United States Patent Application Publication US 2007/0061916 A1 - sequence listing, part 6

SEQ ID NO: 20131 - DNA, 916 bp, Gossypium hirsutum
  Clone ID: GOSHI-09MAY01-C9429_1
atttgacttgcaaaagagaatccattctcttttctacaaggctgccgggcgcgggggcggtcgcgtggctgctggagcagtacaaggttctttgtcaaattttttggccagtaaaaagaaggaaaagttgtctgtgacaattccgtccatgagtaccaatgcgctgggttatggtgctttccttggactctatgcaaaccttagatatcagcttttgtgtgggtttgatcaagcaatggtcaaccattttgatgtcattggtgtagcattgttcttcagcactgctttaagggttctgaatgttcaattaggagagagatcaaggttggcttggctaggtgttgaggtggatccactggttcagtcagatgacctcttgaaggcttataacagaccttctgaggatgggaccagatcctcctctaaatggtttatatcaaagactgccattgtttctggtcttggacttcttggcatcagacaaggaaatgctgaatctgctgccaatgaagaaacgagagctccaaaggcccggagaaagaggattgtgaggaagaaggtaactgcaagctctgcgtagttaattgacataaattcgattgctgtccaattttgctgcttgactgagagaatacaattcgaaagagaacctcttgctaagatttttgtctggtgctgatcgctggctaaacaatcccaattggcaccagcaccgtaactgaagagttcttgactgctgctactcattttcatttgatgttaaatatttggtataccaatgaagtgctataccccaggttgagtcggtccgatttcttttgcaccgcaaatattgggcagggatgttcctggcagatgcttggtcttagatgacctacgatagagtgatgtgcagttaagtgttcagtaagtttct

SEQ ID NO: 20132 - DNA, 696 bp, Gossypium hirsutum
  Clone ID: AW187022.1
gtgcgtttggtgcggttactttggagaaagggaagcttgatatgtctcagaaacagtcaacgtctagccctgagcttgcaactgggggaggtggtggagatattggaaacaaaattaatcatggaggtggagatggaggtgatgatgatggacatgatcatgattatttcgatgactttgatgatgatggggagggcgatgatgatggactcttcacaaggcggatgtttctggaattacttttggagggaggattttgtacatgctgtattgaaccagtggcagctcacgatcatggacttggctgctggcttctcactaccttattatgagggatcggtcatttcacctctctctgtccatctcttgggcgtttgtcccggaccaaccacctgtttattgtttcctcgatcactcccgtcggccacgtccccggcattcttttgctcgatgctttcacatcctgccttccttatcgcggccctttgcataagaggttgcctcccctggttcctctgttctggggggacttcaataatccagctgtattcgatctggtgtttctggggatttatcgtctatgaattttctcagcgtggggagctgcttatccctttgttctttgggtatcttccccgtggttctttcccaagggctgccgctctcggctttgacgcgccggtgcgcctgcgcctc

SEQ ID NO: 20133 - DNA, 1892 bp, Gossypium hirsutum
  Clone ID: GOSHI-09MAY01-C9789_1
ccccgcgtccggcatctgtttgctgagacctgcgagcaaagcttttgcgttcaaaccccccaaaaaaaaaaacaaaatctactaaaagggcaaaatatccctgcggggaatgcagagagatgaggaggacatcgttgacaaggcctgagctgtttggacacggtaagcggtccatcggcggcaggaattgccaccccccgcgcccgcgggcccgggggttcattcgtttcctgtacactcttacaaagaaaaagaaaaaaatctctgttcttaatgttctacttctttatgttatctcttgcgttgtatatgctagaattctgataaaaaacgaacaaaaaaaagattcaaagcttttcttgtagtgtgtttttctcgagattgtaacgaaaaatggcagagaaaactagaagtgaaaacccagctttgctacatggaaaatacgagcttggtcgtatgttgggccatggaactttcgctaaagtctaccatgctcggaatcttcagacagggaaaagtgttgccatgaaagttgttggcaaggagaaagtgattagagttgggatgatggagcagatcaagcgagagatttccgtcatgaagatggtgaaacaccccaatattgttgagttgcatgaagtcatggcgagtaagtccaagatttactttgccatggaacttgttcgaggcggtgaactcttctcgaaaatcgccaagggtcggctcaaggaagacttggcaagagtctatttccaacagttggtttccgttatcgatttctgtcatagccgtggggtttaccaccgtgatttgaagccggagaatttgctcttggatgaagatggctgcttgaaggttacagattttggtctcagcgctttctctgagcacttgaaacaagacgggttattgcacaccacatgtggaacgtcggcttatgtggctcctgaagttattggtaaaaacggatacgacggagctaaagcagatctttggtcttgtggggtaatcctttacgtgcttctcgctgggttcttaccatttcaagatgataatatgccggccatgtacaggaagatttacagaggagatttcaagtgcccaccttggttttcccctgaagctcgtagattaattactaagcttttagatcccaacccaaatacccgaatcaccacttcaaaggtgatggactcgtcttggttcaagaaatcaatacccaagactattagaaccaaggaggagctagaatttgaagccttcaatggcgagaaatcatccaagcctgagactctgaacgctttccatatcatttccttatccgagggcttcgatttgtcaccgttgtttgaagagaagaagagagaagagaaagaggagctaagattcgctacaacaaggccagcgagcagtgtaatatcgagactggaagaggtggccaagtcgatgaagttcagcgtcaagaagagcgagtcaagtgtaagactgcagggtcaagaatgtggaaggaaagggaaattagccattgctgctgacattttcgcattaacaccgtcgtttctggtggtggaagttaaaaaagaccatggtgatacccttgaatacaaccagttttgcagtaaagagctccgaccggcgcttaaggacatcgtctggacgtcgccctccgataactcgactgtcgcttgacttttattttgttctagaccattgtttcataatgttgttattattgtttagaaagaaaaccagaaacagaggatgttctgggtttggtcgtttgtgattatgttaaagatggaatcatatgcgcatcattcgattaatttattgatgatgttccatttttacgccaatattttcatgtttgtgttgtttttctgcaagtggac

SEQ ID NO: 20134 - DNA, 438 bp, Gossypium hirsutum
  Clone ID: GOSHI-09MAY01-C9759_1
tccgggcgggaatcccggggcgagccacacgcgtccgacaaaacagagagctttggctctctccctctctctttctcttttcagctagggtttggggggcctatcatcgccaccgttgtcacggcgccaccacagcggtggttggggcggtgcgagtcgcgccttctatccccggttaaagaccccctcgaaggccgttctttctcggcctaaaaacgcaaaagagaagggttcactttcctctttcaaattcgactacggcgacggagaggagaactccgacgttgtggccacggggtggtctcggtaagacccctttctcttttcttctatttatcttagtttataaaaaaattaaaaaaagcagaatgaatgaaattagaacttaaaacgaaaatggaaataaaaatcaacctttcttagtttcttggttttttg

SEQ ID NO: 20135 - DNA, 1116 bp, Gossypium hirsutum
  Clone ID: GOSHI-09MAY01-C9719_1
tgatttcgatgagtgtggacgcccctcaaattctctgattatcctttgtattttcttccctagtcggcgaaaccctatccaacgaaacttaaggatgtcgccagctgctgtggttgaagccgccaatcctgagactgagcaggttccttctactgaggaatccaagatagagcttcagagcgaggaggctgtggttgaagatgttaaagaagatgagaaagaacatgacgacgacgacgacgaggatgacgacgacgacgacgacgatgataaggaagatggtgcccaaggtgctaatggaagttcaaagcaaagcagaagtgagaagaagagtaggaaggccatgttaaagttaggcatgaagcctgttactggtgtaagcagggtcaccattaagagaacaaaaaatgtgctatttttcatctcgaaacctgatgtctttaagagcccaaattcagagacctatgtcattttcggtgaggctaagatagaggatttgagctctcagctccagacacaagctgcccagcagttcaggatgccagacattggttctttggcagctaagccagacacttctactgcagctgctgcaccggctgatgaggaagaggaagaagttgatgagactggtgtagagcctagggacattgacttggtcatgacacaggctggggtttcgagggccaaggctgtcaaggctctcaagagtaacaatggtgacattgtgagtgctattatggagcttaccacttaggcagtctctatcgtataagtcggccctggtcgactgtcaatgagtgtttcggaattagtatcaatgttttagttgttatagtcaaggtggctagatttttacccttccatttgtttcgcttgtcattgagacagttttcttggaacttatgatcagtgtcactacaactgattgtttcctttgcccatttctataagcaaattttgcacctcaatttaactggtttcatccagtaaagttttcgagcaataaaaaaaaaaaaaaaaaaaaaaaaaaataaaaaaaaacaaaaaaaaaaaaaaaaaaaaaatgataaaccgacaaaaaaaaagcaacacttactaaggattggaataaaa

SEQ ID NO: 20136 - DNA, 1061 bp, Gossypium hirsutum
  Clone ID: GOSHI-09MAY01-C9709_1
cccacgcgtccgccccaccaaagcgaaaaccctataaaaacccacagcaagctcaggtcatcagagataatggcggtagggctcaggcacttcacggcaagagctggaaacggcgtccggagagccgattctcgatacagataacggtgaggagcttgttcacgtccaaccttccgtctccgttgcagtcggtgaccgtgccccggaatccccgggcactctctacataaccaccaggcaagtgatttggctgagtgaattggacagagaaaagggctacgccgttgatttcctgtctctgtcgctgcacgccgcttcaagggaccccgaggcttacccttctccctgtatttacactcagattgaaactgaagctgatgaagttgaagatgagtctgaggactcggattctgaatgtagcgaggttttagatttgtccaagatcagagagataaggtttattccttcagatgctaaccaattggatactctttttcaagtattctgtgagtgcgctgaactaaatccggagcctattgaagaaggagaagaagagggacataattggatttttagtgctgatcagttggaagatgaagctggagctggtgatgatgtggaatggcatttctcccagaatccaacaaacacaatcggtcattcaaatggtcaccatgacctagctagcagtgttcttgagcttcaaatcaatgatcaacgctttgaggacgccgaagagatggaacaagattcagataccggtcatcatcatcaatcacagcagtaagttcccataccatttttgcctgttaatccgtaaggcaaagagtgaactgaatgcatgtgttaatttttaactgattttgcgcccatggcctaagttttgttgtatgttatgaatgtttatcttttctaagaaactagtcatctcatttgaatgtgctgctttgggcattaatatgctatcctattttcccatgaaaatgaacttaccgtatgggaaacaagtaaatttctgttgagccttaaactggtcaatgttaatgtgattgtggaatctt

SEQ ID NO: 20137 - DNA, 1415 bp, Gossypium hirsutum
  Clone ID: GOSHI-09MAY01-C9739_1
tcgaggacgcgtgctctctctctctctctctctctctctctctcatggattctctttctctcttctgtaccggggctcttttagccggcggtctgtactggttcgtttgcgttttaggccccgcagagcagaagggcaagcgagctgtcgatctctccggcggttccatttccgctgaaaaggttcgagacaactacaagcagtattggtctttcttccgccgcccaaaggagatcgaaaccgccgagaaagtcccggacttcgtcgacactttttacaatctagtcaccgatatatacgaatggggctggggtcaatcctttcatttctctccttccatccccgggaaatctcaccgtgacgcgacgcgtctccacgaagagatggccgtcgatctcatcgacgtcaaacccggagaccgaatcctcgacgtaggatgcggggtaggcggacctatgcgtgccattgcggctcactcgcgtgctaaagtcgtgggcatcacgatcaacgattaccaagtgaaccgcgcccggatgcacaacaagaaagccgggctagattctctttgcgaagttgtttgcgggaacttcctggagatgccgtttcaagacaacagcttcgacggcgcctactccatcgaagcaacatgccacgcgccgaaactggaagatgtctacgccgaggttttccgggtattgaaacccggatctctctacgtgtcttacgagtgggtcacaactgaaaagtaccgagcagataaccccgagcacgtggaggttattcaaggtatcgaaagaggcgatgctttgcctggcctcaggagctactccgatattgccgaggctgcaaaaaaggtaggatttgagattgtgaaggagaaggatctggccaagccaccgtctctcccctggtggactaggcttaagatgggtagaatcgcctactggaggaaccacattctcgtcattgtgctggctgccataggcatagctcctaaaggaaccgttgatgttcacgatatgttgttcaagaccgctgattatttgaccagaggtggggattctggaattttttcccccatgcacatgattctcctcagaaaacccaaggaggctccttcaaaatcctagacaatttctggaggtaacaccatgttgcagcattaattgtgttccacctcttgttactttacccttcttaatattttttttccttaaatttaatttccaagggttcttcttttccccccctactttaatcaatcatcatgtacctcctttttggtttgatttaagttcgaagttgttgatttggggttttaatttttggattggtggggataaaccgataaaaggaaagcaacgaaggtttttgttctttttttttctcaattgagagtgaagaatctttgttgt

SEQ ID NO: 20138 - DNA, 521 bp, Gossypium hirsutum
  Clone ID: GOSHI-09MAY01-C9729_1
agtatgcaacaacatcgaaaaccctcctcatgttttggctactcgtcacctgcattgctgcagtttcattgggatcagcagtggaaacccaaggttttgggggatgcctcatgtcgttcgcaagtgtaaaaggttgcgttgaggcaatccacgaggttgtttcgcacgagaagttcgatgcactccaacctaaatgctgcaaagcaatcatcaagctgggcgacaattgttggccaattgtttttcccaatcaaccttgccttcctgtcttactcaagaccgtttgtaaggttttagggatggttgtgaaagttgagaatgttgcagcagcaccttgatagtttgcgctgttgagattttaacttccttggattaagagataacacagctctattcgttcttttagtctttcaaatcttaaagaacaagtattctttttactagtttgccacatcgccatttttctattatcccaatacattagtatatataaagttaaggaggttagacattttatagag

SEQ ID NO: 20139 - DNA, 981 bp, Gossypium hirsutum
  Clone ID: GOSHI-09MAY01-C9699_1
ccctttcccaaaagccaaacatcgctccggatttggactcgccctgaccaaaaaagaatcaccacaacctgcaacggcgagtccaaatgaacgattccgatgcccccaagttcgacaacgatgaacgacaagaagacatcaggatgcgattgaggccgtcggatagcaacgtgactgaagatcaggagccctttatgggagttaaagtccgacggaaagcctcccgccggcatgaatataaaggagactacatggatatcccctcccgtccttacttaatgaagattttgcaaaaacaaggcgacaagcaagttttctttgctgataaagttctgaagttcacttcaacgggaaagctgaaacggcggattcttatggtgactgattttgcggtttacttggttgaccctgacactggtacgcttaagcgccggatagctttagccgctgtagataagatatgtttgagtgaactaagcgataatttctttgcaattatcgttccgacggagtatgatttgctaatggcttgtactcgcaaaactgaaattgttaccgtcttggtcgatgctaccaagaatgcttctgaatatgaactcgaggtggatttttcaaataggtctgaatataatgcttcagctgacctcgttaaggaagttcagtttgaggaagccgaagggagtgttaggacaagaattgtgaagaaataagtagaaattgcactcgtcaaaatctaaaggtgaaatggactcatcgcactttgtggaaggttctgctcagcttggaggccacccccaaaagtatgtaccatattcttgtccactttaatgtattgttttgtaatttttatgtgagaaaaatggttgtataaactctttgcatgtgtgatatctccatactaggtagaaattgtcacaatagaagatggtctcctttgcgtagcattaatgaagtaatactattattctggtgtgttgcaaa

SEQ ID NO: 20140 - DNA, 788 bp, Gossypium hirsutum
  Clone ID: GOSHI-09MAY01-C9689_1
cttcatgtcatgctaactttttggattttatgaggcacttcttggctttgtcaattttcaactttatcattctataaatgtgaagtatcctcctattttggatccccggttggaggctctggcagcagatctctatgcattatcaaggtattttgatgctaaccacagagctgctattcaagaacctcaagttgctggttcatctagatcggagcaagagcaggaggagtctgacttacgacttgctcaacttcagcatcaactgcctgccaacgaacctggtgcactaatgcaccttgttcaagatgcatccagtgaaattgaggaagacgaaactacaaggaactgtaaaaatctttttcaaaataagaaaattttcttgagtcgtgaggttccaagagaatccctgctttttgtcattcctgcttttggaggtattgtttcttgggaaggagatggagctccattcgccgaatctgatgatagcatcactcatcagattgtggacagaccaacccagggacatgtatatctttcaagagaatatgttcaacctcagtgggtttatgactgtataaatgcacggatcatcttgccaactgagccatatatggttgggagggacccacctccacatctgtcgccttttgttgatgatgaggctgaaggttatgttcctgattatgccaagaccattagacaactacaggctgctgcaaaaagtgatattcaacctttgcctggcaccggaaatgatgagttggatacctctcaaaatatgttggcat

SEQ ID NO: 20141 - DNA, 1984 bp, Gossypium hirsutum
  Clone ID: GOSHI-09MAY01-C9659_2
gcggtttcttttctctctgagagcactctatcctttaggccttttgcttctctgcatgtttctgtcctaactttccataataaagaaaaaaaagaatggtgcccaacagcctccttcgatcaactctcaaaacccagcttggttcatatataaaaaatgctgctgcgtacagaagttctatggaccacccacttaagggtgcattactggcaagattatatagtaccgagccatctttgcagagagatgattcagatttaaaggatggcaatgggtttaaggggcatgatatgctggctccattcacagctgggtggcagaccactgacttacatcccctggttattgaaaagtctgagggaagctatgtttatgatacccatgggaaaaagtatctggattctctcgctggtctatggtgtacagcattaggaggaagtgagcctcgacttatggaagctgcaactgctcaattaaacaagttgccattttaccattctttttggaatcgtacgacaaagccttcactggatcttgcaaaggatcttcttgaaacttttactgcaaccaaaatggcaaaagtcttctttacaaatagtggatctgaagctaatgatactcaggtgaagctcgtttggtattataataatgcacttggaagaccgaataagaagaaatttattgctcgagcaaaatcatatcacggttcaactttgatatcagctagtctttctggacttcctgctctacatcaaaagtttgacctgccagctccatttgtgttgcacactgactgccctcactattggcgctatcatctagaaggtggcgcggaagaggaattctcaacaagattagccaacaatttagagaaccttattctgaaagagggtccagagacgattgctgcatttatcgccgagcctgttatgggagcaggaggtgttatacctcctcctgctacttattttgagaagatacaagctgttgtgaaaaagtatgacatactttttatcgccgatgaggttatttgtgcatttggaaggcttgggacgatgtttggatgtgacaagtacaatattaaaccagatcttatttcactagcaaaggctctttcttctgcatatatgcccattggagcagtcatggtgagccctgaagtttcagaagtcatttattctcaaagcaacaaacttggtagtttctctcatggattcacctactctgggcaccctgtatcctgtgctgttgcaattgaagcactcaagctctacaaggagagaaatattgttgagaaggtgaagagcatttctccgaggtttcaagatggtctaaaatccttttctgacagtcctattgttggagagatcagaggtaccggcttgattcttggtactgagtttacagacaacaagtcgcctaatgatccattccctcctgaatggggggttggtacatattttggagcacaatgtgagaaacatgggttgctagtacgtgttgcaggggacaacataatgatgtctccaccatttataattactcctcaagaggttgatgaagtgagttgcaaggatgttacccctgtctgctgaattatctatagatttcatagtatgttctagaaaagttcctcaggcaactttcttggtttaatcaaagctgaaactgcataaagatgaataactatggttgacatatggaaatagcaattctaggtgttgttaagcagagttgtaataaccctgaactcgttaccctctgcagttgataagcaaatatgggaaagcgttgaaggctacagaggagagggtgaaggaactcaagtctcagcagaagaaacagtgaataggttatattgatgatggtgaaaattatgtgtgctgcttcgtgtgaactgaaagctattcacggagttcgtactcgggacatgttttctgtaagatatttctggtgccttaataaagaaactgtttttagtctt

SEQ ID NO: 20142 - DNA, 986 bp, Gossypium hirsutum
  Clone ID: GOSHI-09MAY01-C9659_1
gccagctccatttgtgttgcacactgactgtcctcactattggcgctatcatctagaaggggagacggaagaggagttctcaacacgattagccaacaatttagagaacctcattctgaaagagggtccagagacgattgctgcatttattgccgagcctgttatgggagcaggaggtgttatacctcctcctgctacttattttgagaagatgttatacctcctcctgctacttattttgagaagaacaagctgttgtgaaaaaagtatgacatactttttatcgccgatgaggttatctgtgcatttggaaggcttgggacgatgtttggatgtgacaagtacaatattaaaccagatcttatttcactagcaaaggctctttcttctgcatatatgcccattggagcagtcatggtgagccctgaagtttcagaagtcattttttctcaaagcaacaaacttgcactcaagctctacaaggagagaaatattgttgagaaggtgaagagcatttcaccgaggtttcaagatggtctaaaatccttttctgacagtcctattgttggagagatcagaggtaccggcttgattcttggtactgagtttacagacaacaagtcgcctaatgatccattccctcctgaatggggggttggtacatattttggagcacaatgtgagaaacatgggttgctagtacgtgttgcaggggacaacataatgatgtctccaccatttataattactcctcaagaggttgatgaattgataagcaaatatgggaaagcgttgaaggctacaggggagagggtgaaggaactcaagtctcagacagaagaaacagtgaataggttatattgatgatggtgaaaattatgtgtgctgcttcgtgtgaactgaaagctattcacggagttcgtactcgggacatgttttctgtaagatatttctggtgccttaataaagaaactgtttttagtctt

SEQ ID NO: 20143 - DNA, 595 bp, Gossypium hirsutum
  Clone ID: AW187883.2
gcaacagcacaggatacagggtgcccagagtaggtgaatagaaaatattacataatttcaaaatgtcaagattgcaaatagaaaagcttgtttatagctgttatttcatggagtagttgaattcaatgcaggtatcttggggtaagtcttcatgttatcttgaaggcaaatgagtgaccaaaataataaccaaagaataccattatgaaaacattaccaagcttatttcttcaagttgtaatggttaaacagtgtttctacttaaatctgtttcacggttcaattttcatccattctctactcaatcaattaacctgcaaaaagttggacattttctgactcgagttatttctcatagtgcatgtgatacttagggaagtctatttcatatccttgcagggagagaaatattgttgagaaagtgaagaccatttctccgaggtttcaagatggtctaaaatccttttctgacagtcctattgttggagagatcagaggtaccggcttgattcttggtactgagtttacagacaacaagtcgcctaacaatccgttccctcctgaatggggcaagttcttctctctacttactctt

SEQ ID NO: 20144 - DNA, 577 bp, Gossypium hirsutum
  unsure (1)..(577): unsure at all n locations
  Clone ID: LIB3825-012-Q1-K6-B5
gngacggaagagagttctcaacaagaatagccaacaatttagagaaccttattctgaaagaggtccagagacggtaatgtcagctaatatgttttaacacgaaatgggaatctttttttcaactagaaggggtttgtttgtatagctgacctagcaagtttcttcatcttagattgctgcatttattgccgagcctgttatgggagcaggaggtgttatacctcctcctgctacttattttgagaaggtgagcttttaatagctaattatttctatacacttgaaataactatttcttttgctttttggtaccatcaacgtttcaacctgtttctccttatttactggaatattcaaataggcaatgctagtgcaaacttagtttgattcatacaaaagcattaataatttactgcaatttttcattttttttcctagtgcggtatctttcaaaagttctctgcagttttgactgatataacacttcaaatatcatgcagatacaagctgttgtgaaaaagtatgacatactttttatcgccgatgaggttatttgtgcatttggaaggcttgggac

SEQ ID NO: 20145 - DNA, 583 bp, Gossypium hirsutum
  Clone ID: GOSHI-09MAY01-C9669_3
ccctcgcgtccgaaaagctttagatctgaagtaaagtaaaagcccagaaatctgtgcttaaaataagatctgggttgcgacttctgctgctaggtgtatgtcatttagtctggtaaagtgctgtttctagctggtcaagaaggctaggttgaagtggtcgagtaaatggcagtaatggatgcacaaaaccctcttctaggagaaaccacttgtggcactttactgcagaaactgcaagaaatatgggatgaagttggtgaaagtgatgaagagagagacaagatgcttcttcagatagagcaagagtgcttggatgtgtataaaaggaaggttgagcaggctgcaaaatcaagagcagaacttcttgtgaccttgtcagatgccaaactagaactttccacacttgtatcagctcttggagacaaaagttttcttggtgttgatactgtgaaggcatcggtgacaatcaaggagcaacttgctgctatagcaccagcgcttgaacagctgtggaaacagaaagaggagagagttaggagtttttgatgtcaatacagattcagagatatgtggggaattactg

SEQ ID NO: 20146 - DNA, 538 bp, Gossypium hirsutum
  Clone ID: GOSHI-09MAY01-C9669_2
agtctccgggaagatcaaagctttggatctgaaaaaaggtaaaaacccaggaatctcttcttaaagcaagatctgggcaaaatggcggatgctgaaaactctcttctaggagaaaccacttgtggttctttattgcagaaactgcaggaaatttgggatgaagtgggtgaaagtgatgaagagagagacaagatgcttcttcagatagaacaagagtgcttggatgtgtacaagaagaaggttgagcaagctgcaaattcgagagcacaacttcttcaggtcttatccgatgccaaactcgagctttcaacacttgtatcagctcttggagacaaaagttctgttggcattccagagaagggatccgaaacaatcaaggaacaacttgctgctatagcaccagcacttgaacagctatggaaacaaaaggaggagagagttaaggagttttccgatgtacggtctcaaattcaaaggatatttggggaaattgctggaaatgccagtgaacaaacgggtgctcttgcgggggatgaat

SEQ ID NO: 20147 - DNA, 952 bp, Gossypium hirsutum
  Clone ID: GOSHI-09MAY01-C9669_1
gtttttgttctctgcatcaaaattcaaagcttctctcactctcacaaactccactctctgcaaagatcaaagccttagatctgaagtaaaataaaaacccagaaatctttgcttaaaataagatctggctaggttgaagtggtagagtaaatggcagtaatggatgcacaaaaccctcttctaggagaaaccacttgtggcactttactgcagaaactgcaagaaatatgggatgaagttggtgaaagtgatgaagagagagacaagatgcttcttcagatagagcaagagtgcttggatgtgtacaaaaggaaggttgagcaggctgcaaaatcaagagcagaacttcttgtgaccttgtcagatgccaaactagagctttccacacttgtatcagctcttggagacaaaagttttcttggtgttgatactgtgaaggcatcagggacaatcaaggagcaacttgctgctatagcgccagcccttgaacagctgtggaaacagaaagaggagagagttaaggagttttctgatgtacaatcacagattcagaagatatgtggggaaattactgggagtgccaatgagcaggctggtgctcctgcagtggatgagtctgacttgtccctaaagaagttgaatgaatatcaagtaaagctccaagaacttcaaaaagagaagagtgatcggctgcataaagtccttgaatttgttagcactgtgcatgatctttgtgctgtacttggaatggacttctttagtactgtaactgaagttcatccaagcttagatgataaaacatgtgtgcagtcaaaaagcatcagcaatgatacactattaaggttggctgagacagtctcagctttacatgaagataagaagcagaggattcataagcttcaagagttagcaactaagctaactgatctgtggaatttgatggacactcctg

SEQ ID NO: 20148 - DNA, 896 bp, Gossypium hirsutum
  Clone ID: GOSHI-09MAY01-C9619_1
cggtcgcgtgggcggacgcgtgggcaacatctttcccattttctctctctctccttaaaaccctaccgccaccatggcaatagcatgcctgccaaaactccgacttgccaccgccacagccgtctccgtttccaccttccttaagccactcagacatgggctccgatcattcggatcagcagctgcgttggagcttcctgacgaggatgtatactacgagtacgaacaagctcaccgggatcggcgctcagctcagccgaagattgacgtggatgggtcagcgacagacaggggagtccaatgggtacttataggagagcctggggtcaaacgacatgcttatgctgaaaggctttcgaagcttctagaagttccacatatttcaatgggtaccctcgttagacaagagcttaatccccactcttctctttacaaacagattgcaaatgctgtgaatgaagggaagcttgttccagaggatgttatttttgctttattgtctaagaggcttgaagaaggttactatggtggtgaaaatggtttcattcttgatgggattccacgaaccaggatccaggctgagattcttgatcaaattaccgatattgatctggttgtcaactttaaatgtactgaagagcaaatgttgaagagctcagaaagtgaggttcttcacattggcagttctaaagatgtaggaacttcctgaaagaaaaatgtccatgtatactcagagcaggccaagtcagtgggggattattacagtaagcaaaagaagcttctcaattttcaggtgtctggtgcaccacagatgcatggcaaagtcttttggctgcattacatcttccacatattaatgctcttacttcttccccaaagctgacggcataaaaccc

SEQ ID NO: 20149 - DNA, 1385 bp, Gossypium hirsutum
  Clone ID: GOSHI-09MAY01-C9199_1
gtgggtattaaagatcctgttcgccctggtgtcaaagaatctgttgcaatttgtcgtgctgctgggattactgtacgaatggttaccggagacaacataaacactgcaaaggctatagccagggaatgtggaattcttacagatgatggcatagccattgaaggtccggatttcagagagaagagtcaggaggaaatgcttgctttaattcctaagattcaggtgatggctcgttcttctcctatggacaagcatactctcgtaaggcaattgcgaagtatcgatgaagttgttgctgtgacaggtgatggaacaaacgatgctccggccctgcatgaagcagatattggactagcaatgggcatttctggaaccgaggtggccaaggagagtgccgatgtcataattctggatgacaatttctcaacaattgtgacggtagccaaatggggtcgttcggtatacataaacattcaaaaatttgtacagtttcaactgacagtcaacattgtcgcattgatcgttaacctctcctcagcatgtttgacagggactgctcctctcaccgccgttcagctattgtgggtcaatatgattatggatacactgggagcacttgcgcttgcaaccgagcctccaactgacgaacgggggaagcgtgcaccggttggaaagaaaggaaactttatcagtaatgtgatgtggaggaatatattaggacaatccttttatcagtttatggttatatggtaccttcaggtgaaaggaaaaggaatgttcagtctcgacggtcccgattccgacctgacattgaacacaattattttcaactcattcgtcttctgtcaggttttcaacgagatcagctcacgtaacatggaggaaatcaacgttttcaaaggcatattaaataactacgtcttcgtcgccgtccttggttgcaccgccgtgttccaagtcatcatcatcgaattcttgggcacttttgctagtacaactcctctcacttgcttgcaatggttcgtaagcgttgtcataggattcttaggcatgccgatcgctgctgctttgaagacgatacccgtatgaaccactatactagcaatgctgttttccgagtgaatagcaagaaagttttctctgctttatttacagcgattgattgctatcggatcgtaaatagagatttcgggactaaggatcaccataaaaacaaacattttgaaacattttctgtattgaaattcttttgtttataggtgaagctctaggttgttaaactcttgttaatttcattttctaattgacatgtaaggcatgtaagtattttgtttacacgctttctagtaatcgaaatttatgcaccttgttttgtctttgcaaaa

SEQ ID NO: 20150 - DNA, 395 bp, Gossypium hirsutum
  Clone ID: LIB3166-011-P1-K1-C8
taggaattgtgggtattaaagatcctgttcgctctggtgtcaaagaatctgttgcaatgtggcgttctgctgggattactgtacgaatggttacaggagacaacataaacactgcaaaggctatagccagggaatgtggaattcttacagatgatggcatagccattgaaggtccggatttcagagagaagagtcaggaggaaatgcttgctttaattcctaagattcaggtgatggctcgttcttctcctatggacaagcatactcttgtaaggcaattgcgaagtatcgctgctgccttgaagacgatacctgtatgagccactatacttacaatgctgtctttcgagtgaatagcaagaaaagtttctttgctttatttacgacgagtgatt

SEQ ID NO: 20151 - DNA, 574 bp, Gossypium hirsutum
  Clone ID: GOSHI-09MAY01-C9189_1
cccacgcgtccgcccacgcgtccgatctctttctttctttcttccttctcaaaccctaagatttcacccaaattgtcgattcactttctcaaaacagcagctaacatattcaagccctgatagaagatttttcagccttaaggtctcttttcaactccgattgcaacgaagcaaaagaaactttcggcatatttgcaagataaggcttattcttctctttttcttttatttatctttaaacgcatatgataaaaaaaaagaaaaacagatgaacaattaatagaagatgaaagaaatttaaaaaagaaattaggaatcacttaaagagaaatattttcccctttttctattcagtattcgtaaaaaatatagtacattcagtcctccccttttatagcttaaaaatggaaattaaattaattaggaaaatccaattgctttgctgtaatactgcgtattctgttatttccttattctcgtgtgttccatttgcagaaaagaaccatctaacggcacgagcagagacgcgcgtgagggactggtggcgcacgtgtagtgttcgtccctatcactg

SEQ ID NO: 20152 - DNA, 656 bp, Gossypium hirsutum
  Clone ID: GOSHI-09MAY01-C9179_2
cacgttttttgtccatctgcgatcgtccatcactcttgcttcagcaccagaagaaatcctctgcaacagataagtattttccccattcttaatgtcttcagtagcaataagatgagcaaccttgttagcttccctattgagaaagcgaaaagcacaatatctgcaactcaaactcattttttttgaatcttcaatatacacagcaatttcagatctatcttcttccctcgcgtccggcttgtgaatcactgacctagagtctccctcaacttccacgcccttcaggccgagttggaatcccagatctagtgcctgataacacaccaacacctcggccgcaaaagcagacgatcaagaacaaagaaaatcgaacttagatcgaggggagtccaaaataattgaatagtcgactcgtttccatctgaaattcgtacgagttatcttagctgctgaaggctcggggatagtcgaggattgtcaccatactatcgaattcattttggtacttttgaaaagtgtaattatttttaagtatagcatgtataggatagaatgtctatgtatttaaggtttgatatgtatatatgttatgccatgagagttggctagcaaatggtatgtttgtgcttagttttggtaaatggtttgtgatgctt

SEQ ID NO: 20153 - DNA, 477 bp, Gossypium hirsutum
  Clone ID: GOSHI-09MAY01-C9179_1
gctctagatctagtggatcggtgggctgcacgagttgggttcgagtcgagtaaatatgttatttgggcttttatggaggatatgtatattcggccaagctatagtcttggtgaatttttcatatttgtgattttgtgaaaaatagactaaattgtcaaagtgtgaaaatgtaagggctaaaatgtaaagtgccctaaatatgtgttaatggattattttgcatgaaatgaatgattgaatggttgaatttaaattgtattagatcaagaacaaagaaaatcgaacttagatcgagggaagtccaaaatagttgaatagtcgactcgtttccatctgaaattcgtacgaggtaagtcaaaatacaattacgtgttaaattgattgaatgttgtatatactagttataatctgtattggacggctatgagagcctgatgaatgaattccgagtaaatttcgataatatgctagtatttg

SEQ ID NO: 20154 - DNA, 422 bp, Gossypium hirsutum
  Clone ID: uC-gsflmaxxa076f01b1
ttttcctagagtctccctcaacttccacgcccttcaggccgagttggaatcccagatctagtgcctgataacacaccaacacctcggccgcaaaagcagacgccgcgtcaaaatttatcctcagtcatagccctgatggagcaacccatctggttgtatggattcttttgtcagatcaagaacaaagaaaatcgaacttagatcgagggaagtccaaaatagttgaatagtcgactcgtttccatctgaaattcgtacgagttatcttagctactcaaggctcggggatagtcgaagattgtcaccatactatcgaactcattttggtacttttgaaagtgtaaatatttttaagtatagcatgtataggatagaatgtctatttttttaagttttgatatgtttatatggtatgccatgga

SEQ ID NO: 20155 - DNA, 345 bp, Gossypium hirsutum
  Clone ID: LIB3146-010-Q1-K1-A11
cttgtgaatcactgacctagagtctccctcaacttccacgcccttcaggccgagttggaatcccagatctagtgcctgataacacaccaacacctcggccgcaaaagcagacgccgcgtcaaaatttatcctcagtcatagccctgatggagcaacccatctggttgtatggattcttttgtcagttatcttagctactgaaggctcggggatagtcgaggattgtcaccatactatcgaattcattttggtacttttgaaagtgtaaatatttttaagtatagcatgtataggatagaatgtctatgtatttaagttttgatatgtatatatgttatgccatga

SEQ ID NO: 20156 - DNA, 339 bp, Gossypium hirsutum
  Clone ID: LIB3148-030-Q1-K1-D11
cccacgcgtgcggccactcattcacctacactttcgctcacccgtccggtaaagtaggcggccttggaataccagatctagtgcctgataacacaccaacacctcggccgcaaaagcagacgatcaagggcgaacaaaatcgaacttaaatcgagggaagtccaaaataattgaatgggcgcctcgtttacatctcaaattcttacgagctatcttagctactgaaagctcggggatagtggaagattgtcaccatactatccaattcattttggtacttttgaaagtgtaaaccatttttagtataacatgtataggatagaaagaatatccctttaa

SEQ ID NO: 20157 - DNA, 749 bp, Gossypium hirsutum
  Clone ID: GOSHI-09MAY01-C9169_1
gggcccggaatcccgggtccgccccacccgtccgaatttatggggaggttttaaaatagggccctgttaacccagttaaggggtcctgctgtagcaataccttctgatgaaaaaatagctttgctgggggccgtccaggcgctgtttgaaggctcaatgtacacctttgtgttcctttggactcctgctttgagccccaatgatgaggagatccctcatggttttatctttgccacgttcatgttggcttcaatgctgggaagctcccttgcctctcgattgatggctcgctcatcacccagggtagaaagctacatgcagattgtttttgtgatttcctctgcctctctcctgcttcccattataaccaatttcttggtcgcaccttctaaagtgaaaggcggaagcatctcatttgcaggttgtctccagcttcttggcttctgtacttttgaggcttgtgtagggatattctggccatccattatgaaaatgagatcccagtacatcccggaggaggccaggagcacgattatgaacttcttccgcattcctctcaatatctttgtctgcatcgtgctgtacaatgttgacgcatttcccatcaccgtcatgtttggtatgtgctcgattttcctcttcgtggcatctatcctgcaaagacggctgatggcaatttccgacaagccaaagatggaaagctggacagcaatggaccctggggccgagccattgaatgattgagtgat

SEQ ID NO: 20158 - DNA, 395 bp, Gossypium hirsutum
  unsure (1)..(395): unsure at all n locations
  Clone ID: LIB3166-025-P1-K1-B3
gctacatgcagattgttttcgtgatttcctctgcctctctcctgcttcccattgtagctaatgtatgttcgaatatctctctctctctctctatatatatatccgnagattattctattgagtgattcgtaactatatggattgtaacagttcttggtgcctccttcaaaggagaaaggcggaagcatctcatttgctggctgtcttcagcttcttggcttctgtacttttgaggcatgtgtagggatattctggccatccattatgaaaatgagatcccagtacatcccagaggaagctaggagcaccattatgaactttttccgcattcctctcaacatctttgtctgcatcgtggtgtacaacgtatgttagaaagctttctataatagctt

SEQ ID NO: 20159 - DNA, 407 bp, Gossypium hirsutum
  Clone ID: GOSHI-09MAY01-C9059_1
caaaaaaaaaaaaaaccctcttgaatccgctccaaaaacattccaatatgttgtttcttcgacttgtttttgggtcaatattcatagtttgttgccttacaacgctttcaaacgaagcttcacttcccaatgctgaagtggaagctttggaaagtattggtagaacattagggaagacaaactggaactttactggaacatgcattcaaggcaatggtcggttggaccaaccttcacccgagtttaatgaatcttatgttgataatgttatatgcgattgttccttcaacaactatactacctgtcatgtcattcacatgtaagtataaacatatacatattattttataatgaaatatttatcttccttgagttttataatatttattttatttatttatttttta

SEQ ID NO: 20160 - DNA, 655 bp, Gossypium hirsutum
  Clone ID: GOSHI-09MAY01-C9079_1
ggagtgttaatggagcaaatgaacacataaagagggtacctactgcttaatttttggcgagcagcaacagtcactttcaatcattttttttttctctttgagtggtggtagtggttctctcaatgacctatctaatcacccatttttctcacactttgccttatcacactggctagctaacgggatcttattcttgctcatatgaaaaaaaagttgaaagaaagacaagcgcttccttggttattccctttccctttgtttttttgttttgatcaaataaaaaaggggagacctttttagtttaaaagactggtttgtgtggattcactgagctgtcttttgcagatctcattcttatgaagagcgcttttagtctggtgtatctgcttctcgtacttgcatttttcagtcatattacatgggctgtcaagggcaacttcgctttgcaaacagaccggtattggggggagattcgacctcacagtgtcaccattacctgaattcggtgcagttggagatggtgttactctcaatacaaaaccctttcagaatgctatcttctacctcaattcatttgctgataaaggtggggccaagctttttggtccggctggtcggtggttaacaggaagcttcgatcttatcagttacctaa

SEQ ID NO: 20161 - DNA, 414 bp, Gossypium hirsutum
  Clone ID: GOSHI-09MAY01-C9069_1
cccacgcgtccgcccacgcgtccgcccacgcgttcgcccacgcgtccgctttactggctgttttcgccgagggaaaatcgggcatggccgagactgagagccaagcacttcccacgaaacgacatcaccatcaccaaaacgacgattctgaaggacaagaggatgatgatgatgaagaagaagaagaagaggacgggttggagaatgaagaggaagaagaaggagcgagtcgagtcagtgagtcacagggtgctggcgccgcgcctccgagtgatgatgctggatggaaacactctcaattggataccctacccaatgatgatcctcccgaggggttgcaggtaaattctacttcggaatccaaggaaggagctgaattttaggagaagggttacatagctgacccaggaagtt

SEQ ID NO: 20162 - DNA, 415 bp, Gossypium hirsutum
  Clone ID: GOSHI-09MAY01-C9019_4
tttcaacaactttagggtttttcaccttcttcgcccctcctctctagtttcatcgtaaagaaatgtgcctagctttgatgaccgacgcggtggcactcgtttgtatgttggtcatttgtcttcaaggacaagatcacgtgatctagaggacatgtttagcagatatgggagagtacgtgatgtggatatgaagcgtgactacgcatttgttgaattcagtgatcctagagatgccggtgatgcaagatatgcattgaatggtcgagacttggatggaagccggatgattgttgaatttgccaaaggagtgccccgtggttcaggtggatctcgagattaccctggaagaggccccactcctgggtcaggacgctgcttcaactgtggaattgatggtcattgggctcgtgattgc

SEQ ID NO: 20163 - DNA, 786 bp, Gossypium hirsutum
  Clone ID: GOSHI-09MAY01-C9019_2
ccttaatgtagcacttgacatctggtcctcctattaaaatatgagtgagagtgtggcaaccctccacctgtctgtgtggtttaacttgaatgatcttgttgaaggtcccttggcttttgcctaacctggaggtctatggtgagagggtgaccttggtggatttggcgagtctttctatagtgttattgcgtgtttctcgcgaaatggcaacaatctcaaaagtgggtgtttttggttcatctgtgaggggcaaactatcaacccttcgattattgtgtcctgatggccttactgtttctggcacccgtttacgctgagtacgtgatgtggatatgaagcgcgactatgccttcgttgaattcagtgaccctagagatgctgatgatgcaagatattcattgaatggtcgagacctagacggatgccgtatcattgtggaatttgccaagggagtgccccgtggccctggtggatcacgtgattatgctggaagaggtcctactcctggatctgggcgctgcttcaattgtggaatcgatggccactgggctcgtgattgcaaagccggcgattggaagaataagtgttaccgctgtggggaacgaggccacatagaaagagattgtcaaaacagtccaaagaaactgagccgtagaccacggagttactcgcgttcacccagtgaccgacgtggtcgaagcagaagccgcagttacagccgagggcgtagtgacagtagatcaagatcacctgtgaagcgagaaagagttttgagcgtgacgatag

SEQ ID NO: 20164 - DNA, 716 bp, Gossypium hirsutum
  Clone ID: GOSHI-09MAY01-C9019_1
ctcccctctgtcttcgaaaaatatctagggtttttcatcttctcctttccttcgcctctctctcttttgaaactttaatcggaaagaaaaaatgcctaggtatgatgatcaccgtggtggcactcgcctttatgtcggtcacttgtcttcaaggacaagatcacgtgatcttgaggacatgtttagcagatatggaagagtacgtgatgtggatatgaagcgcgactatgcattcgttgaattcagtgaccctagagatgctgatgatgcaagatattcgttgaatggtcgagacctagacggatgccgtatcattgtggaatttgccaagggagtgccccgtggccctggtggatctcgtgattatgctggaagaggtcctactcctggatctgggcgctgcttcaattgtggaatcgatggtcactgggctcgtgattgcaaagccggcgattggaagaataagtgttaccgctgtggggaacgaggccacataaaaagagattgtcaaaacagtccaaagaaactgagccgtagaccacggagttactcgcgttcacccagtgcccgacgtggtcgaagcagaagccgcagttacagccgaaggcgtagtgacagtagatcaaaatcacctgtgaagcgagaaagaagtcctcgagcgtgaccaatagaagatctagggagtcctaggcgccccggcgcgttctcctttcccc

SEQ ID NO: 20165 - DNA, 606 bp, Gossypium hirsutum
  Clone ID: LIB3825-025-Q6-K6-A2
gcgttcgcggacgcgtgggcgacaactctagggtttttcatcttcttcgcccctcctctctagtttcatcgtaaagaaatatgcctaggtatgatgaccgacgcggtggcactcgtttgtatgttggtcatttgtcttcaaggacaagatcacgtgatctagaggacatgtttagcagatatgggaggtctgttggcttttgcctaatctggaggtctatgagtacgtgatgtggatatgaagcgtgactatgcatttgttgtacgtatttctttactctttttatttaatcccaaagaacatttcttatctataatattcttcactagtttagtaaatatgatcattttgcttggaacttttttccttctttatgttttgtatattgttggcctccttgattgtaggaattcagtgatcctagagatgctgatgatgcaagatatgcattgaatggtcgagacatggatggaagccggatgattgttgaatttgccaaaggagtgccccgtggttcaggtggatctcgagattaccctggaagaggccccactcctgggtcaggacgctgcttcaactgtggaattgatggtcattgggctcgtg

SEQ ID NO: 20166 - DNA, 433 bp, Gossypium hirsutum
  Clone ID: LIB3272-018-P1-K1-A4
cgtttaagctctagctctcttcgaaaaatcaaggttattttttttaatcttctctggtcttcagctccctcttgaatttcattgaaaagaaaaatgcctaggtatgatgaccgccgcggtagtggtacacgcctttatgttggtcacttgtcttcgaggacaaggtcacgtgatcttgaggacatgtttaggagatatgggagaatacgtgatgtggatatgaagcgtgactatgcattcgttgaattcagtgaccctagagatgctgatgatgcaagatattcattgaatggtagagaccttgatggaagccgtatagttgttgaatttgccaagggggtgcctcgtggccctggtgggtctagtgattaccctggaagaggtcctgctcctggagcagggcgctgcttcaactgtggaattgatggtcact

SEQ ID NO: 20167 - DNA, 354 bp, Gossypium hirsutum
  Clone ID: LIB3196-013-P1-M1-H3
gaggggcgaactatcaacccttcaataattgtgtcatgatggccttactgtatctggcacccgtttacgcagagtacgtgatgtggatatgaagcgtgactatgcatttgttgtacgtatttctttactctttttgtttaatcccgacggacatttcttatctataatattcttcactattttagtaaatatgatcattttgcttggaacttttttccttctttatgttttgtatattgttggcctccttgattgtaggaattcagtgatcctagagatgccggtgatgcaagatatgcattgaatggtcgagacttggatggaagccggatgattgttgaattatccaaagga

SEQ ID NO: 20168 - DNA, 310 bp, Gossypium hirsutum
  Clone ID: LIB3197-040-Q1-M1-D7
cgacaactctagggtttttcatcttggtgggccctcctctctagtttcatcgtaaagaaatatgcctaggtatgatgaccgacgcggtggcactcgttcgtatgttggtcatttgtcttcaaggacaagatcacgtgatctagaggacatgtttagcagatatgggagagtacgtgatgtgccgttaatgggaatctatcttggtccacctatattcttgggttggagatgccgatgatgcaagatatgcattgaatggtcgagacatggatggaagccggatgattgttgaatgtgccaaaggagtgcc

SEQ ID NO: 20169 - DNA, 738 bp, Gossypium hirsutum
  Clone ID: GOSHI-09MAY01-C9389_1
cccacgcgtccgcggagatcaagcaaagcattttcataacccaattttttttcttcaaacacaaatcaaagggagaaaaaagaatggcagtggagggttcatcgaagaagatgatagcaacacaagcagagatggtggagaacaaggtccccatcccgtacagggatcaatgtgcacatcttctcatcccgctcaacaagtgccgccaagccgagttttacttaccttggaaatgcgagattgaacgccactcctatgaaaagtgcgagtacgagctcgtcatggagaggatgctgcagatgcagaagatccgtgaagaagaggccaagttgaaacaggctgggaaacagggcgcttctgttcctctcattcccaaaactgctaatgcttaagctgcctccagggagggtttagactactttggcggatattttgatgtttgtcacctgtctggggggagtttgaaactgtttgttgtggacgaatgtaaggactattttatttgtgatctgtcatcagctcatcaactttgtttatggaataaagttgctcatcaaattggacatctctttttcagatatagttataacaatcgttttcacttagccaactaggtaaatatgcttcagtttggtgtttatttaattgcaacagatatacaatggatatgcataaccggcgggatatgcgtcaaatgagaaataatatgcaatgacaatgtataataaatcttttgct

SEQ ID NO: 20170 - DNA, 329 bp, Gossypium hirsutum
  Clone ID: GOSHI-09MAY01-C9359_4
cggccggaaacccgggccgacccacgccttcgcggagggccagttttgttcccaccacccgcggtttttccagttccaatagcgtttatttaggtggttgcagttaaaaggctggtggttggactaaggggtgggtcggccggtccgcctcacggtgagcaccggtctgctcgtccctactgccggcgatgcgctcctggccttaattggccgggtcgttcctccggcgctgttactttgaagaaatttgtcttgcacaatgtcggagagcttgaactgttaatgatgcacaacaggacatattgtgccgagattgcccatgatgtttc

SEQ ID NO: 20171 - DNA, 307 bp, Gossypium hirsutum
  Clone ID: GOSHI-09MAY01-C9359_2
tccagcccgagtctgatttcatccccttaacgttattttggaagggacatttttatgctcatagttcgactcaagggtgggtcggccggtccgcctcacggtgagcaccggtctgctcgtccctactgccggcgatgcgctcctggccttaattggccgggtcgttcctccggcgctgttactttgaagaaattagagtgctcaaagcaggcctacgcttgtatacatgagcatgggataacatcataggatttcgatcctattgtgttggccttcgggatcggtgtctcgatttacacggcctgtc

SEQ ID NO: 20172 - DNA, 571 bp, Gossypium hirsutum
  Clone ID: GOSHI-09MAY01-C9359_1
ccctcgcgtccggtcgaccgaaaaccctaattttcggaggtaaggaggaaaagaagaaatggcggtgccgcttctaagtaagaaaatcgtgaagaagagggtcaagaagttcaagagaccccagagcgaccgcaaaatctccgttaagacaaactggcgtagaccaaagggtattgattctcgtgtcagaagaaagttcaagggatgtactttgatgcccaatattggctatggttcagacaagaagacccgacactatcttccaaatggctttaagaaatttgtcgtgcacaatgtcggagagcttgaactgttaatgatgcacaacaggacatattgtgccgagattgcccatgatgtttcaacaaagaagagaaaggagattgtggaacgggcagcccagcttgatgttgtcgttatgaacaagcttgctaggctgcgcagccaagaagatgaatgagattaagcttgtcttttatgtttatctttgagctttgtttgcgtttcttataaatttttggtaattttgttgctttagatgtggcgataacattctcaaccgggatttggt

SEQ ID NO: 20173 - DNA, 278 bp, Gossypium hirsutum
  Clone ID: LIB3149-048-Q1-K1-G1
accaaatctccagtagtattgaaagaggagccaaatggttggttaatacaatcaaagggaaagtacaaaagccattaccagagctggtaaaggagtatgatttgccaataggcatcttcccttgtgatgccaccaactataagtcagaagaaagttcaagggatgtactttgatgcccaatattggctatggttcagacaagaagacccgacactatcttccaaatggctttaagaagtttgtcgtgcacaatgttggagagcttgaactgttaatga

SEQ ID NO: 20174 - DNA, 882 bp, Gossypium hirsutum
  Clone ID: GOSHI-09MAY01-C9319_1
tcgacgttacttccatcaatcaacagcaatcaatattcacccacttcctgcccactttccttcttagagagaaaccaaacgcgtgcggcttactgcaaaactccccccacttcctcctccgccatccgacccctcgactccctctggctctccgtccatctcctctcctcatccgccacggcctcagccccacgaggaactcgattacagataagtaaaaactctatttttaagaccgtcagtcgctattatatgggcaacactattagagaacctgttgataaaacgaaacccacaatagtcaaagtttaaactccgaacctttgaatctctaattattgcagctatttcagatctattctcgtttacatttgcagtttacgaatcaccggccgagagtccccttccacttccacctccttgagtccaagttgaacacccagatcaagagcctgaaagcatgccaatgcttcagccgcaaccgcagacggtacattcacatgtaaaactgatctagagcaaacaacttctgccttttcattccttaccactaacccagaacacgattctcttcgttgtctgttgcaagcggcatcaaaattaattttgattcgcgggcaaatcggagcgacccatctgacattattgacacttctctcaggacagtccctgaacaagtgcatccccgtttctgctcccgaatgacacctccagcacatggtagaatcaatcagccttctgtagtgtagattactgtagttaggcagaaaattacgagtgcaacgccagattgtaattttaattttaaaaggcagctctaggctccaaagtcgcttgtaaaattgtttgtaacaagtctgtaattgatcctggccttcttgt

SEQ ID NO: 20175 - DNA, 610 bp, Gossypium hirsutum
  unsure (1)..(610): unsure at all n locations
  Clone ID: AI730701.1
cgagatccccntccatttccacttcctggagtccaagttgaacacccagatcaagagcttgaaagcatgccaatgcttcagccgcaaccgcagacggtacgttcacatgtaaaactgatttagagcaaacaacttctgccttttcattccttaccactaacccagaacacgattcttttcgttgtctgtngcaagcggcatcaaaattaattttgattcgcgggcaaatcggagcgacccatctgacattattgacacttctctcaggtaaaggcgctttcgccccatctaactccttaatgtagttaagcacaaactcagcaacttgagcgcccgatttcatttccccctcatgtagaaatctatttttagatgtccaaatcgcccatagtgcacaagagatcaatctgcacttggaaatagactgagaaacaaaaaaattcattagatctgcatgaaaatcagaatccactgtcggactaggccaagataaatttaacttctcccatgtttcttttgcgacaggacagtccctgaacaagtgcatccccgtttctgctcccgaatgacacctccagcacatggtagaatcaatcagccttctgtagtg

SEQ ID NO: 20176 - DNA, 408 bp, Gossypium hirsutum
  Clone ID: GOSHI-09MAY01-C9309_3
attgcccgtcctgcgcctggccctcgctggccgggacctggcggactacctcatgaagatcctcactgagcgcggctacagcttcaccaccacggccgagcgggaaatcgtgcgtgacattaaggagaagctgtgctatgtcgccctagacttccagcaggagatggccacggcggcttccagctcctccctggagaagagctacgagctgcccgatggccaggtcatcaccattggcaacgagcggttccgctgccctgaggctctcttccaaccttccttcctgggggaggggagacccgcctcccggccctgcctgacctgggggtcacccttggggctgggctggggaagctaagtccgccctcatttcttcctcaggcatggagtcctgtggcatccacgaaa

SEQ ID NO: 20177 - DNA, 1343 bp, Gossypium hirsutum
  Clone ID: GOSHI-09MAY01-C9309_1
cgacactatagtaacaagctttgtacaaacaaagcaggcttggtacccggtcacggaatgtcccgggtatcagcccgcgtccgccccgcgagcacagagcctcgcctttgccgctccgccgcccgttcacacccgccgccagctcgccatggatgatgatatcgccgcgctcgttgtcgacaacggctccggcatgtgcaaggccggcttcgcgggcgacgatgccccccgggccgtcttcccctccatcgtggggcgccccaggcaccagggcgtgatggtgggcatgggtcagaaggattcatatgtgggcgacgaggcccagagcaagagaggcattctcaccctgaagtaccccatcgagcacggcatcgtcaccaactgggacgacatggagaagatctggcaccacaccttctacaatgagctgcgtgtggctcctgaggagcaccccgtgctgctgaccgaggcccccctgaaccccaaggccaaccgcgagaagatgacccagatcatgtttgagaccttcaacaccccagccatgtacgtggccatccaggctgtgctgtccctgtacgcctctggccgtaccactggcatcgtgatggactccggtgacggggtcacccacactgtgcccatctacgaggggtatgccctcccccatgccatcctgcgtctggacctggctggccgggacctgactgactacctcatgaagatcctcactgagcgcggctacagcttcaccaccacggccgagcgggaaatcgtgcgtgacattaaggagaagctgtgctatgtcgccctagacttcgagcaggagatggccacggcggcttccagctcctccctggagaagagctacgagctgcccgatggccaggtcatcaccatcggcaacgagcggttccgctgcccggaggcgctcttccagccgtccttcctgggcatggagtcctgtggcatccacgaaaccaccttcaactccatcatgaagtgtgacgtggacatccgcaaagacctgtatgccaacacggtgctgtctggtggcaccaccatgtaccctggcattgctgacaggatgcagaaggagatcactgccctggcacccagcaccatgaagatcaagatcatcgcacccccagagcgcaagtactcggtgtggatcggcggctccatcctggcctcgctgtccaccttccagcagatgtggatcaccaagcaggagtacgacgaggccggcccttccatcgtccaccgcaaatgcttctaggcgcactccgccttcggcgcgtgactcccctgctcgacgaatttgctcaatcggctggcgactgacc

SEQ ID NO: 20178 - DNA, 418 bp, Gossypium hirsutum
  Clone ID: LIB3196-055-P1-M1-G11
gaagcgggttggtgccgggccgggatttccgggatcggcacgagacgtctgggttcccttccgcggcgaccagggcccgagccgtgagtagcagttgttgttacccgcccagaaactagacacaatagtgcgacgaagacgagaccaccgccctcgtgtgcgacaatggctccggcctggtgaaagccggcttcgccggggatgacgcccctagggccgtgtttccgtccatcgtgggccgcccccgacaccagggcgtaatggtcggtatgggtcataaagatgcttacgtgggcgacatggctcatagcaagagaggtatcctgaccctgaagtaccctatcgagcatggcatcattaccaactgggacgacatggagaagatctggcaccacaccttatacaacgagctccgcgt

SEQ ID NO: 20179 - DNA, 367 bp, Gossypium hirsutum
  unsure (1)..(367): unsure at all n locations
  Clone ID: LIB3166-012-P1-K1-H3
atccgaaaagacctgtatgccaacacagtgctttttgttggtaccaccatgtatccaggcatggctgacaggatgcagaaggagatcacagccctggctcccagcacaatgaagattaagatcattgctcctcctgaacgcaagtactcagtctggattggcggctccatcctggcctcactgtccaccttccagcagatgtggatcagcaagcaggagtatgacgagtcaggcccctccattgtccaccgcanatgcttctagatggactgagcaggtgccaggcatctgctgcatgagctgattctgaagtatcgatttgcccctgcaaatgtacacacctcatgctagcctcatgaaactggaa

SEQ ID NO: 20180 - DNA, 920 bp, Gossypium hirsutum
  Clone ID: GOSHI-09MAY01-C9339_1
caaccccaccaatttctcaaagtagggctggcaatggggatgatgaggctttccaaatgctgggtgtcgttgttgtttcttgtggctctgtcgggattcacccatggatttgtgatgtcgcctcgcactttgcttaaccgcttctctcaaaacagcaattattatttaaccactgaagagcactggttcgatcagactctcgatcactattctccttacgaccaccggcaatttaagcaacggtactatgaattccttgactactttcaagttcccgatggacccattttcttaaaaatttgtggggagtcttcgtgcagtggcataagcaatgactatctcggcgttttggccaagaagtttggggctgccgtggtttcacttgagcatcgttactatgggaaaagcagcccttttaagtcacacacaacggaaaatctgaaatatctttcatctaagcaggctctctttgacttggctgttttccgtcaatggtatcaggaatccttaaacttgaagcgaaataaaacaggtgctgagaattcatggtttgtttttggcatttcatactctggtgctcttagtgcatggtttcgtcttaagtttcctcatttaacatgtggaagcctggcaagttctggtgttgttcttgctgtttacaactacactgattttgataagcaggttggtgagtcagctggtcctgaatgcaaagctgtgttacaagaaatcactgaacttgttgatcgaagtcttgaatcaaacagaaaagaactgaagaagcagtttggcgcagctgagcttgagattgatggtgatttcctttatttcctggcagatgcagctgttattgcgtttcaatacggaaatccggatacattatgcacccctcttgttgaagcaaaaaaggctggagagga

SEQ ID NO: 20181 - DNA, 518 bp, Gossypium hirsutum
  Clone ID: GOSHI-09MAY01-C9329_4
tcgtgcgatgagattcaagaggcatcacaaatactgagttgtttggctgatatggtttactgcacggtctgtgcatgtatgcagacgcaacataaggttgaaatggacaaacgagatggcaagttttgtccacaaccaatggcagtcccccctgttcagcagatgtctcgcattgatcaaccaattcctcctgcagctggctatccaccagcagcatatggacagccttatccagctcaaggttacccgcctgctgcataccctcctcctcagtacccaccatctggttattctaggtaaatatttctctgggttacttgttggttgcaagcactagtttgggctactaaggcatggatagggctttgatttgcagcctgcaaattacatagtgatatatttttatgcgtgatttgcttttcgtgttgctgatttgaacagctaaaggtttaaaaagtagatataccatgaacatgtctgctatcaatagtttatgcaaatttgtaaaggtaagacat

SEQ ID NO: 20182 - DNA, 959 bp, Gossypium hirsutum
  Clone ID: GOSHI-09MAY01-C9329_3
ccccgcgtccgtgacatgtcaaggtatacatgttgtgctggttatatgccatgcagtggtaggtgtggtgaaagtaaatgtcccgagttttgcctttgcactgaggttttcctctgctgttgtaactccgtggcttcaacccggtttctgctgcaagatgaattcaacattcaaacaacaaaatgtgacaactgcatcattggtttcatgttttgcctgcaacaagttgcctgcatattttccatagttgcaatgattgttggaagtgatgagcttcaagatgctgcacagttgctgaactgtttggctgatatggtttattgcacggtctgtgcatgtatgcagacacaacataagattgaaatggacaaacgagatggcatgttcggtccacaacccatggccattccccctgttcagcatatgtctcgccttgatcaaccaatcccccctgcagctggctatccaccagcagcatatggacagccttatccaccacctcaaggttatccgccggccgcatatcctcctcctcagtaccctccagccggttatccagcacctggttacccaccatctggttaccctaagtgatctttctatggtttaccttttggtttcaatcgcctgaatctggattactgactactgagtcatggatgaagctggtattctttgtaaaatttgactttgcatgctgttgggatttatatatagtgtttatatatattatatattatattgtgtgatttacttttttttatagctgatttactgtcagcttgtttattctcaataattttcttttacttcatgtttctacactattgagttttgatgtttatttataaactttatcttcaattttggtatataaaccaatatttgttaaagcttgaaaaaaaaaaaaaaaaataataaaatatatttttatttattttttattaaaaataataata

SEQ ID NO: 20183 - DNA, 1144 bp, Gossypium hirsutum
  Clone ID: GOSHI-09MAY01-C9329_2
cccacgcgtccgcccacgcgtccgcaaagccaaagccaaagccaaagcctgccattgacccttaacaattcattcatcaaaaaaagcttttcctctccattttccattccatatttgttctgcgctctctgtttctgtggttgtgttttaggatttgagagatcatggcgtcgcaagaatacttggacaagatgaaggtccgtcaggagtatcggaatctctggcacacggatctcatgagcaccattcaacgcgaccctccttattgctgcttggctttttggtgtggcccatgtgtatcctacatgctccggaaacgagctctttataatgacatgtcaaggtatacatgttgtgctggttatatgccatgcagtggtaggtgtggtgaaagtaaatgtcccgagttttgcctttgcactgaggttttcctctgctgtggtaactccgtggcttcaacccggtttctgctgcaagatgaattcaacattcaaacaacaaaatgtgacaactgcatcattggtttcatgttttgcctgcaacaagttgcctgcatattttccatagttgcaatgattgttggaagtgatgagcttcaagatgctgcacagttgctgaactgtttggctgatatggtttattgcacggtctgtgcatgtttgcagacacaacatacgattggaatggacaaacgagatggcatgttcggtccacaacccatggccattccccctgttcagcagatgtctcgccttgatcaaccaataccccctgcagctggctatccaccagcagcatatggacagccttatccaccacctcaaggttacccgccggccgcatatcctcctcatcagtaccctccagctggttatccagcacctggttaccctaagtgatctttctatggtttaccttttggtttcaattgcctgaatctggattactgactactgagtcatggatgaagctggtattctttataaaatttgactttgcatgctgttgggatttatatataggttatattatattatattgggtgaattactttttttatagctgatttaaacagcaaaaagtgttaaatattaaaactgtcagcttgtttattctcaaataatttcttttacttcattgttct

SEQ ID NO: 20184 - DNA, 674 bp, Gossypium hirsutum
  Clone ID: GOSHI-09MAY01-C9329_1
ccaaagccaaagccaaagcccgagcctgccatcagaccctttacaattcattcatcaaagggcgcttttcctcttccattttccatcccatttttggtctgcgctctctgtctctgtgggtgcgccttacggttcgagagatcattggcgtcgcaagaatacttggacaagatgaaggtccgtcaggagtatcggaatctctggcacacggatctcatgagcaccattcaacgcgaccctccttattgctgcttggctctttggtggtaagtaattccgaatcttttttttgtttgttgtagatctgattctgactctgctgatttggttttcgattttttcttttggtttagttaactgcaatagctcctgtctttttttatttgtgatggttaaagggttaaaagatcgagacgtggtgactggtattgacctggatgactctgggtgattttattctctctgatttaatttggttgctaaaatgtcttttcaataacgcctaagtgtgctgctagagttatgatgtaataattctattgcgttatatgttaagggtgggaattgaatatacttccctattggtagatcatcattcattctggcagatacatcgaaatactgtcctaattggcaaatgtaatgaatattcgactctctcctttagaataaat

SEQ ID NO: 20185 - DNA, 981 bp, Gossypium hirsutum
  Clone ID: GOSHI-09MAY01-C9229_1
cccacgcgtccgctttatttatttatttctcttttcgctctttcgctctgcatttccatttgtctgatccgaaataccgataacccattttggatccggcattctcttgtcagatccaaaaccctccatttctttttttcttgcgttaaaaaatggcgacaatggagagcttgatcgggctcgtaaacaaaatccaaagagcctgcaccgtccttggcgatcatggcggccaaggaatgtcgctatgggaagctcttccttctgttgctgttgttggtggccagagctctgggaaatcttcggttttggagagcattgtagggagagatttcttgcctcgtggatccgggattgttacacggaggccgttggtgttgcagcttcataagacacaatcaggggcggaatatgcagagtttcttcacgcaccaaagaggaggttcactgatttcgctgctgttcgtaaggagatttcagatgaaacagatcgaataactgggaagacaaagcaaatctctaatattccaattcacttgagcatatattctccaaatgttgtcaacttgacacttatagatcttcctgggttgacaaaggttgctgtagaaggacagtcagatagtatagttgaagatattgaaaatatggtccgttcttatgttgaaaagcctaattgcatcatattggctattactcctgctaatcaagacattgctacttcagatgccataaaacttgcaagagaagtggatccatcaggtgaaagaacttttggggtgctaacaaaacttgatctgatggataagggaacaaatgctacagaagttcttgaaggaagggcatataggctacaacatccttgggttggaattgtgaatcgttctcaagctgacatcaataagaatgttgatatgattgttgctcgtcgaaaagacgtgaatattttgaaacaagccctgatatggacacttggcgagcaaa

SEQ ID NO: 20186 - DNA, 1142 bp, Gossypium hirsutum
  Clone ID: GOSHI-09MAY01-C4959_1
gcgttcgctcatacaaaccctctttctaagggaaaggtttttttttccttttggtagattgcgagtggagagagagagagagaatttgccatgggtgaagaagtagcgtgttgcaagagaacaggaccaggatatggaactccactggaagccatgtctggtcctaaagaagctcttatgtatgtgacttgtgtttataatggaactggaagagagaagccagatttcttggcaacagttgatgtagatcccaactcaccaacttactctaaagttatacacaggctatctttgccatatataggtgatgaactacatcatacagggtggaatgcttgtagttcttgtcatggtgatccatcatctgatcgacggtttctgatcttgccttcgttgctctctggtcgtatctatgtgatcgacacacaaaagaaccccaaggctccctcgttgcacaaagtggtggaacctgagcacatcattgagaaaaccggcctggcatatccccacacatctcactgcctggccaacggcgacataatcatttcatttctcggcgacaaagatggaaacgcccaaggcaacggattccttctcctcgattcccagttcaacatcaaagggaggtgggagaaaccagggcgtaaagctgagtttagctacgatttttggtaccaacctcgacataaaacgatgatctgctcaacgtttggtgctccttcggcattcacccaaggttttacccttaaacatgtcgaagacggtttctatggaagacaactgtctgtgtatgattggcctgatggtcggctcaaacagacattggatctcggtgacaatggtcttatccccggagagataagattcttgcatgatccaaccaaagacacagggtacgtcgagtgtatcctctcaagcaaaatggtacggtttttcaagacccaagatggatcatcatggagtcacgaggtggctatctcagtgaaaccattgaaggtacaaaactggattctccccgaaatgcccggactcataatcggccttttaatctctctcgacgaccggttcctatatttcgtcaactggttccacggcgatgtccgacaatacaacattgaagaccccaaaaacccaatcttggt

SEQ ID NO: 20187 - DNA, 478 bp, Gossypium hirsutum
  Clone ID: LIB3584-050-P1-K2-A1
cccacgcgtccgcccacgcgtccgcccacgcgtccgcccacgcgtccgcccaaggctccctcgttgcacaaagtggtggaacctgagcacatcattgagaaaaccggcctggcatatccccacacatctcactgcctggccaatggcgaaataatgatttcatttcttggcgacaaagatggaaacgcccaaggcaacggattccttctcctcgattcccagttcaacatcaaagggaggtgggagaaaccagggcgtaaagctgagtttagctacgatttttggtaccaacctcgacataaaacgatgatctgctcaacgtttggtgctccttcggcattcacccaaggttttacccttaaacatgtcgaagacggtttctatggaagacaactgtctgtgtatgattggcctgatggtcggctcaaacagacattggatctcggtgacaatggtcttatccccggagagataagat

SEQ ID NO: 20188 - DNA, 741 bp, Gossypium hirsutum
  Clone ID: GOSHI-09MAY01-C4949_1
cccacgcgtccgcccacgcgtccggcgggaaagtggactctgtgatttgaaagaaattcccgaggataaatggttttgttgcgatgactgcaacaggattcatgtggctctccagagttatgtttccagtggggtgcagcccacgcgtccggtatttgcaaatataattagaagaaagtatttagaaaaaggattacttattgatggagccacagattgtgttcaatggcgaatactgagcggaaaaagccgttattctgaacatctgcctttactttcaagtgcagctgcaatatttcgagaatgttttgatcccattgttgcaaaatcgggtcgtgatttgattcccgtcatggtctatgggagaaatatatcagggcaagagtttggtggaatgtattgcgtggttttgattgtgaggtccgtcgtcgtatcagctggccttcttagaatatttggtcgggaggttgctgagctccctattgtagctacaagtagaaaacatcaaggaaaaggatatttccaggcattatttgcttgtattgagaatttactaagttccctgaatgtcgaaaacctggtgctcccggcagctgacgaagctttgtcgatttggacgaagaaatttggttttacaaagatgagtgagcagcaattatccaagtaccaaaaggagcttcaactgacgatcttcaaaggaacatttgatgtggagataaaggtagagccgataccggaaaa

SEQ ID NO: 20189 - DNA, 539 bp, Gossypium hirsutum
  unsure (1)..(539): unsure at all n locations
  Clone ID: uC-gsflmaxxa004g09b1
tcgattagggcaagagtttggtggaatgtattgcgtggttttgattgtgaggtccctcgttgtagctggccttcttagaatatttggtcgggaggttgccgagctccctattgtagctacaagtagaaaacatcaaggaaaaggatatttgcaggcattatttgcttgcattgagaatttactaagttccctgaatgtcgaaaacctggtgctcccggcagctgatgaagctttgtcgatttggacgaagaaatttggcttcacaaagatgagtgagcagcaagtaagtgccgtctaaatcttttacctttacaagaaagacttgaataaactttccaactctaacatgaacaccgaaacttaactcaccttgatttaaccataaagttaataacctgaatccaacccaaaattaactcaaactcgaaacaatgtagacctaagatagtctggatctgaactngaaaatgagaagtaactttaaactaaacagaatcgaagtggtttaaatttaaaactaaacctgagttgactcgaac

SEQ ID NO: 20190 - DNA, 356 bp, Gossypium hirsutum
  unsure (1)..(356): unsure at all n locations
  Clone ID: LIB3582-002-P1-K1-A10
gccattactttcaagtgcagctgcaatatttcaagaatgctttgatcccattgtgcaaggctggttgtgatttgattcctgcatggctatgggagaagtatatctgggcaagagtttggtggaatgtattgtgtggttttgattgtnaggtttagtgttgtataatttggacgttttaggatatatgggttatgagatttgttttaattatttatgttttgtagcttattttttttgtatttttaggtatattgattttttttatatatttagtattgttttagtgttttataaattctaatatttctatggggggggggggggggggttatcttgtttctctaccctatccatct

SEQ ID NO: 20191 - DNA, 917 bp, Gossypium hirsutum
  Clone ID: GOSHI-09MAY01-C104922_1
cccataatgattaattgaataaatatggaatttgaacaaaaaatatagcattatttatttattagttacacaagctatcaagttcacaaacgtgcatcaaagtttaatattatcctaccaagtagatcaaaaaaagataaaaaaaaaagagcataacaagtaaagaaaaacaaatatttgaatcatcgaagtgtaagaatctgggttttacctcaatgtcccaattgtatttgctaacttcaatcattttatattgttctcgatgattggtttcacaattcaaactcatcttcaagcttcaactgctctgcagcagcctcttcctcttcatcatcgatggcaaaatatgggttatgcgcctctggcttgaatttatacccagtaaacacataaaaggcaagagtggccaattctccggccaacacagcggtccatagatacttatacgaagtaatcgtctccaaagcataaaccacaacacgagtgaagtaaatataacagatcaccacaacgtaatactgcctaaacagagtcaatttcatcaaattcaccgcagctttcccatccgttcgagccgcctcacgcaggttcttaatcgaccaaacgatagggaacaacacagcgcagcaacaaataacatcaacaagcaaaaacagttgcttccatgtcgccctatcttgaccaaatggggaggcctcatcgatgacaacttgggcgatgttagcaacaacttgaagtggaatcacgatcattaaaaccttcttttctttgtcctgcaaataaggtttcaaaaacgaccaaccggtgccgatcaaaacgatgagcgtgaaaagcatgatccctttcaagaaactgaatatgtaaaacaaaacatcccaaccatgagcacttcccggacgcgtgggcggacgcgtgga

SEQ ID NO: 20192 - DNA, 539 bp, Gossypium hirsutum
  Clone ID: GOSHI-09MAY01-C4939_1
aaacagacaaaaggtccaggataaaataataaaggaaaagattaagctgccagcttttttgtcaagtgaagcacactcaatccctcaaggggctgctgcagaaagaagcaagtaagcgtctgggttgtggaaaaggaggtagtgaggagatcaaacgccatacatggttcaaggccattaactggaagaaattagaggctcgggaggttaggccgagttttctccctgatgttgcaggaaaccactgcgtagctaattttgaggagtgctggactagcatgccggttattgattctcccgttgccagtcctacattcggtgagaatccctttaaggggttcacctatgtgaggcctgtcgcctcatttcttcagagaaatgcttgatgttcgatggctgtgctatctagcttctctcctttagtttattgaaacaggtaactatatatgaactatatatttatgcttttggacttgtttaaaacgactctgctttctgcatttcgtgttgcagctgatgtttactactgattcttagtc

SEQ ID NO: 20193 - DNA, 624 bp, Gossypium hirsutum
  Clone ID: LIB3584-026-P1-K1-A5
gttttgtagccaccctttactggaggaaacagacaaaaggtccaggataaaataataaaggaaaagatgaagttgccagcttttttgtcaagtgaagcacactcaatcctcaagggggtaaatcctcattctcatctatttatgcctttgccataatgattcgatgctctgcaaatgtccaacacttcacagaagtgaatttaaatgttccacttcacattatgcaattttttacaaattttatacagctgtgaaacgaatggtttctttgggttattatgcaatttttaatgttgctccagggcatcatggtctttgaattttcttgctacaagataagaaatcatggtctaggttgtttttctcttcagctgctgcagaaagaagcaagtaagcgtctgggttgtggaaaaggaggtagtgaggagatcaaacgccataaatggttcaaggccattaactggaagaaattagaggctcgggaggttaggccgagttttctccctgatgttgcaggaaaccactgcgtagctaattttgaggagtgctggactagcatgccggttattgattctccaattgccagtcctacattcggtgagaatccctttaaggggttcacat

SEQ ID NO: 20194 - DNA, 690 bp, Gossypium hirsutum
  Clone ID: GOSHI-09MAY01-C4849_1
agtggatatggcttcagatgctaatgaaagcatggctgaaagatctccaactagtccttcttcagatgtagcagaggatgatgtttctttgaatggcgacatgtcagaccattgctttggccatatccctatggataacttagagaggacagttgttatctgtccggattatgttctatatcaaaatgattatcatacaggtgtgtcagtcattttttctcctagtggtgtcaaaattgagggatcaactgtgagtgaacaccaaagaacctttagttttgaaagcagaattgatgatattattagtatcaattgtcggtggtttcaaagggttggatatatgacattaaagatgaaagtcctatccaaggttgcaatagaggctgagaatgcatgtgacacttcagccgatgaggagttgaaatttacggttattgaccccagatggtccgagaaacatgcagcaatcatctcattaaattttcaataccaggccttatggaatattatgccagatccacttgcagaaatggatggagatgattcacttgtacaaaggtcctattttcccaattttgacgagccttttgaggaggttatatatccaaaaggtgatattgatgcagtttccattagcaagagagatgttgatctgttactaaccagaaaatttgtaatgatactattatt

SEQ ID NO: 20195 - DNA, 2237 bp, Gossypium hirsutum
  Clone ID: GOSHI-09MAY01-C4599_1
gtttgattagacaaccaaagtatggtcatctaaaggagctccataggctattaagatgtgtgagcgagctttagtttcagcagatcccattgttacttcacttggagacctccaacaggcttatatgtatacatcggaatctggagattgtgcagctttcctatcgaattatgataccaaattcgctgcaagagtgctatttaacaacatgcattataacttgcctccttggtctatcagcatccttcctgattgcaggaatgcagtattcaatactgctaaggttggagttcagacatcacaaatgcagatgttaccgacaaattctgagacattctcatgggaaagtcatgacgaagatccttcttcattagattacagctcagcaattactgctgacgggctattagagcaaataaatgtcacaagggatgcaagtgattacttgtggtacattaccagtgttgacattggttcatctgaatccttccttcatggaggggaactccccactctcattgtccaatcaacgggccatgctgtacacgtctttatcaatggacaactgtcaggttccgcgtttggaacgaggcaaaatcggagattcacgtacacagggaaggtcaatctgcgtgctggaacaaacaaaattgcactgctgagtgttgctgttggattaccgaatgtaggtggacactatgagacatggaatacagggatcctaggtccagttgcactgcatggacttgaccaaggcaaatgggacctgtccaggcaaaaatggacttaccaggttggtcttaaaggagaggccatggatctggtctcaccaaatggattttcctcagttgagtggatggcggcatcattggttgcacaaaaaccagagccattaagatggcataaggcttattttaatgcacctgagggtgatgagccgttagctttggacatggtgagcatgggaaaaggtcaaatctggattaatgggcagagcataggcagatattggacagcatatgctcatggtgactgcaatggttgtaattatgctgggacgtttcgaccaccgaagtgtcagcttggttgcggccaaccaacccaaagatggtaccatgttcctcggtcttggctgaaacctacacagaatctgttggttctttttgaggagctgggaggagaccccacaagaatctcacttgtaaaaagatctgtgtccagcgtttgtgccgatgtcactgagtatcacccgaatattaagaactggcagattgaaagctatggaaaggcacaacagttccgcagaccaaaagttcacttgcgctgtagtcctggacaatccatctctttcattaaattcgccagttttggaactcctttgggaacttgtggaagttaccagcaaggcccttgccatgctcctgctacatatgccatcgtggagaagaaatgtgtagggaagcaaagatgtgtggtcaccatagccaacagtaacttcgggcaagatccatgcccgaacgtgttgaagcggttgtctgtggaagctgtttgtgctccgatatcttcaacaacagcacagccaaactggggaggctaataagattgaaacactcacaaaggaactctatagcgcttgcatctagtaatttaaccatacagaagcaagcaccaaagaagaaaataaaaaagaagagtgcaaagaattggcgtttagttagggttaggttgagtgccatagcatttcaaaaatggagtgctttggcaaaaggtgttcgctgttcaatgctataggcaatgagttattttaattttataaaaaagaaaaaaggttaagtgaggttaatagactactgtaaattagtgatcgtatagataggtgagtttctaaattcttaggggccttcgatttaggcccgaagggtgaaatgtcttccatgtgtccccgcccgtcttttaaccggatatacgggcaacagagaaacagagatttgtatttggtgtgatttcagtttgtatcagtggggggaaatcgaacccctatcaggttcatgttgggagcggttcctagtatggccattgttttatgtgcagttcctgaatccaaaagtcttctttttcagttgttgacaaaaaccaataaaggtgcaaaaaatctgttggtccaataaaaaaaaatattaaaaaacaaaattaaaaaaaatctttaattaaataaaaatacaaaaaaattttttacc

SEQ ID NO: 20196 - DNA, 594 bp, Gossypium hirsutum
  Clone ID: LIB3828-032-Q6-K6-H11
cccggtcgacccagcgttcgcaaaatgcactgctgagtgttgggggggggggggcggggtgtagagagacactatgagacatggatacagggatcctaggtccagtagcactgcatggacttgaccaagcaaatgggacctgtccaggcaaaaatggacttaccaggttggtcttaaaggagaggccatgggtggggggggaccaaatggattttcctcagttgagtggatggcggcatcattggttgcacaaaaaccagagccattaagatggcataaggcttattttaatgcacctgagggtgatgagccgttagctttggacatggtgagcatgggaaaaggtcaaatctggattaatgggcagagcataggtagatattggacagcatatgctcatggtgactgcaatggttgtaattatgctgggacgtttcgaccaccgaagtgtcagcttggttgcggccaaccaacccaaagatggtaccatgttcctcggtcttggctgaaacctacacagaatctgttggttctttttgaggagctgggaggagaccccacaagaatctcacttgtaaaaagatctgtgtccag

SEQ ID NO: 20197 - DNA, 433 bp, Gossypium hirsutum
  Clone ID: uC-gsflnu33B006g07b1
acccgtccgtaaaaactaaacagaatggctagcctggcagcagatatgtttgtaggaagggaaagatttgctacatcactattgatgcggctcaccacaatatgtcatcatatgcctttgcgaagatcaaagctgaccccacgagattgtggctggtcaaaagatctgagtccagcgtttgtgccgacgtcactgagtatcacccgaatattaagaactggcagattgaaagctatggaaaggcacaacagttccgcagaccaaaagttcacttgcgctgtagtcctggacaatccatctctttcattaaattcgccagttttggaactcctttgggaacttgtggaagttaccagcaaggcccttgccaatgctacagatacatatgccattttggagaatacatgtttacggacgcaatgatgcgaggtca

SEQ ID NO: 20198 - DNA, 368 bp, Gossypium hirsutum
  unsure (1)..(368): unsure at all n locations
  Clone ID: LIB3148-042-Q1-K1-G3
agtaatttaaccatacagaagcaagcaccaaagaagaaaataaaaaagaagagtgcaaagaattggcgtttagttagggttaggttgagtgccatagcatttcaaaaatggagtgctttggcaaaaggtgttcgctgttcaatgctataggcaatgagttattttaattttataaaaaagaaaaaaggttaagtgaggttaatagactactgtaaattagtgatcgaaagataggtgagtttctaaattcttagggtccttcaatttaggcccgaagggtgaaatgtcttgcatgtgtnccncngactttttaataacccgatacacggcccaggaatacaagatgcatgtcngtttgcttttgcnna

SEQ ID NO: 20199 - DNA, 985 bp, Gossypium hirsutum
  Clone ID: GOSHI-09MAY01-C4579_1
cggacgaaaacgttgaaatgctctgcagacggggaggagagaggtcccaatcctggcctccggccacggtgcagtgcttgcacacgcgcctcacgcgccatcgtacacggtggtctgaaggcttaaaaacctttgcccttccacaggtgacctcttttcccttagatccttacttgtatatgataaaacaattcatatatgttcaaaataaagcacgagatatgcgattaaatcaccttttgagagactgttggtatttttttttgaatgaatgtctgtgagtatatttctttcttccccaaaaaagaagggtccccttacaccgttttaattcggacttttatagccactactgttattacataaactgggaaagaaatcgaagatttctttccatttcttgtctgttgtatctaccatatctttgattgtgatctgctgaaatccttttattttagtttcctttttttgttttggtcgtatctgctgtgtttccttttcttgcaggtgacttgcaaagatttcggtggtgacgaaggcttgacgatggtccactggtggcggtgatctcggcgtgactcagagccttaggattgtggccttgctggagagtagctggaacgacgcgtctgttgggatggcttctggaatcttctacttgcggcgcgaggagaaagagaggcagaaaccctagggtttcatgcctcggtgtaacggtttgggccagttgggccactttagtcttgggtccatttaggtctgttgtaatgggccttaagagtaagattttagaaatgggccagtaatgtaacgggtttgggtctgctgagttgtaaccgggcataaggtttaggccaattgattttgggtctactggttggtgggccaatgtaaatggacttttaaaatatttatttggtttacagcccggtcaaatttgggctactttcaattaaaaacaaaaagagttttccttgtttactga

SEQ ID NO: 20200 - DNA, 551 bp, Gossypium hirsutum
  Clone ID: GOSHI-09MAY01-C4499_6
ggctcattggtgctggtactgatcattgtgaagggcaactcataagtgaccgtgtaaatgttaaggagggtgaattaggagatttatctccagatattagaagtacagtagatgacacaggtgaccgttctggtatacatcccaggcggtctagctggggtagaaaaagtggtcgatgggaaatgtcacctgaagttcttgctttggcagcttgagtgggggaaccaaaccgagtcggtggaggcagcagttgcaacaatttgacaaccgaaagccgcccgtcatgaccaatgtggtgattttgaatgtacgatttggaaaagggattgactgctaaggttccgttttcttgtttcaatcatgtgtaatatggggacatatgtttttgggtttggcagggcatttgaaagtgttggttaggccctctgctttggggaagaactggtgtgtagtatgttgtatgaaagtgaggtttttcaatttgatttgttagtaactaattgtagtgaccctttcagattcgttttagtgtcgtgtaatatcctcatttc

SEQ ID NO: 20201 - DNA, 681 bp, Gossypium hirsutum
  Clone ID: GOSHI-09MAY01-C4499_3
caacgaagaaacaaaataaaagaaaaaggaagggaaaacccacatagcccccaaccatcgtcccttttcctcccctcgcggccctttgttggaaagaggctcatgacttgtcgcctacccttccccgactcgctattactcagttaactcgccctcccttcactcactcccaccatggcattccatttttctgcttaaaagctctttcctttccttttttgtttttttttcctcaaatctcatcttttgaagtaaattatttttatcattattctttagagtaaaagggagagtaaaagggagagatgtatatggtgccgccaccccagcgatcggatccgggttccatcggcggcgggtcgggtgatttacgggtttaccaagcttggaaaggcagcaatatatttttatttcaagggaggtttatatttggaccggatgtaagatcattagggctgactattttgcttatagtagctccagtttccattttctgtgtttttgttgcaaggaaattgatggatgatttttctcatcactcgggcaacttaattatggtggctgcctgtggtcttcactgcctatgatttacttcttctattgctaacatccggaagagatcctggtataattccgcgcaatgcacaccctcctgagccagaaagttttgatggaaatgta

SEQ ID NO: 20202 - DNA, 2037 bp, Gossypium hirsutum
  Clone ID: GOSHI-09MAY01-C4499_1
ctttcctcttcttcgtttgaaagatccccttgacctttgtcgccgactccttctcgactcgctattactcattgaactcgcctcgccttgactcactctcaccatggctttccatttttccacttaaaacctcattcctttcttctcaaagtctcatcttttaagttctttttattgttattattattattctgaaagttaaatagagagagagagtaaaagggagagatgtatgtggcgccgccaacccagcgatcggatccgagttccatcggcggcggaccgggtgatttacgggtttaccaatcctggaaaggcagcaatatatttttatttcaagggaggtttatatttggaccagatgtaagatcattagggctgactattctgcttatattagctccagtctccattttctgtgtatttgttgctaggaaattgatggatgacttttctcatcatttgggcatttcaattatggttgttgctgttgtcttcactctctatgatttagttcttttactgctaacatctgggagagatcctggtataattccacgtaatgcacaccctccggagccagaaagttttgatggaaatgcggatgttggggctgggcaaactccaccgttacggttgccacgaattaaagaagtggaagtcaatgggatctctgtgaagatcaaatattgtgacacttgcatgctttataggcctcctcgctgctcacactgttcgatctgcaataactgtgtagaacgatttgatcaccactgtccttgggttgggcaatgtatcggactgcgaaattatcgattcttcttcatgtttgtcttctcaacaacccttctttgtatatatgttttcgcattctgttgggtctacattagaaggatcatggcatcagaggagacaacaatttggaaagcaatgattaaaaccccggcttccattgttttaatagtttacacgttcatttcaatgtggtttgttggtggtttgactgccttccatttgtatctaatcagtacaaatcagacaacgtatgagaatttcagataccgatatgatcgtcgagcaaacccctataacaaaggagtggttgataacttcaaggagatattttgctccagcattccatcatccaagaacaacttcagggcaaaggtgcccagggaacctgtgctaccaacacgaccaggtggttttatgagtccaaatatggggaaggctgtggatgacatagaaatgggtaggaagacagtgtggggtgatattggggctagcactgatcattgtgaagggcaactcacaagtgaccgagtaaatgttaaggagggtgaattaggagaattatctccagatattagaagtacagtagatgacacgggtgaccatgctggtatacatcccaggcggtctagttggggtagaaaaagtggtcgatgggaaatgtcacctgaagttcttgctttggcagctagagtgggggaaccaaatcgagctgttgggagtagcagcaggagcttggcaacttagaagccttagacgtaaccaatgatgaaatatcgagtggcaaatatggaaatcattgctaaggttgcttaacatgctccctcaatgttgtgctttatggggagaaatgttttgagccttgtgctctgaggaagaacagagctggtgtggtgcggtataagagtgaggtttgattttgtatttgtggaattacttgttcctaattgtgtatttgtccttgtggattcattttagtgtcttatagtgttcatttcacctctttctccgtctctttgtgagattatgttcattgacggggtgctgctgattggcaagtttggcaatggcagatgggctgtcagtgggtcaacaattagactttgcttgaatgaatattggtgtcccacaaaagcagctgtctcaatgccatcctgatgacaccttcatcttctacacgaaccaaaatgctctatagatagcatacatttggtatgtatttttatatctatctcatttcttttt

SEQ ID NO: 20203 - DNA, 606 bp, Gossypium hirsutum
  Clone ID: LIB3584-046-P1-K2-F7
ccggaattgaagaggacaatgacatgttttgctatattcctatccataatttttttctagaggtcataatcgtatggggaaagctcaaagtggcaaatttatgacatgcttgtatttatcttggagaaatttgttgaagagggcggtcttgctattggaacttgttcattgtagttattttgccttcaccgttcagccaatctgtgacaccaggaagcctaaatctatgcaggaaccttgcttagtttttacgtgtttgtggttgcagaatttttaaattaatagtggttagatttctttaatttgataacttctgattttctcttttctcatattatgtacgaaactcatggtaattttattgtgttttgcagcaagactatcggttcttcttcatgtttgtgttctctacaacccttctttgtatgtatgtatttggattcagttgggtgtacattagaaggatcatggcatcagaggagacaacaacttggagagccatgattcaaactccaacttccatagttttaatagtttacacattcatctcaatgtggtttgttggtggtttgactgccttccatttgtacctaatcagtacaaaat

SEQ ID NO: 20204 - DNA, 582 bp, Gossypium hirsutum
  unsure (1)..(582): unsure at all n locations
  Clone ID: LIB3829-029-Q6-K6-G6
cgctattactcattgaactcgcctcgccttgacnactctcatcatggctttccgtttttccacttaaaacctccttcctttcttctcaaagtctcatctttaagtcctttttattgttattattgttctgagagttaaatagagagagagagagagagagagagagagtaaaagggagagatgtatgtggcgccgccaacccagcgatcggatccgagttccatcggcggcggaccgggtgatttacgggtttaccaatcctggaaaggcagcaatatatttttatttcaagggaggtttatatttggaccagatgtaagatcattagggctgactattttacttatattagctccagtctccattttctgtgtatttgttgctaggaaattgatggatgacttttctcatcatttgggcatttcaattatggttgttgctgttgtcttcactctctatgatttagttcttttactgctaacatctgggagagatcctggtataattccacgtaatgcacaccctccggagccagaaagttttgatggaaatgcggatgttggggctgggcaaactccacca

SEQ ID NO: 20205 - DNA, 569 bp, Gossypium hirsutum
  unsure (1)..(569): unsure at all n locations
  Clone ID: LIB3825-024-Q6-K6-H6
gaaagagtatgtggtgctaccaccccatgnatcggatccggcggtgggtcagttcttctgctactaacatctagaggagatcctggtataatatcgcgcaatgcacaccctccagagccagaaggttttaatgggaatgtagatgttggtgctgttaaaactccacagttacgattgccacgcattaaataagtggcggtgaacaatttgatcaccactgtccttgggtcaggcaatgtatcagactgcaagactatcggttcttcttcatgtttgtgttctctacaacccttctttgtatgtatgtatttggattcagttgggtgtacattagaaggatcatggcatcagaggagacaacaacttggagagccatgattcaaactccaacttccatagttttaatagtttacacattcatctcaatgtggtttgttggtggtttgactgccttccatttgtacctaatcagtacaaatcagacaacgtatgagaatttcagatatggatatgatcattgagcaaacctctatagaaaaggagtgattgagaatttcaaacagatattt

SEQ ID NO: 20206 - DNA, 330 bp, Gossypium hirsutum
  Clone ID: LIB3145-032-Q1-K1-G1
ctcaaatttcaacgaagaaacaaaataaaggaaaaaggaagggaaaacccacatagcccccaaccatcgtcccttttcctctactttcaatactttgttggaaagaggctcatgacttgtcgcctacccttccccgactcgctattactcaagtaaaagggagagtaaaagggagagatgtatatggtgccgccaccccagcgatcggatccgggttccatcggcggcgggtcgggtgatttacgggtttaccaagcttggaaaggcagcaatatatttttatttcaagggaagtttatatttggaccggatgtaagatcattaaggctg

SEQ ID NO: 20207 - DNA, 221 bp, Gossypium hirsutum
  Clone ID: LIB3828-006-Q1-N6-B12
attaaaacattaatcgtttaaaaattataaaatgatttaaaatcacttgagttttacactgaaataattggatccttccccatattcggactcataaaaccactggctcgtgttggtaacactggttccctgggcaccttggcactgaagttgttcttggatgatggaatgctggagcaaaatatctacttgaagttgcgaaccccttctttgttataagg

SEQ ID NO: 20208 - DNA, 620 bp, Gossypium hirsutum
  Clone ID: GOSHI-09MAY01-C4459_1
agccatgaattcccattaacaagctgtcgagctcgaaatcagcttgtgggcaaagtaagaagaacattgatgggctggtgaactgatcgaatacattgacagcagcctgatggttttgctccctgctgtatgtttttgaaacactcctatccccatgcagcatatcatgcaactccttgttggaaccaactgatcccaacccccctaccccattaacatctggattcgatcatgttcagaagcaaagatccagacccttctttgagttgtgtaagattgcaatgagagccatctgctgcagccttttctggcttttggggttcttaaaagcggaacttcatcctcttttaatggataagtagggtttgctttccatcgaaaggttctgaaatgtatgcttcccaatccgaattcaggtttatgaaagcataaacttctagaaaataggactttctttatattggtgctttctgggaaccaatattgtatggaccacgattttgatgaagctggtgctaatttgaggtgaaaattggatagtttgataagaaaggaagtgtttcagattttaattatatggtggcacctaatagcacgctgatgttactcattctaattct

SEQ ID NO: 20209 - DNA, 622 bp, Gossypium hirsutum
  Clone ID: GOSHI-09MAY01-C4479_3
caacaatttaaataatgaaggaagaatacgaacagttcttgatgttggttgcggtgtcgcaagttttggagcatatcttctttcttctgatattatacccacgcgtccgcccacgcgtccgcaatgtcattagcacccaatgatgtgcatcaaaaccaaatccaatttgccctggaaagaggaattcctgcatatcttggtgttctagggaccaaaaggctcccttacccgagcagatcatttgaacttgctcactgttctcgctgtaggattgattggcttcaaagggatgggattcttcttcttgagctagaccggttacttagacctggaggctattttgcctactcgtctccagaggcttatgcacaagacgaagaggatctcccgatatggagagagatgagtgcccttgtgggccgtatgtgttggagaatagctgcaaagaggaaccaaactgtcatttggcaaaaacctttaacaaatgattgttatatggaaagagaacctggtacaaatcctcccctctgccgctctgatgatgatccagatgcagtttggggtgtaccaatggaagcttgtatcactccttactctgaccatgaccaaaaggcccagggga

SEQ ID NO: 20210 - DNA, 794 bp, Gossypium hirsutum
  Clone ID: GOSHI-09MAY01-C4479_2
aaagcaagatgtttgggtcatgaatgttgtcccggaggatggaccaaacacacttaaggtgatatatgacagaggtctgattggcactactcataactggtgtgaagccttttccacataccctggaacgtataatttacttcaagcttggactgtcttttctgatattgagaagaaaggctgcagtgccgaggatttgttactcgagatggatcgtattctccgtccaagtggattcgttatcatccgggacaaacaaccagtgatagatttcgtaaagaaatatttatcagctttgcactgggaagcagtagcaacagctgattcagataatgaaggggatgacattgtttttatcatccaaaagaaattgtggctgacaagtgaaagcctcaggaattctgaatagagtatttcaaccctcacagattccccctttcttatttcatctgcagctccaaagagattaagaaggccaggcattattaaaatgcagtgaacagtttcattttgtagcattaaacaatggttcacattatttttttgtttacctttttttttctttttctttttaatgaattacttgacaagccataaactggtcattgtgatctataggctattattcaattttttttctctaatttggtgttgttcaaagctactttagctgatggcaaataaccatatacacataatttgtaatgctgaacggcataatcattatgggttttaactactaagttcttccataaatgaatattcttcttatcaaacgcgacaggtaagcccgt

SEQ ID NO: 20211 - DNA, 1504 bp, Gossypium hirsutum
  Clone ID: GOSHI-09MAY01-C4479_1
tttttatgttggttgtggtgttgcaagttttggagcgtatcttctttcttctgacattatagcaatgtcattagcacccaatgatgttcatcaaaaccaaatccaatttgccctggaaagaggaattcctgcatgtctggctgggcgtgcgacgacagggcgcccgggccccagccgatcatttgaacttgctcactgttctcgttgtaggattgattggcttcaaagggatgggattcttcttctcgagctagaccggttacttagacctggaggctattttgcctactcgtctccagaggcttgtgcacaaggtgaagagatctccggatatggaaagagatgagcgcccttgtggaacgtatgtgttggagaatagctgcaaagaggaaccaaactgtcatttggcaaaagcctttgacaaatgattgttatatggaacgagcacctggtacaaatccaccgctctgtcggtctgatgatgatccagatgcagtttggggtgtgccaatggaagcttgtatcactccttattccgaccatgatcagaaagccaagggaagtggtttggctccttggccagcgagattgacatctcctcctccaaggcttgctgattttggttattcaaatgaaatgtttgaaaaagacacggaaacttggcgccagcgggtagagaattattggaatctcttgagtccaaagattgaggccaacactttgagaaatttgatggacatgaaagcaaacatgggatcttttgcggctgctctaaaagagaggaatgtttgggtgatgaatgtcatccctgaggatggaccaaacacacttaagttgatatatgacagaggcctcattggcactactcataactggtgtgaagccttttccacataccctcgaacctatgatttactccatgcttggactgtcttttctgatattgagaagaagggctgcagtgctgaagatttgttactcgagatggatcgcattctccgtcccaggggtttcataatcattcgggacaaacaaccagttatagatttcgtaaggaagtatttatcagctttgcactgggaagcggtagcaactgctgattcaagttcggattcagaacacgaaggagacaacgtcgtgtttattgtccaaaagaaattgtggctcacaagtgagagcatcctgaattctgaatagaatatttccggattacaattcccacgtactctcattatatcttcttcagcagctccaaggtattaagaagctctcctattattaatccggcaagcaatttcattttgtggcattaagcaatggttcaaattgttttttcttttttacccctttttccttgtattgaattactttgacaagccatgaaatgatcatcatctatataggctattcttcaaacagatctcactttgatgccgtccaaagctttgcttcggctgatcatggttaccaattactatattattccgactcttcgttttacttg

SEQ ID NO: 20212 - DNA, 439 bp, Gossypium hirsutum
  unsure (1)..(439): unsure at all n locations
  Clone ID: LIB3166-039-P1-K1-D1
aggaaccgggtcggaccacacgccgtccgcccaacgcgtccgcttaggttatgtttttatcaagnntgcattcattctgctcaattatgtcgtgtttgaatatattgcgagttataccgatattaattgttgcttcaattacantgtaattcctgattattaaattatggtatanttttgcgaacggaaaattcttagggattcttcgagtttattagctttaaaacgatnntagtttaaactttatnctgtaactaaaacttctctttgtttctatcnagatganntcagaaagccaagggaagtggtttnggctccttggccagacgagattgacgatctnctcctccaaggcttgctgattttggttattcaaatgaaatgtttgaaaaagacatggtaatggaggcagcattgtttcatctatgcctttacttat

SEQ ID NO: 20213 - DNA, 928 bp, Gossypium hirsutum
  Clone ID: GOSHI-09MAY01-C4439_1
gggataggccaagaaaaaactgtccctatttcttcatcaaggttgaagaagaagaagaagccatggaaaaacaaaacaggtcgggaactgcaggaaaagttataagatgcaaagctgcagtttgcagaaatccaggggaaccacttgtgatagaggaaattatggttgacccacctaaagcttgggagattaggataaaaattctctgtacttctctttgtcattctgacgttaccttctggaaaatatccattggaccatttgcactttttcccagaatttttgggcatgaagctgttggtgttgttgagagtgtaggggagcatgtggaggaatttcaggaaggagatatggtggtacctgtgtttcgtccgaattgtagagaatgtagggactgcaagtcccaaaagggaaatggttgttccatattcggtgacaaattggtcgctgaaatgccaagggatggaacaagtaggttcaaggggatgaatggggagactttgcaccatttcttgtctgtttccagcttcagtgagtacacagtggttgatgtggtccatgttgtgaagatctcatcggaattcccagctgagaaagcttgcctccttagctgtggagtatccagtggtattggagcagcatggaaggtggcagacattgaagaaggctccactgtcgccatatttggcctgggagctgttggacttgcggttgcagaaggggcaaggttgcgtggagcttcgaagatcataggtgtagatttaaaccaggaaaagtttgagatagggaaaaagtttggagtcagtgaattcatcaaccccgcaacatgtggagagaaaaaagtcagtgaggtgattaaaggaaataacagatgggggaagtgactacagctttgaatgcattggattgcttcactaatggaagaagc

SEQ ID NO: 20214 - DNA, 558 bp, Gossypium hirsutum
  unsure (1)..(558): unsure at all n locations
  Clone ID: LIB3584-026-P1-K1-C5
cccacgcgtccgcccacgcgtccggggaactgcaagaaaagttataagatgcaaagctgcactttgcaggaatggagtgtaaccacttgtgatagaggcaattatggttgacccacctaaagcttgccagattcacataaaacatctctgtacttctatatgccattctcacattcattaatgaaaacatttcatgcccacatgttgcctctatgagcagatcaaagggcattcatcttttggtgttgctgagagtgtacgggagcatgtggaggaatttcacgaaggacatatagtggtacctgtgtttgcatcgaattcccgacaatgtatgtactgcaatgtaccaaatcgataccggtgtggcatctcaagcagctatactggtatgggtaggctctacactcggttcactcgccactgacgtggatcggcgtatctggttcactatggcgcttgagagcgaaaacactntcccagattagatcgatttttcgttagttaagccctgctggctgtgaaaacatcgcccacgcaatgtaacgaacatgggcaatg

SEQ ID NO: 20215 - DNA, 415 bp, Gossypium hirsutum
  unsure (1)..(415): unsure at all n locations
  Clone ID: LIB3083-029-Q1-L1-D3
acaccgcntgcctattccnactaaancccttttttcttcttaatgagaagcaaaaccagaacgcctttttcattcttgaagatgggacctacggttttttccctacaaattgactggttgaaacttccactaaaaaacttcgaatgatacttccttcattgcccattttcgttacattgcgtgggctatgttttcacagccagcagggcttaactaacaaaaaatcgatctaaactggggaagtgttttcgctctcaaacgccctaatctaaccatatactccgatccactccattttctatctaatcgagtgtaaatcctacccataccattatatctgcttggtcttccaccccatgatttacttctttcacctaccgacacgaacaaccctgctttcctttccccctataac

SEQ ID NO: 20216 - DNA, 1043 bp, Gossypium hirsutum
  Clone ID: GOSHI-09MAY01-C4429_1
cggaagagagcaaagatgcaatggcaaacacgaagaccttccggttccggtttactcttcactagaactggtgttttattcgtaagggaatcaatcactcaaaaaaaaaagaaaatattgcaggctacagtgaccggaagagaggcaaagagagcaatggcgaagcacgaagaccttccggttccggtggactcttcactagaactggtctacggcgaagggatctcagctggaagaagctcagcttcggttcgatcaattgaagtccaagtttgtcgaagtctttggtcatcctcccgatgtcttcgctcgatctccagggagagtgaacttaattggagagcacattgactatgaaggatactcagtgttgcctatggcaatcaggcaagacacaattgtggcaatccgaaagcacaaagaaggggaggctgaaaagcttctaaaaattgctaatgtcaatgataagtatgctacctgtacttatcctgctgatcctaaccaggaaattgacttgaagaatcataaatggggccattatttcatttgtgggtataagggtttttatgaatatgccaagtcaaaaggagtgaatgtaggtaagccagtgggccttgatgtccttgttgatggaacagttcctacaggttctggtctatcaagctctgcagctttagtttgctcagctacaattgctattatggctgcttttggtgttaacttctcaaagaaagaaattgcccaactaacatgtatttgtgaacaacatattggaacacagtcaggtggaatggaccaggcaatctccgttatggccaaaaacgggtttgctgagctaatagatttcaaccctattcgtgcaactgacgtgcaactacctgctggtggtacatgtgtgatagcccattcattggcagaatctcaaaaagcagtaacagctgcaacaaattataataaccgagttgtggaatgccgactggcagctatcgtgcttggtatacagctgggaatgaggccacaagaagcaatatcaaaggtcaaac

SEQ ID NO: 20217 - DNA, 383 bp, Gossypium hirsutum
  Clone ID: LIB3166-011-P1-K1-E3
agccttccgtttttgtttcggtgtgtttaattcgcaagggattttttcactcaaaaaaaaattgcaggctgcggggcccggaagagaggcaaagagagcaatggcaaagcacgaagaccttcggttccggtttactctttactagaactggtctacggcgaaagatcttagctggaagaagctcagcttaggttcgatcaatttaagtccaagtttgtcaaagtctttggtcatcctcccgatgtcttcgctcgatcttcagggagagtgaacttaattggagaacacattgactattaaggatactcaatgttgcctatggcaatcatgcaagacacgattgtggcaatcctgaagcacaaagaaggggaggctgaaaagct

SEQ ID NO: 20218 - DNA, 566 bp, Gossypium hirsutum
  Clone ID: GOSHI-09MAY01-C4779_2
ataaccatgaaaaccacaaaagcttcagtgtttcttcttttcatcatcttctcagtcacaccatcatcctttttgtttggtgtggccaacgctacaaatgaacctgtgctcgacactgatggcaacgaagtccaaacaggcaccgaatactacgttgtgtcggcgatatggggtgctggtggtggtgggcttgccctaggcaggccaagcggaaacccatgcccggaagtcgttgctcaaagacgatctggtgacgacggtataccggtgatattttctagttcggactccgacgatggagttgttcgcctatcctctgacataaacatagagtttgttccgctcagacccagactttgccgaacaacaacggtgtggaaggtcgatgattacgaccattcagccggaaaatggtgggtgataaccgatggggttaaagggaacccgggtgccgacactttgaccagttggtttagaatagagaaggggggtgttcttggttacaaatttaagtactgccccgcagtatgtggaacatgcccagctttatgcaacgaaattgggag

SEQ ID NO: 20219 - DNA, 895 bp, Gossypium hirsutum
  Clone ID: GOSHI-09MAY01-C4779_1
cttcagtgtttcttcttttcatcatcttcccacgcgcccccccacccgtccgccctcgcgtccccaacgctacaaatgaacctgtgctcgacactgatggcaacgaagtccaaacaggcaccgaatactacgttgtgtcggcgatatggggtgctggtggtggtgggcttgccctaggcaggccaagcggaaacccatgcccggaagtcgttgctcaaagacgatctggtgacgacggtataccggtgatattttctagttcggactccgacgatggagttgttcgcctatcctctgacataaacatagagtttgttccgctcagacccagactttgccgaacaacaacggtgtggaaggtcgatgattacgaccattcagccggaaaatggtgggtgataaccgatggggttaaagggaacccgggtgccgacactttgaccagttggtttagaatagagaaggggggtgttcttggttacaaatttaagtactgccccgcagtatgtggaacatgcccagctttatgcaacgaaattgggagagactcagatggagatatggtacgtttggctctctccactgacaatggatggccatttatctttaagaaaaaagaaagttcacttcgggggattcaacaagttattaggacttgattgaaagcaatcattatgcatgactatggaatatgagtttcaagtgtaaaaatttctgagagagcttaaacttgattgaagcagcagcatgtatatgcttacttacagggtttgtctctcagagttctgctttgtactcttttcagcttaatgaataaactctttacttatttaaaaaagaactaacaccttgtcttttgatttgaaatcacgaaatgcacagaagaacaaaccgt

SEQ ID NO: 20220 - DNA, 523 bp, Gossypium hirsutum
  Clone ID: GOSHI-09MAY01-C4739_1
cccacgcgtccgcggacgcgtgggaacggcactgtcagacacacgtgtacaattccatcaagaccagatgcattttcttgttgtacatgagactcagcttgccatatatgaaacaacaaagctagaacgtgtgaagcagtgggttccgctcgaatcttcttgctccaattactcatgcgacattctcatgtgatagccaactggtgtattccagctttttggatgcaaactgtttgtgtctttactgctgcaaacctcagactacgttgccgtataaatccttctgcttatcttcctgctagtgtcagttccaatgttcatccacttgtaatgctgcacatccatctgagccaaatgaatttgcatggggactctcagatggtggggttcatgtctttgagcccccttgatctgaaaacaaatggggtgtgcctccaccagttgaaaacgggtcatccagcaatatggcagcaacaccttcggtcggagcttcaggatcagaacaagcacaacgatgatgaaa

SEQ ID NO: 20221 - DNA, 524 bp, Gossypium hirsutum
  Clone ID: GOSHI-09MAY01-C4729_1
cccacgcgtccgcccacgcgtccgcccacgcgtccgggcgtctgatattgtgagaatagcgttggagagtgaaaccaagacgcataagaagaaagtgttggaggagttcgtgtgggcagtgctctgcaatggcagaaagatgggttattctattagaaggaaacaattgtcggatgacgagcttcatgtcatgcagcttttgcgaggggtttcgatgggtgctggggtgcttcctagcccaaacgacaaggaaacagtgacggccgatggggaactgacgtatatgagagctaagatttgagagagtggggggatcaaaaggactcggaagctttctatatgatcaatccagatggtgcagcatctggtcctgagctaagtattttctttgtaagatctaattagaatttctttttggggtcatttagatacttggatattttacttgtgtaccatatcaactttttccctttaatgtttgtgaattacatgaatgccccaaaaaaccaggctttccttctctc

SEQ ID NO: 20222 - DNA, 528 bp, Gossypium hirsutum
  Clone ID: GOSHI-09MAY01-C4699_2
cccacgcgtccgatttgctgaggactctgatttgagtgtgacaaccaggcttgcttgtggggctgctgctggaactgctgggcaaactgttgcttaccctctcgatgtcatccgcagaagaatgcaaatggtcggatggaaagatgctgcatcagttgtcactggtgatgggaggaataaggctcctcttcagtatactggcatgatcgatgcattcaggaaaactgttaggcacgagggctttggagcattttacaagggtctggtccctaattctgtgaaggttgtaccttcaatagctattgcgttcgtgacatatgaggtggtgaaagacattctaggagttgaaatcagaatatcagactaaaccggtaccatttctactcaatgtttttagggatgtgtgctgtttttgtaggtaaaggggatatagagtaagataaactagggaacaaccttttaacctttttcttttcgtctcatcacgcaaaatgagtttagaaacttatacgagcctgccataatttg

SEQ ID NO: 20223 - DNA, 576 bp, Gossypium hirsutum
  Clone ID: GOSHI-09MAY01-C4699_1
gtgggtttgaactttgctgtgtacgagtctctaaaagattggttaataaaaaataaacaattcggattggctgaggactctgagttgagcgtgacgaccaggcttgcttgcggggctgctgctggaactgttggccaaaccgttgcttaccctctcgacgtcatccgcagaagaatgcaaatggtaggatggaaagaggctgcctctgttgtcactggtgatgggaggaacaaggcccctctcgagtataccggcatgatcgatgcattcaggaaaactggtaggcaccagggctttggagcattatacaagggtctggtcccctattctggggagggtggaccttcaatagcactcgcgtttgtgacatatgaagtggtgaaggacattttaggggttgagattagaatatcagactgaaatcgggccccattcaggttgaaatgtttatgaggtgtgttgctattctttttttgtaggcaatggaacagatagaaaggtgaactagggactgttttcttagtactcttatttggtttctcataaatgagttttagaaacttgttcacagagagc

SEQ ID NO: 20224 - DNA, 521 bp, Gossypium hirsutum
  Clone ID: GOSHI-09MAY01-C4689_1
cattgctgcaccctgaacttaaacattgctccattgatgatcaccagcttgtttttgatctagttaatgaggcactcgtggggatgagtgaaaaagcatgtgttcataaattccccaagccctttaaccgtggcattggtttaatgtttaaaggaaacgctgttcttcttcaagaggtgtggagatacgtcagtgggaacatggggtttcaacaggaacatgatgggtcgttggatgatattgtgggtcgagatatggagaaagatgcttggatgttccttcaaggtgaagatgactttgtggcacttgagcttcaagagttggttttcgatgggcttttagatgaacttctttgtgactgattgaggagaatatgaattcgagctcctcttagtttctggggttgtttttggcgttcttttgagatcttttcgtattataattttatatatatatatataagctttgtttatagatactctctgttatatgtaagctgtggcttgttgacgaaatccata

SEQ ID NO: 20225 - DNA, 638 bp, Gossypium hirsutum
  Clone ID: GOSHI-09MAY01-C4659_1
cccacgcgtccgcagttacgtaacaacaaagtatagtttcttcttggtgttttagggtttatagaggagggtgggagagacacacgaagcgagaagggttagaatgggaaaccagaaacaaaagtggacggcggaggaagaggaggcgcttctggccggaatcaccaaacacggtcctggaaagtggaagaacatccttaaagatcccgaatttgcccctttcctcactcaccgctccaacattgacctcaaggataaatggcggaatttgagtgtcagtacttctactcaaggtgccagagacatatcaagagcacccaaggtaaaagccattgttgcttcccttcccaacactcccaattcttctgctccagttgcgttgcgtgctcacaatgtaacttctgatactgttgtgggtgattcttcaaacaacggtatagacgggcagaatgctcctaggtataacacaatgatttttgaagcccttttaaccattaaagatacaaatggatgtgatataagtgcaattgtaagctacattgagcataggcatgaagttccaccaaatgtttatagggtactaaagttcaaggttgagaagacttgttcacaaggcaatctggaaaggtcaaaatttg

SEQ ID NO: 20226 - DNA, 1754 bp, Gossypium hirsutum
  Clone ID: GOSHI-09MAY01-C4669_1
caagtaggtacatatagaggaaacaaagaaccttgttggcgatgcgcccttaaccaccacagccagtcaaatagagaaaggcccaaaagatgcagctatgagaccagtggggggtaatcaaacagagagggggagaatgggggatattgcaaagctaccgaacaaggaagagaatatgttgaaaggataggcacgacgccaaagagatttgaccatgagatagacatgagtggctacgatgtgatgttgatggagccccctcgtccacctcctcctccgcctccgcctcccccacctccgccccctccacctcctccggcacttgctgagaaggtcattgtgaaacccattgtgcctaatgaagtaactgcagggccttctgccaaaacaccaaagccatctacatttgcgaggtcgttcaccattgcagcccttcaacaatatacaaatagcttttctcaagaaaatcttttggggggtggcatgcttggaagtgtctatagggcagaacttccggatggaaagttacttgcagtcaagaaactggagaagagagttgcaagccagcagaaggatgatgaatttattgaactggtggaaaatattgatcgtatccagcatgtaaatgttgtcaggctaatgggttattgtgcagagcatggtcaaaagcttttgatctatgagtattgcagcaatggatcgctgcaggatgcgctgcactctgatgatgagtttaaaaagctgctttcatggaatacccgtatccggatggctcttggagctgctagagccttagagtacatgcatgaggcttgccatccacctgtaattcacagaaatttcaactctgccaatgttctccttgatgatgatctcgatgtgcgtgtctctgattgtggtttggctccattaatagcatcaagttctgtaagtcagttgtcaggacaactacaatcaatttatggttatggagcgccagaatttgagtctggaatttatacttctcagagtgatgtttacagttttggggtgtttatgttggaactcttaactggcaggaaatcttatgacaggacaaggagtagaggagaacaatttctagtgagatgggcaatcccacagctccatgatattgaagcattatctaggatggttgacccttctctcaatggagaatatcctgctaaagcgttgtcacggtttgctgatatcatttctcggtgtgtccagtctgaaccagaattcaggccaccaatgtctgaagtggttcaagacctattggacatcatacgcagggagcgtccgagtaatgaatcaattggagactgacttgtgttaggcaatacacctgatgaattagtttaggatccgaggtcacagggatttgatccatcagatgttgtgaaaacacatccattgtaaagaggcagctgcgcgaaattttacatctgaagctctggcacaaggtttggcggtcattcagtaagaacccccccgcggggactaggaacagtctgaattttcaggtccggtcaaccggggatcattcgggtggtcattaaatcaggtaacaaagtcttggctatggcataaatatgctaacccatttgtttcatgataactattattttgttactaatgattcattatgattttgttcccatttcatttgttttttttcctcttgaatggatcattgatgtgtacaacatatgaacataatttcctgaatagattgtgtgtttttttatttg

SEQ ID NO: 20227 - DNA, 789 bp, Gossypium hirsutum
  Clone ID: GOSHI-09MAY01-C4189_1
attgacttggagagactccccccattttctttacatttctctcatctttctatgccctgtttgccaccatttttcccaaagagagaaagatccctaacactccaccgatctctccatctcccctaaatctgatgcacccaccatttccagtaaggtggagagagagagatataagtgaagtcttttaaaagataccattttctttttgatactttacttcttctagtaacaataaaaattctagcttttttagctttcagggtgataaaaataaacaatggaaccgttttttaaacacccttttttcatctgttttatgggctttattcagatttttcattgaagggggggggttgaggtttggtaaattaaactcgttcagactttgttgaaaggaagatgaaaggcgaggatcaagcaaggtctttgtttggaattccccttacagataggccaaaatggcaacagtttcttatttgttcgtctgggttcttctttggttaccttgttaatggcatttgtgaagaatatgtatataataggcttcaattcagctatggatggtatttcacttttgtacaagatttgtttacctgatattgataaggcttcaaggctttaccacgaagcaatggtgaatccatggaaaacatatgtgaaacttcagctgttctattggttctcatggattaccaaagttcttggcttaccttactacccagacaaatatgttaaattacaaagtgctgctgtataatatggtgcttaatcctggcttaaaggaaatct

SEQ ID NO: 20228 - DNA, 586 bp, Gossypium hirsutum
  Clone ID: LIB3583-006-P1-K1-A11
cccacgcgtccgaccacgcgtccgattcagctatggatggcatttcacttttgtacaacgatttgattacctgatattgataaggctctaaggctttaccacgaagaaaatggtgaatccatggaaaacatatgtgaaactctcagctgctctcatgggttctcatggattaaccaaaggttctttggcttacctcaactacccagcacagattatgttgaaatctacaaaggtgctgcctgttatgattatgggcgccttcattcctgggctgagaaggaaatatccagttcatgaatacatctgtgctctgcttcttgttattggtctcatccttttcaccttagccgatgcccaaacatatcctaattttagcatcatcggtattataatgattttgggtgctttggttatggatgcctttctgggtaatttccaagaagcaatattcaccatgaatccggagacaactcagatggagatgttgttttgctcaaccgtagttgggattcctttcttagttgtgccaatgattctaacaggagagcttgttagggcatggaattcttgttctcagcatccttat

SEQ ID NO: 20229 - DNA, 481 bp, Gossypium hirsutum
  Clone ID: GOSHI-09MAY01-C4169_4
tccctttcgttcgacgatatcaagcatatgatgaagttttgcaatagcctgcatggtggtttgaacaagcttgctgagttgttggaagtggaaagagttggtgtgtgtcatcaagctggctcggatagtttgctcacatcgtgcacgtttaggaagttgagagataactttttcaatggctccactgagaaatatgcaggtgtactgtatggcctaggggtcgaaagtggacagactactaattagaaagaagaaataataattgggaaaaggttgatgaatgtagactacttgagtgtgagactttataattttcattgtatacattggcaaaaatgattgttaatttagttgtgagcttatctcctttgcttgcattataactgaaaccttaactggttttcttgtctagttctaggtggaagtcatgtataaattatgcagttagtgtttcaataataatttgaaccattggcatttt

SEQ ID NO: 20230 - DNA, 1520 bp, Gossypium hirsutum
  Clone ID: GOSHI-09MAY01-C4169_1
attttagcagggtttttaagactggaaaaggcaacctcagaacgatgtcgtatcaatgagttggaagttacaacgccgtcggttgggacattggccatccctttccctttgtacatccctgtccttccttccttccttccttgccgtccggatgacacccccgacccacgcggctgtcgtaaaagggctctaagcctcgtccgcgttttcctcatttccctttactcgttgaccgaaatttctcgactcaccgtgttcacaacctctagatctgttacttcctaggcccgatttcataatttcaagatctgcttccagcatctaaacgcgaccgtttccggaactcaactcggagattcaatttttaagggtttcgaatttggatgtgcttgtcttttatttggtctactggaaatgtcgattttgcccaaaggtgattcagttcatattcgagaagtttggaacgataatctagaagaagagtttgctttgatccgtgaaattgttgatacctataattacgtagctatggatactgagttcccgggtgtagttctacgtcctgttggttctttcaagaatatcagtgattataactaccaaactttgaaagataacgtggatatgttgaagttgatccaattggggctcactttctcggatgccaacggcaaccttcccacttgtggaaccgacagctcttgcatttggcaattcaatttccgcgagtttaatatcagtgaagatatcttcgttagtgattccatcgagttgttgcgtcaatgtggggttgattttaagaagaacaatgaaaaaggtattgatgtgaaacggttcggtgagcttttgatgtcgtccgggattgtgttgaatgatgatgtgcattgggtcacttttcatagcggatatgatttcggatatttgcttaaacttttgacctgcaggagtttgcccgatactcaaactggcttcttcaatttgatcaaaatgtattttccgatggtatacgatatcaaacatatgatgaagttctgcaatggcctacatggtggtttaaacaagctggccgagttgttagaagtggaaagagttggtgtatgccatcaagctggttcggatagtttgctcacatcatgcacgtttaggaagttgagggataactttttcaaatcagtacagaaatatgcaggtgtactgtatggcttagaggtcgagggcgggcagaattcggattaaaagagaaaataattgggaaaaaggatgtagactactaagtgtgtgtgacttaattttatttgtatacattggccaaagaagaaagattgttgatctagttgtgactttttctcttttgcttgcattgtaactaaaacctggtgttcaagttgaagtccagtgtaaattatgcagttagtctttcaataataattgtaacaattcccatctaaaaaaaaaaaaaaaaaaaaaaaaaaaaaaaaaaaaaaaaaaaaaaaaaaaaaaaaaaaaaaaaaaaaaaaaaa

SEQ ID NO: 20231 - DNA, 574 bp, Gossypium hirsutum
  Clone ID: LIB3828-027-Q6-K6-D2
acccttctttcttctttctcctttgactggaattttaaatttacgttcgccccaatcaatcaatctcttatatctgttatttacaaggcctgatttgaaatatccaagatctgattccgacaacggaaaacgctactgttttggggcctagacttgaagccctttctgcttcttttttgaggtttgggtttttcttggatgtgcttatgttttgttctcaaatctgggttgggctgtatttgtagctttgattcggtattctggcaaatgtcgggtttgcccaagggtgaatcggttcatattgcgggaagttcggaacgataatctacaggaacagtttgctttgatccgtgaaattgttgatacttacaattatgtggctatggatactgagttcccgggtgtggttctacgccctgtggcaactttcaagaattaaatgattataattaccaaactttgaaagaaatgttgacatgttgaaattgatccaattgggtctcacttcttcggatcaaaatgggaaacttcccacttgtggaactgttagcttttgcatttggcaattcaattt

SEQ ID NO: 20232 - DNA, 523 bp, Gossypium hirsutum
  Clone ID: LIB3583-005-P1-K1-G3
cccacgcgtccgcccacgcgtccgacaagccaggctgccttgtccgcgtttctcttccttcactttgcctgtgttgcgttgacccacaatcactctcctcaatccccaaacacaattcactgtttcgcaaaagagctctttaagatctgttgtttttcgatttcacaattccaaggtcaaatctcttctcctccttccctttctttttttttttcatttgcttctctgcatttgttttttcagatccgctctcaagatcgaaacgacactattttccagatctgggtttggtaatatttgtctggaaatgtcggttttgcccaaaggtgattcggttcaaattcgagaagtttggaacgataatctggaagaagagtttgttttgatccgtgaaattgttgatgcttacaattatgttgctatggatactgagttcccaggtgttgttctacgccccgttggaactttcaagaacgtaagtgattataactaccaaactttgaaggataatgtggatatgttg

SEQ ID NO: 20233 - DNA, 327 bp, Gossypium hirsutum
  Clone ID: uC-gsflnu33B076h10b1
tagcgagttgttgcgtcaatgcggggttgattttaagaagaacaatcagaagggtattgatgtgaaacggttcggtgagcttctgctgccctccggaatagagacgattgatgaagcgcatcagggcatcttcatattacgaagacctaatagagtggatgctgaaacatcttatgcaacagatagtgtgcaccacgctaccctagagtcgttaatatgtaccaaaatggatggcctgactgaatgacctatcaaacatctgctgattatgtggccagtcccgcatggaggtgtggacatgacgacaaaactgtttgatgcagacag

SEQ ID NO: 20234 - DNA, 306 bp, Gossypium hirsutum
  Clone ID: uC-gsronu33B087h01b1
ccctcgcgttcgcccacgcgtccggttttcctcatttccctttactcgttgaccgaaatttctcgactcaccgtgttcacaacctctagatctgttacttcctaggcccgatttcataatttcaagatctgcttccagcatctaaacgcgaccgtttccggaactcaactcggagattcaatttttaagggtttcgaatttggatgtgcttgtcttttatttggtctactggaaatgtcgattttgcccaaaggtgattcagttcatattcgagaagtttggaacgataatctagaagaagagttt

SEQ ID NO: 20235 - DNA, 523 bp, Gossypium hirsutum
  Clone ID: GOSHI-09MAY01-C4109_1
cccacgcgtccgcacgactgaagaatcatctgtgtctttacagaatgctggttcagattcatctagtgggagaatacatcatttagatgtgcctgaagtgttcacttctagtcttgatggaagtgaacctatatatgaaggtgaagactgcatattagattcaataacaacaacatatcaagaccgggagcctatatatgaaggtgaggtaattcttgcaaaacaagctggcaaaacagctgtggaggactccaatatgaggtctaaagatgaaatcaatctgcagcaaggggagttgattggaaacttcttgaagaacaatgccagtcagttgaccttttatgggcttttttgcttacaagatggtcttaaagaacgagagctttgtgttttctttcgtaataatcatttcagcaccatgtttaagtatgacggtgaactttatcttttagctactgaccaaggctatctaaatcagcctgatttggtgtgggagaaactaaatgaggtcaatggagacaca

SEQ ID NO: 20236 - DNA, 840 bp, Gossypium hirsutum
  Clone ID: GOSHI-09MAY01-C4139_1
cttgtttctcccccttcaaaaccaaaaaaaaaaaaaactcatctttttgcttttttgcactgtttgttttttctctctggttaaaaagttgaaacctcgtcaactctttcatggtgctgaaaaccatagcttcttgttgttgttgacagttgagatttttgttcctttttctagttttacatcttgtttttcaatgatgggtcgaaagcatttacatgagttgcttcaagaggatcaagaaccgtttgttttgaagaaatacattgctgacagacgttgtgaactgaagaaaccgtccccgaaaactctcttacagatcaaaaaacgaaaacccatcactcaaacctcgagtttcccttcgaatttctgcaaaaatgcttgctttttctcgacgaaaacaacaacggactttaccaagtctccattgtttgaattcccatcgcctgttaaaagaagtccatgtaaaagccccaatgctatttttcttcacatcccagcaagaacagctgctcttcttcttgaagctgctttaaggattcaaaagcaatcgaaaactaaaaacaatggtggttcttccgggttattcggttctattttgaagaggataactcatcgtaacaaaagtcggaatagtgaaataagtaacgttgaaggagctgaagtgtcggtgaaagatattctaaggtgggattcgagtgttggtaaaaataatcaaagtggtcggccgagtagcagtgccgtttggtcggaaactaatgaagaaaaatcgatggatttggatttggatacttcttgtagctgcagccaatccgaggatttcgaagagattttcgttaataa

SEQ ID NO: 20237 - DNA, 806 bp, Gossypium hirsutum
  Clone ID: GOSHI-09MAY01-C4049_1
cggacgcgtgggttgggtttcagagggaaaaaaatggagaaagaggagaaaaccaatatcaatatcgatgaaaccctaactgaaacaaagaaagatgaatgtcttgaacaacatcaacaacgaaaaggtgaagcggaaggggaaagggaagcaaccaatgatcttccttctgaggaattcttcgacgagttccaatgttgcatttgccttgaaaaagaatcatatatcaatcaatgagcagaagtgaagtgtttggtcaccgatcttatatggtgtacagcatcttgcaatttgggtgtactttttagtttatcgaagctctttgtttgaaggtgatttccttctgtttttcagggaactactttacaagcctgttgtattagcctgtgggcatatgtcatgcttttggtgtgtctacaatgcaatgaatcatgttcatgagtcccattgccccatttgtcggtgcccatacaatcatttcccaagtgtctgtcagatgctgcattttttgctcctgaagctgtatcctgtagcttataatagaagggaaaggcatgtgagagatgaagagaagagagcgggccacttctcacttcagtttgatcaaaatttagttggaaccaaatctttgtgagaaattcagatatttctgaggaataaacaacacctgtgctcatctccaaatggacgggcattcagaaagttgttcaaatgttttggaatcatcatcattcagagattcacctaaaacaactatggaggatgaaaatggtataatgagtaattcagagagtcttgaagttgat

SEQ ID NO: 20238 - DNA, 712 bp, Gossypium hirsutum
  Clone ID: GOSHI-09MAY01-C4009_3
tgagaaacttgactcgatttatgggtcatttgagaagccttctgagaagaagaagggctcccgcgtcccccctcccgtccgggtgaatgctgatctccgtcggatcattaactccgacgaggttcagtcggttgttaagccgattaagaaggagatcaagagggcacctttgaagaagaatccactcaagaacttgaatgctatgctgaagttgaacccttacgcaaagactgctagaaggatgtctcttttggctgaggcacagcgtgttaaggccaagaaggagaagcttgacaagaagaggaagcctatatctaaggaggaagcaaccgcaatcaagtcagctggcaaagcatggtatcaaactatgatctccgacagcgattacacagagttcgagaacttctccaagtggttgggtgtgtcgcagtaaattttagtttctgcggagtggttgtatcagttttgttttcggtgtttttgacatttttatttcatttgatgatgtttggagttttggaagtaaaattagtggaatggcatggaccctatttctcttttcatttagccatctccaccatgttttcactctttatgattaggggaatagtttcaatgaaaatgagaactagcattgaaatagtttacaagactggttggtcggattattatatttatgttattgaaatgtttgctttgcagtgttttatcc

SEQ ID NO: 20239 - DNA, 1490 bp, Gossypium hirsutum
  Clone ID: GOSHI-09MAY01-C4009_2
cccccaaaaaccctacctgctcagtgctcacattttctcgcattttatttaattgtctggtctgccctcaaagcccaaaaccctaacaatggcagccgccgccgcccgtcctctggtttcggtgcaaaccatagagtccgatatggctaccgacgctacgcctactgttcctctcgctgatgtcatgaaagcctcgatccgaccagacatcgtcaccttcgtccacgataacatttccaagaacagccgccagccttacgctgtctccaagcgtgctggtcaccagacctcagctgaatcgtggggaactggccgtgccgtctcccgtatcccgcgtgttcctggtggtggtactcaccgtgctggccaaggtgcttttgggaacatgtgtcgtggaggccgtatgtttgctcctaccaagatctggcgccgttggcaccggaagatcaatgttaaccagaagaggtacgccgttgcctcggcaatcgccgcttctgctgttccttcactcgtgatggcacgtggtcaccgtatcgagtctgttccggagatgcctctggtcatatcggacgctgtggagagcgtggaaaagacctcggctgcaattaaggttttgaaacagatcggagcatatcctgatgttgaaaaggctaaggacagccaaggaatccgacccggaaaaggaaaaatgaggaatcggaggtacatttcccgtaaaggtcctttgattgtttacggaactgagggagctaagcttattaaagccttccgtaacattcctggagtggaggttgccaacgtggagaggcttaatctgttgaaactggcacctggtggtcaccttggaaggttcattatttggaccaaatcggcttacgagaagctggacaccatttaccggtcatttgataggccttttgagataatgaaggggtccgtctggcctcgttctaacatggtggacgctgctctgggtaggatcattaactccgatgaggtacaatcagtggtgaagcctattaagaaggagatcaaaagggcacctttgaagaagaatccaatgaagaacttgaatgctatgctgaagttgaacccttatgctaagactgctaggaggatgtctcttttggctgaggcacaacgcgttaaggctaagaaggagaagcttgacaagaagaggaagcccatttctaaggaggaggcaaccgcaatcaagtcggcaggcaaagcatggtatcaaactatgatctcagacagtgattacaccgagttcgagaacttctcaaaatggttgggcgtatctcagtaatttagttcttccttaagaaattatggcagacaatcatttttatcagttttgttttaatgtttttgacatgttatatgttgatggccttttggaatagtttcatttatcttgaagacaaggattaaatagttttcttccattctccttttatgataattttgagatgttggttgtgtgccga

SEQ ID NO: 20240 - DNA, 1631 bp, Gossypium hirsutum
  Clone ID: GOSHI-09MAY01-C4009_1
atagaatataaataatccatacttctcaaaaccctagcgctcccccccgccttcattctactccatcttcactccccctcgtcccccaaaccctacaaaatggccgccgccgcgcgccctcttgtctccgtccaaaccatagagtccgacatggctactgatgccaccccaaccgttcctctcgctgatgtgatgaaagcctcgattcgacccgacatcgtcaccttcgtccacgacaatatatccaaaaacagccgtcaaccctatgccgtctccaaacgcgctggtcaccaaacttcagctgaatcctggggtaccggtcgtgccgtctcgcgtatccctcgtgttcctggtgggggtactcaccgtgcaggccaaggtgctttcggaaacatgtgtcgcggtggacgcatgtttgctcctaccaagatctggcgccgctggcaccggaaaatcaatgttaaccagaagcgttacgccgttgcttccgccatcgccgcctccgctgttccttccctcgtcatggcacgtggccaccgcattgaggctgtaccggagatgccgctggtcatttctgatgctgttgagagcgttgagaaaacctcgggtgcaatcaaggttttgaaacagatcggagcatatcctgatgttgaaaaggctaaggacagccaaggaatccgacccggaaaaggaaaaatgaggaatcggaggtacatttcccgtaaaggtcctttgattgtttacggaactgagggagctaagcttattaaagccttccgtaacattcctggagtggaggttgccaacgtggagaggcttaatctgttgaaactggcacctggtggtcaccttggaaggttcattatttggaccaaatcggcttacgagaagctggacacaatttacgggtcatttgataagccttctgagaagaagaaagggtacgtactgcctcgatctaagatggtgaacgctgatctgggtaggattatcaactctgatgaggtgcagtcggttgtgaagcccattaagaaggagatcaagagggcacctttgaagaagaacccactcaagaacttgaatgctatgctgaagttgaacccatatgcgaagactgctaggaggatgtctcttttagccgaggcacaacgtgttaaggctaagaaggagaagcttgacaagaagaggaagcccatttctaaggaggaggcaacagcaatcaagtcagcaggcaaagcatggtatcagactatgatctccgacagtgattacacagagtttgagaacttctctaagtggttgggtgtgtctcagtaattttagtttttgatttagatatttgttgcagtcaatgttgtcaactttgttatggtgttgtctttttagttattttgatgttttgagttgtgggtggaaggaaaattagtgaaatatcatgctctaatacgcttctgttttgtcctcctcccctgttttcgcattctatggctagtggaatagtttctataatatgagaacaagaaattaatcagtttacaagtctcgtttgtcattttgatattgaaatgcttgttttgctttggtctatcctgttaactgggatcctgaataaagttttgattcctttctcc

SEQ ID NO: 20241 - DNA, 573 bp, Gossypium hirsutum
  Clone ID: LIB3829-001-Q1-N6-D11
aagctattcaattctttctcattttaatagaaactattctcatattcagttcttttactcattttaatagtaactattctcactgtcatgcagggtggaggccaaaagagcacggcacaggagcatgccattcccaccctttctcttgcacaaaattgaaacagcaaatacaaataaaaatgttaataccaaaccaaaactgatgccgaccttcataatttctaaagccaaaagctaaatcactgcgatacacccaaccacttggagaagttctcaaactcagtgtaatcactgtccgagatcatagtcttataccatgctttgcctgctgacttgattgctgttgcctcctccttagacacgggcttcctcttcttgtcaagcttctccttcttagccttaacacgttgtgcctcagccaaaagagccatcctccttgctgtctttgcatatgggttcaacttcagcatagcattcaagttcttaagaggattcttcttcaatggtgccctcttgatctcctttttaattggcttcaccacggactgcacctcatcggagttaattatccta

SEQ ID NO: 20242 - DNA, 507 bp, Gossypium hirsutum
  unsure (1)..(507): unsure at all n locations
  Clone ID: LIB3493-051-P1-M1-A2
cctgttcttcattctactccatcggcacggcccctcctcacccaaaccctacaaaatggccgccgccgcgcgccctcttgtctccgtccaaaccatagagtccgacatggctactgatgccactccaaccgttcctctcgctgatgtgatgaaagcctcgattcgacccgacatcgtcaccttcgttcacgacaatatatccaaaaacagccgtcaaccctatgccgtctccaaacgcgctggtcaccaaacttcagctgaatcctggggtaccggtcgtgccgtctcacgtatccctcgtgttcctggtgggggtactcaccgtgcaggccaaggtgctttcggaaacatgtgtcgcggtggacgcatgnttgctcctaccaagatctggcgccgctggcaccgganaatcaacgtaaccagaagcgtacgcccgtgttctgcatcgcgcctcgtgtcctcctcgcatgacgtgcacgatgagtgccgaatccgtgcatttgcctg

SEQ ID NO: 20243 - DNA, 330 bp, Gossypium hirsutum
  Clone ID: LIB3135-051-Q1-K1-A9
ctcgtttaggccttcaggaacattcctggagttgaggatgccaatgtggagaggcttaatcgtttgaaactcgcccctggtggacaccttgtgcgattcattatttgtaccaaatcatcttacgagaagcttgactcagtttatggaacattcgaaaagcccttacaaaagaagaatgggtatgttatggctcgcactaagatagtaaatgctgatatgggtaggatcattaactacgattaggtacaatgagtgctgaatcctaataagatagataacaatatggcacctttgaagaagaaaccaatgaaaaacttgatgctatgctgg

SEQ ID NO: 20244 - DNA, 314 bp, Gossypium hirsutum
  unsure (1)..(314): unsure at all n locations
  Clone ID: LIB3585-038-P1-K1-D7
cggacgcgtggggccaaaaccctaaacaatggcagccgccgccgccgctgcacgccctctggggggggtccaaaccatagaatgtgacatggccactgactccaccccaaccgtcccactcgccgatgtcatgaaagcctcgatccgacccgacatagtcaccttcgtccacgacaacatctccaaaaaccgccgccaaccctatgccgtctccaaatgcgcgggtcaccagacctctgccgaatcctgnggcacaggtcgcgctgtctctcgtatcccccgtgttcccggcggaggtactcaccgtgctggtc

SEQ ID NO: 20245 - DNA, 637 bp, Gossypium hirsutum
  Clone ID: GOSHI-09MAY01-C4319_3
cccacgcgtccgcggacccgcccgcagcccgagaaataacccaagattaagttcctgaaaacatgccgtcgctgctactgcaaaagcaaatgcatcaaaattgatttttatcctcagaccattcggagcgacccatctactcgtatgaaaccgtctcgctgggcactccctgaacaaatgctccctcgtttccactccattctgacaccttcggcaagttgcgggttccaacaatcttctataatgtagattatagaaagtaggcaaatagttacaagaaaaccttcacactgtgtttggttcgccgtattacccaatccattacgccccgattacgtgtgtattacattacgcccctattccggcgtttggttcgctgtaataggtattacgcgcgtaatcggttacgcccctaatccccaaattcccgtgttttccaatcccttcccttttcgctgtattagctattacttccggcctccctccccatctccctgttttaccctccctccctacccgaccctctcctcttccgtgcatgaacctcttccctcaccgttaaattccttttatattttagagccccccacaaagtagagtcgccgtcctttctcttcatctggattgaacagctacg

SEQ ID NO: 20246 - DNA, 1650 bp, Gossypium hirsutum
  Clone ID: GOSHI-09MAY01-C4319_2
ccctcgcgtccggactccttcagcaagttagcagaggttccatcatatctcccacgcgagccgattatagatagtaggcttattgttacatgataaaccttcactctgtgtttggttcgccgtatttcccaatccattacgccccgattacgtgtgtatttcattacgcccctattccggcgtttggttcgctgtaattggtatttcgcgcgttatcggttacgcccctaatccccaaattcccgtgttttccaatcccttcccttttcgctgtattagctattacttccggcctccctccccatctccctgttttaccctccctccctacccgaccctctcctcttccgtgcatgaacctcttccctcaccgttaaattccttttatattttagagccccccacaaagtagagtcgccgtcctttctcttcatctggattgaacagctacgaaagatctaccactaatttcccttctttgatcctctcaatcaagtgatgataaacactgtgaatttaaaatttggggagatgtgagtgtgttgagtggctggagaaattattttgcgtagctgcgatcgaattgctgagtcaggggctaccgagttactgagttcttcatggctagattttcatacatcgactcatagagctaactggatcttctcgcctcaagaactggttgagaaatacaaggctgcaaatcaaagagcaatacaagcactggagaagtatgggacaacacaaatggaagtagacgctgatggttcactatcataccctgaacctattgcaagagataatgctgacaagcattctcgtccaaaacctcttaacattgaagaagaacagttcatgcgagtgttttatgagaacaaacttcgagaagtttgtagtgcattctactttcctaataaaattcagttttgcaggcaactgctctaatttatttcaagaggttttacctgcaatggtcggtcatggaacatcatccaaaacatataatgttaacctgtgtgtatgcggcctataagatagaagaaaatcatgtgtcagcagaggagcttggtaaggggatttcacaggatcatcaaatgattctcaattacgagatgatagtgtctcagagtctggaatttgatctcattgtttatgcaccctatcgttcagttgaaggttttgtcaatgacatggagaagcttcacctgtagtacatgaagagacaggtccatcagaggcaaatctcttctcaggcaaatatatactagatccaaatcaagctccgagaaagcaagtaaaaccggtcgctcgacttcagaagattctcaagttcagattgttactcgacgaggatgttcaagtcgaaacaaattcccaaaataattcaattttgtaaactagcaaactcaaaatttgtagttaaatgttgatccttaactttgaaagtaatttaatgaaattttgaaagtaatttaatgaaattcaagcttagttatgctctgaggaagagtccatatttttaagcggtggatcttgtatataaactattttagcagattgcaaattataatgcagcaaatgtaactttttagtaaaaaaaaaaaataaaataaaatttttatttttaaaaatttaaattttattttaatt

SEQ ID NO: 20247 - DNA, 1169 bp, Gossypium hirsutum
  Clone ID: GOSHI-09MAY01-C4319_1
cccagcgtccgtgcagtgtttggattaccaaacgggaatctatttcgatctcaacctccctcagcccgagaaataacccaagattaagttcctgaaaacatgccatcgcttctactgcaaaagcaaatgcatcaaaattgatttttatcctcagaccattcggagcgacccatctactcgtatgaaaccgtctcgctggtgatgataaacactgtgaatttaaaatttggggagatgtgagtgtgttgagtggctggagaaattattttgcgtagctgcgatcgaattgctgagtcaggggctaccgagttactgagttcttcatggctgattttcatacatcgactcatagagctaactggatcttctcgcctcaagaactggttgagaaatacaaggctgcaaatcaaagagcaatacaagcactggagaagtatgggacaacacaaatggaagtagacgctgatggttcactatcataccctgaacctattgcaagagataatgctgacaagcattctcgtccaaaacctcttaacattgaagaagaacagttcatgcgagtgttttatgagaacaaacttcgagaagtttgtagtgcattctactttcctaataaaattcaggcaactgctctaatttatttcaaaaggttttacctgcaatggtcggtcatggaacatcatccaaaacatataatgttaacctgtgtgtatgcggcctgtaagatagaagaaaatcatgtgtcagcagaggagcttggtaaggggatttcacaggatcatcaaatgattctcaattacgagatgatagtgtatcagagtctggaatttgatctcattgtttatgcaccctatcgttcagttgaaggttttgtcaatgacatggaggagcttcacctgtggagtacaggatgacgcaggtccatcaatcaaatgctgaaggatttgcaagaaactgcaaggttggaagttgacaaaattatgcttactgatgctccacatctttttcctcctggccagttggcactggctgctttacgcaatgcgaatgagatgcgtagagttctcgactttgagggatacctaagaagaattcttgcacgccagaattccaagcacaccattttgcagctgatagaatctctagatgctatagatgcttgggtt

SEQ ID NO: 20248 - DNA, 347 bp, Gossypium hirsutum
  Clone ID: LIB3135-028-Q1-K1-C11
ctcaagttcagattgttactcgacgaggatgttcaagtcgaaacaaattcccaaaatagattcgattttgtaaactagcaaactcaaaatttgtagttaaatgttgatccttaactttgaaagtaatttaatgaaattttgaaaataatttaatgaaaaaaaaaaaaaaaaaaaaaaaaaaaaaaaaaaaaaaaaaaaaaaaaaaaaaaaaaaaaaaaaaaaaaaaaaaaaaaaaaaaaaaaaaaaaaaaaaaaaaaaaaaggttttgggttttggtagaaataaatttccattccttcttttcccccgttttggctttttaattcctcatttaaactaagtttatt

SEQ ID NO: 20249 - DNA, 1192 bp, Gossypium hirsutum
  Clone ID: GOSHI-09MAY01-C4309_1
gtttcctgatgcaagagagagatttttcgagattctctgcttggcctagttccttcaggtttttcatacccacagctcatcgaagattcaacctttgattcaactgaataggctaagagatctgagacagctgctagctgcgttagtcaggattgatctgataaaccattctacaagctcaacaccgttggagagaacacctgcacaactttctaccctcgcgtccggtacatctgtagtacctggcccaagtactctatcatccacttattctgatcagaagtctgaaatttcaaaagattctaaagagaagaagctggaacaattacagttatctgcataagagaacctgagcatgcaaagttgttctagttttacaagaagtcgtacaaaggttctaatgcaggggatagccgtaggtcgtgctgtggatttggccatttttgaagggtatggtcagcttatagatgaactggaggagatgtttgatattaagggagagcttcgccctaggaataagtgggagattgtctacactgatgatgaaggtgatatgatgcttgtaggcgatgatccatggccggaattttgcaacccgcgcggccgaatatttatttgttcaagccaagatgtgaaaaagctgaagacaggaagcaaacttcccttggcttctatcgaaggtgaagggacggtaataagttcagactcatctgaaaactaaaaaaataggaacccatttatctttcattacctgctgtttatttttcactgaagttgatgaaaccctaatcagtagctcatatttttttggagctgtgagacttaaaacgacatcatctgggttttgaagaaccaagaatttgttaatgaattagttcggaataagaggctaagactaggaaaaatgtgaatacttataatctttgttgtgggttggggtgctttaattgtggtattttctgcgcttgtaaatataaaatgtggtctggcagtgtattccttgtttgcagcgagtgaaagtgtcgctgcttacagcttttatactgctgccattaatttaattagcttcactgtcattatagggggtttaatctgtacatactcattaggttgattatcatgtcaattattcaaggatgcttaagtcataatcttattttatcgccctttattagaagggtgacatttattg

SEQ ID NO: 20250 - DNA, 651 bp, Gossypium hirsutum
  Clone ID: GOSHI-09MAY01-C104302_1
aagaaaattcttcccatataaaagaataaattcctaattttccccctttgcgtttcattttcctccatttttcacccagtcaaaaaaattttcaatcatttatacagctcccctctggatttttagtaagggggataaggtcctggatatggacctggagggtaatagggtggaggagggtaagcgcccgctggaggagggtatccgccatatgggtctggtccaagaggatacctggctggaggatacaagggttgttgaggataaccaccaggatacgggggagctggataacccgccggacctggtggtggataaggagctggaactggtggtccgccgtatggaggtcgttgatgaggtggcggtgcatatgctggtggtgccgacggttgactatatcctcctgaggcttggtgtttggcgttgggataatgcagtatcagctgcacttctcctgcatacctgccagttttggtttgaatggcccaagaactatcatcataaccttgagaaatagccttctgcaattgaattcttccatagcctattaagtcatcactagataaagtattgctgttccagaccactacattgacctctgtcagcccttcaagcaaggagaagcggacgcgtgggcggacgcgtgga

SEQ ID NO: 20251 - DNA, 474 bp, Gossypium hirsutum
  Clone ID: GOSHI-09MAY01-C4339_3
cggacgcgtggggcaagggcggtcttgctacaggacagggaacggatggttcacatgttaaggaggccatggacttggcaacttcatttgcttcaatgaagttaaaatgaaaaaaatttctgcaactttcgtccctgacatggaagaagcattgatgctactaaatttcatcgatacattaaagtgaaatagaaaacatttagtttgtgtggaaatgctgcaattgccgaagaaaaatctatcactggaatatactacgttatttttcacttccgaacgggggtcggcatatagaagaaaaattatgctattgatacccttcgaacatctccacgcttctttatttagcagtgaaaatggattataagaatcaactactttgttttaaaaaaaaaaaataaaaataaaatacatctaataaataaaccaaaaaaaaaatttcaataccacaatttttaaaaaaaaaacaaatcc

SEQ ID NO: 20252 - DNA, 1268 bp, Gossypium hirsutum
  Clone ID: GOSHI-09MAY01-C4339_2
aacaggtcacaggggcacgctcatattctggaaaagttgggcctgatgatactgacaaagttgacatggcatattgggttgttgctgatcatattagaactttgtcttttgccattgctgatggtgcttctccaggcaatgagggacgtgaatatgtcttaagacgtattcttcgccgtgctgttcgctatggcagtgaggtcttgaaagctcctgagggttttttcagcaggcttgtaaggattgtggtggaagccatgggtgatgttttcccagagctaaagcagcatgaggcacgcattggggacataattgctgcggaagaagcgagctttggcaagactttggtgaagggaatcgagaaatttaagaaggcagcccaggatgttcaagggaggatattaagtgggcaggatgcttttatcttgtgggacacatatgggtttccattagatttaactcagttgatggcagaggaaagaggtttgatagtagatgttgattgtttcaataatgctatggatgaggctagagaaaagtcaaggagtgccagaaataagcaagctggtggtgctatcgtcatggatgctgatgctacctctgcactgcacaagaagggagtgtctacaacagatgattccttcaaattcatatggttccagccccatgaaagtgtaataaaggccatatacaatggctctgagtttatggaaaatgcaactgctggcgatgatgttggcatagttttggaatctacgagtttctatgctgagcaaggtggtcagatttttgatactggatatcttgatggttcctttggctccttccaagtatgtaatgttcaaatttttggaggttttgtacttcatattggttctctttctggagcttctggcaaattctctgttggtgataaagtaacttgtaaggttgactatgataggcggacgttgattgctcctaaccatacttgcacgcatatgttgaacttcgctcttagggaagtgcttggtaatcatgttgaccagaaggggtccattgttcttcctgaaaaattgagatttgatttttcccatgatccaaacagagacggagccatcaatgctgatcatttgagaaaaattgaagctattgtgaatgaacaaataaaatctgagttagatgtatattcaaaggaggtaacccttgctgaagccaagcgtatcaacggtttgcgagctgtctttggaggaagttatcctggttcagttagagtagtggcagttggt

SEQ ID NO: 20253 - DNA, 1841 bp, Gossypium hirsutum
  Clone ID: GOSHI-09MAY01-C4339_1
gagggagctagtcaagtgatggcgttgctggggggggatttatttattcatctgacatatttgcttgtggacatagatttttgatactggatatcttgatggttcctttggctccttccaagtatgtaatgttcaaatttttggaggttttgtacttcatattggttctctttctggagtttctggcaaattctctgttggtgataaagtaacttgtaaggttgactatgataggcggaggttgattgctcctaaccatacttgcacgcatatgttgaacttcgctcttagggaagtgcttggtaatcatgttgaccagaaggggtccattgttcttcctgaaaaattgagatttgatttttcccatgatccaaacagagacggagccatcaatgctgatcatttgagaaaaattgaagctattgtgaatgagcaaataaaatctgagttagatgtatattcaaaggaggtaacccttgctgaagccaagcgtatcaacggtttgcgagctgtctttggagaagtttatcctgatccagttagagtagtggcagttggtaaaaaagtggaggaccttcttgctgatccagaaaacaaagaatggtcatcaatttcatcggaattatgtggaggtacacacataacaaatacactggaagcaaaggcatttgctcttttatctgaggagggaattgctaaaggagttcgaaggataactgctgtcaccactgagagtgctttgaaggcaatggaattgggtggcctgcttttgaaggaagtagatgatgcttccaatatggaagtaagcttgctggaaaagaaagtggcttctctaaaaactactgtggattctgcatcaattcctgctgcccagaaagctgatattagggccaaaattgcacaacttcagaatcaactgaaaaaagcacaaaagaagattgctgaacaaaatatgcagagagctgtcgcgacagcaaccgaattggctgaagttgctgccaaagagggaaagactttctgtgtcactcgtattgatgttggtttagatgcagctgctctccgcgaagcggtttcaaaagttattcaacaaaagggtatgccggttatggttttcagtattgacgaaaccacaaacaaggctgtcgtttatgctggtgtacccgagaaatctgaacagagcaagctattggaagtatcacagtggttgacaaatgccgtagggcctctaaaggggaggtgtggcaaacgcaagggcggtcttgctacaggacacggaacggatggttcacatgttaacgaggccttggacttggcaacttcatttgcttcaatgaagttaaaatgaaaaaattttctgcaactttcgtctctgacatggaagaagcattgatgctactaaatttcatcgatacattaaagtgaaatagaaaacatttaatttgtgtggaaatgctgcaattgccacatagacccactgcgtgttcaaaatctatcactgtaatatactattttatttttcacttacgaacgtgtctcggcatataaaattatgctattgataccattcgaacatctccacgcttctttatttagcagtgaaaatggattataagaatgaactaagttttttatttgatttaaaaaaaaaaaaaaaaaaaaaaaaaaaaaaaaaaaaaaaaaaaaaaaaaaaaaaaaaaatacaatatgttaaataaacaaaaaaaaaccaaaaggggaccacttttcaagtccaaaatacttaaaaaggggggccccttttaaagaaccaaagttttctaaccttgtgcatgcccataaaaagttttttttttggggccccc

SEQ ID NO: 20254 - DNA, 685 bp, Gossypium hirsutum
  Clone ID: GOSHI-09MAY01-C4269_1
cccacgcgtccgcccacgcgtccgcgttcaatatatactcggccgatacctcacaccggcaacgattacgaaagaaaagggaaatgcctgggctagcctgcaacgcctgcaacagagaattccttgacgaggccgagcggaagctccattacaagtccgattggcaccgctacaatctcaagcgcaaggtagctggggttccaggggtgacggaagctttgtttctggcaaggcaaacagcacttgctgaagagaaagataagcagaatgaaacccccatgctttacagttgtggtctttgtggcaagggctatcgaagttccaaggcttactctcagcatcttaagtcacgggctcatattgcacagacttctcaacaccctgaagaggggaaggcagccattatcaagccatttatacgtcgtgctgtaaataagcctccacaaccaagggatacgaatgatgaggaaaatgacgataattgggtggaggttgatccagatgagggacttggcgtctggtgatgaaatgcatattgataatggtgaagaaacaggacgagaggaattagatccatgttgttgttctatgtgcgatctggagcatgacaccattgaaagctgcatggttcacatgcataagtttcatggtttcttcatccctgatgtgagtatttgaagaatcc

SEQ ID NO: 20255 - DNA, 577 bp, Gossypium hirsutum
  Clone ID: AI728144.1
cttatctttctcttcagcaagataagcagaatgaaaccacaactgtaaagcatgggggtttcattctgcttatctttgtggcaagggctatcgaagttccaaggcttactctcagcatcttaagtcacgggctcatattgcacagacttctcaacaccctgaagaggggaaggcagccattatcaagccatttatacgtcgtgctgtaaataagcctccacaaccaagggatacgaatgatgaggaaaatgacgataattgggtggaggttgatccagatgaggacttggcgtctggtgatgaaatgcatattgataatggtgaagaaacaggacgagaggaattagatccatgttgttgttttatgtgcgatctgaagcatgacaccattgaaagctgcatggttcacatgcataagtttcatggtttcttcatccctgatgttgagtatttgaagaatcctgaaggcttgctcatctaccttggccttaaggttaaaaaggatttcatctgtctgtattgtaatgaacggtgccacccttttactattttggaagctgttcggaaacgtatggca

SEQ ID NO: 20256 - DNA, 679 bp, Gossypium hirsutum
  Clone ID: GOSHI-09MAY01-C4209_1
gatggaataaaaatgatcaaacacagtatgaactttttgaagatatggagcagcgagagagaattgaaagggcgatgtacattatgtagaaaacaggtagcagatgatggtggagtatgtagcatttggaggcccatttgtccggacgggtatgtgtccattggtgacatagctcgtgtagggactcatcctcctaatgttgctgctgtttaccgaaacattgacaagctatttgcacttcctgtaggttatgacctggtatggaggaattgtctagatgactacaccacaccggtctctatttggtatccgcgagcacctgatggattcttctccctgggatgtgtagctgttgcgggttttgaagagccagaagctgatttggtacgttgtgtggcagaaacagttgcagaggagacaacatttgaggagcagaaggtatggtgtgctccagaatcatatccgtggggttgtcatgtataccaagttcaaagtgacgcacttcattttgttgctctaagagaaactaaggaagaatccaactggaaaccctcaagggttcgtgatgatttccagtctccacgatcatcagaatcttagtgaagtttggtattggtcaaaaacagaatgtgaaagaaacttgtttgatgtgctatgattctgtatcattatagagtga

SEQ ID NO: 20257 - DNA, 560 bp, Gossypium hirsutum
  Clone ID: GOSHI-09MAY01-C5919_1
catgtgcctggttatttttgcttcttcaaaggttttttttttttaattaattttctcttggaaggagaggaagatagttaaaaactcaaagaagggcttcaattagatcctcttgcttgctatcattccaaacttggagataagagaaagctgacccctggtttgcttatctgtaggatcccctggggaagctgctggtggtggtttttacaggcatttcaaataccattttctatggttctttggctgttctgattctaattgatgttggaggggttcactgaggattaagctcctcaatcatggaaggtctttgtgaaacaccagaaaatggtaaagtagcagatcccgaccttcggaatattcagtacttgccatcacccctctaccggattatcattactttggtttgatatgagagtcttctatgttagagtcagcaattttcaggttgatgattcaacccccgagtttctgactctcaatcatatccccttagaccctgacacccttttggaagttaatggcattagaagcagcatatactctgatggggtctc

SEQ ID NO: 20258 - DNA, 402 bp, Gossypium hirsutum
  Clone ID: LIB3583-059-P1-K1-B2
ctctgggctttcgtagtctttgtatatgtgcttatccacaatttttatttaggaaatcaaaagcgatagagcttagaggttgaaagcgatttgagaggtcaatagttagtgactagcaaagtagatttttttcttttcgattaatagaagacaatttatacatttccccaagttagaatttttgtggatggaagattttcctggtaaagattatttccttggagaggaagatagttaaaaactcaaagaagggcttcaattagatcctcttgcttgctatcattccaaacttggagataagagaaagctgacccctggtttgcttatctgtaggatcccctggggaagctgctggtggtggtttttacaggcatttcaaataccattttctatgggtctttg

SEQ ID NO: 20259 - DNA, 418 bp, Gossypium hirsutum
  Clone ID: GOSHI-09MAY01-C5929_2
cccacgcgtccgcttgcttttcttgttttgaacttttccttcttttttttttcttttttgttaacggggttttcagcatacatgcaaaagagatcgaagggcacaaaacgtaaaacccgacaggcaaaagcacttgaaaatgctaggaaggctcccagatcatttcttgagctcttacatgaggcaaacttagagtccttgcctcctcatgttccatcttatttgagggcagcagtgggacctccaagttctacctcccgccggcatttttgcagcgtttgcggctttagtgcaaagtatacatgtgtgacatgtgggatgcgcttttgttcgtgccgatgccaaaatattcataacgatactcgtgcatgaaatttgttgcatgagtggtgatattaggaacccaaaaggattttgt

SEQ ID NO: 20260 - DNA, 805 bp, Gossypium hirsutum
  Clone ID: GOSHI-09MAY01-C5929_1
gctagaattattattttacagaatttgccaccacccgccaatctccctttcacggccgccgatttcttctgtcctcttctcgttcccttgtcggccaccacttcccctccgctatggatgacgacaattcgaacgcgttgcggagaatgtcgacccgtactcgtaaagttgctcctaaaatggctgcagcactcggcagttctgataatcgatcccaggcagctttggcccgtcttgaagcattggagaacgataacgctgggattgaagcagttgaaatgaacgatgatgatgaagcttctcttgatgaagatgatcaagcatacatgcaaaagagatcgaagggcacaaaacgtaaaacccgacaggcaaaagcacttgaaaatgctaggaaggctcccagatcatttcttgagctcttacatgaggcaaacttagagtccttacctcctcatgttccatcctatttgagggcagcagtgggacctccaagttctacctcccgccggcatttttgcagcgtttgcggctttagtgcaaagtatacatgtgtgacatgtgggatgcgcttttgttcgtgccgatgccaaaatatacataacgatactcgatgcatgaaatttgttgcatgagtggtaatattaggaacccaaaaggattttgttgacattagcagacattcatcatatgccaaaaatattctgtggatattgttgtaaacaaaactttcaaatgtagtgttagtaaaactaagactttctgtgatattgtttcttggtagaaattgtaaatcaagctttctttt

SEQ ID NO: 20261 - DNA, 1127 bp, Gossypium hirsutum
  Clone ID: GOSHI-09MAY01-C5589_1
cccacgcgtccgcccacgcgtccggttttctatgtgaagtttaggattttttttttttttgtgatggatccgccagctatgatgagcgatggaaggtacaatctagcagagatctggcagtatcccatgagtgagtctgggataagtaggggtcagttcggacatgggttggctcagttcggggaccccagtcgagaggtttccggcaatgatccgggtagcttggagcagcagcagagaaggggtggtatgaggagaaggcgtgacggagaagttgaaacagctaaggttgtctctactagctccactagtagtggcaatgccgtgaataatggtgaggggaagagaattaaagcagcaggaggcagagaacaaaatcatgaatctagagttgaagcagaacccagttcaggcaagcttgtggaagaaaaagctcaaccttccgagccacctaaacaagattacatccacgtacgagcgcgaaggggtcaagctactgatagccacagcttacctgaaagggctaggagagaaaagattagtgaaagaatgaagattcttcacgatttggtccctgggtccacccagcgtccgggcaaagcacttgtccttgatgagataattaattacattcaatcactacagcgtcaggtcgagttcctatcaatgaagcttgaagcagttaattcaggaataaaccctgccattgaagtatttcctcgtaaagattatggccaacaagcgtttgatgctactggtatggcattcggttcgcaagtgataagggaatacagtggtggcacatcaccagagtggttgcacattggcagtgctttcgaaaggacaacataatcgggtaaagggaatccccttgcaattaaataagagcattaaattaatttgcagtgcttccagcttgggtcggccaaagagactatatttcctttgtcaacataaaggcatggagcctccattgcagaaagctagagttagtatttgatgaaaatgttcattgttgtgttttggagagtgtgttcctttactccctatatgtcaaacgttaagctgaagggaatctcctagaatgattagtttttgttcttgtacaagaaatttgattgttcaaa

SEQ ID NO: 20262 - DNA, 1122 bp, Gossypium hirsutum
  Clone ID: GOSHI-09MAY01-C5559_1
atttcccacttttccctcccgccacagaaaatggcatttaattcacttcctttcttttaatcccaccttctctactccaaattttctctagaaccatacttcgagatggcttttctcatgccttcacctgaaatttccaccgcctctgcaaaatttttctctaaccctaccccccgccctaaatttctcaagagctgcgcgatttcgaagaacgacgacgagaaagtttggtcaaggaccaacgctagggtcggtgttaaagatgccggcagtacggtttcgtgtttgagccaaaacttgaggttgtacgtacaattttcggctccggtgaagcgaggatcgaagcccagcaaagaggaagaggagaagcaggattattacgtgaatatgggttacgctattcggaccttgagagaggagttcccggacatcttttacagggagctcagttttgatatttacagggatgacattgtattcaaagatcctctcaatactttcatcggaatcgacaattataagtcaatcttccgggcgctgcgattccatgggaggatttttttcaaagctctctggctcgacattgtcagtgtatggcagccaatggacaatgtcgtaatggttcgctggaccatccatggcattccacgagtcccatgggagagtcgtggtcgattcgatggcacttctgaatacaaactcgacaagaagggtaaaatatatgagcaccgagtcgacaacaccgcactgaattcaccccctaagtttcacgtgctagctgtggaagatctaatccgatccgtaggttgcccctcaaccccaaggccaacttacttcgagatttcatcggcttcacctccagaaaaaacataataaaaccaccttaggttctttataaattttggtaaataatgtgtctcatggtttgttgagctatatatagcatgaaatgggtgttattaatgtgtaaaaaacttggtttagatcacaaagctagcacttagtatttgcttgggttgtgttctcatactatgatatcaaacaagttgtatggttttgtaaaaatacatgtatattgaagttcgctgtaaaatggaattattagctctattcaacttaaaa

SEQ ID NO: 20263 - DNA, 536 bp, Gossypium hirsutum
  unsure (1)..(536): unsure at all n locations
  Clone ID: LIB3582-016-P1-K1-F11
ctatcctggaaatttcgcactttttattccgtccaaagaaaatggcatttaactcccttcctttcgtttaatcccgccttctctgctccaaattttctctagaaacgtacttcgagatggcatttctcatgccttcacctgaaatttccaccgcctctgcaaaaattttctctaaccctacccctcgccataaattcctcaagagctgcgcgatttcgaagaacgacgacgagaaagtttggtcaaggaccaacgctagggtcggtgttaaagatgccggcagtacggtttcgggtttgagccaaaacttgaggttgtacgtacaattttcggctccggtgaagcgaggatcgaagcccagcaaagaggaagaggaaaagcaggattattacgtgaatatgggttacgctattcggaccttgagagaggagttaccggacatcttctacagagagctcagttntgatatttacaggttcggattcaattttcccgtatttgatttcttcgaaatggagtaaataatggagaattct

SEQ ID NO: 20264 - DNA, 444 bp, Gossypium hirsutum
  Clone ID: uC-gsflmaxxa057b04b1
aaatatgtcttacaatttttttttcagtaggaaaacgccttcttccattccccttccccttccccttgcaaatcagtgccattgccaggtaccctacccctgccctgaattcctcaagagctgtgcgatttcgaagaacaatgatgagaaattttggtcaaggaccaatgctagggtcggtgttaaagatgctgacaatatggtttcgggtttgagccaaaacttgagtttgtacgtgcagttttaggaccttgagagagaagttctcggacatcttctacagagaactcattttttatatttacaggttgggattcgattttcccgcatttgatttctttgaaatggagtaaataattgagaattactggaacgcatttgatttttgtggtggtaactgatcttggagaagaagcaattgtgtacattaattgcacaccattt

SEQ ID NO: 20265 - DNA, 863 bp, Gossypium hirsutum
  Clone ID: GOSHI-09MAY01-C5569_1
cccacgcgtccgcaagcacatcaaggccgtcatgaacattggtcctgcgtttctcggtgttccaaaggctgttagtaatttgttctctgctgagggcaaagatgtttcttacatcagagctatggctccgggagttttcgattccgagattttgggccttcaaacatttgaacgtgtcatgcggatggctcggacatgggactccatcgtgtcattgctgcctaaaggtggagaggtcatttggggaaacatggaccggtctcctgaagaaggtcatgtttgtgacttctccaagaaaagccattctaagacctctctaaccactaataatgtcaacaacagtgacgttaagagaggcttcctagtcaaagatcttgctaactatggaagaataatctctctcggcaagccagcctcagttctacattcctcaaagcttcccactgctgattcaaaggtattttcgcgaacgagtacttccgaaaatttcaataacttttcgtgtggagaggcatggactgaatatgatgagatgagcaggcaaagcatccaaaatgttgcagcagataaagcttacacaactacaactcttcttgatctgcttcggtttgtggcaccgaaaatgatgagacgagccgaagctcatttttcacatggaatagctgaaaatcttgatgaccctaaatacaaccattacaaatactggtctaatccacttgaaacgaaattatctgatgctccggacatggagatatattgcatgtatggtgtcggaattccgactgaacgatcatacgtgtacaagctatcacctaacagtggtgcaaaagcattccataccagattgataactcagtccacgg

SEQ ID NO: 20266 - DNA, 689 bp, Gossypium hirsutum
  Clone ID: GOSHI-09MAY01-C5479_1
gaaaaaatctctctcaaattttcatttttttttctatcattcctttcttctccatcgtcagatctctctttcattccttgcaccaaataaaacaaataatttaaccaatcaaatcccctcgcgccaaataagagggaaatcccatttttttcttcttctctatttcctttcccttcaggtgtgatttaggttttctggggacatggcggatggtatgggaggagggccaacgagtccggcaggagggagccatgagagcggaggagagcacagcagtcctcagtcaactgtgagggaacaagatcgttacctcccaattgctaatataagtagaatcatgaagaaagccttgccttctaatgggaaaattgctaaggatgctaaagataccgttcaagaatgtgtttccgagttcatcagcttcctcactagcgaggctagtgataaatgtcaaaaagagaaaaggaagacgattaatggagatgacttgttgtgggcaatggcaacattaggattcgaagactatatcgagccacttaaaatataccttgccagatacagggagttggagggtgacaccaagggatcagcccgtggtggtgatggatctttttaaagagacgcagctggagctcttcctgcccaaaatccacagttttcaatccaggggtcattgaactatattaatt

SEQ ID NO: 20267 - DNA, 595 bp, Gossypium hirsutum
  Clone ID: GOSHI-09MAY01-C5469_1
agccgtccgattttttctttggcagcagccacgggtccaaaacaccctcggcttggggtctggaccatggcgctagtagtctattggtacgattgcgtttgtttcggcattgtggcggctgccttccttgggtctttatgggttttatggagaaaagaagctgcatctagatgcgaggacgacagcgtatacgagagtctgctagcggctcaacaggatgccgatgggttcgtacatgccacacccaccgctcacgttggctccaaccagctatggaccagttgttggaaaggggtgcaccctggatggctagtgttgactcgttttgtttcgtttgcagtgttggccggattcttgtcgtgggacatagtcgaatgggatgcttcgatcttcgtttactacaccgagtggacatttgcattggttatggtctattttgggctggggactgtcatttctgcttatgggtgttgggtgtgcttaaatactcctctgcctgaaaatggtgcaagggctgagtttctgaaaagtgatgtggaagagagtagaactgaaaactctggaacttataaggaaaacaatgtgagggataaac

SEQ ID NO: 20268 - DNA, 386 bp, Gossypium hirsutum
  unsure (1)..(386): unsure at all n locations
  Clone ID: LIB3166-016-P1-K1-G8
cggacgcgtgggttaacattttttcttttgctgcagccacgggtccaaaacaccctgnggttggggtctggaccatggcgctagtactctattggtacgattgcgtttgtttcggcattgtggcggctgccttccttgggtctttatgggttttatggagaaaagaaactgcatctatatgcgaggacaacagcgtatacaagtgtttgctttcagtttaacaggatgtctatcggttccgtcattccatacccacctttaacttttggttctatcagctaatgaccatttttttgtttggggtgcaccctaaataaatagttgttgccttgtttatttttcttttaacaattttgcttgttttttttatttgttctcttttttaa

SEQ ID NO: 20269 - DNA, 894 bp, Gossypium hirsutum
  Clone ID: GOSHI-09MAY01-C5409_2
cggccgcgtggggacagaagtgccttgattttggttggtttttcatgttctacttgctccaccttggattttgcatttttgctgcaattgctcctcctattgtcttccatgggaagtcgttaactggtatcctggcagcaattgatgttatctctgatcatatgttggcgggggtattcttctttgttggttttgggctattttgcttggagtcactgctgagcttgtgggttattcaggttagtttattgtattttattgaaaaaagaatatgtggcaatgtcatctgatttctctcttttaagatctgaactctaattagcattcttggtaagaaatgtttctttactcactctacatttaataatacatatcgtttcctaataaataatgttgcacgtgaatctgcataataagtgcttttttaagtttcattgaacatgtgaaaatggagatctatatgctagatttcttcgaatcagtgtcataatataataaattcatttattatgtagccgctttgcgttgatatttaattgcttttgacggagtgttttacctctgtgtgttggttggtatgtgcagaaaatttacttgtactttaggggacacaagtaagagatatgaagtcaggctgtgctatgattacttttggggcacaagagatataaagcgagggtatgctgtggtcgtatgtggatgaatgttgatggtgccacgccctatctatggggtattatatatattttacaccttatgattgtgtttctcattttatgatattgtctaatggattttgatataatgggtttgtatgcattacaactgaggtagattctagggaattagttcttactggcatttagagtttaagagggaagtgttcaagtaagt

SEQ ID NO: 20270 - DNA, 1186 bp, Gossypium hirsutum
  Clone ID: GOSHI-09MAY01-C5409_1
cggacgcgtgggcggacgcgtgggcggacaaaaactggcctaactttggagataattttggatctgaaacagagagagagaagagagagtatgaatcgccaccacgatccaaaccctttcgatgaagaagaagtcaatccattttcgaatggtggttctgtcgcacctgcacgaccactggcatccgaacctttgggttttgggcagaaacatgatgctactgtggatatacctctggattcaatgaatgattctaagaaaagagaaaaggagctcgcagcttgggaagctgatcttaaaagaagggaaaaggatataaagagaagagaagatgctgtttcccaagctggtgtttctgtagatgataaaaattggccaccaattttcccgattatacatcatgatatagctaatgagataccggttcatgctcagaggctgcaatatcttgcatttgcaagttggcttggcatagttctttgccttgtttttaatgttattgcagtgattgtctgttggattcagggtggtggtgttaagatttttttccttgctgtaatctatatgttgcttggatgccctctttcatatgtgttgtggtacagaccactttaccgagcaatgaggacagatagtgccttgaattttggttggtttttcatgttctacttgctccaccttggattgggcattttggctgcaattgctcctcctattgtcttccatgggaagtcgttaactggtatcctggcagcaattgatgttatctctgatcatatgttggcgggggtattcttctttgttggttttgggctattttgcttggagtcactgctgagcttgtgggttattcagaaaatttacttgtactttaggggacacaagtaagagatatgaagtcaggctgtgctatgattacttttggggaacaagagatataaagcgagggtatggcggtatcgtgtgggggtgtatgttggtggggccacgccctatctatggggtattatatatattttataccttatgattgtgtttctcattttatgatattgtctaatggattttgatataatgggtttgtatgcattacaactgaggtagattctagggaattagttcttactggcatttagagttaagagggaagtgttcaagtaagtaatttcaaattctttattatcgc

SEQ ID NO: 20271 - DNA, 583 bp, Gossypium hirsutum
  Clone ID: LIB3585-045-Q6-K1-B3
ctgttggattcagggtggtggtgttaagatttttttccttgctgtaatctatatgtagcttggatgccctctttgacatgtgttgtggtacagaccactttaccgagcaatgaggacagatagtgccttgaattttggttggtttttcatgttctacttgctccaccttggattttgcatctttgctgcaattgctgctcctattgtctttccatgggaagtacttaactggtatccagccagaaatggacgttatttatgatcatatgcaagactgaggattcctttttgtatgacaacgactatgttgcttggagcctgtgctgagccagacggttatcatcaacactcaacatgactagaccgtaactaacgatgagatagttactgatgctaaggaccatgttatctagccggatatacaccaaaaaggccatgatgagaaaaccatttttcaccttaacccgtagagccgtttcgcatttggagttcccatggtgatgctggactcactggttgcaagattatcattgttactaatgaaggatggggtgctaatggagatggggctttctctggtaaa

SEQ ID NO: 20272 - DNA, 451 bp, Gossypium hirsutum
  Clone ID: LIB3189-046-P1-K1-B2
cgcgtacgcgtgcgtaaaagctgaactcactctatgagataattttggatctgaaacagagagagagagtatgaatcgccaccacgatccaaaccctgtcgatgaaaaagaagtcaatccattttcgaatggtggttctgtcgcacctgcacgaccactggcatccgaacctttgggttttgggcagaaacatgatgctactgtggatatacctctggattcaatgaatgattctaagaaaagagaaaaggagctcgcagcttgggaagctgatcttaaaagaagggaaaaggatattaagagaagagaagatgctgtttctcaagctggtgtttctgtagaatgataaaatttgccactaattgttccggttatacatcatgatatagctaatgtgataccggttaatgctcagatgctgcattatcttgcattcgcaagttggcttgtc

SEQ ID NO: 20273 - DNA, 403 bp, Gossypium hirsutum
  Clone ID: GOSHI-09MAY01-C5429_3
tgcaaacgattacaccgcatatgatcttgataattgggatggtgtggaccgataccattgcaatgccagggttagcaagcaagacctggctgatacatatgatgtgccattcaagtcttgtgtggtggaagggaaagttgcaagtgtaatgtgttcttacaatcaagttaatggcaagcccacttgtgctgaccctgatctactcaagggtacaatccgaggtcaatggggccttagtgggtatattgtatcagattgtgattcagttggggtaatgtatgatactcaacatttcacggctactccagaagagtctgctgcagctgccattaaagcaggtttggatttggattgtggaccatttttggcaatccacacagacttggcagtgaggagggggttg

SEQ ID NO: 20274 - DNA, 961 bp, Gossypium hirsutum
  Clone ID: GOSHI-09MAY01-C5429_2
gggttgctcttgcctggataccaacaagagctagttaccagggtggctcaagcatcgaaaggccctactattttggtattaatgtcgggtggcccgattgatgtctcgttcgccaagtacgatcgtcgagtaagtgccattttatgggccggttatccaggccaagctggaggaacagcaattgcggatattctatttggaacaacaaatcccggtgggaagttgccaatgacatggtatccacaatcttacgtagctaaagtaccaatgacaaacatgggaatgaggccatccccaggctatcccggaagaacctaccggttctacaaaggtccagtcgtgttttcgttcggtcacggcttgagctacacaaactttaaacaatcattagccttagctccaactgatctctcagtgctcattaacaccaatttatttgccactaaaaactactcaacattatcaagcaatgccattaaggtgaaacatactaattgtgattcactttcattacccctccacattgatgttgaaaacattggcaacatggatgggactcacactttgctccttttctccgaaccgcccgctgctgtaaaatggtcaccgaacaaacaattgataagtttccatagagtccatgtcattgctgggtcgaaacaacgagtgaaaatcaatgttcatgcttgcaaacaccttagtgtcgttgatgaattcgggatccgaaggatgccggtgggtcaacatagtttatacattggggatctaaagcattctatttctctccaagcaaatttggagggcatcaagaattagaggataattattatcggtattattattagttccactgcatttccaaagggaaaaaaaagtggtcataattgtacaagtttttaggcatttgagtcttcaatctattttgtttttgtttcttaaataaaagaacaaatattgattg

SEQ ID NO: 20275 - DNA, 1419 bp, Gossypium hirsutum
  Clone ID: GOSHI-09MAY01-C5429_1
gggcaagcccacttgtgctgacccaaacttacttaaacgcaccattctgtggcaatggcaccttaatgggtatattgtatcacattgtgagtccgttggtgtaatgtaggagactcagcatttcactgttacaccagcaagagtctgctgcagctactattaaagcaggtttggatttggattgccggccgtttttggccatatatacggatttggctataacggaggggtttgttaactgtaactgatgttgacatggctttagcgaataccgttactgtccaaatgaggcttggcatgttcgatggtgaaccatcagctcaaccgtatgggcatctcggtccgagacatgtgtgtaccccggatcataaacaactagccttggaagctgctaggcaaggcatagttttgttgaagaactctgggtctttgccgttgtctacttcacgtcatcgtaccatcgcggttattgggccgaattcagatgtcacggaaacaatgataggaaactatgcaggggtggcatgcgattacacgagtcccttgaaaggcatttcaagatacgtgaggactgttcatcaagtaggctgttcaaacgttgcttgcaaagcaaacaatctgtttggattcgccgaggtcgctgcccgccatgctgatgcgacagttctcataatggggcttgaccaatcgatagaagcagaattcaaggacaggaccgggttgctcttgcctggataccaacaagagctagttaccagggtggctcaagcatcgaaaggccctactattttggtattaatgtcgggtggcccgattgatgtctcgttcgccaagtacgatcgtcgagtaagtgccattttatgggccggttatccaggccaagctggaggaacagcaattgcggatattctatttggaacaacaaatcccggtaaattcgattcacttgctcaatgtcgaaaatatcaaactttttgaagctaactcaatgaattccacaggtggggaagttgccaatgacatggtatccacaatcttacgtagctaaagtaccaatgacaaacatgggaatgaggccatccccaggctatccggaagaacctaccggttctacaaaggtccagtcgtgttttcgttcggtcacggcttgagctacacaaactttaaacaatcattagccttagctccactgatcttcagtgctcattaacaccaattattgccactaaaactactaacttatcaagcatgccataggtgacatactaatggatcacttcatacccctcacatgtgtgaacatggcacatgatggactacacttgtcttctcgaccgccacttgtatgtacgacagcatgaagtccataacattcctcggaaaaacgtggaacatttgttgcaccttatgcagaatggg

SEQ ID NO: 20276 - DNA, 785 bp, Gossypium hirsutum
  Clone ID: GOSHI-09MAY01-C5749_1
ctttctctcacaaaccaatctaacatggctgacaatggttctcctgaagagttcttggccactgcagtcgacgcagctaagaaagccggcgagataatccgtcaagggttttaccagaccaagcatgtggagcataaaggccaggtcgatttggtcactgagaccgataaggcatgtgaggatcttgtgtttaaccatctcaagcagcattacccttctcacaagttcatcggggaagaaaccaccgcggcctgcggtgcatcagagctgaccgatgagcctacctggatagttgatccccttgatggaacaactaattttgtccacgggttcccctttgtctgtgtctccattagtcttacccttggaaaggttcctacagttggtgttgtttacaatccaataatggatgagctctttaccggtatacttgggaaaggtgcttttctcaatggatctcctattagagtgtcatctcaaacagaacttgtgaagtctctgcttgcaacagaggctggaacaaaacgagacacaccaactgtggatgctactacaaatagaatcaataacttacttttcaaggtgagatcagtccggatgagcggttcttgtgcattgaatctttgcggaattgcatgcggaaggcttgacctgttttatgaacttggatacggggtccatgggatgtcgcaactgggttttaatcgtaaagaagctggggcctcgtgtatgatccgtttggaaagattcgacatcacagtccacaggtcgcgttcgaatcgtct

SEQ ID NO: 20277 - DNA, 687 bp, Gossypium hirsutum
  unsure (1)..(687): unsure at all n locations
  Clone ID: AI055739.1
cctaatttggaaatcacccacaaattcaccatcggccattatttctttcactttctctcacaaaccaatctaacatggctgacaatggttctcctgaagagttcttggccactgcagttgatgcagctaagaaagccggcgagataatccgtcaagggttttaccagactaagaatgtggagcataaaggccaggtcgatttggtcactgagactgataaggcatgtgaagatcttgtttttaatcatctcaagcagcattacccttctcacaagttcattggggaagaaaccactgctgcttgtggtgcatcagagctgactgatgagcctacctggataggtgaacccccttgagggaccacctaatttgggcacagggttccccctttgtgtggcgtcccattggcctcactatgggaaaagtccccaccatgggtgtggttaacacccaaatagtgaaagactttccatggtggcctagaaaaggcgcttntctaacgggacccttataagagttcttttaaaccaactttgaaagtttctactttcacagggttgcacaaaccataaagtaacgggggagttctacaacgggacaaaaaatctcttaggggaaacctttggagggggtttgggcattcactttggaattttttaaaggttctttttataacattataggggg

SEQ ID NO: 20278 - DNA, 564 bp, Gossypium hirsutum
  Clone ID: LIB3543-048-Q6-K6-E1
catcttcttgccatttccattgatgggatttcaatttcttgttcactgttatcctcttttttgttttcttatataaattctatggatttcaggttctcctgaagagttcttggccactgcagttgatgcagctaagaaagccggcgagataatccgtcaagggttttaccagactaagaatgtggagcataaaggccaggtcgatttggtcactgagactgataaggcatgtgaagatcttgtttttaatcatctcaagcagcattacccttctcacaagttctttggggaagaaaccactgctgcttgtggtgcatcagagctgactgatgagcctacctggatagttgatccccttgatggaacaactaattttgttcatgggttcccctttgtgtgtgtctccattggtcttactattgggaaagttcctacaattggtgttgtttacaatccaataatggatgagctcttcactgctgtacttggaaaaggtgcttttctcaacgggacccctataagagtttcatctcaaaccgaacttgtgaagtctctacttgcaac

SEQ ID NO: 20279 - DNA, 393 bp, Gossypium hirsutum
  Clone ID: GOSHI-09MAY01-C5709_1
ccgtatcccggtcgaccacgcgtccgcccacgcgtccgttcatctccatttttcctttcaaaaatggcggcactcgttgcagggacgccatgggtgagaatcagagtaatccctgagttcgctcctccgctcattttccggcgccatttccgtcgaaatttctctgtgcgcgctccaattgacagtgatgcacccgtcagagtccgtttcgctccttctccgaccggcaatctccacgtcggcggagcccgaactgctctcttcaactacttattcgctagatcgaaaggaggaaaatttgtactgagaatcgaggatactgatctggagaggttgtcacttcaatcggggggggcggtgcttttattattatctcagctttgtcttttgtct

SEQ ID NO: 20280 - DNA, 1279 bp, Gossypium hirsutum
  Clone ID: GOSHI-09MAY01-C5729_1
gccgtccgttcctttctactatacgcattgtaagaacctaaagacacctgagacgtgcaactttgcactttgaatggcgcatatccatcacagcactaatcatgttccttctgaagacttggcgggcatctgcatttggagtttatggttacttgaatttcaccagaaatggcttcttgggacactccaagaaattcaaacccgaagatatggaaatacgaatagaggggaagaactgcgtggtcacaggagcaaatgctggcattggttttgctactgctgaggctcttgcatcatgtggagcaactgtctatatggtgtgtcgtaacaaggagaagggagaaaccgctctttctaaaattcagtcttcaactggcaatccaaatgttcatttggaagtttgtgatctttcgtccatcagcgagatcaagtcatttgcatccaggttctcttcaaaggatgttccggttcatgttcttgtcaacaatgctggactgatggagcacaaacgagttacgacatctgaaggatttgagttgaactttgctgtcaatgtattgggcacttatgccacaacagaattaatgttgcctttgctggagatagcttctcctgatgctcgagtcataacagtttcatctggtggaatgtatactacttccttgaccagtgatctacagtttagtgatggaaaatttagtggggcagagcaatatgctaggaacaagcgagttcaggtagcactaactgaaaagtgggctgagatgtacaagaacaaaggaattgggttttactcaatgcacccgggctgggctgagacacctggagtagctaaaagtttacctgattttaacaaatggttatcgggaaagctcagaactagtgaagaaggtgcggacacagttatatggttggctttacagcctaaagagaaactggtatctggtggtttctattttgatagagcagaagctcctaaacacttaaagttcgcagctacaaggcagtctcatgcaatcatagactccatttacgacactctacgttccttggtatagtctcaaaaaaacattagttcccaaccccaaattgttccaggaatctgcttgctgcatattgcttctgcgttatgctgtttatacgtatctttagctcataggaaggataatcagctttatgttataatgcttttcccatatgtgcattggtttagaatgggcactttgaaaggaactgtatatcaaattcagctatagcgaaaaagaagatctttttctac

SEQ ID NO: 20281 - DNA, 471 bp, Gossypium hirsutum
  Clone ID: LIB3583-029-Q6-K1-A10
cgtacgcgtgggcggacgcgtgggccaatttcaaggtctcctctctacaatgtaagaacctaaaaacaaatgaaaaatgcaactttgcactttgaatttcacatatccatcacagcactaatcatgttccttctgaagacttggcgggcatctgcatttggagtttatggttacttgaatttcaccagaaatggcttcttggaacactccaagaaattcaaacccgaagatatggaaatacgaatagaggggaagaactgcgtggtcacaggagcaaattctggcattggttttgctactgctgaggctcttgcatcatggtgttgattattttctgacctttttgcttgtttgatttattaaaaataaacttgcatgtacctgcattctgttttcctttttgaacatgttattatgatgcgtaccggaatgtagcaactgtctatatggtgtgtcttacaaggaaaatgg

SEQ ID NO: 20282 - DNA, 786 bp, Gossypium hirsutum
  Clone ID: GOSHI-09MAY01-C5649_1
aaactaaaatatctttcatttcttcttcaatggaggtgaagcaggtgggtccgtctcgtgtgggtcatggatccgtcgacccgaaacgtcaattgggttgtcttggcccggataatgacccgacccacttcttcttcttcttcttcagttattgagattttcccttttgatcccaacaccacttctctctcttcgtctccgttggctaggcatgagcttgaagaaagtgatggtgatccaataaccattgcagtgcacccaagtggagattgttttgtttgctctaccactaatggaggctgcaagttgtttgagttgtatggtcatagaaacacatttacagctgtccaccaaagagttacgctcctctcctagatgcgggcccgcaaaaatgcctagctttcagtgttgatggttctagatttgctgctggtggggtggatggacggcttagaatcttggaatggccaactctacgcatcattgtagatgaagtaagagcgcataaatcctttcgagatatggattttagcctagattctgagttcttagcttcaacatcaactgatggttctgcaagaatatggaagacagaagatggtgttcctttgatgactttagctcgcaactcggatgaaaagattgaattatgtcggttctccaaggatgggacaaaaccatttttgttttgcactgttcaaaggggtgataaagcagttactgcaagttatgacataagcacgtggaataaaattgggcataaaagattactcggaaagcctgctt

SEQ ID NO: 20283 - DNA, 560 bp, Gossypium hirsutum
  Clone ID: GOSHI-09MAY01-C5189_1
cccacgcgtccgcccacgcgtccgcttggaaaagtacagactgcatagctggctatgattggtcttccatccgttgcttcagctccaccggtgaagcatctaatgtagacgaatacctatggttgatggggagagcttgctacaagcctgtcattgaatattgtggtggcactgaaattggtggcggttttgtttctggatcatttctacagccccaatcattagctgctttcagtactccagttatgggttgccgtttgtttattcttggtgacgatggccatcctattccagaggatgcaccagggatgggggaactggcccttggtcctcttatgtttggttcttcaagcacactgctaaatgccagtcactacgatgtttactttaaggaaatgccttcatggaatggattggttctccgaaggcatggggatgtctttgagcgcacctctaggggatactatcgagcacatggtcgtgctgatgatccaatgaacatagggggtattaaggttagttcagttgagattgaacgcatctgcaatgcaattgatagc

SEQ ID NO: 20284 - DNA, 671 bp, Gossypium hirsutum
  Clone ID: GOSHI-09MAY01-C5149_3
ccccgcgtccgcccagcgtccgcgccgcgtccgagagagggagagtttgagagagaaagagcaaaacaaaaagaagaagaagaaaaaaaaagcagaagatattgttgggttattgaagctagctagctccacattttctatggcttcaaagcttcttttgattgctgtctttgttcttgatctcattgcttttggtttagctgtggcagctgagcaaagaagaagcactgccaagattgtccaagacagtgaagttaattataactattgtgtctatgactcagacatatcaacaggctatggtgttggtgcatttttgttccttatggttagccaagcccttgtaatggctgcaagcaaatgcttctgctgtggaaagggtttaaaccccagtggttcaagggcctgggcagtcatccttttcatagtctgctggtatgttaatttcatcaaatttatagccgtcattattgtagatttttgttgtttcattggttatttgaattttgtgtcacaggttgtttttcctgattgctgagatatgcttgctggccggatcggtgagaaatgcctaccataccaaataccgaaccattttcagcgagcagcctccctcttgtgaaactgtgaggaaagtgtgtttggtgcaggggcagctttcattttcttaa

SEQ ID NO: 20285 - DNA, 976 bp, Gossypium hirsutum
  Clone ID: GOSHI-09MAY01-C5149_2
cccacgcgtccgcccgcagaagagaaagaacaaagcaaaaggaaaaatagaagaagcctttgtttggggttattgaagctagctagctccacattttctatggcttcaaagcttcttttgattgctgtctttgttcttgatctcattgcttttggtttagctgtggcagctgagcaaagaagaagcactgccaagattgtccaagacagtgaagttaattataactattgtgtctatgactcagacatatcaacaggctatggtgttggtgcatttttgttccttatggttagccaagcccttataatggctgcaagcaaatgcttctgctgtggaaagggtttaaaccccagtggttcaagggcctgggcagtcatccttttcatagtctgctggttgtttttcctgattgctgagatatgcttgctggccggatcggtgagaaatgcctaccacacaaaataccggaccatcttcagcgagcagccaccgtcttgtgaaactttgaggaagggagtgtttggtgcaggggctgccttcattttcttgactgctattgtcaataagttctactatatttgctattcaaatgctagggaaaacagcttccggccatacggtggcggcggaaaggccggtgtcggcatgggagcctacaaataagctatgacctcatgaactctatgccattgacatcattttgcttactccgttgtctgttttttttctgttcttttttgagttccctttcgtgttctttaaggtttcgatataggagatagatcgtatttcatattatattcataaattttttaatttcattttcgtccccagtccaagattctgtaaaattttgtgaagtttcttgtatacaatcaaataacaaaaagattggcatttgttttccagctcctcatgcaatgctggttatgtacttttgcatgaatgacataatcttcgatgaggtttgcttgct

SEQ ID NO: 20286 - DNA, 645 bp, Gossypium hirsutum
  Clone ID: LIB3543-053-Q1-K6-D6
tgttgactaaattattgacaaccaagcttcaaaatcttgctttttgtttattgtaccctatatgatagtttaatataaagtatgatagctgatcttctaacaccttctagtattctaataaataatcaaagggtaaaagtctcatgaaggttcttgtactatgagtcagattgtattttgcctcttctacttaaaaaagggcaagttagtacctgtactttagatcaaagagtaaaatagttcttctgttaaaggtttcattcatttctactgttaaaaactagtctttgcacgtcagcacgagatacatgtggcgtttgctatgttagttgttaacaataaaaatggataaaaatttcaacatgaaagacctgtttgctctttaatctaacatataggaattagtatgcttattttctgagtagaggagacaaaatacaagctgattcataatataagggcctccatgatacttttatcgggatcaaaggtatatatccaacatgagaagaattttttattccgcttcaactcaaagcagctaacattgggtgcatgtttaatggcaggccaagattgtgcaggataatgaaattcaatacaactattgtgtatataactcagacatagcaactggctatggtg

SEQ ID NO: 20287 - DNA, 624 bp, Gossypium hirsutum
  unsure (1)..(624): unsure at all n locations
  Clone ID: AW186670.1
ggttattttgtgtatttagagagggagagtttgagagagaaagagcaaaacaaaaagaagaagaaaaaaaaaaagcataagatattgttgggttattgaagctagctagctccacattttctatggcttcaaagcttcttttgattgctgtctttgttcttgatctcattgcttttggtttanctgtggcagctgagcaaagaaaaagcactgccaagattgtccaagacagtgaagttaattataactattgtgtctatgactcagacatatcaacaggctatggtgttggtgcatttttgttccttatggttagccaancccttgtaatggctgcaagcaaatgcttctgctgtggaaagggtttaaaccccattggttcaagggcctgggcagtcatccttttcataatctgctggttgtttttcctgattggtgaaatatgcttgctgggcggaatggtgaaaaattgctaacattaccaattaccgaaccattttcaacgagcaaccccccctcctgtgaaaatgtgaagaaaagttttttttggtgcaggggcacttttcattttctaaattgccatggtccaccaatttccattatatttggctatccagtttctac

SEQ ID NO: 20288 - DNA, 590 bp, Gossypium hirsutum
  unsure (1)..(590): unsure at all n locations
  Clone ID: LIB3828-029-Q6-K6-A8
naaaaatttcaacatgnaaanactgtttgctctttaatctaacatataggaattagtatgcttattttctgagtagaggagacaaatacaagctgattcataatataagggcctccatgatacttttatcgggatcaaaggccaagattgtgcaggataatgaaattcaatacaactattgtgtatataactcagacatagcaactggctatggtgttggtgcatttttgttcctcatggctagccaagcccttataatggttgccagccgatgcttttgctgtggaaaggctttgaaccctagtggttcaagggcttgggcagtcatccttttcattgtttgctggttatttttcctaatagccgagatatgtttgttggcgggatcagtacggaatgcataccacacaaaataccggaccatcttcagcgagcagccaccgtcttgtgaaactttgaggaagggagtgtttggtgcaggggctgccttcattttcttgactgctattgtcaataagttctactatatttgctattcaaatgctagggaaaacagcttccggccatacggtggcggcggagaggctggt

SEQ ID NO: 20289 - DNA, 560 bp, Gossypium hirsutum
  Clone ID: LIB3585-037-P1-K1-C4
gttgggttattgaagctagctagctccacattttctatggcttcaaagcttcatttgattgctgtccttgttcttgatctcattgcttttggtttagctgtggcagctgagcaaagaagaagcactgccaagattgtccaagacagtgaagttaattataactattgtgtctatgactcagacatatcaacaggctatggtgttggtgcatttttgttccttatggttagccaagcccttgtaatggctgcaagcaaatgcttctgctgtggaaagggtttaaaccccagtggttcaagggcctgggcagtcatccttttcatagtctgctggttgtttttcctgattgctgagatatgcttgctggccggatcggtgagaaatgcctaccataccaaataccgaaccattttcagcgagcagtctacctcttgtgaaactgtgaggaaaggtgtgtttggtgcaagggcagtttttatttttttaaatgccatggcaaacaagtcttttttaattttcatattaaagtgcttaggacaaaaagcttccaagcttaacgg

SEQ ID NO: 20290 - DNA, 441 bp, Gossypium hirsutum
  Clone ID: uC-gsflnu33B115b01b1
ttgtttctataaacatgtcccagtggtgtttctgacgggccacccagctgttatggtgattatcaacctgtgctaaggcggattaagggctcatgaccctggtggcacatggcatgctgcagtgatcactttcatctgacagttgatttatttttgctatggcctcattgatttctgaggccggatcagaacggaatgcataccacacaaaataccggaccatcttcagcgagcagccaccgtcttgtgaaactttgaaagaaaaggagtgttgggcgcacgttctgacttaaccatcttgactgccattgtcaataagctctactatttttgctactgaaacgctaaggaaaacagctgccggccattcaacagcggcggacaggccaaaccccggctggtcaccaacaaataagctatgacctcatgaactttatgcca

SEQ ID NO: 20291 - DNA, 350 bp, Gossypium hirsutum
  unsure (1)..(350): unsure at all n locations
  Clone ID: LIB3584-011-P1-K1-G12
aaaaaaaaaatagaagaagcctnngctnggggnncttgaacttagctttccatatattcatccatggcttctaagcttcttttgattgctgtatttgttcttgatctcattgcttttgatttaactaaaacagctgggggggggggatttttttttttttngngcannanaannaaanncaanacaactatngngngnataactcanacatancaactgnctatngtgttggtgcatttttgttcctcatggctagccaagtccttataatggttgccagccgatgcttttgctgtggnaaggctttggaccgtggtggttccngggcttgggctgtcttccttttcttt

SEQ ID NO: 20292 - DNA, 1521 bp, Gossypium hirsutum
  Clone ID: GOSHI-09MAY01-C5169_1
cggcgcgtgggcggacgcgtgggcggacgcgtcggctgcctcctttcctttcttggtgtttaattcatgttgaatactaaaaaaccagtgtaaaagttttgtgtttatggtttagtatggggagagatggacaaagaaactaataaccaagaaaacccatctctcctctctaataataacaccaacaaagaagactgttcccctaagaaacaccctggaagctccactgtcactggcggtggaggcgggagtaatgataggctgaaacgcgatgaatggagtgaaggggctgtttcgagcttactcgaggcctatgaaaacaaatgggtgcttagaaacagagccaagcttaaaggccatgattgggaagacgttgcacgttatgtttcggctcgagccaattgtaccaagtcgcccaagactcaaacgcagtgtaagaacaagatcgagtccatgaaaaaacggtatcggtcggaatcggccacggcggagggatcgtcttggcctttatatccacggcttgatcttttattacgtggtaacgctgccgctgctgctgctgcaccgtctcctccaccattacagccgctgcctccgccaccgcagcagctgcatctgacagcaatggttcaaccacaaccacctggccctctttttactaaccttcccttgacgttaccagaagcgtccacgctggtggtgctgcaacaacaacaacaacaacaaccaccaccgccactaccaatagctgctccgccgcctgctttggctcctcagggtctgggaactgcacagaattcacacggttccaatggttttgaaaagatacccaaggatgacggagccggaacgaaagtatcggaccatctatcggacaaggtagccatagagacagatagtagtacaccgggtctttacagtgacaaggaaaagctaagatcgaagaaattgaagatgaaaacaatggagaataagaagaagaaaaggaggaaaaaggatgagtatagagaaataggggagagtatccgaatactagctgaagtagtattaaaatcagaagaatcaaggatggaaacactaagggaaatagagaaaatgaggattgaagctgagactaaaaggggggaaatggagcttaaaagaacagagatcatagccaatacacaattggaaattgctaagctctttgctggatcaagtaataaagggatcgatccttcgttgaggataggaagaagttgacatacatatgcgcgaatgtgtatgtatgtgtaggtttagggtattgacaatgaaacaatgtgggaaggtattttaacttgtaataatagggtagtgggttgttgatctaaattatgtaaccggtacaatgcagtgtgaagatgactttcatgttgcgtaatgaccccttttcttacaactatgagactaattaattagctaatgataatttgggtgggggaagtttggtaattcctagcttctgtgaaaggaaatgaaattttatccttttttactttt

SEQ ID NO: 20293 - DNA, 574 bp, Gossypium hirsutum
  Clone ID: LIB3584-034-P1-K1-D1
cccacgcgtccgcccacgcgtccgcccacgcgtccgcccacgcgtccggaaactaataaccaagaaaagccatctctcctctctaacaataacaccaacaaagaagactgttcccctaagaaacaccctggaagctccactgtgactggcggcggaggcgggagtaatgataggctgaaacgcgatgaatggagtgaaggggctgtttcgagcttactcgaggcctatgaaaacaaatgggtgcttagaaacagagccaagcttaaaggccatgattgggaagacgttgcacgttatgtttcggctcgagccaattgtaccaagtcgcccaagactcaaacgcagtgtaagaacaagatcgagtccatgaaaaaacggtatcggtcggaatcggccacggcggagggatcgtcttggcctttatatccacggcttgatcttttattacgtggaaatgctgccgctgccgctgctgctgctgcaccgtctcctccaccatcactgccgctgcctccgccaccgcagcagctacatctgtcagcagtggttcaaccacaaccacctggccctcttt

SEQ ID NO: 20294 - DNA, 553 bp, Gossypium hirsutum
  unsure (1)..(553): unsure at all n locations
  Clone ID: LIB3828-014-Q1-N6-G4
tntttttttttttatttttatttttttatttttttttttatttttttttatttttttttttttttttttggacaaggccaacagcaagatcgaaaaaattgaaaatgaaaacacggggaaataaaaaaaaaaaagggggaaaaaggaagagtttagaaaaataggggagagtttccgaatcctagctgaaggggttttaaaatcagaagaatcaaggggggaaaccctaagggaaatagaaaaaatgggggttgaagctgaaactaaaaggggggaaagggggcttaaaagaacagagatcatagccaatacccaatgggaaattgctaagctctttgctggatcaagtaataaagggatcgatccttcgttggggataggaaaaagttgacatacatatgcccaaatgggtatgtatgggtaggtttagggtattgacaatgaaacaatgggggaagggaatttaacttggaataataggggagggaggtggtgatctaaattatgtaaccggtacaatgcagggggaaaatgactttcatgttgcgtaatg

SEQ ID NO: 20295 - DNA, 1014 bp, Gossypium hirsutum
  Clone ID: GOSHI-09MAY01-C5109_1
gcgttcgcaaaatcctcctcattacttcaggcaattagcacatacacttcaaggcttaaaactttgatttctagagaaatagaggaagtcgacgttagagctgacgctgaagccttaaggtacaaatatgagaacaacagagttatggatgtttcctctccggatgtgagctcacccttaaatcaactttatggtaatgagaagataggaatggatgtactttctagaggaatgcaaaatcaacttcttgaaagacagaaagctcatgttcaacaatttttagctactgaagatgctctcaacaaagctgcagaagcgagggacttgtgtcaaaagcttataaaacgtctacaaggaggtagtgatttagttccttcacgttctcttgtcggaggtgcaacacagaaggttggcagtcttagacaatttgagttggaggtttgggccaacccacgcgtccgtgctgggttaaaggccagcttaaatacactaatgtctgaaatacaacggttgaacagggtgtgtgcagagaggaaagaggcacaagattcattaagaaagaaatggaagaagattgaagagtttgactcccgtagatccgaacttgaatccatatatactgctctcctgaaggctaatatggatgcagctgcattctggaaccaacagccattggcggcgagggagtatgcttccagtaccattattcctgtttgcaatattgttgcagacatttcaaacggtgcaaaagagtttattgtcaaagaagtttctgcattttatagaagtcctgataatagcctctacatgcttccatcaagcccacaggctcttctagagtccatgggtgctaatggatctacaggacctgaagctgtggctgcagcggagaaaaatgctgccttgttgactgcaagggctggtgccagggatccttcggcaattccatccatatgtcgtgtttcttgctgctcttccataccctgctggtttggagggttcggatcctgtttg

SEQ ID NO: 20296 - DNA, 862 bp, Gossypium hirsutum
  Clone ID: GOSHI-09MAY01-C5089_1
ttttattatttcacacaaaaaaaattctttgttagatgtgtatttccccccttttgtggattctgtcatggaattagtaagccgtacatcttcactgaagttgaaacatgattgtatgaactgaaaaaagaggagaaaatttagggttagggttcgtgagatatacccatggattaaggaggaaagggggggggatatcgaatgaaattgacgatgggaccaaagcttcatcgttgaaaaggcggtgcccgccgcgccggccgaccgatgatgatgataattgctatgaaaaatctgctctcgaattacttccgcaagatattattattaagattatttgtggtgtggatcatgaagatttgaaacggcttcctattgtttctaaatcaatcagagaagctgctatggttgcaaagcaattgcattttgcatatagtacaccaacaaaggtgaaagcttttaaaacatcaatagatttcgatgaacaaagtgaatcaaacgacttggaacttgaagctccaaatgcacctcaacaatggcggtcacacaggtcaatcaacaagaaaaaacttgcagatatatcaatacaattgtttttgtaaatagcttgttgtttgctattaaatcagtgcattacaagccattattttcttcaaagttttcattgaagaatgggaatttttggcttgtttttatgcatcttgttgtacaaaaaaagaagaaagggatagtatttgtttgaagggtcgtgttcttgacccttccgatttgattaaaaaaaaagagttaagcttaataaagatggttcatattcaatcttaaaaaaaaaaaaaaaaaaaataattaattttttttttttttt

SEQ ID NO: 20297 - DNA, 409 bp, Gossypium hirsutum
  unsure (1)..(409): unsure at all n locations
  Clone ID: LIB3584-031-P1-K1-B4
gcgcagagaagctgtaagtacaaaatatttcaattcaattcattttttcttatttctttaaccatttaatctggttattggctgtgattattcttatttttctgcangctatggttgcaaagcaattgcattttgcatatagtacaccaacaaaggtgaaagcttttaaaacatcaatagatttcgatgaacaaagtgaatcaaacgacttggaacttgaagctccaaatgcacctcaacaatggcggtcacacaggtcaatcaacaagaaaaaacttgcagatatatcaatacaattgtttttgtaaatagcttgttgtttgctattaaatcagtgcattacaagccattattttcttcaaagttttcattgaagaatgggaatttttggcttgtttttatgcatctt

SEQ ID NO: 20298 - DNA, 1037 bp, Gossypium hirsutum
  Clone ID: GOSHI-09MAY01-C5059_1
ctcaacttaaagaaaaagtgaagatgaccagatgggtaagtttaattgtatccagaaactgaaaaatcagcagcagcaggcaagtgcgagtagatcaatagataaagcatcaaaaggaacaaattcaagcaatcactcaacaaccatgtcgattgggaattcaagcaacagtgtttcaaagctatctgcgaaggctaaatatgggtttattgatgataacttctcaacccttcaccaggttacagcagcattaagaggttctggtcttgaatcatctaatctcataatcggcatcgatttcaccaaaagcaatgaatggacaggccaagtatcattcaataaccggagcctacatgcaattggtgctgcaccaaatccatatgagaaagccatctccataattgggaaaactctagctccattcgatgacgacaatttgataccgtgcttaggttttggtgatgcaactactcatgatgatgaagtgtttagctttcacagtgatcactcatcttgccatggttttggagaagttttggattgttacaagaagatagtcccaaacttgagattatctgggccaacatcatatgcacctgtaattgatgctgccattgacatagtggaaagcagtggtggccaattccatgggctggttatccttgcagatggccaggtcaccacgaagtgttaatacaagtaacaatgaaatgagtccacaggaagagaagacaatcaatttcattggtaatgcaagctcacacccacttgcgattgtactgggttggtggcgatggacctggaagatgaagaaattgatgatagatccctgacgtgacttcgacaatttagtcgttacttaccgagtaatgcgaaaactcagtccgatgaaagaactggtttgacttgtgtattatgaaacgttcaatcaggtggttgactggttatgccccaactgaaacaaagaggccctcctccgttctcatgtctgtttggatttgtctctatattattctgtgtgtattatgcttatgaag

SEQ ID NO: 20299 - DNA, 740 bp, Gossypium hirsutum
  Clone ID: GOSHI-09MAY01-C5009_2
tgatgatgaagctttggtcatctatgaaaagctcttctcaaatgcatgtcccaagttcattacaccttcagctccgagcttttaggacgccccttgtaaattacaaccaggatgcttatagacttcagttgaagctgtttctatatgaagtgaagcaacagcagttgttatcaggtgttcggacatttcttaaagtgtattcaactatatctcttgggaagctcgcaaattacttggaagtggatgagcccactctgaggaccatcttattgacatacaagcacaaaactcatgctgttgattctgatggaaagattatctctaatgctgatgtggacttctacattgatgatgacatgattcatgttgttgaatccatgccagtgaaaagatatggtgattatttccttcgacagattgtcaagcttgaaggagtgatcaatgacatggatcggataaagctggaatagatgacctacttgattattttattacttgtactactttagcgaaggatttattttatttaaatggcattttgatgcccattttgtcttggaatgggtagaatctcacgttaagatatataaatggttcctttttgagagcactgtgagaggggatttatgcatttgcgggcttgccagaaaatttttgttgcgactgttgctttgtttgttattctttaactttgggttagccctatattcaaaatattgatgtgatggatcatagtcatc

SEQ ID NO: 20300 - DNA, 1739 bp, Gossypium hirsutum
  Clone ID: GOSHI-09MAY01-C5009_1
cgtgccggactggccgcggtacagacccacgcgtacgtacaggtagcttcaacgatggcagccaactacgattacgacgaggctccagccacctacgacgatgccaaccgccaagagctcggctacgacccgaacttcgttcccgactccgttaagtcgttcgtagtccacctttaccgtcacattcgtgagaaaaacgtgtatgagattcaccagatgtacgagatctcgttccaaacactctccgaccgtctattcaaagacactccttggccttcagttgacgcagttgctcattacgtcgacaacgaccaagttttctgcctcctttaccgtgagatgtggtttcgtcatctctatgctcgcctttctcccactctcaagcagaggatcgattcttgggataattattgtagcctctttcaggtggttttgcatagggtagttaacatgcaattaccaaatcaatggctatgggacatggtggatgagtttgtataccaattccaaagtttctgtcaatacagggctaaaatgaagaacaaaactgagcaagaaattgctcttctccgccaatttgatcaggcatggaatgtgtatggggtgctcaattacttgcaagcatttgtcgagaagtcaaatattattcagatattggagcaggagaaggagggtcttgagcaatttactgctactgatggatatgattacagtggtggaagcaatgtgttgaaggtgttggggtacttcagtatggtgggtttgttgcgagttcattgtcttttgggtgattaccaaaccgggttgaagtgcttgcttcctattgacatcagtcaacaaggtgtttacaccagtgttataggaagtcatattgcaaccatatatcattatggttttgccaatctaatgatgcggaggtatgtggaggctattcgcgaattcaataagatgctcttatatatttacaagacaaagcaatatcatcagaaatctccacagtatgaacaaatattgaaaaagaacgaacagatgtatgccctgctggcgatttgtctttcactttgtccccaagtgaaacttgttgatgagactgtgaactctcagctgcgagagaaatatggtgaaaagatggctaggatgcaaagatatgatgatgaagcttttgtcatctatgatgagctcttctcatatgcatgtcccaagttcattacaccttcagcgccgagctttgaggagcccctcgtaaattacaaccaggatgcctatagacttcagttgaagctgtttctctatgaagtgaagcagcagcagttgttatcaggtgtccggacttttcttaaagtgtattcaactatatccctaggaaagcttgcaaattacatggaagtggatgagcccactctgaggacaatcttgttttcgtacaagcacaaaactcatgccgttgattctgatggaaagattatctctaatgctgatgtggacttctacattgatgatgatatgattcatgtagttgaatccaagccagttaaaagattcggtgattacttcctgcgacagattgtcaagcttgaaggagttataaatgatatggatcggatacgtttggagtagacttggctgcctacgtatctccgctccggcttgattgttttacttttactcggcagaaatttatgcgatatgtatggcatcttaattccccttttgtcaattaatggaattttggtagcttc

SEQ ID NO: 20301 - DNA, 683 bp, Gossypium hirsutum
  Clone ID: GOSHI-09MAY01-C5399_1
aaaatacaaaacaaaaacccatattgtagcttccaccatcttgctttcatccccctgcttgctttctctcaacaatatcaactgaattatcggccgacaggtatttctcccaatacccaattcttcggagcatccggagagcccagaagataagttgtttccggcttcctcctatttggtcaaatttgtaaagggaaagggtggacggtagagatgccaatggcggcgggggcagcgacgccgagggaaagggttcaagctatggggccagcagcggtggtaccgatgatgcaagctgtgccggctgttgctgatgttttggccaaggacacgatcatttcttggttccgaggggaattcgcggcggccaatgccatcatcgatgctctttgcggtcatttggcgcagcttcaaggagggggcggtgaaggatccgagtacgaggcggtgttcgcggcgatccacaggaggcgcttgaattggattccggtgttgcagatgcagaagtaccactccattgctgatgtgacggtggagctgaaacaggtgactgccaagaagaccggaggaggagatggaattggcaaggaggaagtggaaggtggcggtggcggacgatgaaaatacagctgttgtttgtatgatgagaaagatgacgagaaagccgccgaggaagtggttga

SEQ ID NO: 20302 - DNA, 663 bp, Gossypium hirsutum
  Clone ID: GOSHI-09MAY01-C5389_1
taagagaactcatcaatttttatatcataacaatttatttatgttccctgaatatttaaagaacacataatgagttagtccccccagttagctaatagaagtttgtttctttaaaaaaagaaaaaggggaaaatattgactcactcaactcaattgcctacaaaatttttatccctccccacttttttaactaacaccaacatacactaagctgaatgaagaacctagtaaacatgatcgtaataatatcataagccaacccactcttaaagaatctcccaccttaccccctatacaatgccaacattttgttgtttttcctatagctacatccacacactcgcgtggggtttcgaaaacccaacacttcgtctcaaatcatacttctatccttagtcgtctcatttcagctcgaaatatgggacttaaattcagagttcgtcgagcaagacttcttatgtcttctcgagaacaatcccgcgatatccggaccagctcccaaagggcacctccacttatcatgtcctttgcgtttacttcatgttgcgctaaatgacatagtgcaagctcaatgtgtctcctaataggtgaggaatcattgttagcgttttgcacaatccatggaagcgcaccatcatcaataagaaccgatctcccactttt

SEQ ID NO: 20303 - DNA, 689 bp, Gossypium hirsutum
  Clone ID: GOSHI-09MAY01-C5369_4
ttgtttacctctttgacggaccagcaccagtccctatggaaaaatctgccgtgagtactgattcaacagatgttgatctatttgctgatgcaacttttgtgtcagcaccgaccaaggtgactcatgaatcaagtcctcaggcacagcaacaagttgatctatttgcttcccagcctgccattactcctgcagcctctccaactgttgacatatttgctgccggtgatccagttgtgcaaccacacataaagggacaggttgatttattcgcttctcagcctgccattactcctgcagcatctccgtccgcgggccccgtcgcctccgctgatccagttgtgcaaccagccatggcagcaaacgttgagccagtaaatgctagcattgttgatccatttgctgctgttccgctgaacaattttgatgggtctgacatttttggttcattcccaaccccctcggatgctgctttcctagtaccataacaaaaccccatgaatgatggaaaccttaataaaataagcttctaagtgatacctagactattaccattctcaggataggctttatgctgaggttaacattagtggaattaacggtgaagttatgcctggacaatgggaatttcaagttggtccatctgttggaatatctgaacgtgatcaaatattgtttgcacgatacatact

SEQ ID NO: 20304 - DNA, 657 bp, Gossypium hirsutum
  Clone ID: GOSHI-09MAY01-C5369_3
gcggagctgctgctcatactaagtacagcacaaagtcaatcataaatgatggtccgcatacaacgttatcgggaatgtggtcgatatgtcaggtcgtgcgccacaaacatcatattgccgcctacagagagtgtaacgagagacgtctaactggtcatcatgagactgcagatatcaactcattctcatgctgcgttgcaaacacaggagcctccatccgtgtaggtcgtgacactgacaaagatggaaatagctaccccgctcgctcgcccccgcctccgaacatggatccttacgttgttacatcaatcattgccgagaccaccattctctgcaagccttaagagggggtggacattgaaggcttgtgaaagacgagacaggaaaaacctcattcagattaataaaaccccctctctcatctttctttgctggcccactggttgaacttgtattttattgctttggttcgctggtttgcaatttaaattgtgcgacttcttattattattatcattttagtttatagtcttatgctgctgctgatatgttcacatgaacgaatttatcgtgttttaaataaaattgtagttgattgttcgcacccaaaaattatctaaaagcctttgacaaactttatacttatattctaaacat

SEQ ID NO: 20305 - DNA, 680 bp, Gossypium hirsutum
  Clone ID: GOSHI-09MAY01-C5369_2
cccacgtttccgcccacgcgtccgcccacgcgtccggccacgctttcgctctcttcttaggtctgctgtatcttagttcttgattaattagccaatcacagcagccatgtctctcctcaatgatctcatcaacctcaacctcagcgacaccactgaaaagatcatagccgaatacatatggatcggtggatctggtatggatctgagaagcaaagcaaggactttgcctggaccagtgacggacccttcaaaactcccgaagtggaactacgatggttccagtaccaatcaagcacctggagatgacagtgaggtcattctttatcctcaagctatattcaaggatccatttagaaaaggaaacaacatcttggtgatgtgcgatgcttacacaccagccggcgaacccattcctaccaacaagagatttaatgcggccaagggctttagccaccctgatgttgttgctgaggagccttggtatggtattgagcaagagtacactcttcttcaaaaggatactaagtggcctcttggatggcctgttggaggattccctggaccacagggaccgtactactgtggagtacgggctgacatgtgctttcaaccggacatattgatctacattttacaggcattaacttatgctggtagtaacatcagtggaaccaacggtg

SEQ ID NO: 20306 - DNA, 1537 bp, Gossypium hirsutum
  Clone ID: GOSHI-09MAY01-C5369_1
ctttgattataatttttccacgaatatttttccgacttttttgttttccttttggctatttaaaaagtccaccaaacaggtctttccttcacccccaccttctctccctctcttcttaggtctgctgtatcttagttcttgattaattagccaatcacagcagccatgtctctcctcaatgatctcatcaacctcaacctcagcgacaccactgaaaagatcatagccgaatacatatggatcggtggatctggtatggatctgagaagcaaagcaaggactttgcctggaccagtgacggacccttcaaaactcccgaagtggaactacgatggttccagtaccaatcaagcacctggagatgacagtgaggtcattctttatcctcaagctatattcaaggatccatttagaaaaggaaacaacatcttggtgatgtgcgatgcttacacaccagccggcgaacccattcctaccaacaagagatttaatgcggccaagatctttagccaccctgatgttgttgctgaggagccttggtatggtattgagcaagagtacactcttcttcaaaaggatactaagtggcctcttggatggcctgttggaggattccctggaccacagggtccgtactactgtggtgtaggtgctgacaagtcctttggtagggacatcgtggactcccactacaaggcttgcctttatgctggcgttaacatcagtggaatcaacggtgaagttatgcctggtcaatgggaattccaagttggtccatctgttggaatatctgcaggtgatcaaatatggattgcacgatacatactcgagcgaatcactgaaatcgcaggagttgttctttcttttgatcccaaacccattccgggtgactggaatggtgctggtgctcatactaattacagcacaaagtcaatgagaaatgatggtggcatcgatgttatcaagaaggcgattgagaagttgggtctgcgccacaaggagcatattgccgcctacggagagggtaacgagagacgtctaactggtcgtcatgagactgcagatatcaactcattctcatggggtgttgcaaacaggggagcctccatccgtgttggtcgtgacactgagaaggatggaaaaggctacttcgaagacagaaggccagcatcaaacatggatccttacgttgttacatcaatgattgccgagaccaccattctctggaagccttaagagggggtggaaattgaaggttgtgaaagacgagaaggaaaaacctcattcagattaataaaaccccctctctcatctttctttgttgggccactggttgaacttgtattttattgctttggtttgctggtttgcaatttaaattgtgcgacttattatttaatcattttagtttaaagtcttatgctgctgctgatatgttcacatgaacgaatttatcgtgtcttaaataaaatggttagttgattgttcgcccattaaaaaataagatataacaacaatactattgctttttaaacgg

SEQ ID NO: 20307 - DNA, 929 bp, Gossypium hirsutum
  Clone ID: GOSHI-09MAY01-C5309_1
gtatttcccagcaacaatggcaatggttttatggcttcttttttctccttttctgttcttatctgtttctgtcaacactcaaaccaaagtaaccgataaccctgcggatgaattggtggctgcgcttaatgccaataggacagctcacaagtcatcggctctcaccgacaacccaggcctggcctgcattgctttgcagtatataaaagcataccaaggtgactgtaaagctgtaggagaggccaagaagcccgctgactctgaattttctgaaacttttgcccccaactgtggtgtggaagcctcaaccctctctccaatcactggtcgtttacttggatgccaatcgaaatatgtagagccttctgaagctttctcgatgttgatgaaaaacgagaagagtttggaaattctttacaataagaaccacactgaagttggggctggtgtgaccggctccgatggtgggggtccctatttctggtgtgtacttttcagcaacggcaagcataacagtagctttgttgcacaaggtggtgtggctaaaatctcgagaccgggatgctttagtggtgccaatgatgaatgcagcggtgctaatgatttatctcgacttcatcacatgtggctgtacgccgtaacagctttcgttgctgcaggatatgccttcggaatatgatcatatcctatagtatccgaactctttatcattagattgttcattctgaggcctgcttcagtccattgccatatatagctcagcctctctagtagttttttcgaggggtttatatattggtataattttattgatttgtttcttttttcacattgagcaagtttcacactgtgccattgaattctccagtttcatgtgtcaaccttcaaattgagtgaacctacttggaatgacaattactttttttttc

SEQ ID NO: 20308 - DNA, 602 bp, Gossypium hirsutum
  Clone ID: GOSHI-09MAY01-C105232_1
gtaaataatataattatgacaaaacctgtgagcctatacttttattgaaaagaagatgtgtttatattttaaagctaaaatacatttagctgctgctgtatttaacaccagttgacagtcatatgatcatcttcaacccagagctacttcatttcctcttgccgaacaacccgagttccactcttcgatagtagtagatccttcatttctctgtagctgttgagctcttcgagcgcatctgccgttttacgcggcataaaaaatccagaagcgatactgacacctccctcatattcagtccttaatgaatgtgtcgaatagcaactcgagtcttgtcggagaggcggtgctgttctaagcatttgaacaagaatgccaacagcagcatcttgtgattttttaccaaccagatttgactgtgcagtgaattctgaagcctttttcccctctgtgttttgactggatgaatcagatacatcgacatcatcaccatcaaaagggcaagagagctcacaatcatccatgtcatcctggaaagatagtctactagagcttctagagaatcccatatgaggtgatccactagaagacatcaatgcaga

SEQ ID NO: 20309 - DNA, 771 bp, Gossypium hirsutum
  Clone ID: GOSHI-09MAY01-C6989_1
cccacgcgtccgatcaaatcaaaacagaacttccaaagctttcagacaagactagtgattcgtgttcaaagaaccaaacaagccaagtacatggttgatttggacgttcagatccctacaactttcgatccattcgccgaggctggggaatttgatggcactggaaccaaggagtatgttcatatacggattcaacaaaggaacgggaagaaaagcttgacgacggttcaaggcctgaggcatgacctgagctacgagaaaatcctcaagagtctcaagaaggacttttgttgcaacggcaacgttgttaaagacaaagagctcggcaagatcattcaactccaaggcgatcaacgcaagaacgtgtcgcagttcctcgttaatgccggcatcgtcaagaaagaccaaatcaagattcatggtttttaaggataacccaagttgctatttatgaaaaaaaaaatcagcactgttccttttttagcttaaataaaacactagtgctgctgtctctctaatttatacacccttggtggttttaaactgtcatggaatatgggatttctttaataaaaaatgggttttttatttgctctacaaataataaagatgagtcaaaaaaaaaacaaaaaaaaaaaaaaaaaaaaaaaaaaaaaaaaaaaaaaaaaaaaaaaaaaaaaaaaaaaaaaaaaaaaaataaaaaaaaaaaaggggcggccctttaaaagaatcaaagtttacttccccgtgcttgcaacgaaaaattttttt

SEQ ID NO: 20310 - DNA, 308 bp, Gossypium hirsutum
  unsure (1)..(308): unsure at all n locations
  Clone ID: LIB3148-016-Q1-K1-C4
cccacgcgtccgcccacgcgtccgcccacgcgtccggttcctcgttaatgccggcatcgtcgagaagagaccaaatcaagattcatggtttttaaggataacccaagttgctatttatgaaaaaaaaaatcagcactgttccttttttagcttaaataaaacactagtgctgctgtctctctaatttatacacccttggtggttttaaactgtcatggaatatgggatttctttaataaaaaatgggttttttatttgctttncgaaaaaaaaacanntatnaaagacaaaattaagggaaaaagaaa

SEQ ID NO: 20311 - DNA, 654 bp, Gossypium hirsutum
  Clone ID: GOSHI-09MAY01-C6949_1
gccacccattcccctcccatcctggccaaaggcatcgcaacaccatcctcatctcttttcacttgaccacctgaaaagagaagctagaaatagagaggagaaatgatgcaatctcgctttacctctgttgttcgtgccatatcatccgccgcaaaggcaaggcccttctcatccaccatcgattcacctacccccaccaaacccgatttccctcccacccttgctggcctccgggcccgccttgccgccgaatctcccaccctctccgattttttcggtctccaaaccaataacctctattcggtcgaagtcggcaccaagaaaaaaccgctccctaagcccaaatggatgagagaatccattcccggcggcgaaaaatacgttcagattaaagccaaattaagggaattaaaactccacactgtctgcgaagaagctcgatgccccaatcttggcgagtgctggtccggtggcgagactgggaccgcaactgccaccataatgatcctgggtgatacttgtactcgcggttgcaggttttgcaacgtgaagacgtcgcgaacgccgcctccaccagatcccgatgaaccgaggaatgttgcggaggcaattgcatcgtggggtttggattacgtggtgattacgagcgtggac

SEQ ID NO: 20312 - DNA, 435 bp, Gossypium hirsutum
  Clone ID: GOSHI-09MAY01-C6919_1
cccacgcgtccggttttaaacctttccttgcttgtataagcatacctaaatgtagcaatgacaacaacaacctcagctacactctctccacccacattggctgctgccagtgttggcaatcccaggaggagaactaaagttaatgtaagttacattataggattgaattcctttggtgggctaaaagctcataacaatgtgatctcactaggccaaccagtgtgcattgaacgatcatttgcaaaggttgtgagctcactcagagctccatccaaggggaaaggtagtggcggcggtgccctctcttcaacctgcaatgcaattggtgagatatttaggattgcggcaatcatgaatggacttgttctcgttggtgttgctgtggggtttgttctccttcgaattgaagcatctttggaagaggctgagtgagaa

SEQ ID NO: 20313 - DNA, 930 bp, Gossypium hirsutum
  Clone ID: GOSHI-09MAY01-C6879_1
atttcttgcgcgtccgttgtctccttgtcattagtttctgttactacttcactctccctctgtcttcaagaaatggatcgtagaagtgcatttgcagttgctttgatttgctttgtggtgaccgctgtcggtggtcaatctccggcagcctcacctactaaagctccgccggccgcgactactcctgctactgctcccgctactgcccctgttagcaaacctaaatcaccggctccaactgctgcccctaccacttccccaccaacttcttcaccaccggctgcggctccggagaagtctgcggcggttccagccccatctaaatctgctccggcttcttctcctccggctgctgctccggtgagttctccaccggctccagtacctgtgagctctcctccagccaaatcgcctcccgttgctgcaccgacgactccaccagagagctcggcctctcctccggctcctgttgcggcaccaactactgctgaggttccggccccagctccaagcaagagcaagagcaaaagcaagaaatccaagaaacaccatgctccggctccttcacctgatatgcttggacctcccgctccaccaactggagctcctggacctagcctcgatgcttcctctcccggtccatctgtcgctgccgatgagagtggagcagcggcaatgaagaacatgaagaagataattggagggttggcgttgggatgggcagccattgctttgagcttctagattggttttgatcacattccacattctgcgttgtaattctttggctggtgtactgagaggcggaaactctagttttttttttttcctctgtaatttccactattcttgttttttcccccttcatttacccattttctgtcttttatttctcgattatattttaataaaatcacaatttattttact

SEQ ID NO: 20314 - DNA, 373 bp, Gossypium hirsutum
  unsure (1)..(373): unsure at all n locations
  Clone ID: LIB3149-022-Q1-K1-F5
ccgactccttcacctgatatgcttggacctttcgctccaccaactggagctcctggacctagcctcgatgcttcctctcccggtccatctgtcgctgccgatgagagtggagcagaggcaatgaagaacatgaagaagataattggagggttggcgttgggatgggcagccattgctacgagcttctagatttggtttgatcacattccacattctgcgtggtaattcttcggttggtgaactgagaggcggagacactagtattattgcttttggaanttccgactattctggttatagatgtgcaattacccgaagtcatgactttaaaattcgatgatataagaaatatacataacgccattactattct

SEQ ID NO: 20315 - DNA, 942 bp, Gossypium hirsutum
  Clone ID: GOSHI-09MAY01-C6599_2
ttcttacgcgtccggtcatttgtccgcccacgcgtccgatttgcttctataggggtttctcaaaatccgcgaacgtagattcggatcgtaagaggaagaaatcttcgatctcatccgcagatcgaacggcggcgaaggagggcgaaaaacataaagataaagctcccacttcctccaccaatcaccaccaccaccaccaccaccacaaaacttaaaaacagcaaagaagatgtcatcatcaacggcggccaatcaagtgagggcatctcacatactcatcaatcaccaaggctctcgtcgtaaggcttcttggaaggatccagaaggtcgcgtcatctccaccaccacccgagacgccgctgtctcacagcttaaacttctcggcgacgacatcgtttccaacaaggctaagttcgacgaggttgcctctcgctactcggattgcagctccgctaaacgtggcggtgatctcggctgcaaggagtgtgcctcaactcagttcttattgttaattatctgtgacctttagttggtttataccagcattacgggacataatgcaaactaaaaaccttatacaaactttttggtggaggtccttttggtcgaggccagatgcaaaagccatttgaggatgcaacatataatcttaacattggcgagataagtgacattgtggataccgatagcggtgttcacatcataatgcgaactggttaatcattattgatggagcctggatatcgtgagcaattagttcagtcttctcggaaaattctatcgaagaacattctgaaatcacttctgataatgcctatggctaatttcaatggcttaatttttggacccctttggttttggtgtgaaattgacttgccagttataataaacaaatattgggtgaactaaatttctctggcttcttctcttctctttatctcc

SEQ ID NO: 20316 - DNA, 852 bp, Gossypium hirsutum
  Clone ID: GOSHI-09MAY01-C6599_1
ctttctctcccacgcgtccggtttcattttatttctatttctatcatttatttgcttctatagtggtgtctcaaaatccgcgaacatagattcggatcgtaagaggaagaaatcttcgatctcatccgcagatcgaacggcggcgaaggagggcgaaaaacataaagataaagctcccacttcctccaccaatcaccaccaccaccaccaccaccacaaaaagaagagcaagatgtcttcttcatcgcccgccaatcaagtgagggcttctcacatcctcatcaagcaccaaggctcccgccgtaaggcctcttggaaggatcctgaaggtcgcgtaatctccaacactacccgagatgccgccgtctcacagctcaaagccctccgtgacgacatcgcttctggcaacgctaagttcggtgaggttgcctctcgccactccgattgcagctccgctaaacgcggcggggacctcggtccttttggtcgaggccagatgcaaaagccatttgaggatgcaacatatagccttaatattggtgagataagtgacatcgtggatactgatagcggagttcacatcattatgagaacaggttgattattggtgataatacctggatatgttggcaattagttcggtgtgttggataactgtattcaagaatgttctgaaattaatgtcgatactgcctatggtcaatttgagtgataatttacacttggcaatgacattttaaatgcttggtataagttgtttggtgagggcatttaatttccgaaccattttggttgtgatttgagattatttgcttgtttataataaaaggttttggttataatttatctctc

SEQ ID NO: 20317 - DNA, 584 bp, Gossypium hirsutum
  Clone ID: LIB3829-023-Q6-K6-G12
tttttctatttctatcatttatttgcgggggggggggttggctgaaaaaaaaaaaacatagattcggatcgtaagaggaagaaatcttcgatctcatccgcagatcgaacggcggcgaaggagggcgaaaaacataaagataaagctcccactttcttcaccaatcaccaccaccaccacgcggggggggggggagaagagcaagatgtcttcttcatcgcccgccaatcaagtgagggcttctcacatcctcatcaagcaccaaggctcccgccgtaaggcctcttggaaggatcctgaaggtcgcgtaatctccaacactacccgagatgccgccgtctcacagctcaaagccctccgtgacgacatcacttctggcaacgctaagttcggtgaggttgcctctcgccactccgattgcagctccgctaaacgcggcggggaccttggtccttttggtcgaggccagatgcaaaagccatttgaggatgcaacatatagccttaatattggtgagataagtgacatcgtggatactgatagcggagttcacatcattatgagaacaggttgattattggtga

SEQ ID NO: 20318 - DNA, 639 bp, Gossypium hirsutum
  Clone ID: LIB3165-006-P1-K4-B10
ggtcaaagccctaagtatatgattcttttcatattttgccaaccaagagagggcagctcacgtactcatcaatcaccaaggctgtcgctgcaaggctactgggaaggatccagaatgtcgcgtcatctgcaccaccacccgagacgccggtgtctcacagcttaaacttctcggcgacgacatcgcttgcaacaaggctaagttcgacgaggttgcctctcgctactcggattgcagctccgctaaacgtggcggtgatctcggctgcaaggagtgtgcctcaactcagatcttattgttaattatctgtgacctttagttggtttataccagcattacgggacataatgcaaactaaaaaccttatacaaactttttggtggaggtccttttggtcgaggccagatgcaaaagccatttgaggatgcaacatataatcttaacattggcgagataagtgacattggggataccgatagcggtgttcacaatataatgcgaactggttaatcattattgatggagcctggatatcgggagcaattagttcagtcttctcggaaaattctatcgaagaacattctgaaatcacttctggtaatgcctatggcttatgtcatggcataattttgaaccctt

SEQ ID NO: 20319 - DNA, 301 bp, Gossypium hirsutum
  Clone ID: uC-gsflnu33B081g12b1
cgcgtgcgccttcgcgtggcgcctgaaggacgcgtaatctgacgacactacccgagatgccgccgtctcacagctcaaagccctccgggacgacatcgcttgggaccgctcggtacggtgagggtgactagagtcacttggggggccggtcctttaggccgccgggggtgatctcgcccctgtggggcggggtcagttgcatgaggcggcccgaggatgcaacaccgcggcttgtgactgtatagcactgaggcggggaatccacggggggccccgggcacatcctttggagaacaggccc

SEQ ID NO: 20320 - DNA, 401 bp, Gossypium hirsutum
  Clone ID: GOSHI-09MAY01-C6549_2
cccgcccgcccgtgcagctcgcttctctagaaaggccgcggcctcggcgttctccggctgccgctacgtcaccgcttcccgtagtttctccgcggaggctgccaaaacgatctcgccatcgtcggatcgagtgaagtgggactacaggggtcaaagaaaaataatccctctcggtcagtgggtccctaaggtagctgtcgacgcttacgttgcccccaacgttgtcttggccggtcaagtaacagttaacgacggagcctcggtgtggaatggttgcgtcctacgtggcgatctcaacaagatcaccgttgggttctgctctaatgtccaggaacgctgcgtcattcacgccgcttggtcctctccgaccggacttccagctgagacatcaattgagaggt

SEQ ID NO: 20321 - DNA, 1087 bp, Gossypium hirsutum
  Clone ID: GOSHI-09MAY01-C6549_1
cccacgcgtccggtgttgaagctctaaatcccttagggttccttcactccattgccagtttgccaccactaatggcgacatgcatagcagctcgcatctccaggaaggccgcggcctctgctttctccgctcaccgtcacgtaatctcatcccgttgtttcgccacggagtcggcgaaaacgatctcgccgtcgtcggatcgagtcaagtgggactacaggggccaaaggaagataatccctctcggacagtgggtccctaaggtcgccgtcgacgcttatgtggcacctaatgtcgtcttggccggtcaagtaaccgtctacgacggagcgtcggtgtggaacggctgcgtcctacgtggcgatctcaacaagatcaccgttggattctgctctaatgtccaggaacgctgcgtcattcacgccgcttggtcctcacctaccggacttccagccgagacttcaatcgagaggttcgtgacaattggtgcatacagtctcttgaggtcatgcacaattgaaccggagtgcattatcggacagcattctattctcatggaaggttccttggtggaaacacactcaatccttgaagctggttctgtagtacctccaggcaggagaatcccaaccggtgaactttgggcaggtaatccagctaggtttgttcgacctctaacccatgaagaaaccttagaaatccctaaactcgcggtagcaatcaatgacctgagcaaagaacatttctcggagttccttccatactcaacagtatatttggaagttgagaagctcaagaagtccctgggaataaatatttgattgccttttgattttcatgtttccatagatgagtttttccgatgcaacgaaataagcagtctcgtaaacacgtcgaagaaccctttttctttttgtttatccatgtattcgatcgtgttggctgtcggaaaaagagaaaaccctaaacttgtgagttccaatgaaatggaacatggtttgcaaccgaagcatcttgtggattatgccgagcacattctatgttgaagttactttttctattgtcctcttgtgatagtcctgcccgg

SEQ ID NO: 20322 - DNA, 386 bp, Gossypium hirsutum
  Clone ID: LIB3146-042-Q1-K1-H1
cccacgcgtccgcccacgcgtccgcccaacctgtgaactttgggcaggtaatccagctagggttgttcgagctctaacccatgaagaaaccttagaaatccctaaactcgcggtagcaatcaatgacctgagcaaagaacatttctcggagttccttccatactcaacagtatatttggaagttgagaagctcaagaagtccctgggaataaatatttgattgccttttgattttcaatgtttaaaagaataagttttttgaagcaacgaaataagcaggctcattaacaagaccaaaaaccctttttatttttgcatatccatttactttattggggtttttggcggaaagagtaacaaccgtaaggttggtgggttcaattcta

SEQ ID NO: 20323 - DNA, 408 bp, Gossypium hirsutum
  Clone ID: GOSHI-09MAY01-C6569_1
cccacgcgtccgaattcaaccaccatcactgcctactcctcagccatggcaaccaccacagctgccaccgtgtcacattttttcggtacccgtatccaaacctctaacccaagctccggtagaatccaagctaggttcggctttggaaccaagaaagcaccacccgcaccaaaaaaggccgcccctaaacggccatccgatcgccttgtttggttccccggcgcaaacccaccggaatggcttgacggtacaatgatcggagaccgtgggttcgatcctttcgggtttgctaaaccggctgaatacttacagtacgatttggactcgttggaccaaaactttgccaagaatgtggctggtgaaattataggggtgattagcgagacggcggagcttgaaccgacgccg

SEQ ID NO: 20324 - DNA, 629 bp, Gossypium hirsutum
  Clone ID: GOSHI-09MAY01-C106522_1
cccagcgtccggcttttcaaaagtaaacataatttctctctctatatatgctcatcgccaccagaaaactcaactactttctgtcaaaccccatttgctcaaaatgcaccgtccttccctacttctaaccctcctcactcttcttacactgctaacagcagctccgcttccggccattgggtatcgtccattgcctcacttaagacccaacagctccgattcaagattcggtgactccaagaaatacgagggttcctcggagttcgtccacttaagataccacatgggtccagtactcaccggtagcattaccgttcacacgatctggtacggccagtggcagaactcccaaaagaagataatccgtgagttcatcggttcgttctccgccgtcaatgctaagcatcctccggttgccggatggtgggataccgtacggctttacaccgaccaaacgggagccaatatttcccgtacggggcgtttaggggaacagaaaaacgaccgtttttactcccaccggaagtcactcactcgcttgtcgatacagtccgttataaaaagcgcggtaaccgccaaaaccaagccgttgcctataaatcccatcaatgggctttacttattgctca

SEQ ID NO: 20325 - DNA, 691 bp, Gossypium hirsutum
  Clone ID: GOSHI-09MAY01-C6529_2
gagacactgagtttgctaaagatgctgcctttggctataaatcttcaaaccttcgagagtgggtggaggagaaaacagcaggacgaattccagctagcattgttgcatccatttctatccaacttttaagaaaaggtggaccagatgctgtttgtgagcttctttgcagtttggagaagggatcgacatgcattgtaaatgcagttagtgaacgagacatggctgtatttgctgctggaatgatccaggcggaactgaaggggaagtctttcttatgccgttccgcggccagctttgtttctgcccgcattggaattatccccaaagctccaatccgcccaaaggatctaggaataagtaaagagaggagcggtggactaatagttgtgggttcatatgttccaaaaacaacaaaacaggttgaagagcttcagacacaacatggacatatgttaaaaagccttgaggtttctgttcataaagttgctatgaagtcatcagaagagagggaggaggaaattaatagaactgcagagatggcttctgtttttcttgcaactcgtaaagatactctgataatgagcagcagagaactcatcactggaaaaaatgcttctgagagtttgagatcaatttcaaagtgagctctgcacttggtgaagtagttaggcggataactacaagacctcgt

SEQ ID NO: 20326 - DNA, 1659 bp, Gossypium hirsutum
  Clone ID: GOSHI-09MAY01-C6529_1
ttctgcccgcattggattctggggggggtggcgtccgcccaaagaatctagaataagtaaagagaggagcggtgggggggtggttgtgggttcgtatgttccaaaaacaacaaaacaggttgaagagcttcactcacactttttttatgttaaaaagccttgagtttctgggggggcccgtccctggccgtcgccccccccgcgcgaccaggaaattaatagaactgcagagatggcttctgtttttcttgcagctcgtaaagatactctgataatgagcagcagagaactcatcactggaaaaactgcttctgagagtttggagatcaatttcaaagtgagctctgcacttgttgaagtagttaggcggataactacaagacctcgttacattctggccaagggtggaatcacttcatcagaccttgcaacaaaagctttggaagcaaaacgtgccaaagtagtcggacaggccctagctggaatacctttgtgggagctagggcctgaaagtagacatcctggagttccctatattgttttccccggtaatgttggtgacagtaaagcactggcggaaatagtgagatcttgggctcgcccactcagactttcatcgactaaagagatccttattaatgctgaaaagggcggctatgctgttggagccttcaatgtctataacatggaaggagttaaggctgtagtatcagctgcagagcaagaacgtagtcccgctattttacaggttcatcctggtgcatttaagcaaggaggggttacattagttgcatgttgtatatctgccgcagaacaagccagcgttcccatcactgttcactttgaccatggtacttcaaagcaagaactattggaatctcttgagctgggctttgattcagtaatgggggatggttcacatcttccctttaaagataatatctcatacacgaagcacatatcaaacttggcccacttgagggatatgctcgtggaggcagaacttggaagattgtcaggaacggaagatgatttgactgttaaagattatgaagcagagctgactgatattaatcaggctgatgaattcatagttgagactggcgtagatgccttggcagtatgcattgggaatgtacatggaaaatacccagcaagtggcccgaatctcaaacttgatttgcttaaggatctatatgccctaagttcgaggaaaggagtatttcttgtgctgcatggtgcctctggtttgtctaaggaacttgtgaaggggtgcatagagcgcggtgtgaggaagttcaatgtgaacacggaagtacgaaaagcttacatggaatccttgagcagccccaagggagatcttgtacatgtaatggcttctactatagaggccatgaaagctgtggttgctgaaaagatgcatctatttggttctgctggaaaagcctgatgggttggggtgatcatagatcctacaaaaatagaagctaaggttacttgctcttttcccaatttataacatattatgatccttttgtgcattaaaaacattatggttcatttccttttggaaaggcttaaaccaataagaaaaaacttggttgaattagcaagaattgggtttgtatatcgtcttgttttgtaacctgttgtgtcttc

SEQ ID NO: 20327 - DNA, 727 bp, Gossypium hirsutum
  Clone ID: GOSHI-09MAY01-C6409_2
ttaattcgcagagaatttttaggttttgtcactctcacccctttcttcaaccctcttccattacagtcctactatatatatacacatatatatatataataggagctgaataggagcagccaaaagggtcttttcttcaacaccattgttgagctgagagaaaaacagagaaaaattagagaattctctctatatatacatatacatatagagagagacagttcaaacttcaaagatctagtagattggtaataaaaaaaagaatgttgggacaaaagcaaagtgaagaagcaatagtgtcgaattataacgaaagtgaacatcatgttgagaatagagatgaagagaaagaagaagaaaaccagtcattgtttaatgttaagaatctactttggcatggtggttctgcctgggatgcttggttcagctgtgcttctaatcaagtagcacaagtgttgttgactctaccatattcattttctcaattgggcatgctatctgggattctgctacaagttttctatggaattattggaagttctttcaaggttaaggcgtgaagtggaggagcagttggaaagcctgatgaataacaaggtagagatatcatatgagaatgctatgtagtagccagcaatggtattgaagagcaaagagctgaatggtatcatgaaagtgctcgtcatttaagagtaatccttgatcatgaacaggctgtgattccaag

SEQ ID NO: 20328 - DNA, 626 bp, Gossypium hirsutum
  Clone ID: GOSHI-09MAY01-C6409_1
cccacgcgtccggtttcagccaaattagcctgtgaccaaagcccaagttggtggggctcttgcaactggtgaggcttttgacctataaatgaggagcttgcgcgtattgaagcagaatcaatggcagaaaaggcagtatctgctcataatgctttagttgctgaagttgagaaagatgttaatgctagttttgagaaagagcttttaatcgaaaaggaaaagattgatgctgttgaaaaaatggccgaagaggcactgcatgaactggaaaggttaaaagctgagagagaggcagagaatatggccttaatgaaggaccgtgctgccattgattcagaaatggaagctctttcaaggttaaggtgtgaagtggaggagcagttggaaagcctgatgaataacaaggtagagatatcatatgagaaggaagcgattaacaaactacgaaaagaaacagaggatgaaagccaggaggttgtcaggttacagcatgagctggaggtggagagaaaagctttatctatggccagggcgtgggctgaggatgaagcaaaaagagcaagagaacaggcaaaagccttagaggaggctagagaacgctgggagaggcaaggtatcaaagtggt

SEQ ID NO: 20329 - DNA, 1097 bp, Gossypium hirsutum
  Clone ID: GOSHI-09MAY01-C6429_1
cccacgcgtccgcaaattcactcctgtctttccccccgtgtctgtctctatatatctccataaacattccaacattccaaacgccttgtttttgtgaacatcataattataattatatgcagaaaaacaagaaaaacgtaaagaaaccatcacccttaatccgactactgtttctgtatcttcacaaccctagctaatcccaatttaatcaatatgtcagcagctgttgccgccgccgccgccgccgcaagcgtctcatctaacaccacttcttcttctcatcatccaagtaaccaggcgccgaaccatggctggatacccttttttcaaccaccggcacaacgtgcagcgctcccagctttgagccgctacgaatctcagaagcgacgtgactggaaggcgtttgtagagtacctgaagaagcatcgcccccacttgggtctctcccgctgcaccggagtgcatgtgcttgaattcttggactatcagttcgggaatactaaactccacacacggaactgtcctttttggggcaaccctcctgacctaccatcgccatgctcatgctcttgccctctcgaccaagcatggagcagcttggatggtgtggtagggcgcctccgtgtagcttttgaggagaacggaggccaaccaaagaccaaccctttcagtgcccgtgttgtgaggctgtacctaacggacctcagggatgctcaagccaaggctacaggaaatgcttataccttttgaagaataagatgataaatgacgataatgatgaaagcatttggattggacgttgttgtaggaaacaatttgggtggtcctgctgcggaatccctgtatgcattgtctgtgatgaactagatttatgttgttggtcactgccactggcattggagtaatgtacatttaatttacatcttgtttctgtcttaacgaatcagagtactggaagaaaatttgaaggctgttctatttactttcttgaaatcttatttcatcttaaagttattatgatttatgataaaaggggttggaccacaaaatgtggtgagggaaaatcctcacacgtaattagctgttgctcaaaaaaa

SEQ ID NO: 20330 - DNA, 300 bp, Gossypium hirsutum
  Clone ID: LIB3493-059-P1-M1-A11
attcttcaaaggtataagcattgcctctagccttggcttgagcatccctgaggtcccttaggtacagcctcacaacatgggcactgaaagggttggtctctggttggcctccgttctcctcaaaagctacacggaggcgccctaccacaccatccaagctgctccatgcttggtcgagagggcaagagcatgagcatggcgatggtgggtcaggagggttgccccaaaaaggactagctcctctttggagtttaacctttccctgaccttgaagttcaagaattctagctcattctcttt

SEQ ID NO: 20331 - DNA, 383 bp, Gossypium hirsutum
  Clone ID: GOSHI-09MAY01-C6719_1
ctcacgcgtacggagagaaaaacataaaacacttccgtaatggcacgcatgaagatcagagagtgcgattccatgagattgtggaaagaacatggcaagaggctttcacggtagagatttgccaatcacatgtgcacaatttacggcatcaactgatttcaatcagctagtacagatggagccatggctttcgtcacagatactggctggtaaacctggtatgttgttcggtatgcgtgggcagagtgcgttgggtggcttaaatataggttgtgctcaagttattacgtttcgcgaaagagcgcctaggcacatagggggaattgaggggatacaagggacctgttacaactcccattgggggaccttacatacctgacaat

SEQ ID NO: 20332 - DNA, 763 bp, Gossypium hirsutum
  Clone ID: GOSHI-09MAY01-C6709_1
ctcccccacacattcaaaatcctattccttttctcctttttctttttctcagacaagatgggttctcagggatcggttatggcgatgcttttgctgatgatgttcactttatcatcagcttccgacatgtccattatatcctacgatgaaacacatcccgacaagtcaacgtctagttggagaacagacgacgaagttatggccatgtacgaggagtggcttgtaaagcatggaaaaacatacaacggtttgggtgagaaagagaggaggctccagatttttaaggataaccttaggttcatcgatgaacataacgccgatgagagtcagagttttaatgttggtttgaaccgctttgctgatcttaccaacgaggagtaccgagccatctacctgggaatcaagaaacccaaccggaaagtttccaaggccagtgaccgatactccgcgcttctcggcgaaaagttgcccgattccgttgattggagggaaaaaggggctgtcgctgaagtcaaagatcaaggaagttgcgggagttgctgggctttctcgactattgctgctgtggaagggataaaccagattgttacaggcgaactcctttcactatctcagcaggagttggtggattgtgatacatcttacaatgaaggttgcaatgggggtctcatggattatgcctttgaattcatcatcaaaaatggtggcattgacaccgaacaagattacccttacactggtcatgaccgtacatgtgacccat

SEQ ID NO: 20333 - DNA, 520 bp, Gossypium hirsutum
  Clone ID: uC-gsflmaxxa098c07b1
tatttaccaagtttcacattgggttactaccattaatcttctttttttctttataagcctactgtctctcgcctttcttctcccccacacattcaaaatcctattccttttctcctttttctttttctcagacaagatgggttctcagggatcggttatggctatgcttttgctgatgatgttcactttatcatcagcttccgacatgtccattatatcctacgatgaagcccatcccgacaagtcaacgtctagttggagaacagacgacgaagttatggccatgtacgaggagtggcttgtaaagcatggaaaaacatacaacggtttgggtgagaaagagaggaggctccagatttttaaggataaccttagatcttgtagggaaggcgatggaggggagggtgagagactagggatgcttcttgaagtggccattgcttgctgttcgagttgtagtgaacaaaggcccacaatgtggcaagttctgaagatgttacaggagattaaagaagctgta

SEQ ID NO: 20334 - DNA, 752 bp, Gossypium hirsutum
  Clone ID: GOSHI-09MAY01-C6629_1
gcccacgccgtccgcccacgcgtgccgggcggggcgggggggggagtttgagagtctgatgaatggtttcaaattagggttttccccttagcacttctatttgatgattaattagggttttagagctttcacaattgtttaggaatttgagagtttatgttggagaagaagaggggctcaagaattagagctttcatgagtgatatatacttggggatttcttttgtcattaatttgggtttgcttattgctctttgattttgagcaagtacttgctgatttcttgctgcattgaagaattagaggtttcaagcctggatttggagaattcaggcttttccctcattggcaagttcttccattgttcttgtcataggaacgacgaacgagcaaagcgattaatcttacttctggattgtacttgatttacatattattggggtttgatcggttaaccaaaatagggtgactggatgctgaacgccagagatttgcttgcttggctacttaacttgatgctgtggatatatggtctccctaaatattctggaattccttctattgctatggttgtttgaggactattagtttctttgcagctggtgcttagcatcggaaattatggttcttaagtgcatagctcatggtatgctgtggacgtgggttgatctggccctctcttttttgatttaagtgtttgtgtttgatcgcatggtctcaaatgagactgatgtgtgaaagattgcatttct

SEQ ID NO: 20335 - DNA, 579 bp, Gossypium hirsutum
  Clone ID: GOSHI-09MAY01-C6189_1
ctttttagcagcaacttttttcctgggatcctccttcgtggtcttctaagtcagtgttaggtttgaaatttttggccctgcataagttctgcatagcatctaatgtcaaaatagaaccaactggtaatcacagtattatttagtgtggtttccatgacaacaaaaatacatacgaagaaaacttctcaggttactatgctgaaattccaaaatgtctgagttttgaatagtgatcactttgttctggtattgacgcaattatattaggaaaaaagttggttgactgtttttgtttaattgacttctaaaatgttcaaattgtctagttctaaaagtttactaaatgcctagtgcagttaaacatactcttgtttaagtgtgtgttgctaaattttttactgtcattactaaataatctgtgtggcaaaatgtgtgtcacttttccctccttttttatctcctattttcaggagtcaaatgtagccataaactgtatccttgtctgacactttaactaaaaatttccagttaggggaggttattgccaaattaaatttggctgttccccccaaccatata

SEQ ID NO: 20336 - DNA, 550 bp, Gossypium hirsutum
  Clone ID: GOSHI-09MAY01-C6169_1
cccacgcgtccgcccacgcgtccgaggaccagaatcattgtcgcttcttgcaaaggatatttgatgaaggaggctgtttagatgttcaaataatattcaatgaaattattgataatattgtggaacttatgatggatccctttggaaactaccttgtgcaaaagttactggatgtgtgtactgaaggacaaagactgcagattgttcacatggtcacaaaagaatcaggacagctagtgaggatttccttaaacacatatggtactcgtgtagtacagaagttgattgagactctcaaatccagagaagaagtttctcttatcaagtcagctcttaaacctggaattcttgatcttatcaaggacctcaatggaaatcatgttttgcagcgcttcttgcaatgccttggcaatgaagataataagattatttttgatgctgctgcacaattttgcgtagatattgccactcatcgtcatggatgctgtgtgttgcaacgctgcattgctcattcaaatgggcaacatcgatataacctaattacccaaat

SEQ ID NO: 20337 - DNA, 645 bp, Gossypium hirsutum
  Clone ID: GOSHI-09MAY01-C6119_1
agtttctgatttctctggtgaagcaaagaggtagaagaaaaagagagatccaaagatggcaccagaagcagaagacgagatcaaggacgagaaaaacccacgacctctcgacgaagatgatatcgcccttctcaaaacctatggattaggaccttattcaaccagcataaagaaagttgaaaaggagatcaaggagatggcaaagaaagtaaacgatttatgtggcatcaaggagtcagacactgggttagctgcacccagccagtgggaccttgtctctgacaagcaaatgatgcaggaggagcaaccacttcaggtggcaagatgcacaaagataattaatccaaacacagaagatgccaagtatgttataaatgttaagcaaattgccaagtttgttgttgggctgggcgacaaagtttcccccactgatattgaagaaggcatgcgcgtggtggttgaccgcaacaattatcagattccgattcccttgcctccaaaaattgacccaagtgtaaccatgatgactgttgaggagaagccagatgtgacatataatgatgttggtggatgcaaggaacaaatcgaaaagatgcgagaagttgttgagctacccatgcttcatcctgagaaatttgtcaagct

SEQ ID NO: 20338 - DNA, 303 bp, Gossypium hirsutum
  Clone ID: uC-gsronu33B121h01b1
ctttccgttcaagaaaagtagaagaaagcaaaaaaaaaaaaaaaaaaatggcgcctgaaccagaggatgagttcaaggacgagaaaaaccctagacctcttgacgaagatgatatcgcgcttctcaaaacctatggtttaggtccttattcaacgagcattaagaaagttgaaaaggagattaaggaaatggcgaagaatgtaaatgatttatgcggcatcaaggaatctgatactgggttagctgcgcctagccaatgggatcttgtctccgataagcaaatgatgcaggaggagcaaccac

SEQ ID NO: 20339 - DNA, 1158 bp, Gossypium hirsutum
  Clone ID: GOSHI-09MAY01-C6109_1
gttaaacccaatgggatctgaaaattaagtaaaaccatccttcttgttgttcaatgggaaaaaaaagctaaaggcatagcttgggtaggcaacctctatcagaaatttgaagctatgtgtatggaggtggatgatatggtcccccgcgtcccattgcgatatgttgaaaaccagttgcagacagttggttctaatgttaaacagttctgcactgaactaatgcaagacttggtcgcttcatctaccgattcgttagaagaccttaacacggtgcaaattgccggcgttgcagcctctgtggactcgaatggaagtgccaatgaagatcactctcagaccaaactggtcgattcctcttctgtaaaatctgttgaggatgtacatttaggcttgccttcagaacaattcacagaggaccaaaattccttggctcattctaaagggttcacagcacctgcttccctaattttctctaaagctttcaagaatgaacttaaggacaatgattctactgcagatgacacatcgttagagtcgatggaaccagaagtgaaaatgggaccagcacgtttattagaggcttacccataaatctgttttgaaaatggaaccagaagttccatcatttgataacacaaagcttgaagaaagctgcattatagtagaccgtagtgagcttctttccgtctctaacaacgtaggaaaacacaggtcatacaagaaaaagctccgggatgccttttcttctaagtcaaggttcacaaagcgggatgatgaacagcatgcactatccagacaaaggaacaaacgagaatcacaagacatggaattttgtgaatctgattgggagattatttagacaggttaaattggtttttggtttttgtttatggacttaggtatgcgtatgaagtaataagaatacagataaacgttgttatgatacgagactggatgtccctcggttgaagatgtataaagatggagagaatcaggcagtggagtagagcgttatgaaatctccaacttgttggattggtggaacatctgacattgttgtcttgttttctttattggaattcttttatagtttttgctttgaattcgtagttttttagatccttctatataaagtcaatgtcctgtcaagttatacct

SEQ ID NO: 20340 - DNA, 468 bp, Gossypium hirsutum
  unsure (1)..(468): unsure at all n locations
  Clone ID: LIB3585-047-Q6-K1-E2
cccacgcgtccgcggacccgtgggtttttttttaacaacatttcttcataccatgatgtccaccatcggctttgtggtaccaaatacaacttctctgtctactttnacatatnnnacanaattctattaacctatatcccttattcacttnanaaaacacctnatatctnccttnaattgccaatgaagatcactctcaaaccaaactggtcgattcctcttctgtaaaatctgttgaggatgtacatttaggcttgccttcagaacaaatcacaaaggatcaaaattccttggctcattctaaagggttcacagcacctggttctctaattttatctaaagctttcaagaatgaacttaaggacaatgattctactgcagatgacacatttttagagtcgatggaaccagaagtgaaaatgggaccagcacgtttattagaggcttacccataaattttttttaaaa

SEQ ID NO: 20341 - DNA, 953 bp, Gossypium hirsutum
  Clone ID: GOSHI-09MAY01-C6129_1
ggaatttcagatatgattgatgatactgtgaacacaatgtgtcacagacatgcttgagtggccacatagaattgttgttccaattggtggtataccagttgatacaagtgaattagagctgaaaccggagggaaagctgacagttacagtagtcaaagctaatgatttgaagaacatggaaatgattggaaagtctgatccttatgtggttgtatacatccgacctctcttcaagattaaaacaaaagtcatcgagaacaacctgaatcccgtttggaatgaaacttttgagttgattgccgaagatagagagacacaggaactcactgtagaggttttcgaccaggacattgggcaagacaagaggttgggaattgcaaaattccgtttgattgaactggaaccggagacaccaaaggaggttaatctgaaccttctgtcctcactcgatacacttaaaataaaagataacaaggacaggggaagttgtaccattaagcttttgtaccatcaatttaacaaggaggaacagttgattgctttggaagaagagaagaggatcctagaagaaaggaagagattgaaagaagccggagtaatcggaagcacaatggacgcacttgacggagcggcttcactggttggatctggtgttggtatggttggtaccggtatcggtactggagttggacttgtgggaagtggtgtcagtgctggagtcgggatggtggggagtggactgagcaaagcaggaaagttcatggggaggacagttacagggcattccagcaagaaaagtgaaaccaccaccactcctgacgaaagcaaggaagaaaatggtggtgctaagccacagtaactcatagaacaactactatttcacccctttcattttgggaaggtggatagttcgtaccgttcgaacctcttttttccatgcttgttcccacgat

SEQ ID NO: 20342 - DNA, 1733 bp, Gossypium hirsutum
  Clone ID: GOSHI-09MAY01-C6099_1
aactgtatgataagttgcagatcttgggttcagacgctgctgaagcacaggcatctaagattcttgcagggttgggtttcaccaaacaaatgcaaggtcgtcctactcggtcttttagcggtggctggaggatgagaatatctctagctagggcactctttgtgcaaccaacacttctgttactggatgaaccaactaaccaccttgaccttagagctgttctttggttagaggaatatttatttcgctggaaaaagacattggtggttgtttctcatgatcgagattttcttaatactgtttgcactgatattattcatctccatgatttcaagctccagttctaccgtggaaattttgatgattttgaatcagggtatgaacagcgtcgtaaagagatgaataagaagtttgaaatttatgagaagcaggtaaaagctgctaaaaggtcagggaatcgagttcagcaggagaaggtaaaagatcgagcgaagtttgcggcagcaaaagaagcagcgaagagcaagggaaagggcaagggcaagatcgatgaggatgatcctccagctgaggccccgaagaagtggagggattacagtgtggagttccacttccctgagcctacggaactgacgccgcctcttttgcagataatgaatgtaagcttcagttatcctaatcgggaggatttcaggctctcagacgttgatttgggtattgatatgggaactcgggttgccattgttgggcctaatggagctggtaaatctactctcttgaatcttattgctggtgatttagttccaacagagggtgaagtgcgaaggagtcagaagttgaggattgggaggtattctcaacactttgttgatctgctaacaatggaggagacacctgtgcagtatcttcttcgtcttcatccagatcaagagggactcacaagcaggaggctgttcgggccaaactggggaaatttggacttcccagccataatcacctcactccaattgcaaaattatctggagggcagaaagctcgagttgttttcacttcaatttccatgtcaaaacctcatatattgctgttggatgagcccacaaaccatttggacatgcaaagcatagatgccctggctgatgcgctggatgagtttactggtggagttgtcctcgtaagtcacgactctaggctcatatcacgtgtctgcgaggatgaagagaagagtcaaatttgggtggtagataatgggacggtgaacactttccctggtactttcgaagactacaaagacgagctccaaagagagattagagcggaggttgatgaatgatgcggcagttgaattaggtaccgagttcccccataatatgtttttatatattaagacgtataaatgcattgaaacccgcacattttctttatatttccttttctagaaaaacatgcgagtgtacctctctgtataggggatttatttgaaattccaagcttgtttacctatgaatatgacattgtacactaggaaaagtgcaagcttggtagcagttacaaaattttattggactatgtagttgatgttgctctgagttccctttttgggatgttagaaccgtattttcttttgcagacaatgtagcacaatctactgtcttgtcatttcctgttctataagtttgtaggtcaaaattcattgtctgatgttgggatggaggtccaaaaaaaaaaaaaaaaaa

SEQ ID NO: 20343 - DNA, 409 bp, Gossypium hirsutum
  Clone ID: LIB3148-055-Q1-K1-B7
cccacgcgtccgcccacgcgtccgaagctcgagttgtctttacatcaatttccatgtcaaaacctcacatattgctggtggatgagcccacaaaccatttggacatgcaaagcatagatgcactagctgatgcgcttgatgagtttactggtggagtagtcctggtaagtcatgactcaaggctcatatcacgtgtctgcgaggatgaagagaagagtcaaatttgggtagtagataatgggactgtgaacactttccctggtagttttgaagactacaaagaagagctgcaaagagagattagagcagaggttgatgattgatgtggtattgagttttcccaacaaaaaatgaaaaattatatgtttaaccatataaatgcattaagacctgcatatggtatgatggg

SEQ ID NO: 20344 - DNA, 878 bp, Gossypium hirsutum
  Clone ID: GOSHI-09MAY01-C6039_1
cgttgatgagctcatcttcactcttcatttctatctttgatctttgaggtttttccttagttcttgaacttacatcaaagcaataacacatcaacaatgacggagcaaatgaacggtgcgtccgtagacgaaaataactgtacccaaagtgaggaaatgctgctccatgaagctctccgccgtttgatttcgacgatcatctaccccgatggatcttcatcgtcaccagctccgcttctgcagcggatcaagatctctgtttccgagaatgggcctcgccttggggaagcctctagaaacactagccgtactgttatacggtggactcgtagtggcagcccccttcgtgctcttcttgtcatctctgttgggtccattgcttttcttaccttgacaggattgcttgtatttatgcttttctttctagctgcaactgtcaatgccgtcatcatctcttccctcattgctttggctgctgcaggaggcttcttggctcttttctttgcctgtgtaacagttttttacattggggccatatcggttgctgcttttgttatttcaactgcaataatttcagcaattatagctgctcttgtagctacaggttgggttggattcttttgggttttatggttgggtactaagagaagtatggaccttgcaaagcactccctcagcattactggatctgctttctcagcttattcttctgctcagcatgctcatcgccaccaggaactgcacaaagtttcagactgaaacacttacttgctcatcatgtatatattgtcagatgcagttgattaatcatagataaaaagcatgtcaatgtgtttgacaatttagtcggctaggccgacttgcagtatataggatgc

SEQ ID NO: 20345 - DNA, 528 bp, Gossypium hirsutum
  Clone ID: GOSHI-09MAY01-C6399_2
gcacgcttgacagcctgtcccactaagccacaacgcatggatctctctttaagtttcaatctccatcggcttttcttctacccaaatccaaaccatcaaccctctccatccccctcatttctctcaaaccatcgcctcatcgcctcacggtggcagcggctgcagggaagatgaagatgattgagggcgtcagtgatgaattgaactccattgcttcacagaatcttgactacgctgctgctcgtagaagagttcgatctgctttcatccctgtccaccagcagcttgatcatttattgttcaagatggctcctactggtgtaagaacagaggagtggatcgaaagaaactcaaagggattggagattttctttaggcgatggatgcctgaacccggggttaaaattaaaggtgtcgtatgcttttgccatggatatggtgatacttgcactttcttctttgaaggcattgctaggttcattgcagcatctggatatggtgtttatgctattgatcatccaggattcg

SEQ ID NO: 20346 - DNA, 527 bp, Gossypium hirsutum
  Clone ID: GOSHI-09MAY01-C6399_1
gctaattagcactttcatcttttaaaatattgtaaatttagctttcatatactttttggtttcttatctttttcttgcggaaaattatgggattttgcttctagatggctcctactggtgtaagaacagaggagtggatcgaaagaaactcaaagggattggagattttctttaggcgatggatgcctgaacccggggttaaaattaagggtgtcgtatgcttttcccatggatatggtgatacttgcactttcttctttgaaggcattgctaggttcattgcagcatctggatatggtgtttatgctattgatcatccaggattcggtctttctgaaggattgcatggttacatctatagctttgatgaattggctgacaatgtcattgaacaatatgcaaaaattaaagaaagacctgaagtgagaggattgccctgcttcatattggacagtccatgggtggagctgttactctcaaagttcaatttcaaggatccacatggatgggatggaatcatccttgta

SEQ ID NO: 20347 - DNA, 477 bp, Gossypium hirsutum
  Clone ID: GOSHI-09MAY01-C6389_1
cccacgcgtccgagagatgctgccataaaggagaaacttgccagtgtgaaggacacgtctgaggaagtgaagcaacttgaagaacaagcagcggctattatgagagctgcaagggctgagattgcagccgctttgaacaagatgaagaaggagactcagttggaagttgaggagaaactggctgaagggaggatgtaaagttgaggttgggttgcaggacgcctcgcctaatttggagaatcaaaaagacgagactatctagtcacttgattcccagattgctgctctcagccaggatattgtcaagaaggtgcttcctctctaaaatcccacttcatatttggtttaacttcgagtcaataatgtttatataggcctgaaaccatctgtgtatttaatatgatctggcattgtacaacaagggacaactctctgtactccaatgaaatctgaaccctgtattcggtatttatggat

SEQ ID NO: 20348 - DNA, 490 bp, Gossypium hirsutum
  Clone ID: GOSHI-09MAY01-C6359_4
ggtgcttcttcacatcctcgggagggttaaggagctatgagcatccccttaacgagttgaaaccggtgccaagagtggacagttcgggacatgtttgtggtgccactttcaacgtggatgtagagacgaagaaggagtctactggtatgaaaaaggtcggaagtgccgcagattggtccgctaactactaaagcgatatcagctgagcctcttgattctatccatcttaaattccgaagtttacttgattgaacttgtctgtaatttggaactaaaacagcattttaagcagtagtttgcttaccataaaaactcagcttgctatggtaacataacatggaataatattttcttgtcctaaattaaaaaaaaaaaaaataaaaaaaaaaaaaaaaaaaaaaaaaaaaaaaaaaaaaaaaaaaaaaaaaaaaaaaaaaaaagaaaaaaaaagaaaaaaaaaaaaaaaaaaattggggcggccgttttaaag

SEQ ID NO: 20349 - DNA, 703 bp, Gossypium hirsutum
  Clone ID: GOSHI-09MAY01-C6359_2
gtgccacatcgccagttcccatggtaggatatctatcaatcaaagaaactttggtttttgtttgtgttttaagtttcggatctttgcaaaagaaaggagaaagaagaaatgctagcagttttcgacaaatcggttgccaagagcccagatgctcttaatgctccagataaccctcaggctgtttctgctctcaaagatggcttcttacctaatcactttgcctctgtttatcccggttctgtctccatcagtctcggctcttctggggttatggcttattctcttgaaaaacagaacccacttctccccagactgtttgcggttgtggatgacatattctgcttgtttcaaggccacattgagaatattgctgttcttaagcaacaatatggcttgaacaaaacagcaaatgaggggatcattgttattgaagcttaccgaaccctcagagacagaggtccttaccctccggatcaggttgtaagagatatccaggggaaatttgctttcattatctttgatagctcttcaaaagccacatttatagcttctgatgctgatggaagtgtacctttcttctggggaactgatgctgaaaaccaccttgttcttgccgatgatgtggagactggtctgaagggctgttggaattcttttggttccatccccaaaggggtgctcttcttctccactggaaggttta

SEQ ID NO: 20350 - DNA, 1006 bp, Gossypium hirsutum
  Clone ID: GOSHI-09MAY01-C6359_1
ttttgttttctttagggagtttgccagaactttcagatttcataaattaatataaaataaaaattggacaaaggacagaacccgcgcgtccgcccccgcctccggttgacaagtgtgtgtcaaaatctgccgtactttgcgtatcggccacatcaacagggatatcaatcaatcaacgaaagatcaaaccaaattaccattttttgttgttttgtttctctgatagttttggaaagaatatgttagcagtttttgagaaatcgattgccaagagccccgatgctcttaaagtttctggtgattctgaagcagcttcagccctcaacaagggcttcttggctacccattttgccactctccatcctggttcagtcactgtcaatcttggttcttctggtttcatggcttactctcttgataaacaaaacccacttctccccaggctctttgcagttgtggatgacattttctgcttgtttcaaggccacattgagaatgttgctgttcttaagcaacaatatgggttgaacaaaactgcaaatgagggtatcattgttattgaagcttacaggacgcttcgagacagaggtccataccctcctgaccaggttgtaagagatatccaagggaagtttgctttcattatcttcgatagctcttcaaaagctacatttatagcttcggatgctgatggaagtgtacctttcttctggggaactgatgctgaaggccatctggttcttgcagatgatggggagactgtcaaaaagggctgtgggaaatcttctgctccattcccaaaagggtgcttcttcacatcctctggagggttaaggagcttcgagcatccccagaacgagttgaaggcagtgccaagggtggatggttcaggtcaggcctgtggtgctacgtactgtgtggatacagagacgaagaaggaatcaaccggaatgaagaaagtcgacagtgctgcgaactggtcgacaaactactgagcctcaaaacg

SEQ ID NO: 20351 - DNA, 484 bp, Gossypium hirsutum
  Clone ID: uC-gsflnu33B080c08b1
taatttttgtcattttcgtcattgatcaatcaaatatagttcaaagaataccccatttttggatcgcaggaaagccaaaaaaaaatgctagcagtttttgacaaatcggttgccaagagcccagatggtcttactgttgctgatcagccacaagcactatcagctctcaaagatggtttcttagctaatcattttggctcagttcatcctggttcagtcaccatcaatcttggatcttcgggtgttatggcttattctcgtgaaaaacagaacccacttctccccagactgtttgcggtagtcggtgaaattttctgcatgtttcaaggacatatcgagaacgttgctgtccttaagcaacaatatggcttgaacaaaacagcagacgaggggattatcgctattgaagcttatagaaccctcagagacagaggcccttaccctccagaccaggttgtgagagatatccaggggaagtttgttt

SEQ ID NO: 20352 - DNA, 286 bp, Gossypium hirsutum
  unsure (1)..(286): unsure at all n locations
  Clone ID: LIB3148-016-Q1-K1-F6
cgcagcacgagtaagtcttcaggatttagtttaaagataccatgttatagaatcagcaacgtgtaaacagaaggcggatcatgcgatgactattacganactacattacattttatgattgttaaactcacattgacaatgttgctgttcttaaccaacaatatatgttaaacaaaactgcaaatgacggtatcattgttattgaagcttacaggacgcttagaaacagaagttcataccctcctgaccaggttgtaagagatatccaagggaagtttgctttcat

SEQ ID NO: 20353 - DNA, 279 bp, Gossypium hirsutum
  Clone ID: GOSHI-09MAY01-C106372_1
tcttttcgcgtggggttctagatcgcgggccgggggtcttgttttttcttttgggtgtttcaagttttgatctttttatgttctgttagcgattactgttttctgttttattcagaaaaatgtggtttggattgatatgtaattaaacgaatctgtaaatgttttactatttgggtcatgatgatgagacaaaatttcatgatgaactgtaggcaatttcttggttcccccccttttaaaacacttttctttgtgtgaaacctttgggttttcccaatt

SEQ ID NO: 20354 - DNA, 499 bp, Gossypium hirsutum
  Clone ID: GOSHI-09MAY01-C6369_1
cccacgcgtccgcttagagtctctctcagatcagaactagagtgtttacatcctggtaagaggttgagttgccatggcttcagcttcctccaattcactatcaatctcaccctcatccaccctcgtggatgccaaagctcctcgtcaaccaactgctgcatccccacaatgtgtcactcttcctactcttcctcccccacccgttcagtcccagagtcgtccctggaagaccactgcctactgtcgcaagattgctcgaaatgtgatggctatggccactggtgagactttggccacgcgtgaagctccaaccgaagttaccccaactgagctgacagagtttatcaacaaaatacaagaaacatgggataaagttgaggacaagtacgcagtgagttcacttgctgtagcaggtcttgttttggtctggggtactgctggaatggtctcggcaattgataaacttcctgtgatttccacatttctcgaggtcgtgggt

SEQ ID NO: 20355 - DNA, 423 bp, Gossypium hirsutum
  Clone ID: LIB3120-008-Q1-K1-H9
agagtctctctcagatcagaactagagtgtttacatcctggtaagaggttgagttgccatggcttcagcttcctccaattcactatcaatctcaccctcatccaccctcgtggatgccaaagctcctcgtcaaccaactgctgcatccccacaatgtgtcactcttcctactcttcctcccccacccgttcagtcccagagtcgtccctggaagaccactgcctactgtaagttcatagactaactatatcacacacttgacatgcatcaactggtataccaaatggtctttccactttttgcaggtcgcaagattgctcgaaatgtgatggctatggccactggtgagactttggccacgcgtgaagctccaaccgaagttaccccaactgagctgacagagtttatcaacaaaatacaaga

SEQ ID NO: 20356 - DNA, 1036 bp, Gossypium hirsutum
  Clone ID: GOSHI-09MAY01-C6289_3
gcccttgaaactgtggggtttgggaaattccagggctttgttcttggatacgctggtcttggttggtttgctgaagccatggagattatgattctttcctttataggacaagctgttaagtctgagtggcaactttcctctggtcaggagagccttttaagtaccatcgtctttgctgggatgcttctcggagccaatacatggggccttttatcagataactacgggaggaggaaaggttttcttactatatctatggtaacttttggagctggattactgagcacattctctccaaactatttaacgcttgttcttcttcgaggtttggttggttttggccttgggggctcatctgtattcttatcctggtttctagagtttattccagcttctaatagaggcatgtggatggtagtgttttctactttcggcacatttggatcaatttttgaggctactcttgcatggattgtcatgcccagattaaactggaagtgggtacttgcattttcggctgtgccatcttttgctttgcttattttgtatggtgttgcacctgagtctccgagatacctatgcatgaaaggtaacacaagtgatgcacttcgaattttggagaagatagcttcagtgaaccaaacaaagcttcctcctggtgtcctagtttctggtagatcaaatgacaaggatgaagagtctgctccatcagaaaatactgccccattacttccctcactcagtaaaagtaccacacaatcaaaatcaggcttctcatcattttttatgcttttctcttcaaaattaattagaacaacgctgctcctatgggtattattctttggagattcattttcatattatggtatcatattgcttacctctaagctaagtagtggacaaagtacatgtttcccatctctccaaagcaatataaatccccaggatgatggtctctacctaaatgcattcatcaccagtatggcaggtattatgtctcattctcacttccttctttatgctttctttttttctt

SEQ ID NO: 20357 - DNA, 486 bp, Gossypium hirsutum
  Clone ID: GOSHI-09MAY01-C6289_2
tcctacgcgtccgcccacgcgtccgaccacgcgtccggcaacatgtatttcatgggttcagatttggagagaaatcccaagcgagcttacttgccgatcagattgtcagtgttaattccaaattgcttcagcaggcattggagaatgttgagatagcttcaaagagatggactataactgaatcactcgccggaactaagctggtgagaaatagattgaggatatcagaaaaacgctttactccatcgacaagtgaggagaagctgggaacaaatttcactttgcaagaaaaggcacttcagcttatttctaagggcaaagttgcagttgttttagatatgagtgaccataagaaccggggaaaagaatatgacctcagtctctcttcctcaacaagcagggagaattctgaaacatcctcccttcagatgttgctttgtgacgacgagaggtttgtgaaggctgaatatagatcatctatgccac

SEQ ID NO: 20358 - DNA, 1880 bp, Gossypium hirsutum
  Clone ID: GOSHI-09MAY01-C6289_1
cccctcgcgtccgctcttctctgcttttacaagcaaatttcttcgaggctgtattttcagatatcggaactggcaaacagcaattccacggacaaatggattataaagcggctggtttatatacgttggatgaagcccttgaaactgtggggtttgggaaattccagggctttgttcttggatacgctggtcttggttggtttgctgaagccatggagattatgattctttcctttataggacaagctgttaaatctgagtggcaactttcctctggtcaggagagccttttaagtaccatcgtctttgctgggatgcttctcggagccaatacatggggccttttatcagataactacgggaggaggaaaggttttcttactatatctatggtaacttttggagctggattactgagcacattctctccaaactatttaacgcttgttgttcttcgaggtttggttggttttggccttggtggctcatctgtattcttatcctggtttctagagtttattccagcttctaatagcccccgcggccgcccacgcgtcccccctcgcggcccatttggatcaatttttgaggctgctcttgcatggattgtcatgcccaggttaaactggaggtgggtacttgcattttcggctgtgccatcttttgctttgcttattttgtatggtgttgcacccgagtctccgagatacctatgcatgaaaggtaacacaagtgatgcacttcgaattctggagaagatagcttcagtgaaccaaacaaagcttcctcctggtgtcctactttctggtagatcaaatgacaaggatgaagagtcttctccatcagaaaatactgccccattacttccctcactcagtaaaactaccacacaatcaaaatcaggcttctcatcattttttatgcttttctcttcaaaattaattagaacaacgctgctcctatgggtactattctttggagattcattttcatattatggtatcatattgcttacctctaagctaagtagtggacaaagtacatgtttcccatctctccaaagcaatataaatccccaggatgatggtctctacctaaatgcattcatcaccagtatggcagagctacctgggcttcttctgtcagcaatattggttgatagggttggccgcaagcagtcgatggcaattatgttcggcttagcatttattttcctttcaccactgctaatccagcagcctgctgtgttaactacttgcttattatttggagctcgtatgaatgccatgggaacctttacagttgcctccatatattcccctgagttatatccaacctcggtgcggacaacaggggcgggagttgcaagtgctataggaagaattggtggtatggtatgtcctcttgttgcagtgggattggtgaatgaatgtcatcaaacagcagctgtagcgctatttttggtcgctatagttgtttcgatagtttgtatccaactcttcccctatgataccaagggacgggagcttagtgatactagttgataagaagtagttagcttctaaagacaaatggcaaattgtgtgccatccgtaatttgtcttttaagggaaataagtggtcccctacctgtagttatagtttgaattgtagggtggggatattatgtagacttaattttcttagaaaatgcaatggggtgctgggatcattttgtaaaaacataccagtcattgtcataattaaaatagtttcttctattacgtaaatgtgaagtacttgcgtattgcaattggcctgtgaaagttgtagcccccgctttgttttgtaccctgcccggtgacagaggttcctatgagagtaaaaaaaaaactagtgaa

SEQ ID NO: 20359 - DNA, 601 bp, Gossypium hirsutum
  Clone ID: LIB3825-003-Q1-K6-A11
ctttcctctggtcaggagaaccttttaagtaccatcgtctttgctgggatgcttctcggagccaatacatggggccttttatcagataactacgggaggaggaaaggttttcttactatatctatggtaacttttggagctggattactgagcacattctctccaaactatttaacgcttgttcttcttcgaggtttggttggttttggccttggtggctcatctgtattcttatcctggtttctagagtttattccagcttctaatagaggcatgtggatggtagtgttttctactttctggacatttggatcaatttttgaggctactcttgcatgggtatgtatatttcctatatcacaatttaaggctatctttaccatagcctcttctccctgcacctaaaactacagattttttttattttatctcttttccttatggaggctcagagctcgaaactcacatatttttaaactgaaacaagtacaagaaaagggtcatgaaaatataggccttagatgttaacttcttttctcttcaccaactaacagtgctgccaagatgtgcagccacaagcctagacactaaattatggtcc

SEQ ID NO: 20360 - DNA, 403 bp, Gossypium hirsutum
  Clone ID: LIB3146-020-Q1-K1-D11
tataagaagaattggtggtatggtatgttctcttgttgcagtgggattggtgaatgagtgtcatcaaacagcagctgtagcgctatttttggtcgctatagttgtttcgatagtttgtatccaactcttcccctatgatacgaagggacgggagcttagtgatactagttgataggaagtagttaacttctaaagacaaatggctaattgggtgccatccgtaattttgtttttaagggaaataatgcggccgcttcctatttatatgaccataataaccggggaaaagaatatgacctcattctctctctctcaacaagcagggagaattctgaaacatcctcccttcacatgttgctttgtgacgacgagaggtttgtgaaggctgaatatagatcatcta

SEQ ID NO: 20361 - DNA, 369 bp, Gossypium hirsutum
  Clone ID: uC-gsflnu33B108d11b1
tatttgtcttttaagggaaataagtggtcccctacctgtagttatagtttgaattgtagggtggggatattatgtagacttaattttcttagaaaatgcaatggggtgctgggatcattttgtaaaaacataccagtcattgtcataattaaaatagtttcttctattacgtaaaaaaaaaaaaaaaaaaaaaaaaaaaaaaaaaaaaaaaaaaaaaaaaaaaaaaaaaaaaaaaaaaagggaaaaccatataaaaggaatccaagctaacaaacccacaaacgcaaaggcaaaacttttttatagggccaccataattttaattaattggccgtttttttacagcggccccattggaaaaaccctgtt

SEQ ID NO: 20362 - DNA, 1883 bp, Gossypium hirsutum
  Clone ID: GOSHI-09MAY01-C6209_1
cacaggccaactaaaagacctccattttcatctgtttttttttccatcaaattaagttttgcgtttcgtttttcaggttgaagaaatcctccttttgggttcgatctctggcttcaccaccaatgctagagatcggacatgccccaggtaatgcccttttcggcaaatacgagatcggccggctcctcggttgcggtgctttcgccaaggtttatcatgccagaaacctccgcaccggcctcagcgtcgctgttaaggtcatcaacaaaaagaagctacccaacctcaccatgatgtccaacgtcaagcgcgagatctccatcatgagtcgcttgaaccacccttatatcgtcaaactttacgaggttctggccaccaaaaccaagatctatgtcgtcatggaattcgtcaaaggtggagaattgttcgctaaggttgctaaaggaaggttcaccgaagatctcagccgtaagtatttccaacagctcatctccgccgttgggtactgccattctcgtgggatattccaccgtgatttgaaacctgaaaatctcctcctcgacgacaacgggaacttgaaggtttcagatttcggtctcagcgccgtaactgaacagatccgagccgacggcatgctgcacaccttgtgtgggaccccagcttacgtcgcaccggagatcttgtcaaagaagggatacgatggagctaaggtggacgtgtggtcatgcggcgtcatcctcttcgtgatgaacgccggttacttgccttttaatgatcccaatctcatggctatgtacaggaagatatacaacggtgagtttcgttgtcctaaatggatgtccagcgatatgaaacggttcatttctcgactcctggatacgaatcccgttacaaggatctcccttgatgagatccttaaggatccatggttcaggaagggttacaaagagcccaagttccacgaggagcaacccaaggatgacgctcaggcctcaagctcgaagctgaatgcattcgatttgatatccttctcctcgggtttgaacttgtcggggttgttggatgagtctcacgattacggtgaacggttcatattgagagagtccccagagaaattggtggagaaagtagagcaattaggcaagggtgagagattgaaggtcaagaagaagaaacagtggggcgttgaattggaaggaaaagaaaggatttctggggtagctattgaggtataccagttaaccgatgagctggttgtggtggaaaccaaaagaacaggcagtgatgctcaatggtacaaggaactctggaacaacaagctgagacctgccctagtgggaaattagccgtacgtattggtttggcttttgtggaaacgcaaaaatgaagtcttgttgatttcaatatgggtgcatttgctattgttgttattattgttatgaattgattgatgaatgatgtgaataaaaggggagaatacagacaatatttgcttcagcaatggaggaattttccttccaaggcagagcagaaggagaaggatgagtgaaacttactacttcatacagaagttagtataacaatcatagtagttattataattatgtaagttgctgtatgttagcagcattttggtggagtaatactaaagataacccggaactttgtttatttgggggttaacaaaatccccatccccaacataaagtttaccattggatttctctcgcttgtattgaattgtattttggtgggttatatataccttcccttggggggtatataagagaagcgcacccaaagagaactctgtattatataaataataaagggagggatttttattggttttctttaaaaaaaaaaaaaaaaaacttcggggg

SEQ ID NO: 20363 - DNA, 646 bp, Gossypium hirsutum
  unsure (1)..(646): unsure at all n locations
  Clone ID: AW187888.1
ctgtccactttggtaccctgcgccatcttanatcnacggtatcnataagcccgatatcaaattcggcacaaggatccttatatcgtcaaactttacgaggttctggccaccaaaaccaagatctatgtcttcatggaattcgtcaaaggtggagagggtgcgctaangtttctaaangaaggttcaccnaaaatctcanccntaattatttccaacacctcatctcctccgttgggtactgccattctcttgggatattccaccgtgatttgaaacctcaaaatctcctcctcgacgacaactggaacttcaacgtttcacatttcggtctcagcgccgtaactgaacatatcctatcccaccgcatgctgcacaccttgtgtgggaccccaccttacgtctcaccggagatcttgtccaacaaaggataccatcgagctaacgtggacttgtggtcatgccgcgtcatcctcttcgtgatgaacgcccgttactttccttttaatgatcccaatctcatggctatgtacacgaagatatacaaccgtgactttcgttgtcctaaattgattttcaaccatatgaaactgtncaattctctactccctgatacaaatccccttaccaggatttcccccgattacac

SEQ ID NO: 20364 - DNA, 484 bp, Gossypium hirsutum
  Clone ID: LIB3585-051-P1-K1-G10
cccacgcgtgcgtccaactattatgacacaatcatttagctaaagaatatcatggcggagaggtctcaacttgcatatgagacgatgaaacagctatacacacttagaatctacgccacctaaactttataagaaaaactaagctctcaacttgacatacttgtcccaggtaccatctcaatatctagaaactattataagttcatacacaccaaatcaaagatatatgtttcactatatatttccaaatgagatgaatagtttaatattgttgctaaatcaaggttcacccattatcttaaacgaacttatttccaacaggatcatttccaatataatttacatacactctctttggatattccaccgtgatttgaaacctgaaaatctcctcctcgacgacaacgggaacttgaaggtttcagattgccgtctcatctccagaactcaacatatcctagcctacatcctgcttcacaccttt

SEQ ID NO: 20365 - DNA, 394 bp, Gossypium hirsutum
  Clone ID: LIB3166-004-P1-K1-G10
gtttttcaggttgaagaaatcctccttttgggttcgatctctggcttcaccaccgatgctagagatcggacatgccccaggtaatgcccttttcggcaaatacgagatcggccggctcctcggttgcggtgctttcgccaaggtttatcatgccagaaacctccgcaccggcctcagcgtcgctgttaaggtcatcaaccaaaagaacaggcagtgatgctcaatggtacaaggaactctggaacaacaagctgagacctgccctagtgggaaattagccgtacgtagtggtttggcttttgtggaaacgcagagatgaattcttgttgatttcaatatgggtgcatttgctattgttggtattattggtatgaattgattggtgaatgatgtg

SEQ ID NO: 20366 - DNA, 266 bp, Gossypium hirsutum
  Clone ID: LIB3148-026-Q1-K1-A10
gcattttggtggagtagtactaaagataaccgggaactttgtttatttggggattaacaaagtccccatccccaacataaagtttaccattggatttctcttgcttgtattttattgtattgtgttgtatatacctttccttttggtgtatataagagaagtgcagccaaagagaatactggatttttttaaaaaaaaaaaaaaaaaaaaaaaaaaaaagaataaaagattaaaatttaaaataaaataatagaatataataatgg

SEQ ID NO: 20367 - DNA, 414 bp, Gossypium hirsutum
  Clone ID: GOSHI-09MAY01-C6239_7
agccttccggcattcacccaattacctaactaactactctgctctgctctcttctacttatgcaatctaaaacctctgccatctgcccggctctctgttttactccacaaccactatcactaccattatggcttcggctactgtttctgtagccaaacccaaccttcagattcaggcaaaaggaaagggtgttggttttgcagatttctcaggcctacacaactcctctactagccttccctttgccaggaaaacctctgatgacttccattcactcgttgcttttcagacatctgctctaggaagcaataatggcgggtacaggaaaagggatggcagaggcaaagctaaaggtggcttttaaatgggtttggtaggattggcaggaatttcttaagatgctggcatggccgt

SEQ ID NO: 20368 - DNA, 707 bp, Gossypium hirsutum
  Clone ID: GOSHI-09MAY01-C6239_5
cccacgcgtccgcccacgcgtaggctcgggtctagaatttttttataaccaaaggcacaacggctactacgtatgcatatactggtgaccaacgatcactcgatgctagccaccgcgacctcatgcgtgctagagctgcacctctaaacattgttacgacttcaactggtgcagctaacgctgtggcccttgtactccctactctcaaaggcaaactaaatggcattgccttgcgcagaccaacaccaaatgtttcggtcgttgacttaattgtccaggtctcaaagaagaccttcgctgaagacgcgaacgctgccttcagagagagtgcagagaaagagctacagggtatactttcagcgggcgcggggcccctcgcgtcggtggacttcaggtgctctgatgtgtcctccaccgttgatgcatcactcaccatggtcatgggagatgacatggttaaggtgattgcttggtatgacaatgagtggggctactctcaaagggttgtggatttggctgacattgttgccaatagctggaagtgacttcaatgtgctatacatacatatatgcataacaatgtcaccgatggttgatttttgcatgctcacttcatttttattctttcggcttcagcaatttctcattttgtcaaggctactatataatctgtaatgtaatgttggatacatacattctctaatatg

SEQ ID NO: 20369 - DNA, 561 bp, Gossypium hirsutum
  Clone ID: GOSHI-09MAY01-C6239_3
cccacgcgtccgattcagtcatccaccaattaccttacttactactctgctctgctcccacgcgtccgcccacgcgtccgcccccgtcatctgtccgtctctctgttttactccacaaccactatcactaccattatggcttcggctactgtttctgtagccaaacccaaccttcagattcaggcaaaaggaaagggtgttggttttgcagatttctcaggcctacacaactcctctactagccttccctttgccaggaaaacctctgatgacttccattcactcgttgcttttcagacatctgctctaggaagcaataatggcgggtacaggaaagggatggcagaggcaaagctaaaggtggctataaatgggtttggtaggattggcaggaatttcttaagatgctggcatggccgtaaggactccccacttgatgtcattgccatcaatgacactggtggtgttaagcaggcttctcaccttctcaaatatgattccacccttggcatcttcgctgccgatgtcaagcctgtcggcactgatggcatctctgttgat

SEQ ID NO: 20370 - DNA, 1435 bp, Gossypium hirsutum
  Clone ID: GOSHI-09MAY01-C6239_2
cggggcggacccacccgtcccccccgcgcccgcgcccccgcgtccggtgtgcctctgctacgcaccacttcttaagcagcttcctctacgatcataatggtgtcggttactgtttctgtagccaaaccaacccttcaggcaaatgcaaagggttttgcggaattctcaggtctgcgcaactcagctagccttacctttgccaggaaaacctcggatgactttcaatcagtcattgcttttcagacatctgctttgggaatcaataatggtggataccggaaaggcgtggtagaggcaaagctaaaggtcgctattaatgggtttggtaggattggcaggaacttcttaaggtgctggcatggccgtaaggactccccacttgatgtcattgcaatcaatgacactggtggtgttaagcaggcttctcaccttctcaagtatgattccacccttggcatcttcgctgccgatgtcaagcctgttggcactgatggcatctctgttgatggcaaggttatcaaggttgtttctgaccgcaaccctgccaacctcccatggggggacctaggaatagatctagtcatcgaaggaaccggtgtgttcgtcgatagagaaggtgcaggtaagcacattcaagcaggagccaagaaagtgctgattactgccccaggtaagggtgacatccccacctatgttgttggagtgaatgctgacacctacaacccagatgagcctatcatcagcaatgcttcttgcaccaccaattgccttgctcctttcgtcaaggttctggaccagaagtttggtatcatcaagggcaccatgactaccactcactcgtacaccggtgaccagaggcttcttgatgctagccaccgtgacctcaggcgtgctagagccgcagctctcaacatcgtcccgacttcaactggtgcggcgaaggccgtggcccttgtactccctactctcaaaggcaaacttaatggcatcgcattgcgtgtaccaacaccaaatgtgtcggtggtggacctagtggtccaggtttcaaagaagacgtttgctgaagaggtgaacgctgctttcaaagagagtgcagagaaggagctacagggtatactttctgtgtgcgatgaaccccttgtttcagtggacttcaggtgctctgatgtgtcctccaccgttgatgcatcactcaccatggtcatgggagacgacatggttaaggtgattgcttggtacgacaatgagtggggttactctcaaagagttgtagacttggctgacattgttgccaacagctggaagtgattccaaatacttgtctgcagtgtgatatggttaatttttgctccccccatttcttttcggctttcatcaagaatgtataattttaacgtgggctgtatgcaataaaaatcgtgcttgccctttgatg

SEQ ID NO: 20371 - DNA, 1063 bp, Gossypium hirsutum
  Clone ID: GOSHI-09MAY01-C6239_1
taggatcaaagcaatttgtcctaaccagatcagtttcgaccaaatggagttcccattcggtcacaatcactctcacactcatcaccacagaaatgatgatgaggaaaaccaagaaagacccccaccaccacatcttcaccaccatgaatttactccgccgtaccctccaccaccaagctaccagcagccacctggctttgatggaccctatcctccgccacctccatcatcatacttgcaccaacctggctttgatggtccacccccaccatcttactttcagcaacctggatttccaccacccccaccacaccaaccaccgtcatatcagtaccaacagccaccccatgtgactcatgtccaccgccagcctgaacacagtccatcgaactactctccaccaccagcatctgtttcaaatgtttcccatgaaagtagccaaggaagggttgatgaccatccttcttttagaccccatttgccacctgaattctacaagaaacctactgtgaaagtctattgcaaagctgatcctaattttcatctcaccatcagagacggtaaagttattcttgctccatctgatccctctaatgaattccagcactggtacaaagatgagaagttcagcacaagtgtgaaagatgaagtgggtttcccaagcttttctctggttaataaagccactggtcaagccattaaacattccattggagcttcttatcctgtccaactggtaccttacaaaccagatcatcttgatgagtcagttgatttcaggtgctctgatgtgtcctccaccgttgatgcatcactcaccatggtcatgggagacgacatggttaaggtgattgcttggtacgacaatgagtggggttactctcaaagagttgtagacttggctgacattgttgccaacaactggaagtgattcgaaatacttgtctgcagtgtgatatggttaatttttgctcacctcatttcttttcggctttcatcaaagatgtataattttaacgtggactgtatgcaataaaaatcgtgcttgcactttgatggcctt

SEQ ID NO: 20372 - DNA, 451 bp, Gossypium hirsutum
  Clone ID: LIB3135-031-Q1-K1-D7
accagcatctgtttcaaatgtttcccatgaaagtagccaaggaagggttgatgaccatccttcttttagaccccatttgccacctgaattctacaagaaacctactgtgaaagtctattgcaaagctgatcctaattttcatctcaccatcagagacggtaaagttattcttgctccatctgatccctctaatgaattccagcactggtacaaagatgagaagttcagcacaagtgtgaaagatgaagtgggtttcccaagcttttctctggttaataaagccactggtcaagccattaaacattccattggagcttcttatcctgtccaactggtaccttacaaaccagatcatcttgatgagtcaatgctattgagcgagagcaaggaagtccatgatgggtacagagctataagaatgattaataacattcgcctgaatgtcgatgct

SEQ ID NO: 20373 - DNA, 453 bp, Gossypium hirsutum
  Clone ID: LIB3120-002-Q1-K1-F12
cccacgcgtccgcccacgcgtccgcccacgcgtccgctagatcgcgagcgcccacgcgtgcgcccacgcgtccgactatcactaccattatggcttcggctactgtttctgtagccaaacccaaccttcagattcaggcaaaaggaaagggtgttggttttgcagatttctcaggcctacacaactcctctactagccttccctttgccaggaaaacctctgatgacttccattcactcgttgcttttcagacatctgctctaggaagcaataatggcgggtacaggaaagggatggcagaggcaaagctaaaggtggctataaatgggtttggtaggattggcaggaacttcttaaggtgctggcatggccgtaaagactccccacttgatgtcattgccatcaatgacacttgtggtgttaagcaggcttctcaccttctcaaatatgatt

SEQ ID NO: 20374 - DNA, 332 bp, Gossypium hirsutum
  Clone ID: LIB3120-010-Q1-K1-H6
gttctggaccagaagtttggtaattccttttaacactatattaatatagatgatatgccctattacgagtttctgactaatgctaatgtaatatatatgacaggtatcatcaagggcaccatgactaccactcactcgtacaccggtgaccagaggcttcttgatgctagccaccgtgacctcaggcgtgctagagccgcagctctcaacatcgtcccgacttcaactggtgcggcgaaggccgtggcccttgtactccctactctcaaaggcaaacttaatggcatcgcattgcgtgtgccaacaccaaatgtgtcggtggtggacctagt

SEQ ID NO: 20375 - DNA, 484 bp, Gossypium hirsutum
  Clone ID: GOSHI-09MAY01-C6229_10
aacggaccgggtcgagcccgacgcgatccggagacctcattttgtataacctgtagctatatatgtacctagtaagcagtaatagcaatgggccgtcctccatgatctcatcggcaacccaattgggccacacgttgaacctggctctcccccccggcaacaagggcacaacatgtgttggggcccccttcaacacggcccctcaagtctggcctctggctttctccacgtcaccttaggaaagggccaaccaacgaccactcacttctcttgcaaggcaatggtgggaggagtgcaatgcatgccaggtgtggcccccctcttgggaaggaagaagttcgagacactctcatacctccccgatcttacacccgtacagttggctaaggaagtagattaccttcttcgctctaaatggattccttgcttggaattcgaattagaggagggattcgtgcaccgtaagtactcgagcttacccacg

SEQ ID NO: 20376 - DNA, 467 bp, Gossypium hirsutum
  Clone ID: GOSHI-09MAY01-C6229_9
acggaccgggaatgactgggtgggccgacccatgcgtccacccgccccttcttttgtataacttgtagcatattgtactagttaagcaccaataccaatggccgccttcaatgatctcatcggcgaccattgccaccgtgaaccgctgcttacccggcaacaagcccaacatggtggcccccttcaccggcctcaagtctgcctctgctttcccagtcaccaggaaggccaacaacgacatcacttctcttgcaagcaacggtgggagagtgcaatgcatgcacgtgtggccgcctcttgcgaagaagaagttcgagactctctcatacctgcccgatcttactcccgtacagttggctaaggaagtagattaccttcttcgctctaaatggattccttgcttggaattcgaattagaggagggattcgtgcaccgtaagtactcgagcttacccacgtactacgat

SEQ ID NO: 20377 - DNA, 725 bp, Gossypium hirsutum
  Clone ID: GOSHI-09MAY01-C6229_7
cggacgcgtgggtaaattattagggttatttttaaaattttcatatttgataaaggtgtttatggaaaccctttctcctaaatcaacctcaaacttttttaaccaaaggatgttatacccaaactccatcattataaattggaccttggaactgcgggaaataaacgggagatatagttagctatagcatacactactagtacccactactagcaatggcttcctcaatgatctcatcggctaccattgccactgcctccccggcacaggccaacatggtcgcccccttcaccggcctcaagtctgcctctgctgtcccagtcaccaggaaggccaacaacgacatcacttctctcgcaagcaatggcggcagagtgcaatgcatgcaggtgtggcctcctactggtgatgcatagaagttcgagacttaaattaccccaattgtttgaacacaacaaattacataaattgaatcaaatatatatcttggcttttgagtataggtgtggcctcctcttgggaagaagaagttcgagacactctcatacctgcccgatcttacacccgtacagttggctaaggaagtagattaccttcttcgctctaaatggattccttgcttggaattcgaattagaggtgttttcgagctctaaattattccattccaacactttatttttttagtgggatatttgatttgattaaatgtgtttataagtatgt

SEQ ID NO: 20378 - DNA, 451 bp, Gossypium hirsutum
  Clone ID: GOSHI-09MAY01-C6229_5
cccacgcgtccgcccacgcgtacgcggacgcttgttttgacgcgtgggtagctacagcgtgcgctactagtacccactactagcaatggcttcctcaatgatctcatcggctaccattgccactgcctctccggcacaggctaacatggtcgctcctttcaccggcctcaagtctgcctctgctttcccagtcaccaggaaggccaacaacgacattacttctctcgcaagcaatggcggcagagtgcaatgcatgcaggtgtggcctcctaccgggaagaagaagttcgagactctctcatacctccccgatcttacacccgtgcagttggctaaaggaagtaggattaccttcttcgctcaaaatgggttccttgcttggaattcgaattggaggagggtttcgtgctccgtacattactccattcctccactctttagtggggatatt

SEQ ID NO: 20379 - DNA, 709 bp, Gossypium hirsutum
  Clone ID: GOSHI-09MAY01-C6229_3
cttcgaaattcctttggggggcgcgtgcgcaacgcgttcaaccactcattttcttatttttccagccatggcggcagaatgcaatgcatgcacgtgtggcctcctactggaaagaagaaattcgagactctctcatacctccccgatcttacacccgtgcagttggctaaagaagtagattaccttcttcgctcaaaatgggttccttgcctgggatcccattttgaggagggattcgtgcaccgtaagtactcgagcttacccacgtactacgatggacgctactggaccatgtggaagctgcccatgttcgggtgcaccgactcggctcaggtgttggaggagcttgaggaatgcaagaaggcataccccaatgcattcattagaatcattggcttcgacaacgtgcgtcaagtgcagtgcattagtttcattgcctacaagcctccaggcttctaagctttttattaactttgtctctccatttgtttgaatttgtactcagaaaaaatcatgttctttacttttgcttttccttttctttgagttattggcctttgtttctcgatttccgggttttaatcctgagaactaatgaataaaaagttggttttcttcccaaataaaaaaattttttaaaaaattaattatatataaaatatcatttaaatttattattatattttttttattcttaatattaaattaa

SEQ ID NO: 20380 - DNA, 951 bp, Gossypium hirsutum
  Clone ID: GOSHI-09MAY01-C6229_2
tccacgccggtaccccccgcgtccgcccacgcgtccccccacgcgcggtgagactcttttgtataactgtagcatatagtactagtaagcagtaatagcaatggcctcctccatgatctcatcggcaaccattgccaccgtgaactgctcctccccggcacaggccaacatggtggcccccttcaccggcctcaagtctgcctctgctttcccagtcactaggaaggccaacaacgacatcacttctcttgcaagcaatggtgggagagtgcaatgcatgcaggtgtggcctcctcttgggaagaagaagttcgagacactctcatacctccccgatcttacacccgtacagttggctaaggaagtagattaccttcttcgctctaaatggattccttgcttggaattcgaattagaggagggattcgtgcaccgtaagtactcgagcttacccacgtactacgatggacgctactggaccatgtggaaactgcccatgttcgggtgcaccgactcggctcaggtgttggaggagcttgagaattgcaagaaggaataccccaatgcattcattagaatcattgggttcgacaacgttcgtcaagtgcagtgcattagtttcattgcctacaagcctaaaggctactaagttgtttacttccctcctaggaattccatttgtttcaaagttgtacttaaattaagcccctcaaaccccccccccctttttctttttcttttttaattgaggtatttggcttggggtctttctctttgttttgttttggatttccaatggaacggctgagaactaatgaataaaaaggtagtttcttgccatatttcttggaaaaaaaataatattaattatattaaaattttataaatatataatatatttttattttttttttttttatttatttatatattatttaaatttatattttt

SEQ ID NO: 20381 - DNA, 852 bp, Gossypium hirsutum
  Clone ID: GOSHI-09MAY01-C6229_1
gacccacgcgtccgcccacgcgtccccccacgcgtccgcccacgcgtccgtttagctatagcatacactactagtacccactactagcaatggcttcctcaatgatctcatcggctaccattgccactgcctctccggcacaggctaacatggtcgctcctttcaccggcctcaagtctgcctctgctttcccagtcaccaggaaggccaacaacgacattacttctctcgcaagcaatggcggcagagtgcaatgcatgcaggtgtggcctcctactggaaagaagaagttcgagactctctcatacctccccgatcttacacccgtgcagttggctaaggaagtagattaccttcttcgctcaaaatgggttccttgcttggaattcgaattagaggagggattcgtgcaccgtaaatactcgagcctacccacgtactacgatggacgctactggaccatgtggaagctgcctatgttcgggtgcaccgactcggctcaggtattgaaggagcttgaggaatgcaagaaggaataccccaatgcattcattagaatcattggcttcgacaacgtgcgtcaagtgcagtgcattagtttcattgcctacaagcctccaggcttctaagctttttattaactttgtctctccatttgtttgaatttgtactcagaaaaaccatgttctttacttttgcttttctctttctttgagttattggcctttgtttctcgatttctgggttttaatcctttttggattttcattggaagaaaggctgagaactaatgaataaaagttggttttcttcccgatttccttcctaacaaaaaaggtgttttttatgaac

SEQ ID NO: 20382 - DNA, 490 bp, Gossypium hirsutum
  Clone ID: LIB3120-004-Q1-K1-C5
cactcccgttcggtactgctggattgctttatcttataaaattgattgcctgtcaaagatggtgctgcttattcacgtgcttatctggtcgatcctttcaccggactaagggcggcctctgttttggaagcaatcatgcaggccaacacctacattactatactcgcaagaaatggcgagcgaatgcaatgcatgcaggtgtggcctactactggaaagaagaagttagagactctgtcataccttcaagatcttacacccgtgcagttggctaaggaagtagattaccttcttagctcaaaatggcttacttgcttggaatacagaattagaggagggattcgcgcaccgtacatactctagactacccacgtactaccatggacgctactggaccatgtgaaagctgcctatgatcgggtgcaccgactaggctcaggtattgaaggagcttgaggaatgcaagaacgaataccgcaatgcattcatt

SEQ ID NO: 20383 - DNA, 412 bp, Gossypium hirsutum
  Clone ID: LIB3165-040-Q1-K1-A1
cggacgcgtgggcggacgcgtgggcggacgcgtgggctcgcaagcaatggcggcagagtgcaatgcatgcaggtgtggcctcctactggaaagaagaagttcgagactctctcatacctccccgatcttacacccgtgcagttggctaaggaagtggattaccttcttcgctcaaaatgggttccttgcttggaattcgaattagaggagggattcgtgcaccgtaaatactcgagcctacccacgtactacgatggacgctactggaccatgtggaagctgcctatgttcgggtgcaccgactcggctcacgtattgaaggagcttgaggaatgcaagaaggaataccccaatgcattcattagaatcattggcttcgacaacgtgcgtcaagtgcagtgcattagtttca

SEQ ID NO: 20384 - DNA, 401 bp, Gossypium hirsutum
  Clone ID: LIB3165-022-P1-K1-H6
cgcccacgcgtgccattatttctttatccaagcagagacacgacagtgcaatgcatgcaggtgtggcctgctacgtggaaagaagaagttcgagactctctcatacctccccgatcttacacccgtgcagttggctaaggaagtggattaccttcttcgctcaaaatgggttccttgcttggaattcgaattagaggacggattcgtgcaccgtaaatactcgagcctacccacgtactacgatggacgctactggaccatgtggaagctgcctatgttcgggtgcaccgactcggctcaggtattgaaggagcttgaggaatgcaagaaggaataccccaatgcattcattagaatcattggcttcgacaacgtgcgtcaagtgcagtgcattagtttca

SEQ ID NO: 20385 - DNA, 381 bp, Gossypium hirsutum
  unsure (1)..(381): unsure at all n locations
  Clone ID: LIB3120-008-Q1-K1-H10
gggattggcactggggaataaacattattaagggagatatatttagctatagcatacactactagtacccactactagcaatggcttcctcaatgatctcatcggctaccattgccactgcctctccggcacaggctaacatggtcgctcctttcaccggtctcaagtctgcctctgctttcccagtcaccaggaaggccaacaacgacattacttctctcgcaagcaatggcggtagagtgcaatgcatgcaggtgtggcctcctactgggaagaagaagtttgagactctctcatacctccccgatcttacacccgtgcagtttgctaaggaagtnagataccttcttcgctcaaaaatgggtccttgcttggaattcg

SEQ ID NO: 20386 - DNA, 421 bp, Gossypium hirsutum
  unsure (1)..(421): unsure at all n locations
  Clone ID: LIB3165-045-Q1-K1-E2
cccacgcgtccgttcttttgtataactgtagcatataatactaggtaaccaatataaccatgggcttcttcattaatttatcgggaaccattggcaacgggaactggttcttcccgggacaaggcaacatggggggcccctttaaccgccttaaagcttgcttttgttttccaagcactaagaaaggcaacaaccaccatactttttttggaagccatggtgggagaaggcaatggatggcagtggggccttcttttgggaaaaagaaagtcgagacaactttataccctcccgatcttacacccgtacagtggcttaagaaagagattaccttcttcgctctaaatggattccttgcttgaattcgaattaaanggagggattcgtgcacccgaagtactcgagcttacccacgtactac

SEQ ID NO: 20387 - DNA, 371 bp, Gossypium hirsutum
  unsure (1)..(371): unsure at all n locations
  Clone ID: LIB3165-052-Q1-K1-E4
tcaataataataaatgggaccttggaccggcgggaaataaacggaagatatagttagctatagcatacactactagtacccactactagcaatggcttcctcaatgatctcatcggctaccattgccactgcctctccggcacaggctaacatggtcgctcctttcaccggcctcaagtctgcctctgctttcccagtcatcangaaggccaacaacgacattacttctctcgcaagcaatggcggcagagtgcaatgcatgcaggtgtggcctcctactggaaagaagaagttcgagactctctcatacctccccgatcttacacccgtgcagttggctaaggaagtagattaccttcttcgctcaaaat

SEQ ID NO: 20388 - DNA, 369 bp, Gossypium hirsutum
  Clone ID: LIB3165-018-P1-K1-B9
cggacgcgtgggcggacgcgtgggcgtgtacgctttggcggacgcgtgggcggacgggtggtcagtgagactcttttgtatacctgtagcatatagtaatagtaagcagtaatagcaatggcctcctccatgatctcatcggcaaccattgccaccgtgaaccgctcctccccggcacaggccaacatggtggcccccttcaccggcctcaaatctgcctctgctttcccagtcaccaggaaggccaacaacgacatcacttctcttgcaagcaacggtgggagagtgcaatgcatgcaagtgtggccgcctcttgggaagaagaaattcgagactctttcatacctgcccgatcttacttccctacag

SEQ ID NO: 20389 - DNA, 385 bp, Gossypium hirsutum
  Clone ID: LIB3493-057-P1-M1-D1
gtcaccctgtctcccaaaccagtctcgggatgtggtgagcttagaccaaattttatgactatatataggggattgcaccaaggcagtgacactattaagggatcagtgagactgttttgtatacctgtagcatatagtaatagtaagcagtaatagcaatggcctcctccatgatctcatcggcaaccattgccaccgtgaaccgctcctccccggcacaggccaacatggtggcccccttcaccggcctcaaatctggctctgctttcccagtcaccaggaaggccaacaacgacatcacttctcttgcaagcaacggtgggagagtgcaatgcatgcaggtgtggccgcctcttgggaagaagaagttcgagactctctcata

SEQ ID NO: 20390 - DNA, 352 bp, Gossypium hirsutum
  Clone ID: LIB3120-025-Q1-K1-D6
cccacgcgtccgagatcgcgagcgccgcccttttttttttttttttttttttttttttggtttcgctttttgggcaagaaactaggtttttattcattagttctcagccggtccattggaaatccaaaacaaaacaaagagaaagacccccagccaaataccttaattaaaaaagaaaaagaaaaagggggggggggtttgaggggcttaatttaagtacaactttgaaacaaatggaattcctaggagggaagtaaacaacttaatagcctttaggcttgtaggcaatgaaactaatgcactgcacttgacgaacgttgtcgaacccaatgattttaatgaatgcattggg

SEQ ID NO: 20391 - DNA, 423 bp, Gossypium hirsutum
  Clone ID: LIB3165-053-Q1-K1-H4
agattaccttcttccttagccaactgtacgggtgtaagatcggggaggtatgagagtgtctcgaacttcttcttcccaagaggaggccacacctgcatgcattgcactctcccaccattgcttgcaagagaagtgatgtcgttgttggccttcctagtgactgggaaagcagaggcagacttgaggccggtgaagggggccaccatgttggctaaggaagtagattaccttcttcgctctaaatggattccttgcttggaattcgaattagaggagggattcgtgcaccgtaagtactcgagcttacccacgtactacgatggacgctactggaccatgtggaaactgcccatgtttgggtgcactgactcggctcaggtgttggaggagcttgagaattgcaagaaggaataccccaatgca

SEQ ID NO: 20392 - DNA, 356 bp, Gossypium hirsutum
  Clone ID: LIB3165-005-P1-K1-E10
cccacgcgtccgcccacgcgtccgtccacgcgtccgatatttagctatagcatgcactactagtacccactactagcaatggcttcctcaatgatctcatcggctaccattgccactgcctctccggcacaggctaacatggtcgctcctttcaccggcctcaagtctgcctctgctttcccagtcaccaggaaggccaacaacgacattacttctctcgcaagcaatggcggcagagtgcaatgcatgcaggtgtggcctcctactggaaagaagaagttcgagactctctcatacctccccgatcttacacccgtgcagttggcttaggaagtggattaccctcttcgctcaaa

SEQ ID NO: 20393 - DNA, 354 bp, Gossypium hirsutum
  Clone ID: LIB3165-055-P1-K1-C9
cggacgcgtgggcggacgcgtggtgttgacgcgtgggcggacgcgtgggtttaggtatagcatacactactagtacccactactagcaatggcttcctcaatgatctcatcggctaccattgccactgcctctccggcacaggctaacatggtcgctcctttcaccggcctcaagtctgcctctgctttcccagtcaccaggaaggccaacaacgacattacttctctcgcaagcaatggcggcagagtgcaatgcatgcaggtgtggcctcctactggaaagaagaagttcgagactctctcatacctccccgatcttacacccgtgcagttggctaaagaagtggattacct

SEQ ID NO: 20394 - DNA, 265 bp, Gossypium hirsutum
  unsure (1)..(265): unsure at all n locations
  Clone ID: LIB3120-023-Q1-K1-D6
acgtttaactatagcatacactactagtacccactactagcaatggcttcctcaaggatctcatgggctaccattgccgctgcctctccngcacaagctaacatggtcgctcctttcaccggcctctgcttttccaatcaccaagaacgccaacaacgacattacttctctcgcaagcaatgacggcagaatgcaatgcatgcacgtgtggcctgctactggaaacaataaattggagactctctcatacctccccgatctacac

SEQ ID NO: 20395 - DNA, 269 bp, Gossypium hirsutum
  Clone ID: LIB3120-053-P1-K1-C5
ttgtacgctcctttctgacgccgggctaacgcgtgtgcggacgcgtgggcggacgcgtgggagctatagcatacactactagtacccactactagcaatggcttcctcaatgatctcatcggctaccattgccactgcctcttcggcacaggctaacatggtcgctcctttcaccggcctcaagtctgcctctgctttcccagtcaccaggaaggccaacaacgacattacttctctcgcaagcaatggctgcagagtgcaatgcatgc

SEQ ID NO: 20396 - DNA, 230 bp, Gossypium hirsutum
  Clone ID: LIB3165-008-P1-K1-C1
gtgagactcttttgaatacctgtatcatttagtaatagtaagcagtaatagcagtggcctcctccatgatctcatcggcaaccattgccaccgtgaaccgctcctccccgcacaggcctcatggtgcccccttaccggctcaaattgctctgtttccagcacaggaagcacacacatacttttgagcacggggagcatcatcaggtgcgcttggagagagtgagctttat

SEQ ID NO: 20397 - DNA, 776 bp, Gossypium hirsutum
  Clone ID: GOSHI-09MAY01-C7989_4
gaactttaaagcaactccaatgccaagcttctatcaggagcctccacgccctaaggtggaattaaagaagataccaccaacaagagctaaatctccaaagcttggtagaagaaaaagctcaactcctttggactctgatggtaacagcaatagtggtcaccaatcagtccagctaagtctggatgagaaagcatttcagagcacctcttctaaagtaatttctcctgtcaatgcaaagaagccacagcggaaatcacttcccaaactgccttctcagaagactagtctgtctggttcaacaaatgacgaaaagacatctaatacgcccagtcagaaaaaggtaaatgcacctaaagcatctaccgagggaaagatagccttgcctaaggcaacaaatgaggagaataacactttatctgatgtaacaaatgaagaattatctccaacccaactgcagccagcagtttctgctgctgattcaggtgaaagtcagccagacattgatcaagtggacttggttcaagagccgattgcactggagcatttaagcatggcaatggtttcaagtggatgttcatatacaaagttcttgacctgtatttgcctaatttaatgactactaatactgtaatattttatgatcaattgtttaaaaatgtttttacatttcccgttcatgattgtttttttctctattttataactattctctttttaatttcatttttcttttgttatgccttttttttttattaattttttgattattttttttt

SEQ ID NO: 20398 - DNA, 1326 bp, Gossypium hirsutum
  Clone ID: GOSHI-09MAY01-C7989_3
aaatccatgtatgaaacagcctcttagaggtagagcgttgaatgaaagacaagccaatgtatccaagcattctgaaaaaccagatgcaggcaatgcggagaaactgaagctaaagcctctgaataaagttgaaggagacacagaatcatccccgacggcagctgatgctaaagttcataagatcggtactcttccaaattatggtttcagtttcaagtgcgatgaacgggctgagaaaaggaaagagttctataataaactcgaggaaaaaattcatgcaagggaagtagaaaagagcaatttgcaagccaagtctaaggaaactcaagaagctgagattaagatgcttaggaagactttgaaattcaaagcgactccaatgccaagcttctatcaggaacctacacctccaaaggtggaattaaagaagataccacctacaagagctaaatctccaaagcttggtcggaggaaaagctcaactccttcagacattgatggtaacagcaataacaatcaccaaccaggccggctaagtctggatgagaaagcatctcagagcatctctgccaaagtgatttctcctgtccatgcgaagaagtcacagaggaaatcacttcccaaactgccttctcagaagacaagtttgtccggtgcaaaaaatgaggaacagaaatccaaggagtctgatcaggaaacgacaactaaaccgaaagcaacatctaaagtaacaagggaggagagtaccgcatcatcttatttgaaaaatgaagaatcatctccaattcaacaactggaggcattttccggagctaattcaggtggaagtcagcctgacttagatctagggccagtgattggagacttggaacaagagccaattgcggtggagcattaagtatggcaatggttttaagtggacactagtatataaagttctcgacctcattttgcataaataaggacgactgagactgaattatttgatgatcaaaggcatggaaactggaaacttctacattatgagtgatgatgatgtcgtcttttgtcttctccgatatccagcagcttcggtaggtttgcaaaggttgctgaggttgtttgcagcattgtatgtcctaatttatgttgttcaaggatggcttattttgtttctgaagttgtctgctgttggccaaacctgcttaagtccatttatattgtgtaaattgctctctgtttgttctatgaaattagtgtcttgctatttgcagagattgattatctatttaatttaaattttttaaaaaaaaaaaaaaaaagcccacgcgtccgcccacgcgtccg

SEQ ID NO: 20399 - DNA, 910 bp, Gossypium hirsutum
  Clone ID: GOSHI-09MAY01-C7989_2
ttctcgcgtccgcccacgcgtccgcagaatcagggaagcttgacggcagctgaggctaaagttcatcccacccgtacgcttccaaattatggttgcagtttcaagtgcgatgaacgggctgagaaaaggaaagagttctacaataaactcgaggaaaaaattcatgcaagggaagtagaaaagagcaacttgcaagccaagtccaaggaaactcaagaagcagagatcaaaatgtttaggaagaccttgaacttcaaagcgactccaatgccaagcttctatcaggagcctacaccccctaaggtggaattaaagaagataccacctacaagagctaaatctccaaagtttggtcggaggaaaagctcaactccttcggactctgatggtaacagcagtagcgatcaccaatcagtccagctaagtctggatgagaaagcatttcagagcacctcttctaaagtaatttctcctgtcaatgcaaagaagccacagcggaaatcacttcccaaactgccttctcagaagactagtctgtctggttcaacaaatgacgaaaagacatctaatacgtccagccagaaaaaggtaaatgcacctaaagcatctaccgagggaaagatagccttgcctaaagcaataaatgaagaattatctccaacccaactgcagccagcagtttctgctgctggttcagatgaaagtcagcgagacattgatcaagtggacttggttcaagagccgattgcactggagcattaagcatggcaatggtttcaagtggatgttcatatacaaagttcttgacctgaatttgcctaaataaggacgtctaagactgaattatttgatgatcaaggcataaaaaagattatacattaccggttatgatgttgtcttctccgatatc

SEQ ID NO: 20400 - DNA, 1423 bp, Gossypium hirsutum
  Clone ID: GOSHI-09MAY01-C7989_1
tcgtatattttatttatttttatttaattatctttgaagattcttcctgggttgggccctagactctctaatcttcgctgtttatcttactttcttcatcttttttctcagatcctttcgattttcttcactgatttctgtcattaatcttcgtcttggcttttatggagatttgatttaactcacactttacgagtgttgcagtgtgtgatggattcggataatctcttgtctgcgggtgggcttgaggttgcccatcaaaatggtgtttatccgcaacttcgggtgtctggggacgacagtggtattttgaataatgttaatggaaatgctgaggaaactgtcgggacttgttcgcagaatggaatagatgaccatggagcaactatggaagctagagaacgatcgaatgacttagtcgataacaatggatcaattggttctaaggaagaggaagtaaatgatcatgtgaatgtgaagcaatccaaacctcagaaggttcaaagcaagaccaagaatgagaagccctctggtaccagaaatgcttcttcagctttaatgaagaaaagtaaagatggaaaaactgcagaggtgaggttgacagcatcgaatggcggatctgtggctacaaattcacatctgaaacagcctctgaaaaatagatcatgtaatgaaagacaagccaatgcatccaagggtcctgaaaaaccggatgcagccttctctgaaggccccatggagaaacccaagctgaagcctcttaagaaggggcctcttaataaagctgaaggagacacagagtcctcccccatggcagccgatgccaaaccccgtaaggttggtagtcttccaaattatggtttcagtttcaagtgtgatgaacgagctgagaaaaggaaagagttctacaccaaacttgaggaaaagattcaggcaatggaagtagaaaagagcaacttgcaagccaagtccaaggaaactcaagaagcagagatcaaaatgtttaggaagagcttgaactttaaagcaactccaatgccaagcttctatcaggaacctgcacctcctaaggtggaattaaagaagataccaactacaagagctaaatctccaaagcttggtcgaaaaaaaggctcattccttttgagttcgatgctgctacaatagcagtcaccaatcaagtcggcgaaatctggatgagaaagcatctcaaagcatctctgccaaattaatttctccaattcaatgcaagaagccaccacgttaaatccttcccaaactggcttctcagaagaactatttggctgggtgcaccaatgaagaaaaaacatctaagggatttgatcaaaaaaagtaactgcttccaaacaactgctgagggaaaataacttctcccaaacaaccttatccaattcgacaaata

SEQ ID NO: 20401 - DNA, 320 bp, Gossypium hirsutum
  Clone ID: uC-gsflmaxxa097g02b1
atgcggtttgtttctctggctgaaaattcccatccaagggaggctctaaaaaggagtgggggagttaatgaaaaacatggcaacgctctcgaacagtctgcgagagctggtgcagccttgactgaaggcactatggagaaaccgcttgcagggccggtcaacaccggacctattcatactactgacatatacacagaattgttgagccccatggcagccgacgccaaacctcttagggttggtactcttccaaattatgggttcagcttcaagtgtgatgaacgggctgagaaaaggagagagttttacactaatcttca

SEQ ID NO: 20402 - DNA, 382 bp, Gossypium hirsutum
  Clone ID: GOSHI-09MAY01-C107972_1
gaagccatgcaaatattgttctttgattattatgatgccagacatgtattacatgaaaaggaactgagtgtaaagtaaatgttacagacgaataacaccggcaatgccttggctgtcagttctgttcataacgtcacatacaaaaacataatggtttatttatgggtttgcatctttacatatctgggtttatgccctacaagtttacatggagctcctacccgtgcccttgcactcagacaaccacaagtcgatgtgttctatcatcttttgcctcaccttgttcactgcatcaggggcgctgcagttctcagcattaccttcaatgcttaaaggcgattggggacatcctcgcatatcagttccatggccgcaattatga

SEQ ID NO: 20403 - DNA, 1837 bp, Gossypium hirsutum
  Clone ID: GOSHI-09MAY01-C7969_1
attaaaatttatttcttgttagcatctatccttgtagagaggtgagggtacctaagacacaataatgaagatgggagaggatgcccccgcgtccgatcaccttcacatcaaccaagtgttcgacctctccagtgatgtgcttccacaaggtgggaccaagtgctatgatgacgacggccgcctcaagcgatctggaaccgtgtggaccgctagcgcacatattattacagcagtcattggttcaggggttctgtcactggcttgggccacggctcagctgggatggatcgctggtccaatagtgatgattttgttttcttttgtaacttattacacctccactcttcttgccgcttgttaccgctctggtgaccctgttaacggcaagcgaaactatacttacatggatgctgtccgatcaaatcttggtgggtttaaagttaagatttgtgggtgggttcaatacttgaacctttttggagttgccattgggtacacaattgcatcatcaattagcatgatggctatcaaaaggtcgaattgcttccatgctagtggcggcaaaaatccatgccatatgaatagcaacccttatatgattgcttttggtattgttgaaatcattttctctcaaattcctgactttgatcgactatggtggctttccattgttgctgctgtcatgtctttcacctactctacaattggacttggccttggtattgctaaagtagcagaaactgggaaaattaggggaagcctgactggaatcagtgttggaactgtgactcaaacccaaaaaatatggaggagtttccaggcacttggagacattgcttttgcctattcatactcccttatactcatttgaaattcaggacacccctttaaggctccaccatcagaaatcaaagacaacggtagaaagccacccttgataagtgttggagtgacaaccttgttttacatgttgtgtggttgcatgggctatgctgcttttggagacttgtcacctggaaaccttttaactggttttggattttataacccgttttggctccttgatattgccaatgctgccattgttattcaccttgttggtgcatatcaagtttactgtcaacctcttttcgccttcattgagaaaagcgcgaccgagcggtttccggacagtgaattcattaccaaagatatcaagatcccgatcccgggttttcgcccttacaatctcaacttgttccgattggtttggaggacaatttttgtgatcattacaacattgatctccatgcttcttcctttctttaatgacattgttggactccttggggcacttggattttggccattaacagtttatttcccagttgagatgtacatttcacaaaagaagatacctaagtggagcacaagatgggtttgtcttcaaatccttagcattgcttgtctctttatcaccattgccgcagctgccggttcgattgccggggttgttctcgatctcaagtcgttcaagccctttgcgacagtatactagttcggtagaattgacccggtataattcgcaacattcacggacagtaaaaggcgaagaaaaactgatcttttaggaacaaatgaaggttgtcgttcctgtgcatatgaagccagaatttgcagtttttaattaccttataaattcaacaaaaaatggaggccatttgggtcaccatttccacttgtaagttgtaactttcaatgtcactcaatccaaatggaaaagaattgaactcaagttgaagtttttatcatactattaaagctagaaatttaaaaactttactgcatggttcatgcc

SEQ ID NO: 20404 - DNA, 625 bp, Gossypium hirsutum
  Clone ID: LIB3543-058-Q6-K6-E1
ctcttttcttctttaactcaccagctcctgcaacactctcttccttgctctctatccatttgttggttttttgtgtcacttagcaaagatgggagagaagggtgctgtcaaaaatcaccttcacaacaacctggtttttgaccaccccattggctttgatgacgatggcagactcaagcgaactggaactgtatggacggcaagtgctcatattattacggctgtgattggttctggcgtcctgtccctggcttgggccactgctcagcttggatggatagctggtccagcagttatatttttgttctcttttgtaacttactacacctctactcttcttgctgcttgttaccgctgtgatgaccctgttaatggcaagagaaactatacgtacatggaagctgtcagagcaaatcttggtgggtttgaagtgaagatatgtgggtgggttcaatacttgaacctttttggagttgccattggatacactattgcatcatcaattagcatgatgtgagttccttaacacaagggttccagccagaacatgtttgctttcttctttacttgcgtttgtttgggggctaacgggaattgtaacagggctataaaaaggtctaattgc

SEQ ID NO: 20405 - DNA, 376 bp, Gossypium hirsutum
  Clone ID: LIB3166-052-P1-K1-C11
ttcttgttagcatctatccttgtagagaggtgagggtagctaaggcacaataaggaagatgggggaggaagttcttccaaaaggtgggaccaagtgctatgatgacgatggccgcctcaagcgatctggaaccgtgtggaccgctagtgcacatattattacagcagtcattggttccggggtcctgtcactggcttgggccacggctcagttgggatgggtcgctggtccattggtgatgattttgttttcttttgtaacttacttcacctccactcttcttgctgcttgttaccgctctggtgaccctgttaacggcaagctaaactatacttacatggatgctgtccgatcaaatcttggtgggtttaaagtt

SEQ ID NO: 20406 - DNA, 528 bp, Gossypium hirsutum
  Clone ID: GOSHI-09MAY01-C107912_1
aagtgtgaaactttgtagtacaataatagaagtcccatgtgattattttcagttacagcatgcattatatatactgtatgtgacctcaaacaagtgtatataaacaaagcaaatcaatgctttattctaaccttaatactggaatactttgctcattccaaaagaaattgtgaggatcagctaaagtcttcacccgaaccagtctattgaaattatggttgaagtatttcaaaccccattcgcttgattccacatagcttgtatttgggtaactgttcctccccaaatcaagatccctgtaattgaaatatgcagccctcggtgctgttgagacataaggttccatgtacttgtacaaccttctcatccaccctatgcgtttccctgtttcctctgctacatcccaactaatcatatattgtatcccatataaatactcacttctataaggaaatggagttgccgaactctttatttgcttcattcttcctccgtaaggcgttaatatcaacaccgatgtctctacca

SEQ ID NO: 20407 - DNA, 570 bp, Gossypium hirsutum
  Clone ID: GOSHI-09MAY01-C7839_1
gctcaagcagcaattgttgctttctcccacgcgcccggagaaggtgggatggaatcttcatcaatgtactatttaaaggctcgtttccactttaacaagaatcagtttgctgatttgatgctaattggtggaattgtagcaaccatttcacagttgtttatcatgcccttactagtatctcccataggagatggaaggttgctttcaataggactctttgcctcctgtgtatatgccattctttacagtatagcctggtcagcttgggtcccatatgcagccgctgcagtgtctactgtgatggtctttgcaccaccatcattacgcagtattgcatcaaaacaagctggccccagagaacaggggaaggctcaaggatgcatctccggaataatttctttggccaatatcatggctccactaatttttagtcctttaacatcattgtttctgtctgaaggggcacatttcatttccctggctttagtatcatttgcattgcaatcactttgatgattgccttcattcagagtttgatgatagggagagctcttcactagcaatgcagat

SEQ ID NO: 20408 - DNA, 426 bp, Gossypium hirsutum
  Clone ID: LIB3165-021-P1-K1-H2
ccgatacccaacgggcatttgctttcggattttttgtaggtttaacctcaggtgcctgggtgggggcaacactcgcagttggtttcctgtccgccggttctacatttaaggttgctacattggattcaatgcttgcagtagttaacatgagaatattcctcgaggaaggtataccaaatcaaaacgacggtatgacacaaccgatcttgaaagaaaccgaaggtgtgattcaaaaagatggcaatgttggtacaagaaagatgcctgtattcaagaccattccgtccttgaaagacattattcgcttgataaagagcagtccatcattttctcaagcagcaattgttgctttctttcagagtcttgcagagggtggaatgatatgttcgataatgtactatttaaaggctcgtttccactttaaca

SEQ ID NO: 20409 - DNA, 937 bp, Gossypium hirsutum
  Clone ID: GOSHI-09MAY01-C7829_1
aatttctccaaagttgaccgctgccgccggttctccgtagctgccaccgccactactactccacagagcgaggattctgccgcgcccccgcaaattcctcctgatactcgcattcccgccaccataatcaccggcttttcgggctctggctagacaacattactcaatcacatcttgactgcacatcacgggaagcgtatagcagcgatagagactgagtatggtgaagtagacatcgatggctctcttgttgctgctaaagctgctggggctgaggacatagtcatgctaaacaatggctgtctctgctgtactgtaaggggtgatcttgtgaggatgattgcagagctagtcagtaagaagaaagggaaatttgaccacattgtaatcgagactacagggtgggcaaatcctgcaccaagacttcagacattttatgctgaggagcaggttttcaatgatgtcaagttagatggtgttgttactctagttgatgcaaaacatgctggctttcatttggatgaggtcaaaccaaagggagtggtcaatgaggcagtagagcaaattgcttatgctgaccgcataattgtaaacaagactgatcttgttggtgagccagaaattacgtccctggttaagcggataaggagcattaatggtatggctcatctcaagcacacagagtttggaaaagttgacttggagtatgttcttgggataggaggctttgatttggagaggattgagagttccgtcaatgatggtactaaagaagatcatgctcaccatcatgatcatgatcatcaccatcttcatcatcatgaacatgagcattaacatgaccatcatcatgatcatactcatgacccaggagtttcctctgtcagcatagtttgtgaagggagcttagatctaaagaaggctaacatatggcttg

SEQ ID NO: 20410 - DNA, 770 bp, Gossypium hirsutum
  Clone ID: GOSHI-09MAY01-C7599_4
gttcttgccactttgtagtttgagattctccttttgttctttgaaaccccaaacttagcgccaaaacttttagtttagaagtggaatcaaaataagaattcatccggttcttctctttgatgtgttattggtgccaagcagcagttgttggaaatggttgggtgatttaacttattcataataacagtgctattggttaaatacggaggtactttatcagaaaggttttgcagtgctctgttgttgcctacgcgtccgcggacgcgtggggttgactcgtaggattaaataaaagaaacttctgcaatgcaaacgtctcagaaacataaaattacaggcaagtgcattgactggcccgtgcaagagctggagtcctattgttggcctcccaaccagagcttagagccatgccagtcaggttctgatgatatggcagcaatagtgtgcaacattcagttcctaacctgttactcgcgtaaatgctgttgctccaggttttgttcctaccaactttgcagcatacatcacaaaagatgagggtgtgaaggcggctaacgaggaaaagaccttacttggaaggcttggtaccccaaaagacatggctgctgcagctgctttcttggcatccgatgatgcttgttatattacaggggaaactctaatagtggcagggggattgccctctagactctaaggatactttttttactagctaataagtccttcacttgcgggaaaaataagtgatacttgtagagatatctcgtcct

SEQ ID NO: 20411 - DNA, 1018 bp, Gossypium hirsutum
  Clone ID: GOSHI-09MAY01-C7599_3
ccccgcgtccgctccgtgttgatcccgaacccagattcattatctcttttagcagccatggactcaacaacaatgccagaaacagagaccccatcatcttcaacagaattcatccgattcttctctttgatgtgttattcgtgccaagcagcagttgttggaaattgttgggtgatttaacttattcataataacagtgatatcggttaaatacgcagaaaggttttgcagtgctctgttgttgtcttttgactcgtagaattaaataaaagaaacttctgcaatgcaaacgtctcagaaacataaaattacaggcaagtgcattgactggcccgtgcaagagctggagtcctattgttggcctcccaaccagagcttagagccataccagtcaggttctgatgatggcagcaatagtgtgcaacattcagttcctaacctggagcgatactgcacccttgattcatcgtccagtatgcagaattcttcttcgacagccagtttttcacccgatggcagtcctgtttcgcagcaaaactacacttacccattggaccttcatcattccccggaaaatacgtgtgcttcaccaataagtggttcttgtgtaatagacaatgaaaatgacttggggcttatgataagacaactggaaactgctatgctaggcatcgattcaggtgatcttgaccttcatgcaatagcagcttctggcagagccactaaagtttccgtagaagcggagaggtggaaatacatgaaagagatgatcgccagaggggacctgaaagaactgctttgtacttgtgccaaagctatagaaagtaacgatatgtatatgactgactgtttgattgcgcaattacgtcaaatggtgtcagtttcgggtgaaccaatgcaacgactaggagcctacttgttggaagggcttgttgcacggttggcttcttcaggaagttctatttacaaagccctaagatgcaaagagcctgccagtcctgaactgctttcatacatg

SEQ ID NO: 20412 - DNA, 1167 bp, Gossypium hirsutum
  Clone ID: GOSHI-09MAY01-C7599_1
aaacatggctaaagaatatacacaagcatctgataatatactaagaaaaaggtaaagtcaataataaccttcacctttcaatcggtgctaaggaccattacaattcatcacaaaatcatcctaataagtgaattgaggaaggctgtaactcaatcacctcgaaaaataatctctacaagcaagtcatctatgtgcctgccaacccacgcgtccgaatggcgaagatcatggatatggaaaccaagattgggaggagatttgaaggcaaagttgcaatcgtcaccgcatccacccaaggcatcggcttcgccatcgctgagcgtctcggcttggaaggagcatctgttgtcatctcttctcgcaagcagaaaaatgtggatgaagcagttgaaaagcttaaaaacaaaggacttgaagtgtttggagtggtttgtcatgtctcaaatgcacaacacaggaaagatcttattcaaaagactgttgataaatatggaaaaatagatgtgattgtatcaaatgctgctgtaaatccatctgtggatcccttgttgcgaaccttggaatctatccttgacaagctctgggaaataaacgtcaaagcaactgtacttcttctacaggaggcagctcctcacctccaaaagggttcatccattgttattatttcctcgattgctggctataatccacagcccgctatggctatgtatggggtaactaagacagcacttcttggattgaccaaggcacttgcaactgagatggcccctgttactcgcgtaaatgctgttgctccaggttttgttcctaccaactttgcagcatacatcacaaaagatgagggtgtgaagaaggctaacgaggaaaagaccttacttggaaggcttggtaccccaaaagacatggctgctgcagctgctttcttggcatccgatgatgcttgttttattacaggggaaactctaatagtggcagggggattgccctctagactctaaggatactttttttactagctaataagtccttcacttacgggaaaaattaagtgatacttgtagagatatctcgtcctttgttccttattttttataactagaaatagtttacttcaatggaacagctgtgatggagatcaataaatttaataggcttctctttcaattt

SEQ ID NO: 20413 - DNA, 621 bp, Gossypium hirsutum
  unsure (1)..(621): unsure at all n locations
  Clone ID: LIB3825-021-Q1-K6-B5
cggacgcgtgggcgagagcgtgggcgngagcgtggggcaaagtattgcaagaaacttatatcattgattggcaggcacatagatgacttgccaactttccgccctaaagtttgaatcggtttgcagtgatagttgtatcttagtttttgtgttgatttagagacatatacaaggaaccatgatctgaatgtgatgcagctgcagtggggaaaaaatcccttttatactgttgtggggctagcggattggtgcatagagccactatgctatttttcattctgcttgtatcttggtccaatgattaacaagaggttagttgcagcaattgcttgttttggtggcaaagtattgcaagaaacttatatcattgattggcaggcacatagatgacttgcttgtagagattaatttttcgaggtgattgagttacagccttcctcaattcacttattaggatgattttgtgatgaattgtaatggtccttagcaccgattgaaaggtgaaggttattattgactttaccttttcttagtatattgtatcagatgcttgtgtatatatctttagccatgtttaaaaatttccttactgtcatactcaaattatcgctcacattgttt

SEQ ID NO: 20414 - DNA, 415 bp, Gossypium hirsutum
  Clone ID: LIB3083-054-Q1-L1-A7
acaggatctgctgttctttctgatgctggatatgatttattaaacaggcttcttacatacgatcctgacaagagaataacagctgatgatgctcttaaacatgattggttccgtgaacttcctttaccaaaatctaaagaattcttgccaactttccgccctaaagtttgaatcggcttgcagtgatagttggatcttagttttcgtgttgatttagagacatatacaaggaaccatgatctgaatgtgatgcagctgcaccggggaaaaaatcccttttatactgatgtggggctagcggattggtgcatagagccactatgctatttttcattccgcttgtatcttggtccaatgattaacaagaggttagatgcagcaattgcttgatttggtggcaaaagattacaagaaa

SEQ ID NO: 20415 - DNA, 372 bp, Gossypium hirsutum
  Clone ID: LIB3149-060-Q1-K1-H6
gctgctgttactagttcttcttaagaggggttcatggcaattatgaacggcttgtgatcagattcattaattaagtaagatgggttcggtttgcttgctgctttagctgattcttcaggttacagaattttgtagctggattttaatctttaaaccttgaagctgttttataactgtattaatgtcatataaaacataaatcttttagcttgagagtactgtctttaattgaccatatggcaagaactgaatttatataaaaagcaaaagaacggtctctaatcacccttttcttgaaaaaacgtgtgcttcaccaataagtggttcttgtgtaatagacaatgaaaaatgacttggggcttatgataaggg

SEQ ID NO: 20416 - DNA, 492 bp, Gossypium hirsutum
  Clone ID: GOSHI-09MAY01-C7559_1
gctttttccgttaaaaaaaaccctaaaattttttaattttctctcaacctccagccgtatcgctaatgtcctgacctccaatggcgcgcttgtaaccggcgaagcaaggccctccaacgaagcggtacgtggagatgtgaagagggcgttcatgggcgtgtcaacgtgaaatatgggaggtggaagcgtgggctgaagcaatggcgtgcgtagaggctggcacgaaggcagcagcaacgcaagggggaaagggaaagggttctgaaaactccaaaaacctgggcctactgggcttggttcatttcattcagtattaggccattgtaaaactttttgggcctgtttaaaatgcaataggtttgtattttgggccgggttaaatatgggttttacacttctatcagttaaagtgacattaaaatgcgatgttaagggaaaccattgcaactagtttaatgaattcatatttataaaactatcttgtatcataac

SEQ ID NO: 20417 - DNA, 419 bp, Gossypium hirsutum
  Clone ID: LIB3146-057-Q1-K1-F6
agagaacccaaagctttttccgttaaaaaaaaccctaaaatttttaaatgttctctcaacctccaggcgaatggctaatgtccagacctccaattgctcgcttgtaaccggcgaagcaaggccctccaacgaagcggtaagtctccctctctcccctatactttagtacacaaaataatctaaatgaagagctgaaagtaatagagggaaataaaatatgcaatcaccttcaaaataaaaactaatattcacttgctgttttttgcttgtattcagtatctcgtgtgaatttttgtactcgatttctattctatttctctgaagaaaaaaaaccccatacacttaaaaatcgaaggcttttatagccaaaatacaggcagttccttgctattctccattttgcaagtacgtggagatgt

SEQ ID NO: 20418 - DNA, 512 bp, Gossypium hirsutum
  Clone ID: GOSHI-09MAY01-C7519_1
cttttccagaatacatttcaacatatcaaatgcccttctaaaaacagagtatctgagctactagtaagcaagtattttccttctcttcaacaatggggaactcaaactagtactctcagttttagcttcttcttattcttttcgtttacgcaaaacttcgaacagcttctggtcttacctcaatggctctccctcagctaataccttctcactcttcttcttcactcactcaccagccttccataaaccctaacgcagccaatccataccccatgttgaagtcctttttgaagccatcttctctctctcaatctcgcaggtttcacaggctcagctctcttcgagcttcggcctcttccttccccgatcatcaccaaaccgatccttctaaaccagacgacgtcgtagagctccctatattccctctccccttggttctcttccccggcgctatcctccctctccagattttcgagttcccgtaccgcattatgatgcacacgctccttcac

SEQ ID NO: 20419 - DNA, 433 bp, Gossypium hirsutum
  unsure (1)..(433): unsure at all n locations
  Clone ID: LIB3165-017-P1-K1-F4
aacccgacccacccgaccaaaaanatactataaantntaacttcttcatattttattatatanacaaaaaacaaaccccccgcccttattaaaaaaattaccccccccaaaaaaaaaaacattattactcaaactcttcactcaatcaccaaccttacataaaccctaactcatccaatccataccccacttttaacactctatataaaaaccatatactctctcataaacttccttccaacacaatcttaaatattcatttatataccgcctcttccttcccccatcatcaccaaacaaatccttctaaaccagactacgtcttagaactccctatattccctctgcccttggttctcttccccggcgctatcctccctctccaaaattttcaattcccttaccgcattattatgcacacgctccttcacac

SEQ ID NO: 20420 - DNA, 676 bp, Gossypium hirsutum
  Clone ID: GOSHI-09MAY01-C7509_1
cccacgcgtccgcctacttaaaatttgtctttataatcacagtcgaagagtccttggagtttgtgaatgacccttattgcatacaggtaaagagtctgttatttacaaacatgtggctgtttggcagaaaagggccatctgggttttcgtcatcttccacagctgaggaagttacacaggggatcgatggcactggtctcactgccattgttacaggagcatccagtggtattggcactgaaaccgcacgtgttcttgctctgcgtggtgttcatgtaattatgggggtcaggaatgtggctgctggtaaagatgttaaagaagcaattgtgaaggaaattccaacagctaaagttgatacaatggaattagatctcagttcaattgcatctgtgaggaaatttgcagcagatttcagctcctcaggtcaccctctgaatctccttatcaataatgcaggaattatggcaactcctttcatgctttcaaaggacaatataaaactacagtttgcaaccaatcacataggtcattttcttttgacaaatctcttgctggacactatgaaaaaagctgcacggacaagcaaaagagagggaagaattataatgtctcatcagaagctcaccgttacacttataaggaaggaattcattttgacaagattaatgatcat

SEQ ID NO: 20421 - DNA, 364 bp, Gossypium hirsutum
  Clone ID: GOSHI-09MAY01-C7489_2
cccacgcgtccgcccacgcgtccgcataacaatacacaggcagtcttttttctgaaaactgagaatggcttccaccgccgtcctcgccacttccacggtcagcagcacctcattcgtccgccgccagccagtgaggagcctatcctccctcccaaactttaagcaggctcttttcgggctaaaaccccaaagaggtgggcgtcttacaatggcagtatacaaagtaacgctgctcactccggaaggacctcaagagtttgagtgcccagatgacttgaagatcctggacgcggcggatgagaacgggattgatcttccgtactcgtgcagggctggtgcttgctcttcatgtgcttggagagtc

SEQ ID NO: 20422 - DNA, 414 bp, Gossypium hirsutum
  Clone ID: LIB3165-017-P1-K1-B3
ggcattcttatttctgaaaactgaaaatggctttcaccgccgccctctccacttccacgggcaggagcacctcattcgtccgccccaaactttaagcaggctcttttcgggctaaaaccccaaagaggtgggcgtcttacaatggcagtatacaaagtaacgctgctcactccggaaggacctcaagagtttgagtgcccagatgatttgaagatcctggacccggcggaggagaacgggattgatcttccgtactcgtgcagggctggtgcttgctcttcatgtgctgggagagtcaaagaaggcagtgtggaccagtctgaaaatagcttccttagtgatgaacaaacagaagaaggctttgttctcacttgcgttgctctcccaacaagtgatgtcgtcattgaaacacac

SEQ ID NO: 20423 - DNA, 485 bp, Gossypium hirsutum
  Clone ID: GOSHI-09MAY01-C7459_1
cccacgcgtccgatccctccctcctttctcattttcctctgatccaaacaggaaacaacgaactcgccttcaaccttgttcttcaaaccagaaaaaatagagaatagaaaattctaagataaaattatgagtaaatcttggtttgacaaaggctacaatggggttgggcccaacgatgatttctttgatgacgttataaagtatttggatttgccattggaagacgttgaaggacctgatggcaatggtagtacagaggacgtaaataattttcttctgcccgtggaagagaacaatgatggtggtgaagactgggattgtgattttgaaaacttagagccgccacctaccaatgttttggccagcttatcttccgggttctatggtgatttcttcagtgatagtttggcccaaaaccttaccgattcttgtgatggatcttcacaactaaaccagctctcaagcactaccagcattaccccacg

SEQ ID NO: 20424 - DNA, 728 bp, Gossypium hirsutum
  Clone ID: GOSHI-09MAY01-C7449_1
gttaagtcacgcctctctcttaaatctctgttcatttcttcttcacttcttcttaaaacccctcaaaaggactgcctcaaacaaggaagtcaatggcgttttctgagttcaggccactagacgagaactcgctcatcgaatacattaaagccacgccgtctttgtcatcgaagatcgtcgacaactatgatggtttaaagattaaggaagttggagatggcaatcttaatttcgtctacatcatcgttggcccttctggttcttttgtaatcaagcaggcacttccctacatacgatgtattggggaatcttggcccatgactaaggaacgagcatatttcgaagcgttggcgttaaaacaacatggtgcgttatgccctgaacatgttcctgaagtttatcactttgaccgtaccatgtccttgattggaatgcggtatttagagccgccccatataatcctgagaaaagggttaattgctgggattgaatatcctttgttggcggaacatatgtcagaatacatggccaagactcttttctgcacatctctcctatatcggtcaaccacagagcacaaacgtgctgtggccgaattttgtgggaatgtggaactatgcaggctcactgagcaggttgttttttctgacccctataaaagatctgaatataacccgtggacttcaccttatcttgaccgtgatgcggagactgtccgggaggataat

SEQ ID NO: 20425 - DNA, 451 bp, Gossypium hirsutum
  Clone ID: GOSHI-09MAY01-C7479_1
cccacgcgtccgcccaccttgttctttcagtttcctttggtgttttaagatatgggaactcaagctcctccagaaaatggttatggcagaagcaacagcttggaagagaaatcagcaaaggagaaagcaatcgatgagtggctgccaatcacctcatcaagaaatgcaaaatggtggtattcagctttccacaatgtcaccgctatggtgggagctggtgtcctcagtctcccttacgccatggcagaactcggatggggtcctggtgtgactgttctaatcctatcatggattattaccctatatacactatggcaaatggtggaaatgcatgaaatggttcctggaagacgtttcgatagataccatgaactgggtcaatatgccttggtgaaaaacttggcctctacattgtggtgccacagcaacttattgttgaagttggtgtctg

SEQ ID NO: 20426 - DNA, 365 bp, Gossypium hirsutum
  Clone ID: GOSHI-09MAY01-C7439_2
gggagtgacttctgttgtaatcaagggaccagctgagcataaagatacgttgggcgccccactgggcccttggaggcattatgatgacaaagctgctgaggtagggcagggattctggaattgtccatgcgttcctatgagagaaaggaaagaatgtcactgcatgctctttctcactcctgataatgattttgctggccaagatcagtccatcacactggaagagatcaaggaaacaacaacgaacatgttgttcatgacattcattacttggttttcccaatcccccaaggaattccaggtgaaattttatttttgtatttcaaaaggggtaaattttttttcccttttttatacctaccttt

SEQ ID NO: 20427 - DNA, 794 bp, Gossypium hirsutum
  Clone ID: GOSHI-09MAY01-C7439_1
aaaaagatcaaataattctctgtttcgatggttttagagaactgaagaagaaccaatggggggttaatataaaaaatctgaaaatttataaaacaacaataaagataaaaggaaaaaacgggtggtgatttgagtttgatttgcagttagccaaagcaaagcgatgacacttcaagcaacttcctgcaactttggagccatttcatctctgcttcgtcctcctaaaatttcccgtcatcgtttcgtgatcagagctgaagtggaaccgtcagagaaatctgtggaaatcatgaggaaattctcagaacaatatgcacgtcgctcaggaacctatttctgtatggataagggagttacttctgttgtaatcaagggattggcggagcataaagattcgttgggtgcgccactttgcccttgtaggcattatgatgacaaagctgccgaagtcaatcagggattttggaattgtccatgcgttcctatgagagagaggaaagaatgtcactgcatgctctttctcactccggataacgactttgctggccaagatcagaccataccattggaagaaatcaaggaaacaacagcatacatgtaacacttgacggtttcaaattttgtttcttaaacagtcataactttgttttttggccctcgaaaaaagaaaaacagaacagaggtcgaattttatatgtatatttgatgtcaacagggggataaattctttttttttttgttgcacctcctataatatgctattataagtattaacttatttgatcaaaaaaaaa

SEQ ID NO: 20428 - DNA, 533 bp, Gossypium hirsutum
  Clone ID: GOSHI-09MAY01-C107692_1
gttagtttctcctccaagtgcttaagagggagctgaatactgtttatttacagaggtaaatatggaaaagaaaagtgcaatctctcgatacagagagaggctggacaagacattgtcttgtactgaactgactgatcccgaaatgcttaaaaccctagtcaagaatcagattgtatgatatgcacaggatgagaaagaaggttaatagcatttaaactgcaattgatatgggtcctttagtccctctatgcacattttcttttaatttttctttggccgacagattttagtgaagatttactgggcaatagggctcgggcttgggaagtatcgaatcttctagacatgttaaggagtacttgtattgatgatcgtaacgtttcaaaatccagtgaaacatcacatggtgaatggaaagcatggtctatctgatggacactctgtggttctctgggataaatgtctctgaaaatgccttatcaacttgtcttgacagttgaagcacgataatgaagaagtgccgtgttatgtac

SEQ ID NO: 20429 - DNA, 613 bp, Gossypium hirsutum
  Clone ID: GOSHI-09MAY01-C7169_2
tccacgcgtccgctttcccatttcccaaaccttaccttatctagggttagggttttgctccttctgagtttctctctcaataccaaaaatatctccaaattgaagatgatgcaacaaccagcacaagctatggtaccaccaccaatggctccaccaccttctatggcgggtgctccacagacccaacaacagtaccaatatcagcaaccacctccggctccggttcctcagacacaaccaccttacatgatgatgaacatgatgcagccgcctcagagtcatcctccacctatgtggcccccacaacaaggttcggctggggtaccagctcaacaacagccagcgggtcaaccggctaacgcagatgaggttcggactttgtggatcggagatttgcagtattatatggatgagaattatctcttgagctgttttgcccaaactggagaggttgcttctgtaaaagttatccgcaacaagcaaaccggtcaagtggagggctatgggtttattgagtttgtttcaagagctgctgctgagagagttttacaaacatacaatggtacacctatgccaaatggtgagagcaactataggctgaactgggcatcct

SEQ ID NO: 20430 - DNA, 1574 bp, Gossypium hirsutum
  Clone ID: GOSHI-09MAY01-C7169_1
ttcacgcgtccgcggcccccgcggcccccaaaccttaccttatctagggttagggttttgctccttctgagtttctctcagtaccaaaaatatccccaaattgaagatgatgcaacaaccagcacaagctatggtaccaccaccaatggctccacagacccaacagtaccaatatcagcaaccacctccggctccggttcctcaggcacaacaaccttacatgatgatgaacatgatgcagccgcctcagagtcatcctccacctatgtggcccccacaacaaggttcggctggggtacctgctcaacaacagccagctggtcaaccggctaacgcagatgaggttcggactttgtggatcggagatttgcagtattatatggatgagaattatctcttgagctgttttgcccaaactggagaggttgcttctgtaaaagttatccgcaacaagcaaaccggtcaagtggagggctatgggtttattgagtttgtttcaagagctgctgctgagagagttttacaaacatacaatggtacacctatgccaaatggtgagagcaactataggctgaactgggcatcctttagttcaggtgataggcgagatgagacccctgagttcacaatctttgttggagacttggctgctgatgttacagattacatgcttcaagagaccttcagggcacactttccttcggtgaagggtgcaaaggttgtgattgataggatcactgggcgcacaaaaggttatgggtttgtcaggtttggcgatgaaactgaatataatcgtgccatgactgagatgaatggtgctttttgttcaactaggcctatgcgcatagggccggctactaacaagaagactggtgctgcacagcaatatccagcagcttcatcgcaagggactcagaacgagaatgatccaaataatacgactatatttgttggtaatttggattctaacgtgactgaagaccatttgagagaggtcttcagcccatatggtcagttggtgcatgtgaagattccacaaaacaagcgttgtggatttgttcaatttgctgataggagttgtgctgaagaagcactccgaatactgaacgggactcagttgggtggacaaagtattcggctttcatggggtcgtagcacatcaaacaagcaggcccaagcagatccaaaccagtggaacgctggatattatggatacagccaaggatatggttacggctatggcgctgccccacaagaccccaacatgtactatggagggtatcctgggtatggaaattatcaacagccacagcaacagcaacaagtcggatatagctaagtgctgatattaacgatctttcgtggctgctgttctctctttactagtattatgaacttatgctacttgatttctcctttgtttcgctatagggggatataaacttaaggctgtgttattcacttgttaaatagcatatgcactgtataaacctccttttattacaaaaattttgtacttaaaataaatatttattttattatttaatatataaatttttattattttttttatt

SEQ ID NO: 20431 - DNA, 369 bp, Gossypium hirsutum
  unsure (1)..(369): unsure at all n locations
  Clone ID: LIB3148-034-Q1-K1-G12
cccacgcgtccggctgttctctctttactaggattatgaacttatgctacttgatttcttgtttgggtcgctatagggggatataaacttaaggctgtgttattcacttggtaaatagcatatgcactggataaacctccttttattacaaaaattttgtactattcttggtgttcagattttatcatatggtttgccttttgtgatgcaaaacactaatacccaaaaaagctaacaggcgaaaccgtgggaaaaataaaaaactgattaaggaatgcaccaacctaaaacctaaaatgggtcggccaggggggtggctatattgactttcccaggggggtttagaacccttgaaaaaaaaaaangaaa

SEQ ID NO: 20432 - DNA, 415 bp, Gossypium hirsutum
  Clone ID: GOSHI-09MAY01-C7009_1
tacccatggaatcaaagcctttctttcgtttcctctttttcttcatcgccatagctttcctttttctcttcgcctggactcacctccattacgcgccatcccctggcgtcaccaccctcctcgactgtgccagcaactctccttggtgcacctcctccaagaaccggtttcagtccaaacaacccacactcacaaaaaccccacgtgcctccacctcccagcgtcgtcaccacgagtcagctgtccctcgccacccactcgaccccctcaccatccaagagttcaacaaggtccgcaaaatcctttcttcccacgcgctcttcaagtcctccaataactacgcgctccattccgtcgtcctagaagaacccaacaaagaacttgtccttaaatggaaaaaaggccaaccactctt

SEQ ID NO: 20433 - DNA, 1499 bp, Gossypium hirsutum
  Clone ID: GOSHI-09MAY01-C7359_1
aggaaaggcaccattggaatcagttttgtacctgtattatgcggctcggcttttaaaaataagggtgtgcagccattactcgacgctgttatggattacttgccgtctcctcttgagttgccggcaatgaaggggactgatcctgagaatcccgaagtgataattgaaaggacagcaagtgatgaagaaccgctttccggattagctttcaaaatcatgaccgatccgtttgtgggatcccggacatttgtgagggtgtattcaggaaagcttgctgcgggatcttatgttttgaatgctaacaaagggaagaaagagagaatcggtcgactattggaaatgcacgccaatagtcgagaggacgttaaggttgcattggccggagatattgttgctcttgcaggtctaaaggatactattacaggtgaaactcttagcgaccctgaccatcctattgtacttgaacgaatggacttccccgatcccgtgattaaggttgctattgaacctaagactaaagctgatgtcgataaaatggctaatggtttgatcaagcttgctcaagaagacccttctttccacttctcacgggatgaagagatcaaccagaccgtaattgaaggaatgggagaattacatctcgagattatcgttgatcgtttgaagagagagttcaaggtcgaagccaatgtcggtgcaccacaagttaattaccgggaaagtatttccaaagtttcagaagtgaaatacgtacacaagaaacaatcaggtggacaagggcagtttgctgatattactgttcgtttcgagccgatggatgcaggtagcggatacgagttcaagagtgaaatcaaaggtggagccgtgccgaaagaatatattcctggagtgatgaaaggactggaggagtgtatgtgtaatggtgtacttgcaggttttcctgttgttgatgtacgtgccgtgctagtagatggttcttaccatgatgccgattctagtgtcttggcatttcaactggcagccaggggagccttccgagaagggattagaaaggctggccctaggatgcttgaacctataatgaaagttgaggttgtcacacccgaagaacatttaggtgacgtgatcggtgatctcaactcaaggagaggccagattaacagctttggtgataagcctggaggactcaaggtggtggatgcccttgttccgcttgcagagatgttccaatatgtcagcactctccgaggtatgacgaaaggtcgtgcatcctacaccatgcaactggccaagtttgatgtcgtccctcaacatatccagaacgagcttgctactaaacaacaagaagttggtgcttgattttgttgtttcataattttcctggcatccaaacactattttttgttcacttcataatttaagtgcagcactctcctttctttaattataagtttcatgtatcagttttgggtacaatgcaacaaaactattaagtagaa

SEQ ID NO: 20434 - DNA, 1125 bp, Gossypium hirsutum
  Clone ID: GOSHI-09MAY01-C7369_1
tctaagtttgctttctccttgtaattctcaacatctattgccggttccggaacggactctgtgccgccccgctcgtatcatcactctcccaccccgaccgcttgattttgatcagacggtaatcatgccgatcagaaacatagccgttggccggcctgaagaagctactcatccagatgctcttaaagcagctttagctgagttcatatcaacgttaatcttcgtttttgctggatctggttcaggcatggcttttaataagctgaccgacggcggtgcaacaactccggctggtctcgttgccgcctctctagctcacggatttgcgcttttcgtcgctgtctcagtcggtgctaacatctccggtggccatgtgaatcccgccgttacattcggtgctttcgttggcgggaacattactcttttacgtggtatcctttattggattgctcaactccttggctcaaccgtcgcttgcctgttacttaagttcgccactagtggcctgggagtaccagctttcggactatcatccggcgtgggagcattaaacgcgttcgttttcgagatcgtgatgactttcggactggtgtacaccgtttacgccacagccgtcgatcctaaacgaggcaacttgggagtgatcgcaccgttggcgatcggtttaatcgtgggagccaatattttagctggtggggcattcgacggagcctcaatgaacccagccgtttcatttggaccagccttggttagctggtcctgggaaaaccactgggtgtattgggctggaccacttattggtggtgggctcgctggtctcgtctatgagttcatcttcattaaccagacccatgaacaactccccaattattagtcaataaaatttccggtgtatttaatttttgttcagctttcttttgtgcttaatttgtggccgttgatcttgtttactttttttattataatcttctatcaatgatcatcgtgcatggctgatggtattttcaatttggaaaaaaactggtatttgagtgataatatttatttatgaaaaaaaaaaacctccgccgccgtaatttcttatatttttaaatataaattatattttcttctctctctttatat

SEQ ID NO: 20435 - DNA, 335 bp, Gossypium hirsutum
  Clone ID: LIB3147-040-Q1-K1-G8
cccacgcgtccgcttaatcagatttcaaattaaaatatgatttcaatcagtttcttttactgattcagtcattatctttcgcaaaataccagttcgtatttattaattcatttgcgttttgttatggtgattcgcagggagtaccagctttcggactatcatccggcgtgggagcattaaacgcgttcgttttcgagatcgtgatgactttcggactggtctacaccgtctacgccacagccgtcgatcctaaaagaggcaacttgggagtgatcgcaccagtggcgatcggtttaatcgtgggagccaatattttagccggtggggcattcgac

SEQ ID NO: 20436 - DNA, 402 bp, Gossypium hirsutum
  Clone ID: LIB3272-034-P1-K1-H6
tgatctttatccttgtttactgcactgctggtatctctggaggacacatcaaccttttaataagctgaccgacggcggtgcaacaactccggctggtctcgttgccgcctctctagctcacggatttgcgcttttcgtcgctgtatccgtcggcgctaacatctccggtggccatgtcaatcccgccgttacattcggtgctttcgttggcgggaacattactcttttacgtggtatcctttattggattgctcaactccttggctcaaccgtcgcttgcctgttacttaagttcgccactagtggcctgggagtaccagctttcggactatcatccggcgtgggagcattaaacgcgttcgttttcgagatcgtgatgactttcggactggtctacaccgt

SEQ ID NO: 20437 - DNA, 222 bp, Gossypium hirsutum
  Clone ID: uC-gsronu33B072e03b1
ctacatactcccaccccgaccgcttgattttgatcagacggtaatcatgccgatcagaaacatagccgttggccggcctgaagaagctactcatccagatgctcttaaagcagctttagctgagttcatatcaacgataatcttcgccttcgctggacctggtacatggctggtttttaatttatgtcgacccttctttggtttattctccatatctacttt

SEQ ID NO: 20438 - DNA, 597 bp, Gossypium hirsutum
  Clone ID: GOSHI-09MAY01-C7309_1
gaacgaggtgagcttgaagttgaagaagcttatgagcaggtcaaggaattcgaggatcagatggtaatggaatacggaaagatgatggaagctgagggcccaccaaaatttgatgagacggctgtaccggacttaaaaaagaacttggatgatccacctggtgagggaccaatccttaggtggcaaactcgggcggtgtttgctcctggtggtgatgcgtggcatcccaaaaacagaaaagtaaagatgtctgttacagtgaaggagctcgggctttcaaagcatcaattccgccggttacgagagcttgttggaaagagataccatccaggcgaaggtgaacttacaattactagtgagaggtttgaccaccgtgaagagaacagaaaagattgcctcagaacactcttttctctcatcgaggaagccggaaaagctaacaaaatggtggaggaggctcgtactaaatatgtcaagaacaggcttcgagccaatccagcattcatggagagattgcgtgcaaagacgatgaaattgcaagaatctactacattcccaataatgaactctttaaaggaaattaattggttttttttt

SEQ ID NO: 20439 - DNA, 382 bp, Gossypium hirsutum
  Clone ID: LIB3147-005-Q1-K1-A4
ggaatacggaaagatgatggaagctgagggcccaccaaaatttgatgagacggctgtaccagacttaaaaaagaacttggatgatccacctggtgagggaccaatccttaggtggcaaactcgggcggtgtttgctcctggtggtgatgcgtggcatcccaaaaacagaaaagtaaagatgtctgttacagtgaaggagctcgggctttcaaagcatcaattccgcccggtacgagagcttgttggaaagaaataccatccaggcaaaaatgaacttacatttactagtgaaaaggttggacccccgggaaaagaccaaaaaaaatggcttaaaaccatttttttttttatttgaggaacccggaaaagctaccaaatgggg

SEQ ID NO: 20440 - DNA, 1061 bp, Gossypium hirsutum
  Clone ID: GOSHI-09MAY01-C7299_1
ctcaactcaaactcatcgaaccagcgcagcgagagatcgaagatcagatattgaagcccctataatgggtgacgtccagacagcggagagcagtaacagagctaggctagccattatggagctggccaacatgataagcgtccccatgtctctcaacgctatcgtccgcctcaacgtacccgatgctatctggcaaggaggcgccaacacccctctctccgccgtccagattctctcacgggtactcccttacggcggcggagaccctgaaaacctccagcgtatcctccgtatgctcaccagctacggcgttttcgatgaacaccttaattgcagcggtgatgactcccactccccggagagaaaatactccctaactgacatcggaaaaacactcgtaacagacgctgagggtctaccctatgcaccatatgtcctccagcaccaccaggatgctttgatgagagcgtggccattggtgcacgaagcagtgctgaatccgacatcggagccattcgtgaaggcgaatggggagggagcttatagttactatgggaagaaacccgaaatgaacgggctgatgcaaaaggcgatgtcgggagtttcagtgccattcatgagagcaatattggacggctatgatgggttgaaaggcgtgaagagattagttgatgtgggaggcagcgcgggggattgcctccgaatgattttgcagaaatatccccatgttgagggaatcaactttgatttgcctgaggtcgttgccagagcacctagtattccgggcgtgactcacgttgggggtgacatgtttgagtcgattccagcggctgatgcaatcttcatgaagtgggtgttgacaacatggacagatgatgaatgtaaggcgataatggagaactgctacaaggcacttcctgtgggagggaaattgatagcatgcgagccagtgttgcccaaggaatcagatgatagtcataggactcgggcactcctggaaggtgacatttttgtgatgacaatttacagggccaagggtaagcataggacacaagatgaat

SEQ ID NO: 20441 - DNA, 1032 bp, Gossypium hirsutum
  Clone ID: GOSHI-09MAY01-C7259_1
gagaacatttgggccaccgttttagagcgagaaagagaaggccggagtctgaaagacaagacacagagaaaaagagagacagagagagagatgtcgggaggaatagcgcgtggtcgactcgccgaggaacgtaaggcatggaggaagaaccatccccatggttttgttgcgaaaccagagacgttgcctgatggaacggtcaatttgatggtgtggcattgcacgatccctggtaaagcaggaactgattgggagggtggctacttcccgctcacgctccatttcagtgaagattatcccagcaagcctccaaagtgtaaatttccccagggctttttccacccaaatgtttatccatctggtactgtttgcctttcaatcctaaatgaggatagtggttggagaccagccataactgtgaagcagattcttattggaatccaagatcttctggatgctccaaaccctgctgatcctgctcaaactgaagggtatcacctcttcatccaggatgctaatgaatataagagaagggttcgccagcaagccaagcaatacccacctctggtctagtctgttattaaaaaatagtaactaagactttccatgaaattgctggtaaatgccggctgggttggctgcttgcctcatgtataatgctagacttggcttttgctaagagaaaatatgcttccttgggtatttggtaatctatataaactgtatgaaccagcattggtatttcaactctcatcggattcggattaatggttgtttctaattttatactactagactgatagctccaaaaaaaaaaaaaaaaaaaaaaaaaaaaaaaaaaaaaaaaaaaaaaaaaaaaaaaaaaaaaaaaaaaaaaaaaaaaaaaaaaaaaaaaaggaaaaaaaaaaaaaaaaaaaaaaaaaaaaataaaggggaggtaaaatgaaaaaaaaaaaaaaagggggggaaccggtttaaatgggaaaactcctatggctctgccatagaaaaaaaattctctttataaggctc

SEQ ID NO: 20442 - DNA, 396 bp, Gossypium hirsutum
  Clone ID: LIB3197-059-Q1-M1-G8
agagaacatttgggtgagggttttagagagagaaagagaaggccggagtgaaagacaagacacagagagagagacagagagagagatgtcgggaggaatagcgcgtggtcgactcgccgaggaacgtaaggcatggaggaagaaccatccccatggttttgttgcgaaaccagagacgttgcctgatggaacggtcaatttgatggtgtggcattgcacgatccctggtaaagcaggagtaagtcgaagaacttctatttaatttctgtatttttctttttcattatcgtcggtaaagtttaatggattctgcttgttgagtttggttcgtcaattattttctcttatttctttggacgtggatgctgttgtgctgtttatagattttaagatttt

SEQ ID NO: 20443 - DNA, 636 bp, Gossypium hirsutum
  Clone ID: GOSHI-09MAY01-C7209_1
cccacgcgtccgtactttctagtctttacgcttctttcttttgcatttatttttatatccatttgagacgaaaggtagtgtggagtagtcctcgtcttcaacccaagacttgacccatcttatatatatatagttctttatttgtttggatcaaaatccaatatactaatccttcaaatcatatattacaaaagatgggagtagaaggcaccttggaatacatctctgatttgcttagcagcgtgaagaagaagaagaagaagaagcaaattcaaactgtagctctcaaaatcaggatggattgtgaaggttgtgctcgtaaggtcaagaaggtcctctccggcgtaaagggggcaaagtctgtggacgtggacttaaaacaacaaaaggccaccgtgacgggttacgtagaggcaaagaaagtactggcggctgcgcagtcaaccaagaagaaggtggaattgtggccttatgtgccttacactctggtggctaatccttatgtggctcaagcttacgacaagaaagctcctcccaatcatgtcaggaaggttccggccagtgccaccgtttctgagaccaccattgacaaccgcttcaccaacttgttcagtggtgataaccctaatgcttgct

SEQ ID NO: 20444 - DNA, 585 bp, Gossypium hirsutum
  unsure (1)..(585): unsure at all n locations
  Clone ID: LIB3543-030-Q1-K6-G2
tgcccagcgtccgcggacgcgtgcgttaaggagacggggtatatggtacagatgaatttcggatgtatacttttaaggtcaaaccttgctccacggcttactcccatgactggactgagtgcccctttgttcatcctggggagaacgcgaggaggcgtngatcctagtgaaatatcattatagttgtgtcccttgccctgaatttcgtaagggttcctgcaggcagggtgataattgtgagtatgcacatggtatttttgagtgctggcttcatcctgctcaatatcgaactcgtttatgcaaggatgacactaattgcaccaggagggtctgcttctttgctcacaagcccgacgagcttcgtccgttgtatgcttcaacaggttcagcagtgccttccccaagatcttattcagctacaggttcctacttagatgtgggttcgattagcccacttgctcttggctctacatctattatgatacctccgacatcaacaccacccttgacccctaccggtgccacttctcctatgggtggagctatgtggccaaatcagtctaacatcttgcctcctactttgca

SEQ ID NO: 20445 - DNA, 526 bp, Gossypium hirsutum
  Clone ID: uC-gsflnu33B078a03b1
ctttcttgttcgggaatttcgtacgggttcctgcgggcagggtgataattgagagtatgcacatgccacatttgagtgctgaattcatcctgctcaatgtcgctctcacacatgcgaggtagagacatatcgcaccaactggtattgattatgacctcaccatcacggggagcttctgtacatggtgtgcttaaaaagggtcagccgtggctctttcaacaagatatgcaggtgcatggtccttcttatacgtgggtgctgggagcccacgtgcgcttggctctgcatctatgatgatacctgcgacataacaccacccttgacccgtaccggtgccacttctcctatgggtggagctatgtggcctaatgagtctaacatcttgcctactactttgcagctttctggtagtaagttgaaagctgcgttcagtgcctggcatatggatctagacatggaactatttggtttggaaagtcatgatctggaccagcacacgcagctaattgatgagatatctgggttt

SEQ ID NO: 20446 - DNA, 380 bp, Gossypium hirsutum
  Clone ID: GOSHI-09MAY01-C7229_2
ccattcccctctcttttcacctcatatttcatcaattacccaatcaccctttcaccttgggaaccaatcccccattttacatcccaatgcaacttccccttgtacacataccaaccatggaagcaacctcacttctttcttcatcttcttccttcaccctctctttccttccttcacctctttcttctccacatctccaccacaggtctcttttcttcaggggcatgtttccagttactgtaaacccgcagacatgttcaacagctgttgtccgcaaaaagttgagcttctgcacaaaggcagttcttggaggaaatgtgcatgtaacaggaggtcctacttctgtccctggaagagtagcacacgagcttcatcaagct

SEQ ID NO: 20447 - DNA, 880 bp, Gossypium hirsutum
  Clone ID: GOSHI-09MAY01-C7229_1
cccacgcgtcgccacgcgtcgcccacgcgtacggccacgcgcccgcccgtccatggaagcaacctcacttctttcttcatcttcttccttcgccctctctttccttccttcacctctttcttctccagatctccaccacaagtctcttgtcttcaggggcatgtttccagttactgtaaacccgcagacatgttcaacagctgttgtccgcagaaagttgagcttctgtacaaaggcagttcttggaggaaatgtgcatgtaacaggagttcctacttctgtccctgtaagagtagcacacgagcttcatcaagctgggcatcgatatttggatgttaggactcctgaagagttcagtgcagggcatgtccctggggccattaacatcccttacatgtacaaagttggatcaggaatggcaaaaaaccccagttttgtagctgaagtatcatcacatttaggaaaatatgatgaaattattgttggatgtcaacttgggaaacggtctctgatggcagccaccgagcttctagctgctggctttactgcagttactgacattgccggagggtacgcggcgtggactcagaatgggcttccaacggaatgatgatgatgatgttggaggcagggaataaagttggtgatacaataataaagcatggaagacagagaactagaaagatctcaagtgtaaagaaaaaaaaatgtcgcatattagtgtagttggcagccacagaatgaccaggaagtatgtgaatgtgaatgtgactgtttcgttgttgttctgtatggaaaaggaagcaaagaaacatacaaataatagatgaatggaaccagtgaattttgtacataaaaatctcttctttgctatcgagac

SEQ ID NO: 20448 - DNA, 592 bp, Gossypium hirsutum
  Clone ID: GOSHI-09MAY01-C100992_1
cccggtcgcccacctccgggatgtaagtgtcactcagcgccaggaggtggggttgtggctgcggaacgaaaagaaggatcatctctggagaagatgcagtctgctgcatttgtttggcaaaatacactaataacgaagagctaagggagctcccatgttctcacttcatgcacaaggaatgcgttgacaaatggctaaagatcaatgcatcttgtcctctttgcaagaacgacattggcgagaatgtactggacgcaatatccgggacgagcacagccagcatcttgagctcactgtcgggagcacatgataaccagcgacgagctgcatacagtttgatggtgtttctactaatgtgttgggtggtcgtcccttccattctttatggttatcttacggggtgaaagtgaaacactgagaattgagatgtaagcttgttactctcacttgactgtgactgacagacacaacacaaacaaaaacaaaccaaacacacggcaaattcttcgatcaccaaaatattgttgttgttgttgttgtacccccatcacattggcgttgtgcatttgttatgtatgatctgtttactctc

SEQ ID NO: 20449 - DNA, 1047 bp, Gossypium hirsutum
  Clone ID: GOSHI-09MAY01-C100802_1
ggctttaatagctgattataggtctttcatttaaagtttagcatatcctaagtagtaatttacttaggtcatgctaaattttgaatgaaagtcctattgtttagttattattagtcttatgccatattttaaatcactaattattactttaagcacttagatatttatgtcactttaaactttgaatggaagttctattctttagttactattgttcttatgccatgtcataaatgagtaactattattagtattatgtcatgctctcaatgatttgagcttgtagctctctaaacatgatggctacatcattatttggaagggtcacaatgctttaaaaccatttggggcaagaaaataacaaattgactaatcatgagcattacttttatattttgaattggggaaatttattaaaataagttaaaatgatgatgtggtagtaagaatatacgacactttctaaacacctataagaatttttttatttaggttccacaaccatatgagatttctcttggaacggtttggagggtgtcgcctgttttcttccgacatcggtaatggtctttgcactctttctttaaaaacttatataaatcttaaccttgtttgctaataagatttttatgatttgcacacttgttttgcatatccattgtacacctaaggtgcaggagagaagatgatacattttgtctattttcttatttaggatgaacaaaaggtatgcataggagtgagcacataatttgtggagggaatctgaacaagtttttgtagtttgtacatgatagatttctttattatattgtctttttgagaaagatctctcaccttgctatatggtgtacaatgttttgaagaatgcatacatgtaattaagattttgatatgctggttcagtatattcttatgtggatgttttgtgttatcactagatgagcccaaggtttcttttttgtttcaactataaaatgcaaaattgtatctagtctaaaatgtattagttcaagcccattttaatagatattattttaatttaat

SEQ ID NO: 20450 - DNA, 459 bp, Gossypium hirsutum
  Clone ID: GOSHI-09MAY01-C100812_1
gcgttcgggactcatccctgctgcttacataactgtcagggctggaatagctctcagtgagttacaatcgctaggggatctttacgacttcaactcaattgctactcttttcctcataggggttgtctccgtcacacctacgctcatgagcaagacgaaacaatagcgttcgattggctgaacttggttgtaaatggatttcaatttcgtgatagccattcgggtcgctacaaccttctgtaaaggcaagcatcaaataaatgaacgtgctgctactgtttctatggttaatggaatgcaggactgctcctgctgatattgaagatgatgatctgggatggtgttaagtcttgaagttgtttgccatgctttaacaaatctcaggttaagtcttcatcgacaagaatagccttcagactctgtattatattcgtttttattagttcattttcttatctc

SEQ ID NO: 20451 - DNA, 671 bp, Gossypium hirsutum
  Clone ID: GOSHI-09MAY01-C100542_1
gacgtaaactggcataaatatatatatattggaatataaaaataacaaggtcgtacctggggatccaattcaccctatttagcccgtaaaagtcggataataatccaccaacctttacagcatgactctcaattctatcttatatcttacaggcaccaaatgaagagaaccaacgttattgtttctaataataatcatgccatttccctttcttcacatcccactcccgcttccctccattatttccattcatcttctttcatcctcaaacctccactgctgagagaaaagtaccgtcatgtgtgtctcgatgcatcatcatgtaactgtgccactctcacgttggggtcatcccgaatgtagaaactaggagatcgaaagaaatccatgggtcccattccaggcatggcttgctgagtgccatagtaaccatcatggctcgttgctatggtgtttaactgtcccagcccctgaattgtctgttgattcccataataattatcgcgcggtgccattaaattaagctgaaccattccttggacgcttggttgtgcaccaaagtaactatctagggctactgatcttgagcttaacttatccatttgttgcaagccatccatcggtgcaacagccattacctcctgctctgagtttccctttctctctctctc

SEQ ID NO: 20452 - DNA, 752 bp, Gossypium hirsutum
  Clone ID: GOSHI-09MAY01-C100482_1
gtttcggataacttccctcaaatgtttgtccataattcgatggatgctgttagtgaagatcatgttatgtcactcgagaagttggaggttgagttagtcgagcttctgaaaacaaagagaggggatccggtttccatcgcatcgctgcctttgttgtattacgagaagtacggcaaagttctgcaggcagatggttatctcactgagagccagagacatggcaaagcaggttacagtttgacaaagcgtcgggcgaggttgaaaaacacgatccgagtaattgacaggcctcacggacagcattccgtcattttggctgaagatgctcccaagtacatggaaaaccgaaacgatagaaacgatccaggtcccgattgtaagtggatcgagacagatatatcttacattccctgctgagagcacttttaggggagatgatgtctctaactatttcagcaactatggacaagttgaagatgtacggattccctgccaacagaaacggatgttcgggtttgtaacctttgtcagtgcggatactgtgaagatgatcttggctaaaggaaatccacattatgtctgtggggcacgtgttcttgtgaagccttacagggaaaaatcaaagctggttgacaggaagtacccggaaagaattgagtctccaatgttttattctccacattatattgacatggaatccgagcttcagtcgattccaagaggatatgcaacatctaggttgttcaagaagc

SEQ ID NO: 20453 - DNA, 958 bp, Gossypium hirsutum
  Clone ID: GOSHI-09MAY01-C100492_1
cttgatcccaaaaactgatgaggcgaatgatatgtctttattccacccgatcagtttatgctccgtattatacaaagtaattctaaagtcattgcgaatcgatcgaatatggggatatgatgatgaggcacaaggggcatgcgggcgattaagacactgttttggtggatatgaggatgcatgctgaagaggaagagaacggaaaaaaaggggatgctccgaagctcgatatgagcaaagctcacgatcgggccgaatgggatcctatggaaggtatgatgctcaaatgggtcttgatacaagatgggtggaacttattatacattgcatatcgggttcatactttgtaatggttaataaagaggccattgaagtatttattcctagtaaaggattacgacaaggagatcctctgagtccatatttatttttaatacgtacaaaatgtttttcaaccttactaaagattgcaaagcaggatggcataatgaagagagagagggagtccatcaatgacgcaccttttctttaacgatgacagtattatctttggtgaggctacggaaaggggaggctaggtgattaaagatatttttgaaaagtatgaaagggcttcaggttagaaaattaacttggataagtctgtcattttctttagctcgactttggagaatcatgtttgcaatcagattgtgaacaatttaggggtgtgaaaatattttagtatggaacggtatttggattaccaactctggtaggtcgaagcaagaaagaagcctttttcatatatttgcgataggatgagacaaaagattgaaaattggagtgttcattttctttcgcatgggggaaaggagattttcataaaggttgttcttcaagctttacccacttactccatgtcttatttttttctacccaaaaccctttgccataatcttgaaaaaatcttgaatcg

SEQ ID NO: 20454 - DNA, 640 bp, Gossypium hirsutum
  Clone ID: GOSHI-09MAY01-C100402_1
cggacgcgtgggcggacgcgtgggcggacgcgtgggcggacgcgtgggcggacgcgtgggctagacaggcatgccaaggtaactaagaaaggcctacataaatgatgcaagtaagaagttggcacgaccatattgtaatgccgattagacaagatcagaatcaagtgtgggcgttaataaacccgttttgagggacagagcaatgataccacatgataattaggtaccaacgtcgatctgcgaagagcttcaaatactagtctcaactgtcaactgatcaatgagagtgacaatgaagatggaaaaaagggagacaccgtgtctatctctaatatcgaacaaggaattaatagcttagaaaaactagtccaatcagatcatattagcaatgatattgttaattctcacgtggaaattgtggggtttgtacgcaagggaggaaagggaatggcttcaaaaatgtttcagggagataaaaatactaaatttttccatcagttagaagagttaggaataaagttggtgagtgtgcccaatgacattagaggggtcattcaggttcattttttagctttttacagtaatgctgtcactcttaaattaattgacttggattgttataacactccaaacttattct

SEQ ID NO: 20455 - DNA, 1194 bp, Gossypium hirsutum
  Clone ID: GOSHI-09MAY01-C100742_1
cgcctacaatcccaaaacctggtgtgttttttagggtcttatttccgatcgagtccactgccgctttcccttcaaagccgactcctcactctcgctctcgttctcagcttcatacgcaaccaaaagtcctaaaagagaagatcttttgaacatggtggggtggcagagacatttacaatgtgcacttcgtcaagttgggagaagattagaacataattatactcattctaccaactattcttctgtttctcgcttaaactcccctgttttacctcgtgaactgcctagttatcagaaattgtggaaatctcctgctagtatgtcaccggttttatatcgatatttccagcagttgggaatttccacttcaaggaagttactagcaggttcatctgaagagacaccaattgcatcaccattaacccctgttttggcaatagatagtggaaagactgaagagaagaaagttgttcccaatcgcacaaaagttcaagcagtgttaaagaaaataaaacagagtcctaagaaggtcaacttggttgctgcattagttcgtggtatgcgtgttgaggatgctttattacagttgcaagtgacggtaaagcgtgctgctaaaactgtctatcaggttattcattcggctcgagcaaatgctacccataatcatggattggacccagaccgtctgctagttgctgaggcatttgtcgggaagggattatttttgaaaagagtttcatatcatggtaaagggcgatctggaattaaagagagacccgagtgccgactaactgttgtagtgagggaaatgacccctgaagaggaggctgagttagcccgactgagggtaagcaaatttcgcaagcttactaagcgcgaaaaacgacttgtacctcataaacttattgaaacctctcctatttggaaccgcaaaggcagcggcaacggcaggactcaggaaccaaatggtatggttgcatgagatttctcacttttcgtaaaagctagaaagtgttgaagtgctaaaaagtttgtagtctttaatcattttttcttgggacattacaacttggagtacagatgatgttgctagggtttgaaccgtaccccccgaggtgccaacaaagactttttaatcacttggtcctttgaattggcacaaatgggtgctttaaaatagttttcagtggctgg

SEQ ID NO: 20456 - DNA, 760 bp, Gossypium hirsutum
  Clone ID: GOSHI-09MAY01-C100722_1
ggagacagctcgacattgctgagacaaatggtttgagtgagactgcctattttgacatagttttgggtcgtcctcttccaccagcactcattccatatctacgactggtggcacttgggggaacagatgctttcctcttggaatctatttttagaaacacaatttggggccaccttgatttacctgtaagtcgtgccaatgaagagctcatatgccgggttgtccgtgatgcctgcaaatctgctctctctggctatcataccaccattgaagaggatgaaaagctgatggaagacgaaaatcttgattcgaggctgaaaattgctgtaggaatcagggcaggagaaaagaaggtgctccagcaaattgatgagatatttaaaggacgggaatcagaattggatgagttggaatattaccaggaaagaaggctcaaagatcttggtctagttggagagcaaggtgaaatcatcttctgggagaccaactaggtcatgtcaaagacttgcaatatatatcaaggtccatgtgttaaagatcgaaggaaattcccatcacgactgtccaaatttagtttgcacaacattttaacaatgcccttcaatcatgttgtagttttgctgtagggaattttgcttggtagatgatttctgttgcctagtagctatctttttatccatcctcaacccgagctatatttcttaacaatttaacattgaactgcagctagataaaatcattaatgatttcctggttatgc

SEQ ID NO: 20457 - DNA, 942 bp, Gossypium hirsutum
  Clone ID: GOSHI-09MAY01-C100682_1
gtttcttatgccattcttgtcgggaatggtggttcttctcatggctccccttgcgattcccgtgaagatgactttttgtccttcgaggatcaaccgacctgagatacgtaaccaacaagttgcatcttcagatgaaacacttcaaggtgaaggtaatgcagacaaaactgaaccactgttgaagtcatctgaatcgtctacatacctggaaagtttccgtgaaggtgatgaagcatcagaggtggccatgcttcttgccgtgggtgagggggcagttaagaagaagaggagacctaaaaggggggaggatttcaaatttactgaagccataatcaaagccgatttctggcttcttttcttggtttacttcaccggtgtcggttccggtgtgactgttctcaacaatctggctcagatagggattgcacaaggcatacacagcacgacaatactgttgtctcttttcagtttttgcaacttcattggccgcctcggtgggggtgtggtatccgaacatttcgtcaggtcaaaaacggttccccgtaccctttggatgacatgcactcaaatcatcatggtcatcacataccttctctttgcatcagctattagtggtacattatatgctgcaactgcattactaggaatatgctatggtgttcagttctcaatcatgatccccaccgtctctgagcttttcggtttgaagcattttggtatattttacaatttcatgtccctaggaaatcctctcggagcattcctcttctcggggctcctacaggatatatatatgataatgaggctgcaaaacagcacggacttggtctgatcacttcaagcatttcatgcatcggtccaaactgctttaggcttactttcctgatccttgctggtatctgtggtgtgggctcatacaacatcattctaacaaagaggatt

SEQ ID NO: 20458 - DNA, 478 bp, Gossypium hirsutum
  Clone ID: GOSHI-09MAY01-C100022_1
aaaaaaacaaaatcgaaaaggaaaaaatgaaatctcaaatcacctcttagagactgtttctctttttattcaaacttttgaatcgattttgtatagactcgtcccttccccttttacatcctttcattcagttttatagcccgaaaaataaataaaaataaaaagaaaaagaaaataaaaaaaatccttgttattcttattcctttactgtcaattgctatttgttattccgttttgcaggtgtgtatggcatggagtgaagctgtttgtgggcgtgctggcgtggaggaggcagttggagactgcagcaactgaagctcttagggtttgctgagtagtttttttttgttttgggctgggatttgggttatttgttgggtccggtttattcttggttttaggtctaaagtttgggtttgtattttatgactgcaaacaatttaattttatttagtttatttatttatttgttgtataa

SEQ ID NO: 20459 - DNA, 816 bp, Gossypium hirsutum
  Clone ID: GOSHI-09MAY01-C100232_1
ggcttaaactgtgccgcaatggtttcagcgatgaagctattgccgccttctttgaagcctctggaagttctctaactgaactttccctaaataatattgcctcggtgggactgaacactgctatatcgctttccaaatgttcgagaaaattgttcagtttggacttatcatggtgccggaatttaaccgatgaggcactagggttggttgtagatagttgctcgtcactgaagctgctaaaactcttcggatgtacacagatcaccgacgtgtttctaaaagggcattcgaatccccaggtccagatcattggactgaagatggcaacattattggaatttctcaacgtgtttgaaccccgagaagctccattgcggtattcaccggtcgataatctccactaattagttccagcttgaataacctcagtttgctagcttcagcttcattcattgacatatatacaaaagcaatactgattcattcaaagccttatcagaacataccctacaaaaataattaccatacaccagaccaagctaatctctgtagagatacatacttctcacttctttttggtgtcctattacattcacaatcatccaaaacctgtataatgctcaatgaaatgttttggatagttcacatgatatgaatcaaattgaagagagagaaattttctccattgttgagactatttctgtttattctatatggttttcttctatttccatctcagctgtaaaactatgtaacttggactcgggtgtgagtacccaacaccaatatggttagattttcttaagtttttatagt

SEQ ID NO: 20460 - DNA, 507 bp, Gossypium hirsutum
  Clone ID: GOSHI-09MAY01-C1999_1
agcgctttcaacaagctgcttactcggcttgcagcagaaggttatgatttgtccaaccctgttgatcttaagcaccactgggccaagcatgggacaaaccgctacatccccatcaagtaggttgcccaagataccaaaatgcaaatgggatggtagggagaagtagagaagagtcatccatggctcatgtttctttcgttagtcattgtagcagtgtaggaaaaataaatgatccggaaataactgtagtaaggaatagtagtaggtgggtaatgccaacttaatttcgggtttccctggaaactctgatatgtctcgatcttccattagcaagcctggtatttgaagagaggagaaagcatccattaccattggcacatccaagcttggaaaaatgatggggttgtcaacttggcactatgttggctgtagctctctacttaattgtaaaagtattgtacctcaaacgtcttgttgtacttgaatcaagtttcagtttattagctt

SEQ ID NO: 20461 - DNA, 706 bp, Gossypium hirsutum
  Clone ID: GOSHI-09MAY01-C1989_3
tcaaggttttcggttttcggttttcaattttcagattaaaagaatcaggccacgtttggttggttccttctttattcttggatgaatatcaatgcttttgtttggtttacggtttcttcattcggccgaattagttaaaagcctttctattccctcaaatgcgtaatagggattcagtgctgaaagctttgaatggccattccgaccatggccgaatagaaatgaagaaaattcttcccaaaatctccttcacactttctctgcaaatgcgttcaaagttgcttcttttatgacaacaatacaccttcagtatttcagatttgtttcaggtcccacgcgtccggcagcagatgaaaatttattaagaaatatacgtgatagtgctttggagctgacaagttgatgtccagacactagagggtcaaatggaaacagaagttatgctagcgggcagtatagacggctccttcaggttttcacggtggcgtctcttctaaggcttcctcttctagaatgttgggtggtctcaaaactgcatatgcttattgatgctgtcactgagagttataacaaatatttctttggggacgttgggagagaaatatatgatttcttttggggtgattttgctgactggtatattgaagccagtaaagctaccatttaccactctggagatgattcagttgctttggtagctcagaca

SEQ ID NO: 20462 - DNA, 819 bp, Gossypium hirsutum
  Clone ID: GOSHI-09MAY01-C1989_1
cccacgcgtccgctcaaaactgcatatgcttattgatgctgtcactgagagttataacaaatttttctttgaggacgttgggagagaaatatatgatttcttttggggtgattttgctgactggtatgtagaactgactgatacaactgtcaaatgtgcgattggtcttggaaatgggaatattgggatgactggcttgagccttctagcagatgatatagtttctgagcaactgactaggtgagacaccgtttaaggaaagatcatgggattgagggtggaattcctgttgttttctcgtcccacgcgcccgaagctaagctgctcccttttagaggaccaagtggtgaggaagacaacccttcagattatcaagtgagggtgcttgcttcttacttttgcagttttaaagtactctgtttgatcacctaacatcatgcagcggggaaattcatccaatatattgaagcagaatttaagaattgaaagtacatttggatggagctaaagctgtgtttcttttagcgatatatttgaacttgctagtgttaggtccctggtttttgctatctctagatttaagggtagaaggcaaaggaaaatattttggtctacgttagtatgtaatctacatgcttaatccaacaatttaatgtgttgttctgctgtcggatggtacctgggcaggggcaacaatttaatgcattgtattttttattaccttgcaatgtgtatagtcataggtaggttcaactaaccgagctggttttcatatgaataattgattgtagtttaattttaaatttttatatttacttt

SEQ ID NO: 20463 - DNA, 643 bp, Gossypium hirsutum
  Clone ID: LIB3583-021-P1-K1-A5
gcttcgttttactaatatcttaaattagcttttgtcatagttttcggttttcagattaaaagaatcaggccacgtgtggttggttccctctttattcttggaagaatatcaatgcttttgtttggttggttccctcaaatgcgtaatagggattcagtgctgaatgccttgaatggccattccgaccatggccgaggagaaataaagaaaattcttcccaaaatctccttcacactttctctgcaaatgcgttcaaagttgcttcttttatcatagcattacactttcaggtttggtgatatggtgcaacagatgaaaatttattaagaaatatacgttatagtgctttggagcagacaagttgatgtccagacactagagggtcaaatggaaacagaagttatggtagcgtgcagtatagacagctccttcagatgttacatatgccttttggagtatgaagagggagatagcatgcggatatttgcttgtaaccatgaattccacagaacttgtatagacaagtggctcaaggaggttcacagagaggacttcgagaggactggaataagcactttagtcactgtgggagtccgagatattcagggtgagggatttcttgatcagttttctgggttggctg

SEQ ID NO: 20464 - DNA, 391 bp, Gossypium hirsutum
  Clone ID: LIB3048-005-Q1-L1-A4
ggaagaccaagctaccttgcaatacaacaacttcagggggaactagctgcttttcggttcttttcattccaagtgtctttacattcatacaattgaaacatcacacctattggatccccttcttcatcggattgcaatttcagattaaaagaatcaggccacgtttggttggttccctctttattcttggaagaatatcaatgcttttgtttggttggttccctcaaatgcgtaatagggattcagtgctgaatgctttgaatggccattccgatcatggccgaatagaaataaagaacattcttcccaaaatctccttcacactttctctgcaaatgcgttcaaatttgcttcttttatcacagcgttacactttcaggtttggagatat

SEQ ID NO: 20465 - DNA, 373 bp, Gossypium hirsutum
  Clone ID: LIB3145-052-Q1-K1-F9
cccacgcgtccggggagcagctaagtctctttgtaccccattcgaacagcctgaactcccagaaggtgagacaccgtttaaggaaagatcatgggattgagggtggaattcgtgttgttttctctttagagaaacctaaagctcaactgcttccttttagaggaccaagtggtgaggaagacaacccttcagattatcaagtgaggatgcttgcttcttacttttgcagttttaaagtactctgtttgatcacctaacatcatgcagtggggaaattcatccaatatattgaagcagaattttgaatgagaatttgaagtacatttggatggagctaaagttgtgtttcttttagcgatatatttgaacttgc

SEQ ID NO: 20466 - DNA, 966 bp, Gossypium hirsutum
  Clone ID: GOSHI-09MAY01-C101992_1
caaaaaacaaaccaagtttcagtcctttttgtcctaattttctcgacctactttcttctccccacgcgcccgcaaaatgttgagcacaaatgcgattagaaccatcgttgggatcatcggaaatatcatctccttgttcctgtttctctcgcccgttcccacatttattaaaatatttaaattgaaatccgtggaagagttcaagccggatccatatgtagcaacaatcttgaactgtgccatgtgggtgttctatggtctccccatagtccatcccgacagtcttttgatcattaccattaatggtgttggcctggtgattgagggtgtcttcgtaaccatcttctttatcttctctaacaacaagaaacgaaagaggatttgcttttaatcttttgatcgaaatcatcttcatggtagccgtagttttgattactttacttgtgtttcaaacaacccaaaaaaggtccatgtttgttggaattttggccattgtcttcaacattggaatgtacactttcaccattgacagtcatgcgtatggtgattaagacaaaaagcgtcaagtacatgcccttcagtctctcactttttaacttcttaaatggagttgtttgggtgatttatgcattactcaaatttgatattaacgtcttgattccgaatggcttgggaaccctgtcaggtttggtgcagcttatactttatgcatggttctatagaactaccaaatgggatgaagatgataaagcaccagctcaacaagttcaactttccgagatttgatgatgacgccatcaaattttatttctctttattctcctttcaagtggatttgtcgttcttgtttgtctatcattcccaggttttcagattttcgtagacaaaatctgtacaacaaatattttcttgccagtatttccattccactttaattgcagaaaaatgtttggttcctgttcctac

SEQ ID NO: 20467 - DNA, 1266 bp, Gossypium hirsutum
  Clone ID: GOSHI-09MAY01-C1949_2
cggacgcgtgggttaggcgatggattgtgtgattgagtgcttaggtttatagcccacccgcggaacgtgacgacactacagtggaaaatcaaggtctcaggacacaaaaattgtaattcagggaagatcagctgctaaaaggatgtggttttgctcctcatacgcctttcgatagtaaggattgtctgccccaaagtgatgcgatgcgatgcttgcttgactaatacaaccctcacagcggagttctgagactgtatttgtcgacctcaacaatttcctggagtcttcgatggatgatggtgggcatcgtgaaaatggaagacttaaagcagatcagtatagaacagctcagggccagtggctgatgcatcagccatcaatgaagcagataatggccattatggctgaacgagacgcagctattcaagaaaggaatttagcactttctgagaagaaggcagctattgctgagagagatatggcattcttgcagcgagatgcagcgattgctgagcgaaataatgctatagcggaacgtgataatgccatagcaaatctgcagtatcgagagaactccttggcatctggcaatatatcctcttgtcctccagggttccatatctcacgtggagtgaagcacatgcaacatccacagcagcacgttcaccatctgccccacattagtgaagttccttataactcaagggaaatgcatgcaagtgatgtcctaccagtgacgccaggtacctctgaagctgcaaagtcaagacagggtaaacgagcaaaagaggccaaggtaattgcatctaacaagaaggctacaaagcctccaaaaaaggtaaaacaagagaacgaggactcggataagcttatgtctggcaagtcacatgagtggaagggtggacaagatgtgggtggtgcaggtgatgatctcaacaaacagctagtgacaacgaagtctgattggaaaggtaaggatctggggttgaatcaagttgtatttgatgactcgactatggcaccgcctgtttgttcctgcaccggagtcctaagacagtgctataaatggggaaacgggggatggcaatcttcatgttgcacaacctccttgtcaatgtatcctttgccggcagttcccaacaaaagacatgcccgaatcggaggcagaaagatgagtggaagcgcattcaacaagctgcttactcggcttgcaacagaaaggttatgatttgttcaacccctgttgatcttaaagcaccacttggg

SEQ ID NO: 20468 - DNA, 868 bp, Gossypium hirsutum
  Clone ID: GOSHI-09MAY01-C1949_1
gttcataggacacaaaaagtaaggaaaaattcctctgtttttcctttctttccactcttcctttccacatatttcttcaacttatcaaaattcatgccttgttttcccatctatttcctcctctttaattcttccaccgttgtaatttcccgggaagatccgctgctgtaaaggatgtggttttgctcctcatacgcctttcgatagtaaggattgtctgccccgaagtgatgcgatgcgatgcttgcttgactaatacatccctcaccccggagttctgcggctctgtttgtcgacctcaacaatttcctggagtcttcgatggatgatggtgggcatcgtgaaaatggaagacttaaagcagatcagtatagaacagctcatggccagtggctgatgcatcagccatcaatgaagcagataatggccattatggctgaacgagacgcagctattcaagaaaggaatttagcactttctgagaagaagcagctattgctgagagagatatggcattcttgcaccgagatgccacgattgcttgaccgaattatgctataccaaacgtgatatgccatacaaaactgcagtatcgagagactccttgcatctggcattaatcatggccctcaagtccattattactgaggaacacatcacatcccagagacctaacatattccacattttggatcctttactcagggaagtatcatgtgtcctcgggacagtgctttaattaatttaaaggtttcaaaaaccgggttttttcaaagattactccaagaagtaaaaaacggtattattttcacctaggatctatctctaatctatcaaatagaatataaattgtataaatcaacattag

SEQ ID NO: 20469 - DNA, 616 bp, Gossypium hirsutum
  Clone ID: GOSHI-09MAY01-C1979_1
atttgaaggtaatggttcgttcagtgtctcaaaatgaatttgtgagcagtagattgacaggaaagctagaacagcagatgcaggatgctttcaccttatccaccggtggtatgcctttgtggtgtaatgatttagtttcttcttgtccctttatgtttagctttgaggcaagatgcaagtacttccgtttggctgcttttggtccacgaagaggtcaactcaatgccatttcacgtagtaattcaggcacttcaagtgacaggcaaactacttcaggtggtttgcctcgtaagaaatttttagtctcacgtgatcaaattctagattctgcaaccagaatgatggacctacttgctcgtcataagggacttcttgaagtggagtataatgaagaagttggcactggtctcggtccaactttggaattctatactcttgttagtcatgaatttcagaaatttggccttggcatgtggagaggggatcattggtctcttatcactccaactaccttgcctacagaatctgtaattctgagaaacagttctgggcttttccctcgtccatgttcacctaaatctgatgcgaataatggaatacagttttctcaagtact

SEQ ID NO: 20470 - DNA, 622 bp, Gossypium hirsutum
  Clone ID: GOSHI-09MAY01-C1969_10
tccgggtcggcccaacccgtccgcccacgcgtccgtttacaacaacaaaaaaaatctttccagtttctattttctaaaaacaaaactgaaaatgtcttgctgcggaggaaactgtggctgcagctctggttgcaagtgtggcaatggctgtggaggatgcaagatgttccctgacataatagagaagactacaactgagactattgttcttggtgtgacaactcagaaaatgaacaacaaagagaagcagagtggcctttgtctttttaactaaataaattctattactttagtatgtatcagcaaatcttcatgaggatttggttcttaattatgtgtaatgtgggcttttctgctatgtcagaatgtattatgatatttaagaaagtttgttttctattgaaaaaaaaaaaaaaaaaaaaaaaaaaaaaaaaaaaaaaaaaaaaaggacgggccttccagtgtatccaatccaagcttcccttccctgccacgcgatggcttttctatagtgtagcgtaacctaaattcaatggcctggcgcgtcgcttcacaagcgactggactgaccatgccgtgacgcaacccaatttactcgccttgcagcccattctccttagct

SEQ ID NO: 20471 - DNA, 668 bp, Gossypium hirsutum
  Clone ID: GOSHI-09MAY01-C1969_8
cttaacaatgccaaaggagcaactttggggatgctgtgaagaagcttggattatggggtctgtttacccgtggtcttcccctccgtattgtgatgattggaactctaactggagctcagtggggtatctatgatgctttcaaagtgtttgtgggactgccaactactggtggtgttgctcctgcacctgctgccgtggagcctgccaaggcatagaatgttgggggacaagtaaacataggattgctggaatggtttgtcaagctggtggaaggatattcttttttgcgttgagaacatttttatcaagtcgctctgttttggaaaaaactgttggttttaggagaggatggttttgatctcatcctccaaactacggagactaattatttttgtaatagttagatccccacgcgataaatccgaactacttcgagaagcagagaggcctttgtctttttaactaaataaattctattactttagtatgtatcagcaaatcttcatgaggatttggttcttaattatgtgtaatgtgggcttttctgctatgtcagaatgtattatgatatttaagaaagtttgttttcaattgaaagaatggcagttcctttctctttgaaaaaaaaaaaaaaataacaagaccataaataataaataaggctgaca

SEQ ID NO: 20472 - DNA, 538 bp, Gossypium hirsutum
  Clone ID: GOSHI-09MAY01-C1969_6
tcgcccacgcgttcgccctcccgtccgcccacgcgtccgcccacgcgtccggaaaatctttccagtttcaattttctcacaacaaaactgaaaatgtcttgctgttcaggaaaatgtggctgcggcgctgattgcaagtgtggcagtggctgtaacggatgcagtatgttccctgacataatagagaagactacaactgagactattgttcttggtgtggcaactcagaaaatgcactttgagggatctgagatgggagttggggttgagggtggatgcccgtgtggagacaactgcaaatgcaacccttgcacttgcgggaagtgaacaacaaagagaagcagagtggcctttgtcattttaactaaataaattctattactttagtatgtatcagcaaatcttcatgaggatttggttcttaattatgtgtaatgtggcttttctgctatgtcagaatgtattatgatatttaagaaagtttgttttctattgaaagaatggcagttcctttctctttgactaacaaatccaaaac

SEQ ID NO: 20473 - DNA, 619 bp, Gossypium hirsutum
  Clone ID: GOSHI-09MAY01-C1969_5
cccacgcgtccgcccacgcgtccgccgacgcgtccgcaacaacaaaaaaaatctttccagtttctattttctaaaaacaaaactgaaaatgtcttgctgcggaggaaactgtggctgcagctctggttgcaagtgtggcaatggctgtggaggatgcaagatgttccctgacataatagagaagactacaactgagactattgttcttggtgtgacaactcagaaaatgcactttgagggatctgagatgggagttggggttgagaatggatgcaagtgtggagacaactgcacttgcaacccttgcaattgtaaataagagggggggaaaatgaacaacaaagagaagcagagaggcctttgtctttttaactaaataaattctattactttagtatgtatcagcaaatcttcatgaggatttggttcttaattatgtgtaatgtgggcttttctgctatgtcagaatgtattatgatatttaagaaagtttgttttcaattgaaagaatggcagttcctttctctttggctttccagcagatcgagatgctgtgttagctaatgttgccataaagaaattaagccctgatcaccatgtgatcgttgaaaatttcatg

SEQ ID NO: 20474 - DNA, 814 bp, Gossypium hirsutum
  Clone ID: GOSHI-09MAY01-C1969_3
acctcctcagtaagtctggctcaaataaaccagacgactcaatgggggaggaaccttcatggtaacttctgcaatttctatctccccagttttcaccttcatactccaaaattataaatccccgcttccccaattcctctttccccccgcgtccaattttcgtctttccttaacctctctcatcttccaaactaaaaccaaacaaccagctcaaagcttgcaaccatggccttccgccttagcaacaatcttgttggaatcctcaacttcataaccttcctcctctcgatccccatcctcggagccggcatctggcttagtcgagaaggcgtgacggaatgcgaacggtttttggacaagcccgttatcgtaatcggagtcttcctcatgctcgtctcacttgcgggactaatcggcgcgtgctgtcgcgtcacttggctactctggctttacctagtcgtcatgttcctcctcatcgtgctcggcatcgtcttcaccatctttgctttcgcggtgacgaataaaggtgctggagaagctttgtctgggaaagggtacaaggaataccgacttggtgattactccaactggttacagaagagagtcactagccagaagaactggaataagattaagagctgtttggctgatagtaaagtctgtactgatttccacgataagtatctgaatgcttctgcctcggagttttcccagacgcatttgtccgccgttcagtctggttgctgtaagccatcaaacgactgccaattcacgtatgttggaccgacaaactggactagagggagtgcggaat

SEQ ID NO: 20475 - DNA, 1652 bp, Gossypium hirsutum
  Clone ID: GOSHI-09MAY01-C1969_2
gccccacgcgtccccccccgcgcccggagtttggcaagcgagagaaacaaaatccgaagggaatcccaatttcttcgcttttcatcttctctcgcttccatttctccgtttttccccctccggcaatggctatcgattctgattctttcaaacaatcacttctccctagcttcctttactcttctgctcccaactcattctctctggatcgactcctcaacgccaacagccctgctttctctgcttcgcgctccactatacccgatgctcctgcggcctcttcctcgccatcgatcaaggcgagaactttcatgatcccctcccccaatgagcccgggaagaagatcgagatgtattcgcctcagttctacgctgcttgtacctttggcggtatccttagctgtggtctcactcacatggccgttactcctcttgacctcgtcaagtgtaatatgcagattgaccctgcaaagtacaaaagtatctcatctggtttcggagttctactaaaggagcaaggagtgaggggcttcttccgtggttgggttcctacccttcttggttacagcgcacagggtgcttgcaagtttggattctatgagttcttcaagaagtactattctgaccttgctggacctgaatattttgccaagtacaagactctcatctatcttgccggctctgcatctgctgaggtgattgctgatgttgcactttgcccctttgaggcagtcaaggtcagggttcaaacccagcctgggtttgctaggggtctgtctgatggtcttcccaagtttgtcagatcagaaggtgctctcggattgtacaagggtattgttcctctttggggccgacagattccatataccatgatgaaatttgcttcttttgaaactattgttgagatgatctacaagtatggtattcccactcccaaggagcagtgcagcaaaaatctgcagcttggtgttagttttgctggtggttatgttgctggtgtcttctgtgctattgtttcgcatcctgctgacaaccttgtctccttccttaacaatgccaaaggagcaactgttggggatgctgtgaagaagcttggattatggggtctgtttacccgtggtcttcccctccgtattgtgatgattggaactctaactggagctcagtggggtatctatgatgctttcaaagtgtttgtggggctgccaactactggtggtgttgctcctgctcctgcggctgtggagcttgccaaggcatagaatgttggaaatcctgttgtcatgggggacaagtaaacataggattgctggaatggtttgtcaagctggtggaaggatattcttttttgcgttgagaacatttttatcaagtcgctctgttttgaaaaaaactgttggttttaggagaggatggttttgatctcatcctccaaactacggagactaattatttttgtaatagttagatcataaatgaaatttcatttgaagatcaatcccccccttctgtagcagttaaaaataaggagcagatgcagatggggacgatactgcttactttaccttgttaagcaagctttttaatgtaatattgagaacttttgttcggctttctttaaggcaaaaaaaaaaaaaaaaaaaaaagaaaat

SEQ ID NO: 20476 - DNA, 874 bp, Gossypium hirsutum
  Clone ID: GOSHI-09MAY01-C1969_1
cccaccctcccgcccgataaaccctaatttctttttaaaagcttttgcttgtaattttcgaggcaattggttcagaaaagaaaaatggccaccattgatgttcctgagcaggtttcagttcttgcagatgcagaagctcttagaaaggcttgtaaaggatgggggacagatgagaaggcaataatttcagtgttgggtcacagaaatgcagttcaaaggaagcaaatcaggcttgcttatgaagacctttaccaggaagatctcatcaagcgtcttgaatcagagctttctggtgatttcgagaaagcagtgtatcgttggatattggatccagcagaccgagatgccgtgttagctaatgttgccataaagaaattaagccctgatcaccatgtgatcgttgaaatttcatgcaccagatcccctgaagagctcttggctgtgaggagagcttatcaggctcgatacaagcattccctggaagaagatgtggctgctcataccaagggagacactcgaaagctcttggttgccttagtgagtgcatttagatacgatggggaagaaataaatacgagagtagcaaattctgaagccaaaattctccatgaagctgtcaaagacaaggaattcaaccatgaagaaattatcaggatcttgagtacaaggagcaagatgcaactcatggcgactttcaatcgttacagagatgatcatggcactaccattaccaagaacttggaaggtgattcaggtgacgaattcctcaagacactgcgtccgacgattcgatgccttaatgacccgaaaaagtatttcgaaaaggttttgcgcaattcgatccggagggtcggaaccgatgaggatgcactta

SEQ ID NO: 20477 - DNA, 555 bp, Gossypium hirsutum
  unsure (1)..(555): unsure at all n locations
  Clone ID: LIB3543-031-Q1-K6-E1
tttgncgcgtgggcggacgcgtgggcggacgcgtgggtaagagaggaaattggttcagaaaagaaaaaggccaccattgatgttcctgagcaggtttcggttcttgcagatgcagaagctcttagaaaggcttgtaaaggatgggggacagatgagaaggcaataatttcagtgttgggtcacagaaatgcagttcaaaggaagcaaatcaggcttgcttatgaagacctttaccaggaagatctcatcaagcgtcttgaatcagagctttctggtgatttcgagaaagcagtgtatcgttggatattggatccagcagaccgagatgccgtgttagctaatgttgccataaagaaattaagccctgatcaccatgtgatcgttgaaatttcatgcaccagatcccctgaagagctcttggctgtgaggagagcttatcaggctcgatacaagcattccctggaagaagatgtggctgctcataccaagggagacactcgaaagctcttggttgccttagtgagtgcatttagatacgatgggggaagaaataaa

SEQ ID NO: 20478 - DNA, 358 bp, Gossypium hirsutum
  Clone ID: LIB3196-016-P1-M1-C10
ctttttaaaagcttttgcttgtaattttaatggctaccctcattgctcctgaacatacttcagctgttgaagatgctgaaaagcttcaaaaagcttgtaaaggatgggggacagatgagaaggcaataatttcagtgttgggtcacagaaatgcagttcaaaggaagcaaatcaggcttgcttatgaagacctttaccaggaagatctcatcaagcgtcttgaatcagagctttctggtgatttcgagaaagcagtgtatcgttggatattggatccagcagaccgagatgccgtgttagctaatgttgccataaagaaattaagccctgatcaccatgtgatcgttgaaatttcatg

SEQ ID NO: 20479 - DNA, 524 bp, Gossypium hirsutum
  Clone ID: uC-gsflmaxxa028d09b1
tctttaacctgctggtgatgtccaaggacctgttgggggaattatgattgaatgcggtactgattcccccatggaacaagtgctttcccaggatgatgcagaatgttgcatctgcctttctgcttacgaggatggagttgagctaagggaacttccttgtcgccaccatttccactgtgcctgtgtagataagtggctatacataaatgctacctgtcctctctgcaagtacaacattttaaagagtagttcccaagaggaagtgtagaagaaccaaaaataaaacaatcatttacagtcacgtctaagacctttgcatagggattttagctcgagagtattataatgcagtatgttccctgacataatagagaagactacaactgaaactattgttcttggtgtggcaactcagaaaatgcactttgagggatctgagatgggagttggggttgagggtggatgcccgtgtggagacaactgcaaatgcaacccttgcacttgcgggtagtgaacaacaaaaa

SEQ ID NO: 20480 - DNA, 327 bp, Gossypium hirsutum
  Clone ID: uC-gsflnu33B140g07b1
accgagcccatgcgggctcccacgcgtacgcccacgcgtccgaccacgcgtccgtccacgcgtccgtttccagtttcaattttatcacaacaaaactgaaaatgtcttgctgctcaggaaaatgagggtgaggtgctgattgcaagtgtggcagtggctgtaacggatgcagtatgttccctgacataatggagaagactacgactgaaactattgttcttggtgtggcaactcagaaaatgcactttgagggatctgagatggagtggctgcttggggggattacgatgatggttctaagagttgtttgtcaccccagaagctggt

SEQ ID NO: 20481 - DNA, 451 bp, Gossypium hirsutum
  Clone ID: uC-gsflnu33B138b07b1
taaatctttccagtttcaattttctcacaacaaaactgaaaatgtcttgctgttcaggaaaatgtggctgcggcgctgattgcaagtgtggcagtggctgtaacggatgcagtatgttccctgacataatagagaagactacaactgagactattgttcttggtgtggcaactcagaaaatgcactttgagggatctgagatgggagctggggttgcggccatggccttccgccttagcaacaatcttgttggaatcctcaacttcataaccttcctcctctcgatccccatcctcggagccggcatctggcttagtctagaaggcgtgacggaatgcgaacggtttttggacaagcccgttatcgtaatcggagtcttcctcatgctcgtctcacttgcgggactaatcgacccgtgctgtcgcgttacttggctactcttgctttacct

SEQ ID NO: 20482 - DNA, 387 bp, Gossypium hirsutum
  Clone ID: uC-gsflnu33B092g12b1
ttacctcctcatcgtgctcggcatcgtcttcaccatctttgctttcgcggtgacgaataaaggtgctggagaagctttgtctgggaaagggtacaaggaataccgacttggtgattactccaactggttacagaagagagtcactagccagaagaactggaataagattaagagctgtttggctgatagtaaagactgttctgatttccactataagtttctgaatacttctgtctcgaagtttttccatacgcatattttttaccctttcgtctggtagctgaaagtcaatcatccttgtccattttccttttttcctttttaatattctttcctaaaagtctctttcatattaagccattctttatatttacctttcttttattt

SEQ ID NO: 20483 - DNA, 313 bp, Gossypium hirsutum
  Clone ID: uC-gsflnu33B057c07b1
tttgtttttttttttttttttttttttttgaaattgaaccaagatttattcaaataataaatgccactacaaatatgatcatcataatggttataacgtagaatcagtatcagcacaacaaaactaaggcaatggacaagtacaagatagggtagagagtaccaacaaggagagaagctgagttggcctttgcttttttaactaaataaattttattactttagtatgtatcagcaaattttcatgaggatttggttcttaattatgagtaatgggggcttttctgttatttcagaatgtattatgatattta

SEQ ID NO: 20484 - DNA, 511 bp, Gossypium hirsutum
  Clone ID: uC-gsflnu33B107g02b1
tttttaatgttgcatctgcctttctgcttacgaggatggagttgagctaagggaacttccttgtcgccaccatttccactgtgcctgtgtagataagtggctatacataaatgctacctgtcctctctgcaagtacaacattttaaagagtagttcccaagaggaagtgtgaagaaccaaaaataaaacaatcatttacagtcacgtctaagacctttgcatagggattttagctcgagagcattataatgcagaatatttcatatagaccgatccaggctattctgttattgttgttcttgttgttgtggtagatgcagatgttgatgtagtttctcttagtgccggtgacagtcaatgatacacttgttttagctaggtccttcatggagttgtcgggtatatcgatgtttcccggggcatccaaacactaaccaagttgagaatgggttacggtttcagcttttcttttttgtgttgttaaaatctactatatttatactaatttatt

SEQ ID NO: 20485 - DNA, 388 bp, Gossypium hirsutum
  unsure (1)..(388): unsure at all n locations
  Clone ID: LIB3493-053-P1-M1-G5
ggtctgtttacccgtggtcttcccctccgtattgtgatgattggaactctaactggagctcagtggggtatatatgatgctttcaaagtgtttgtgggactgccaactactggtggtgttgctcctgcacctgctgccgtggagcctgccaaggcatataatgttggaaaacaaagtaacataggattgctggaatggtttgtcaagctggtggaaagatattcttttttgcgttgagaacatatttattaagtcgctctgttttgaaaaaaactattggttntaagaagaagatggttttaatctatcctgcaaaatactggggactaaatagtttttgttgtggtctgatcctcaatggaatttcatttgaagatcaatccccccc

SEQ ID NO: 20486 - DNA, 344 bp, Gossypium hirsutum
  Clone ID: LIB3148-037-Q1-K1-F3
cccacgcgtccggttggggttgagggtggatgcccgtgtggagacaactgcaaatgcaacccttgcacttgcgggaagtgaacaacaaagagaagcagagtggcctttgtcattttaactaaataaattctattactttagtatgtatcagcaaatcttcatgaggatttggttcttaattatgtgtaatgtggcttttctgctatgtcagaatgtattatgatatttaagaaagtttgttttctattgaaaaaaaaaaaatcataaaaaaaaaaacatcaaaaaaaaaaatatataatatttctttaatttatttacaaactttaatttataataatattaag

SEQ ID NO: 20487 - DNA, 344 bp, Gossypium hirsutum
  Clone ID: LIB3165-014-P1-K1-F8
gaaaatctttccaggatcaattttctcacaacaaaactgaaaatgtctcgctggtcaggaaaatgtggctgcggcgctgattgcaagtgtggcagtggctgtaacggatgcagtatgttccctgacatactagagaagactacaactgagactattgttcttggcgtggcaactcagaaaatgcactttgagggatctgagatgggagttggggttgagggtgtatcccccatgggggacgaccagaactgcgctcttaaggacatgggtccgagatcatcagaggtatgctgattgtaactttgctattacacaaaataaatggtattacttttataagtggc

SEQ ID NO: 20488 - DNA, 334 bp, Gossypium hirsutum
  Clone ID: LIB3272-042-P1-K1-F5
aatctttccagtttcaattttctcacaacaaaactgaaaatgtcttgctgttcaagaaaatggggctgcggcgctgattgcaagtgtggcaatggctgtaacggatgcagtatgttccctgacataatagagaagactacaactgagactattgttcttggtgtggcaactcagaaaatgcactttgagggatctgagatgggagttggggttgaggttccattccccctgggagactacctaatatgctatccttggacttgtggaatgtgaacctcatacataagaacaatggggcttgtcattctaactaaatatatactattactgtttt

SEQ ID NO: 20489 - DNA, 324 bp, Gossypium hirsutum
  Clone ID: LIB3148-050-Q1-K1-G12
caagtgtggagacaactgcacttgcaacccttgcaattgtaaataagagggggggaaaatgaacaacaaagagaagcagagaggcctttgtctttttaactaaataaattctattactttagtatgtatcagcaaatcttcatgaggatttggttcttaattatgtgtaatgtgggcttttctgctatgtcagaatgtattatgatatttaagaaagttttttttcaattgaaagaatggcagttcctttctctttgactaaataaaaaaaagaaaatatgattacatacataaaaaaaaaaaaaatataaaaaaaaaataaaa

SEQ ID NO: 20490 - DNA, 243 bp, Gossypium hirsutum
  Clone ID: uC-gsflnu33B085c02b1
gctctcggattgtacaagggtattgttcctctttggggccgacagattccatataccatgatgaaattagcttcttttgaagctatcgctgatatgatctacaagtatggtatccccactcccaaggagcattgcatttaaattgtgcaccttgatgttagttatggtggtggctatgacgctggtgtgacctgtaataccgtggcgtatcctgatgtaaaccgtgtgtacttaattcacctt

SEQ ID NO: 20491 - DNA, 243 bp, Gossypium hirsutum
  Clone ID: uC-gsronu33B087g09b1
ccctcgcgtccgaaaatgtcttgctgttcaggaaaatgtggctgcggcgctgattgcaagtgtggcagtggctgtaacggatgcagtatgttccctgacataatagagaagactacaactgagactattgttcttggtgtggcaactcagaaaatgcactttgagggatctgagatgggagttggggttgcggctttcttcccccttctccttcttctttttttctcttttctctcttctctt

SEQ ID NO: 20492 - DNA, 737 bp, Gossypium hirsutum
  Clone ID: GOSHI-09MAY01-C1909_2
cccacgcgtccgcccacgcgtccgcccacgcgtccgcccacgcgtccgcccacgcgtccgatcaattactttttatttttttcagagcctccttcaccaaactccgctctgttcagcccgtgatcttttgatctttctctatggctaccatttccaagctctctaaccccaacccagtcgcttctctttcatcatcttccaaacccagatcttcttcatcgcttaaatgcttcgttgggttccctaccaggcctggtttctgctctaagctggtttcatcttctagcttgtcctcgataaacacccaccctttcaggggctccttggttgtcaggtgttctcttgctgatggaaacggtagttcagtgaagaggactactttgcatgatctgtatgaaaaagaagggcagagtccatggtatgacaacctttgcaggccagtgacccattcgccgccactgattgcaagtggggttagaggtgtcactagcaacccaccgattttccagaaagctatatcttcatcaaatgctttacaatgatccgtacctgtaaacttggcgcttatggaaagatatctaaagtgcttattgggagttggtggtcaacgacatccaagatgcctgcatactttctgagccattctatgaccaaacagacgaggtgatggttatgtttctgatgaggtttcttccagacttgctgatgatactttatgggacctactatttctccca

SEQ ID NO: 20493 - DNA, 1721 bp, Gossypium hirsutum
  Clone ID: GOSHI-09MAY01-C1909_1
gtgcgcttctttacaacaaccctccaaccccacctcgtatatatctaaaaatccaacgccaccctccttccggttctggtttcagcatcgattactttttatttttttcagagcctccttcaccaacctccgctctgttcagcccgtgatcttttgatctttctccatggctaccatttccaagctcgctaaccccaacccagtcgcttctctttcattatctttcaaacccagatcttcttcatcgcttaaatgcttcgttgggttccctaccaggcctgctttcagctctaagctggtttcatcttctagcttgtcctcgataaacacccaccctttcaggggctccttggttgtcaggtgttctcttgctgatggaaacggtagttcagtgaagacgactactttgcatgatctgtatgaaaaagaagggcagagtccatggtatgacaacctttgcaggccagtgaccgatttgctgccactgattgcaagtggggttagaggtgtaactagcaacccagcgattttccagaaagctatatcttcatcaaatgcttacaatgatcaattcagggaacttgtgcaatcaggaaaagatatcgaaagtgcttattgggagttagtggtgaaggacatccaagatgcctgcaaactttttgagccaatctatgaccaaacagatggaggtgatggttatgtttctgttgaggtttctcccagacttgctgatgatactaatgggaccattgaggcagccaaatatcttcataaagtggttgatcgtcccaatgtgtacattaagatccctgcaacagcaccatgcattccttcaatcaaggaagttattgcgaatggcataagtgtgaatgtcactctcatattttcgcttgctagatacgaggctgttattgatgcttacttggacggccttgaggcttctgggttgagtgatctctccagggttactagtgtagcttccttctttgtcagtagggtagataccctcattgacaaaatgcttgaaatgattggaacaccagaagcccttgatctccgaggaaaggctgctgtagctcaagcagccctggcatataggctctaccagaagaaattctccggtccaagatgggaagctttggtgaagaagggtgccaagaaacagaggttgctctgggcctcaactagtgtcaagaaccctgcctaccctgacaccctatatgttgctcctctcattggacctgacacggtctcaaccatgcctgaccaagcactccaagcctttatagaccacggcacagtttcaaggacgattgacgcaaacgtgtctgaagctgaaggcatctatagtgcacttgagaagttggggattgactggggcaaagtcggttcacagctggaagacgagggagtggagtctttcaagaagagctttgacagccttctcgacacattgcaagagaaggcaaacactcttaaatttgtgatttcttagatttgctgtcactgcaaacacaataaaaacaagcgggtgttggttcctgctgtaaaagaaagttggtgagcgagcgttatgtgagacgttgaatattatgtaatatgaagcagcgagtgtttgtttaatggaacttttgttttgtgctttgttttatggctcctgctgatcaatgtagttgcagatgtggttctaaagcaacaggaaaccttaataaggataaggt

SEQ ID NO: 20494 - DNA, 359 bp, Gossypium hirsutum
  Clone ID: LIB3272-018-P1-K1-H6
tccgtattaagattagaggcgttcttcatcgaccatctttttgtttggtcaggggggtttagtttcgtggttagggatcccattcccaatgcttatttttaggaacccagtcgcttctgtgtaattatctttcaaacccagatcttcttcatcgcttaaatgctacgttgggttccctaccaggcctgctttcagctctaagctggtttcatcttctagcttgtcctcgataaacacccaccctttcaggggctccttgcttgtcaggtgttctcttgctgatggaaacggtagttcagagaagacgactactttgcatgatctgtatgaaaaagaagggcagagtccatggtatgaca

SEQ ID NO: 20495 - DNA, 145 bp, Gossypium hirsutum
  unsure (1)..(145): unsure at all n locations
  Clone ID: LIB3272-030-P1-K1-B4
tggtgntaggtggggaaggacatccaagatgcctgcaaactttttgagccaaggtatgaccaaacagatggaggggatggtcatgtttctgttgaggaaacttatacccgggacgcggtttttcaaccttccaatggagcaacca

SEQ ID NO: 20496 - DNA, 685 bp, Gossypium hirsutum
  Clone ID: GOSHI-09MAY01-C101902_1
attttggactagcaaaaggcttccttctcaatggacacaccattctattgctccaattgaagggacatttgggcatttagcacccgagtacttcatgcatggaacagtggatgagaaaacagatgtgtttgcctttggagttttcttgttagagattatttcagggaggaaaccagttgacgcctctcaccaaagcttgcactgctgggcaaaaccactgttgaaacgtgaagagatggaaaaattggtagatccaaggcttggagggtcctacgatatttcacagctaaagagacttgccttcacggcatccctctgcattcgagcctcttcagcctggcgtcccaccatgaatgaggtattggaagttcttatggaaggggaaactgataaagagaggtggagaatgccagaagaagaggaacaagaagaattctggggctttgaggatcttgaatatgaatgtcacacttctttctcactttcacctgatgattctctctcgactgcaagttctttgagggaaaaaaattaaaataatccaaaatcataaacaaaattttaaccactgctataaattgtcttcatgtaaatataaatatctatttcgcagttatgaatataatatttagcgtgaattgtggcaagaaaccttccatttcaatattagatacctattggacct

SEQ ID NO: 20497 - DNA, 983 bp, Gossypium hirsutum
  Clone ID: GOSHI-09MAY01-C1889_1
ggtgaactcaaaattgtgactttggtatggcgcgacagtatgggagccctcttaagccttacacaaccaaggtggtgactcagtggtatagggctcctgaacttttacttggagcaaagaagtattcaacagccgtggacacgtggtctgtgggatgtataatggctgaattgttagctaaggaacccctgttcaaagggacaagtgaaattgatcagcttcgcaagatatttgatactcttggtgttccaagtgagaagatttggcctgggttttctgaattaccaggttccaaagcaaattattctaagcaaccgtataacttgttgcgcaagaagtttcctgcagcatcttttactggatctgccgttctttctgatgctggatttgacctgttgaacaggcttcttacctatgaccctgagaaaagaataacagcagatgatgctcttaatcatgattggttccgggagcttcccctgccaaaatctaaagatttcttgcctactttcccaccaaaagtgtgaatggaacaatttccttgcctgatttgtggaagctggacacaaccaaaatattagcaccgcattcttacctagcaattgtagtggtcatgaaggatccaaatttgatgcagcagtggtaaaaaaacttcatctattttgtgtcatgatgcaggcaagctggttcattcagccactctgttatctttcatgataattgttttagtagatattgacaaaaatgtgagatgctgtagttgcatgtttcgtagcaaattaatgagtgggagaaactgatatagtcttttgacaggcacatgtacccttacatggcccggttattagttgggataattttcagatgagttgtaaaggtcatcagctgcgaccttaccttgaatcttttattttcatctccttgatactttatcagaatgtaacccatgtaaatattcttaaccacatttgaaatttcctttt

SEQ ID NO: 20498 - DNA, 730 bp, Gossypium hirsutum
  Clone ID: GOSHI-09MAY01-C101852_1
atattttttaccaaaccactcttcacgagtgggccgtcatttttccgcctgaaagccgaacatccctttcccttttcctttagctgttcgccggcaaagttttgtcatctatatccatcagctttccgttttcactgcttatcctacgccactaggtccaccacctcttccgttgtggtaatcatccttctccatcgggaacattggtactcatgacccagtttgtcttctgtctctctccacctccctcataacaaatcccgccacctcatccacaagttttcactgattgtatctgcaaagactacagttttcttctattcgctaattgctctatcagtgcatcagtggtttcctttggattcttctcttgatttgggctttccgttttttgattgtttgggaactcaaaaggatgacagtgctgaagaggtatgtgctgaggttgttcatatcacttaagtacataacagcaaatgtcgtggacagaaataatggacggatacttgcaacagcatcaacagttgaacattccatcaagaactcattggagtgcggccggtcttgcaatgccaaggcagcaaccgttatcggtgaagtattggctatgcgactcaaggtggaaggtcttgagcaaggacagggaagagggattcatgttgatgtaaacaaggaggtcgagaagaaagcttaagaaccgaaccaaggtctgggccgttgtcaatgccct

SEQ ID NO: 20499 - DNA, 670 bp, Gossypium hirsutum
  Clone ID: GOSHI-09MAY01-C1819_1
aaagaatcaaaaggcgtaggcataagagagaaacgtgagggagagagtagcgaaagctttgctggaaaaggaatctcaaccatgagccaaggtccaaagctctacgacaacaaacctaaaaaagctcaattgaaacaatttcaacaccatcaaaaaggaaaggaatttccttcaacatcatcaggtgcagcatcatattcaatgggtcagccgcaccgccgccaccacctcagcctccgaaggaatcgtttgcaaggcgttacaagtttctttggccccttctcttggctgtcaactttaccctcgcggccgtcctcgcctccggtacgaagaaaaaggacacgaacttagcagaagaagatgttgatttgagtcctcctgtatcaactacacctgtcactgcacctccggttactgaaaccccatcacctgtatcatccatcacacagcctttgaagttgcctgaaccgattccggagagccaacagcgtgaactttttaagtatatattggaagagaagaggaaagtgaaacccaaagatcccgaggagaagaagcggctggacgaagagaaagctatactcaaacaatttatccgagctaaatccataccacagttatgacctgataatccattgttgaaactgatatattaccttttgttgttggt

SEQ ID NO: 20500 - DNA, 430 bp, Gossypium hirsutum
  Clone ID: LIB3147-035-Q1-K1-F6
caagttggttactggaaagcttagagcaatgcttcagagatcagacgaacaagttaggagcttgaaaaaacagagcacgttcttgagtcaattggctgccaaaacaattcccaatgcgatccattgcttgtctatgcgtttgaccatagaatactatctccttcccttggagaagagaaagttccctagaagtgagaacttggaaaatccaaacctctaccattatgctctcttctctgataatgtcttggctgcatcagttgttgtcaactcaactatcatgaatgccaaggatccttcaaaacatgttttccatcttgttaccgataaacttaattttggagcaatgaacatgtggtttctgttaaatccccctggaaaggccaccattcatgttgaaaatgttgatgaattcaagtggcttaattca

SEQ ID NO: 20501 - DNA, 402 bp, Gossypium hirsutum
  Clone ID: LIB3147-035-Q1-K1-F4
gcgctcgtttggtttcataatgcacttgtcatttgtccaaggttcgagggctgggggctgggagaagaagcggatggtcgaaaagaaagctatactcaaacaatttatccgagctaaatccctaccacagtaatgacttgataatccattgcttaaacctggatatattgcctatatttgttcagtttgactaagaaatttggaagttcggttccctacaattcatgcatgctgtcttatagattgaaaatgtacaaattttgttgaggaagtacttttttaatacggaagcgagcctgccattgctgttctaaatattgttaccgataaacttaattttggagcattgaacatgtggtttctgttaaatccaactggaaaagccaccattcatgttgaaaa

SEQ ID NO: 20502 - DNA, 622 bp, Gossypium hirsutum
  Clone ID: GOSHI-09MAY01-C1839_3
gattcctttgtacatgctgtagctgagaatctagtacatcgcttggaggactgcaagaaaacatttcctactgcattatgtttgggaagctcgttgcaagctgtgaggcaaatgctgcggggacgtggtgcaattcaaaagtttattatgatggatacctcttatgatatgttaaagctgtgcgaaagttctcaactgggttccggcaatgagaatattgacacttcatatgtggttggtgatgaggagtttctgcccatcaaagaaagttcactagatttggtaatcatgttgcctagggctccattgcacaaatgatcttccaggggccatgatacagtgtaaactggcattgaagccggatggcctattcttagcagctattcttggaggagagaccttaaaggagctgcgaatagcttgcactgtagctcaaatggagcgtgaaggatgcattagtccacgggtatcacctctggcacaggtcaaggatgctggcaaccttttgaccagtgctggttttgcacttcctggcgttgatgttgatgaatacgtggttagatacaagagtgcgttggatcttattcgacatctgcgagctatgagtgaaaactaatgcgct

SEQ ID NO: 20503 - DNA, 1017 bp, Gossypium hirsutum
  Clone ID: GOSHI-09MAY01-C1839_2
cccacgcgtccggaatgaggagattccttttctctcagaccagttgttccctgttgagaagacaaagaagaccgaaagacataccccaccgttggttcctatcatccgcttccttctctactgcggaatatgacgacggcgacgcctttcaaagcagtccttctaaagtcaagatcttcgatcgccacctcaaacgcacacagcgtgatcgagctgcatggttgcttcgtcccaatgattcctttgtacatgctgtagctgagaatctagtagatcgcttggaggactgcaagaaaacatttcctactgcattatgtttgggaggctcgttgcaagctgtgaggcaaatgctgcgggacgtggtgcaattcaaaagtttattatgatggatacctcttatgatatgttaaagctgtgcaaaagttctcacctgggttccggccatgagaatattgagacttcatatgtggttggtgatgaattttctttcaaattctaactgattgtatttgttgatgtaaagttcagtagatttggtaatcagttgcctagggctccattggacaaatgatcttccaggggccatgatacagtgtaaactggcattgaagccggatggcctattcttagcagctattcttggaggagaaaccttaaaggagctgcgaatagcttgcaccgtggctcaaatggagcgtgaaggaggcattagtccacgggtatcacctctggcacaggtcagggatgctggcaaccttttgaccagggctggttttgcacttcctggtgttgatgttgatgaatacgtggttagatacaacagtgccttggatctaattgaacatctgcgagcaatgggtgaaactaatgcacttctgcagaggaccaatatcctgaagagggaaacagctctagcaaccgcagcctatgattcaatgtttgcagccgaagatggcaccatccctgcaactttctaggtcagtgcattaatatccattccaagagctgtaatttgga

SEQ ID NO: 20504 - DNA, 1181 bp, Gossypium hirsutum
  Clone ID: GOSHI-09MAY01-C1839_1
agaatgaggagattccttttctctcagaccagttgttccctgttgagaagacaaagaagaccgaaagacataccccaccgatggttcatatcatccacttccttctctactgcggaatatgacgacagcgacgcctttcaaagcagtccttctaaagtcaagatcttcgaccgccacctcaaacgcactcagcgtgatcgagctgcatggttgctgcgtcccaatgattccttcgtacatgctgtagctgagaatctagtagatcgcttggaggactgcaagaaaacatttcctactgcattatgtttgggaggctcgttgcaagctgtgaggcaaatgctgcggggacgtgtagatttggtaatcagttgcctagggctccattggacaaatgatcttccaggggccatgatacagtgtaaactggcattgaagccggatggcctattcttagcagctattcttggaggagaaaccttaaaggagctgcgaatagcttgcaccgtggctcaaatggagcgtgaaggaggcattagtccacgggtatcacctctggcacaggtcagggatgctggcaaccttttgaccagggctggttttgcacttcctggtgttgatgttgatgaatacgtggttagatacaagagtgccttggatctaattgaacatctgcgagcaatgggtgaaactaatgcgattctgcaaaggaccaatatcttgaagagggtaacagctctagcaacggcatccatctatgattcaatgtttgcagccaaagatggcaccatccctgcactttaccaggtaatagacatgacaggttggagagaacatccttctcaacagaagtccaaaaggaggggttctgcctcaatatcatttaaggacatacaaagcaatttggaaatgggagttaatctctatgtttgtgtgccagtgttcgtctatttatgcaaagaatatgtaaaatagtaaaatctgaaagctgagaatagcatagacgtgtcaggtaacagagaagaaggtttagacatgatgcgaataaactcctttgtaattgccatcattcacttctatttgtaagctttaggtagcaagttgatggttaaaataagaaactgggagatggtacgtgttaaaaaaagtgggaagtaaaattaagagttgatgaacgtctacgt

SEQ ID NO: 20505 - DNA, 442 bp, Gossypium hirsutum
  Clone ID: GOSHI-09MAY01-C1829_1
aatttatttctttcatcgctcggcggcgatgcaccacccacagcctcacatttcttcgtcaacctccacttcctttcctgccgccgcggagtttgacttcaaaccggccaagcgccgcggcagttacaattgtggcagatgtggtcttcccaagaaaggccacgtttgccatctcaacagtaccacctaccctacttcgatttccactcctacctcatctccatccgccattactgtcgaaaattcatcatccgcgtcccgtcctccgcccctacgtcagtcttacacgcatctccgacgtgcgctttcctttgacgacatagacactcgcgctgactcgccggcacgcgatttagatgagtctaattctccctacccgggtacagatcttgatccggataatgagatgatctccggtgggttaccggctgggtgtttgtgg

SEQ ID NO: 20506 - DNA, 986 bp, Gossypium hirsutum
  Clone ID: GOSHI-09MAY01-C1589_1
cctagacgtgacgcattgaatcaggtgatggcgagagggattcttttagtgattcattgagtgatgagagcgagagtgacaagttgtggagatgggacggatgctcgtcggaggatggcggttccgagcacgatagcctttggcatgtgaataatagattgggttacctttactttcagtatttcgagagatcaactccttatggaagagttccactcatggataagattaatggattatcgagaagataccccggtttgatgtcattgaggagcgtagatctttccccagctagttggatggcggttgcctggtacccaatttatcatattcccatgggaaggaccataaaagacttgtccacatgcttcctcacttaccacactctatcttcttctttccaagatatggacctggaagatgacattgagaatcctgaaaggaagcgaaaggaaggggaaggcatctctcttccaccatttggcttggccacttacaagatgcaaggaaacgtgtgggtctcgggcaattctgggcgggaccaagagaggctggtgtcgcttttaagcgtggcagattcgtggctaaagcaacttagagtccagcaccatgacttcaattacttcacggggattcgacgtggctaaatacataattgcttgctgtagttttctcttgagaaccccatggaagtgactgatcactaattatcaaaaaaaaaaaaaaacttaaaaaaaaagaagcctctttttgggttttaagaatttttggttttgtgcttgggagtaatagtgaggattgtgattggcacttgttatcaaaacccttttgacggttcactctgaggccagccttgacaggaactttcagcagaggctatgtgagttgagtttaccctctttatgtctgtgggcttttattgttaagaaatgggtgagggtctaaaagagtacaaaagtggggctctgaaacgttagaaactcttt

SEQ ID NO: 20507 - DNA, 651 bp, Gossypium hirsutum
  Clone ID: GOSHI-09MAY01-C1519_1
aagatggaaagatccatctgtgcaaatcctggctatcgtcgagttcacctgagttgatctcagtgtctcctttggctgttgtgagcgggcaagaaacctctcttttagtgaggggtagaaatctgactaatcctggcaccgagattcattgtgcatacatgggtggatactcatcaatgcaaattaatgggtcaacatataagggagcctcatatgatgaggtaaacatgggcagttttaagattcaggttccatcaccaaaagcactaagtcgttgcttcattgagagtggagaatggattcaagggaaacagttctcctataataatagctgatgctgccatttgtaaagaattgagacttctggaatctgaacttgacacagaagctaaagcttctgatattatttctgaagagcatgcttatgattctcaccgtccaaggtcaatggaggaagtgctgcactttctgaatgaactcggatggttattccagaggagcactgctcccttgcccaagagttctgatcattcccttcgccggtttaagtttttgcttatggtctctgtgagagtgactattgtgctttagtcaaggtactttttgacatgcttgtggaaagtaacttggatatgaatgacctatccaagg

SEQ ID NO: 20508 - DNA, 686 bp, Gossypium hirsutum
  Clone ID: GOSHI-09MAY01-C101502_1
caggtcttgtctatttgcaccatgaaaacatgtaatacatggtcacataaagccgtctaatctactggtaaaccgaatggagaagtgaagattgctgattttggtcttagtacattggtagctagctcaatggaccagacagatacatttgttgggactgataacaactacatgtcgccagagagaattagtgggagcacttatgattatagcagcggtatttggagtttaggcatggtagcgctcgagtgcgccatcggacgttacccgtataagcaatcggaagatccgcaaacttggcctagcattgatgagcttttaaagccaaatgctcccccaaatgagttctcttcagagttctgttcatttgtctcagcctgcctacagacgagccctgaaaagagagcatcatctttggccctcttgagtccccccttcatcaaaaagtcccaacccttcacccttgtgtattttgtaggttggctggaatccccattgaattacccaagacgaagataatttttggtcttttgttaccaaaaacatgttttgatcctaaaattgatttagcccttaatcattcttccccttgttcaaaacccaagagttcataggtctaagttggtctaatttgaaatccacccatatatgatagcaatcctttaagagggtttgttttttgttct

SEQ ID NO: 20509 - DNA, 1005 bp, Gossypium hirsutum
  Clone ID: GOSHI-09MAY01-C1499_1
caagaacccgttctccaagggtttctggtagtgatctatgtctgctgaatcttcctaatggcctgtaacgatgaaaacgagcctttgctatcaggattagcgactccaagaactcaaaagactaatggggatagaccaaagaagagaaggtttcgacgtgttaggagtgctccttttgcagattttgttccgactgatggtaatagagaagctgcagttccacgttccgggtccattttcgggagacttaatccgagtcttaagaaggtagctctatttttgacgttatacatgggtttaggcaccatttgcttttatacaaccaggacccaaatcaaaggggacaaaacaaatggaattcttgatgctctttatttttgtgttgttacaatgaccactgttggatatggagaccttgttcctaacagcgacctcgcaaaactactagcctgtgcctttgtcttcacaggaatggctctggtcggacttgtactgaccaaagctgctgactacttggctgagaagcaagaaatattgctggttaaagctttacacatgaatcaaaaagttggtgaacttcacgttcttaaggagattgaaactaatagggtggcgcacgtgtttttcacatcactaatcattcttggcgggcttatattatccgggaccatcttcctatatgaagttgagaatttaggcctagtcgattcgttctactgcgtttgttctaccattacaaccttgggatatggcgataaaagcttctcaaccgaaggaggtcgtatttttgctgtgttttggatattagctagcactatctgcttggctcagttttttctctatgttgctgaggtaaatacagagaacagacaaagagcactggtgaaatgggttcttggtcgaagaacaacaaatgtagatttggaggctgctgatattgatgataatgagctctgttggagctgctgagtttgttctattcaaacgtaaagacacggagaagat

SEQ ID NO: 20510 - DNA, 318 bp, Gossypium hirsutum
  Clone ID: GOSHI-09MAY01-C1459_2
tttggtgatgcgaccctctcatcatcacattcactttatttaggcttcctctgtatttgttgttcatgttgtctttgatagagtctaagagatagctaggacccactcgcgtgcctcccccctccccccaaatccccataccccgtcgtgttctacagcaaagttgtgcttctctcccagttacctcctctaggatcgttcaagcttcgatcccgaaccgattcacgagtgccattgtcaaggccccgacttctcttggatcttttaagatcattttcaaacctttttggcttgaagtgttcatgtcatcacaatatc

SEQ ID NO: 20511 - DNA, 904 bp, Gossypium hirsutum
  Clone ID: GOSHI-09MAY01-C1459_1
cccacgcgtccgcccacgcgtccgaggtgatccgaccctctcatcatcacattcactttatttaggcttcctattttttttcttttttcttttttttgtataagtctcaaagaaacttagaccccttcgtattctccgctcataccccaaatccccataccccttctgttcaacagcaaagatggcaactgtgcgggttacctcctctagtatcgttcaagcttcaatcccgaaccgattcacgagtgccattgtcaaggccccgacttctcttggatcttttaagaacatctccaaaccttttggcttgaaatgttcctccaatcacaaaacatttatggcagcttataagattaagcttgtaggaccggatggtgaggtgagcgagtttcaagcccctgacgatcaatacattttagatgcagccgaggaagcaggagttgaactgccatactcttgccgagctggagcttgctccacatgtgccgggaagatggtgtcgggttcagttgatcaatcggacggatccttccttgatgaaaaacaaattgccgatggttacgtgctgacttgcgtttcgtacccgacctcagattgtgagatccacactcacaaggaagctgatctttactaggtatttaatggtttgaaatcagtagaatctatctaaaatacccagaaatttcatctgaatttggtggaaaataaagggtaaatgactaaatgtttatcagggacaatttgttgcttaatatgcttagtgtttgctctaaagtttgtagctgaaattagggtttcaataatttttgtggatttgccatacaaaatatataccaatattgtcttttatgatctaaattggtttcaaaaacgaatcttcaaagtatcattgctcatgttgtta

SEQ ID NO: 20512 - DNA, 658 bp, Gossypium hirsutum
  Clone ID: GOSHI-09MAY01-C1449_8
cggactcttgtttcgtcccacgctttcctatcacccactacccgactttcacagggcagatctgtttgttctagttgttcggctgtttctatcctctaagtttcatgtctgatcttgacatccagattcctactgcctttgatccgtttgctgatgcaaatgctgaagacgctggtgctggtgccaaggaatacgttcacattcgtattcagcagcggaacggtaggaaaagcctgaccactgttcatggattgaagaaagaatttagctcgcgctcgattctcaaggacctcaagaaagaattttgttgttatggcactgttgtccaggacccacaattagggaaggttattcaacttctaggagatcagaggaagaacgtctccactttcctcgttcaggctggtattgcgaagactgatagaatcacaatccacggttgataagatatagctacgagaggctgcggaagaataaaaacgtctatcatgttctaagacataagagctacccgatcaagtatttgttatattggtaggtggtacatgatcattcatgcttggaactctcccagttacctagatttctttggtagttgctagaggcacctttggtgccttatgtttctgatcagttcgaacatatcccacgcatattt

SEQ ID NO: 20513 - DNA, 509 bp, Gossypium hirsutum
  Clone ID: GOSHI-09MAY01-C1449_6
gcaggtgcaagtctaacctcctaataaagtcaccttcgccaccactgtctttgttcttcagtgttcccttggccctggacccggtttttgggcaggttattcaacttcaaggtgatcaaaggaagaacgtctccacttttcttgttcaggttattgtcaccatcatttggttttcttatatatattcttaaagctggtatatgcgtccgacataaatgtagatatgctgtgcgaatatgattctattgaacatacatgtgttgacactcgctctctggtctcggtcaggttgtacaagttcttaattttgtatgttctttatgaacaggctggtattgtgaaggacaacatcaaaatccatggtttttaagttgcaggttcctagttttctgggaatctagcctctacgtttaatagctgaaaatcttccccactgatgaacttgttttgctataagtatccccatgttgatttgattgatgtattgttctactcttcggacgcgtggg

SEQ ID NO: 20514 - DNA, 858 bp, Gossypium hirsutum
  Clone ID: GOSHI-09MAY01-C1449_3
tattcagatcaggtacgtattaaccgcttctttatgattttctcccaaaacaattgtttttattttgatataatttagggcttatgctcgaattctttttaggaccaaatcacgtgtgccccctccttagatcagatcagtataacgagtttcccttttgctaaaattccgatatgagttcgtggcttatgcttgtaactgctgaaatctatgtatggttttatggtgctttctcatctttttttttttaccaagaatactaaatttgtgtttttgatgaaatttatttgctatgttacccccagggtgaccggttagtgtttgcagaaaatgattttgcttgaaaggtaggaagttccgaactgaattgatctagtatacgaaatatctgatcaagatttgaccttcccgcccgcccggtttcatgtctgatcttgacatccaaattcctactgcctttgatccgtttgctgatgcaaatgctgaggactctggtgctggtaccaaggagtacgtgtacattcgtatccaacaacggaatggtaggaaaagcttgactactgtccaagggttgaagaaagaatttagctataacaaaattctcaaggacctcaaggagttctgttgcaatggcactgttgtccaggaccctgagttagggcaggttattcaacttcaaggtgatcaaaggaagaacgtctcactttttcttgttcaggctggtattgtgaaggacaacatcaaaatccatggtttttaagttgcaggttcctagttttctgggaatctagcctctacgtttaatagctgaaaatcttacccactgatgaactgttttgctataagtatccccatgtt

SEQ ID NO: 20515 - DNA, 954 bp, Gossypium hirsutum
  Clone ID: GOSHI-09MAY01-C1449_2
tcgcccacgcgtccgcgaaacctaaagattctctctcccaaaccaaaccttcaaatttcagcaagagagagagagagaacttacatagctcagacttcgatcatcaatttagggtttcttaattcgattccccgattacccgataccccaattttacagatcaggtctgagtgttctagttgttcggctgtttctatccgctaagtttcatgtctgatcttgacatccagattcctactgcctttgatccgtttgctgatgcaaatgctgaagacgctggtgctggtgccaaggaatacgttcacattcgtattcagcagcggaacggtaggaaaagcctgaccactgttcagggattgaagaaagaatttagctataacaaaattctcaaggacctgaagaaagaattttgttgcaatggcaccgttgtccaggacccagaattaggaaaggttattcaacttcaaggagatcagaggaagaacgtctccactttccttgttcaggctggtattgtgaagaaggatagcatcaaaatccacggtttttaagtctcggctacgagagtttccaggagacttaaaaggtctatcatcttctaagccggaagagctacccgatgaagtattagttatttaggtggtgtcatattatctataatgttagtctgatactctgatatattgcatcctatgtttcttgtgctgtcaactctttaagctatatgtgatgttgaatgacaatgataaccgttgcatattatacataaatagttgtcaaagttttgagatcgaaaaaaaacaaaaaaaatatcacttcactccaaaaaaaaaaaaaaaaaaaaaaaaaaaaaaataaaagcaaaaagaatatgggggtcccccgtttagaggctccagcttttcttccgcttccatcactcgcctttctttttttaaaagaaaacctcctttt

SEQ ID NO: 20516 - DNA, 717 bp, Gossypium hirsutum
  Clone ID: GOSHI-09MAY01-C1449_1
tctctcaccgccagagagctcagacttcgatcatcaattttagggttttttctattatttcataatcagattcttgattatccaaaactctaatcttcagatcaggtcttagttttctagttgttgggttctttcgacgagctaagtttcatgtctgatcttgacatccagattcctactgcctttgatccgtttgctgatgcaaatgctgaagactctggtgctggtgccaaggagtatgtgcatattcgtattcagcagcggaatggtaggaaaagcctgaccacggtccaggggttgaaaaaagaattcagctataacaaaattcttaaggacctcaagaaagagttttgttgcaatggcactgtggtccaagaccctgaattaggacaggttattcagcttcaaggcgatcaaaggaagaatgtttccaccttccttgttcaggccggtattgtgaagaaggataacatcaaaatccatggcttttaaagttgcaacagctaaaatttcttcgagtctatcctattctgaaactcctatgtatgtaatgttataatatgtttatagtggtgtgatactgataaatgcaccctgtgactgtgtttcttgttgtgctttcaactctttagccctatgtgatgctgaatggcgatgttagctttaattatttctatttctcacatggttgttgctaccatcatctttagtaaaaaa

SEQ ID NO: 20517 - DNA, 446 bp, Gossypium hirsutum
  Clone ID: uC-gsronu33B143e05b1
gaaatactgacagataaatcattttctctctccccgggccccctttaaccaaattttagatctcacgccgagaaaaagagaatcagctcagacttcgatcatcacctttagggatttctaaatttcataatcagattcttagttattcgaaaccctaatattcagatcagggtgaccggttagtgtttgcagaaaatgatcttgcttgaaaggtaggaagttccgaactgaatcgatctagtatacgaaatatctgatcaagatttgacctttccgtcagctaagtttcatgtctgatcttgacatccaaattcctactgcctttgatccgtttgctgatgcaaatgctgaggactctggtgctggtaccaaggagtacgtgtacattcgtatccaacaacggaatggtaggaaaagcttgactactgtccaagggttgaagaaag

SEQ ID NO: 20518 - DNA, 543 bp, Gossypium hirsutum
  Clone ID: LIB3583-012-P1-K1-D6
tccattttgcccatttcactgctctcccctagatcgtctacaagagagagatctccttacagctgccgtacacattcacacacacattcactgaatggatcgagtcatcctaacataaagattggtactggctttgatccgcaaggtgatgcaaatgctgaagactctggtgctggtgccaaggagtatgtgcatattcgtattcagcagcggaatggtaggaaaagcctgaccacggtccacgggttgaaaaaagaattcagctataacaaaattcttaaggacctcaagaaagagttttgttgcaatggcactgtggtccaagaccctgaattaggacaggttattcagcttcaaggcgatcaaaggaagaatgtttccaccttccttgttcaggccggtattgtgaagaaggataacatcaaaatccatggcttttaaagttgcaacagctaaaatttcttcgagtctatcctattctgaaactcctatgtatgtaatgttataatatgtttatagtggtgtgatactgataaatgcacc

SEQ ID NO: 20519 - DNA, 537 bp, Gossypium hirsutum
  Clone ID: LIB3543-019-Q1-K1-B10
cttcccaaaccaaccctcaaaactcagcgccagagagctcagacttcgatcatcaattttagggttttttttcctattatttcataatcagattcttgattatccaaaattctaatcttcagatcaggtcttagttttctagttgttgggctctttcgaccagctaagtttcatgtctgatcttgacatccagattcctactgcctttgactctggtgccggtgccaaggagtatgtgcatattcgtattcagcagcggaatggtaggaaaagcctgaccactgtccaggggttgaaaaaagaattcagctataacaaaattcttaaggacctcaagaaagagttttgttgcaatggcactgtggtccaagaccctgaattagggcaggttattcagcttcaaggcgatcaaaggaagaatgtttccaccttccttgttcaggccggtattgtgaagaaggataacatcaaaatccacggcttttaaagttgcaacggctaaaatttcttcaagactatcctattctgaaactccta

SEQ ID NO: 20520 - DNA, 382 bp, Gossypium hirsutum
  unsure (1)..(382): unsure at all n locations
  Clone ID: LIB3145-046-Q1-K1-B11
gaagaaaccattatttgatccaccgaaagaaaattactgatgaatattcggccttgcaatgtaggtctgagtgttctagttgttcggctgtttctatcctctaagtttcatgtctgatcttgacatccagattcctactgcctttggtactcatttctccctcgtatttatctcttatctccttgtattaacttgcctttagcatggaaattcaaacttgtcatcaactgtatgctgctagatccgtttgctgatgcaaatgctgaagacgctggtgctggtgccaaagaatacgttcacattcgtattcagcagcggaacggtaggaaaagcctgaccactgttcanggattgaagaaagaatttagctataacaaaattc

SEQ ID NO: 20521 - DNA, 706 bp, Gossypium hirsutum
  Clone ID: GOSHI-09MAY01-C1479_2
cccagcgtccgccccgcgtccgatacacctaggaattctcctccgttgctttataagatgagattgatcaagggaatagctaattttaggcgtctttacgctaattctatagacttgaacacaaaatcctacctctctacgacaaagcgcgcattttgcaggccaagtgaatacgcaaaggtcgttaacaccaccatcacttgttctccattttattgcaccaataacttaggatcgagatcccattcaagcagacccgaaatggaggggatagagcatagggtaatcaaagccaatggcataaatattcacgtcgctgagaaagggaaaggccctgtaatccttttcctccatggattcccagagctctggtatacatggcgcaatcagatcactgcttttgcctcgcttgggtaccgagctttggctcctgacctgcgtggatttggggaaacggaggcacccgatgatgcctccacctacaacagtttacacgtggtgggggatctcattgctctcctggatgttgtcgccgccgaccaggaccaggtttttgtcgtgggacatgattggggtgccctcattgcctggtggttgtgcatgtttagaccagatagggttaaggctttggttaacatgagtgttgcattcaatcctaggaaccctaatatgaaacctcttgaaggtctcagagctttgtatgggg

SEQ ID NO: 20522 - DNA, 961 bp, Gossypium hirsutum
  Clone ID: GOSHI-09MAY01-C1479_1
cccacgcgtccgcccacgcgtccgggaattctcctccgttgctttataagatgagattgatccagggaatagctaattttaggcgtctttacgctaattctatagacttgaacacaaaatcctacctctccacgacaaagcgtgcattttgcaggccaagtgaacacgcaaaggtcgttaacaccaccatcacttgttctccattttattgcagcaataacttaggatcgagatcccattcaagcagacccgaaatggaggggatagagcatagggtaatcaaagccaatggcataaatattcacgtcgctgagaaagggaaaggccctgtaatccttttcctccatggattcccagagctctggtatacatggcgccatcagatcactgcttttgcctcgcttgggtaccgagctttggctcctgacctgcgtggatttggggaaacggaggcacccgatgatgccttcacctacaacagtttacacgtggtgggatgatcttattgctcttctggatgatgtttatgtcgtctcatgatcatttattttacattggtcaatattgtatagatctcatttactagatgtttgtcaaatttatactaatttatgtctaatggctatgtttactaatattgtattatataactttatactccattaagtatcattctgattttcaatgactttttatttatatattattattatcatatttcagattataaatctatttgtatatttaatacatcttcaatatctatttcttatatcataatgatatatgtaatttactaatgattatttaataactatatttagtaatatattattattatatattattatattattatattattgtattttatattatcattcaaatattcaacaattatatctatatgtatataatctattatactgatgttctcttcgaatttatatattcatcgatt

SEQ ID NO: 20523 - DNA, 501 bp, Gossypium hirsutum
  Clone ID: GOSHI-09MAY01-C1419_8
gcgagagaccctcgcggccgcccacgcggccggagacagcgcgcgtctgggttgtcgtttctgtagctcaagaaactcttcaatggctgaaaagagcaaggttttgatcatcggaggaaccggatacctgggaaagttcattgtggaagccagtgcaaaagagggtcatcccacttttgtttttgtaagggagtccaccgcctcccaccctgtttagggaaaacttgtcgacaacttcaagaacttaggggtccatttgttgtttggggatatgtaccaccatgagagtttggtcaaagcaataaagcaagttgatgtggtgatttcggttgtgggtcaaatgcagttatcagatcaagttaagatcattgctgctattaaagaagctgggaatgtcaagagatttttcccatcggaatctggaatggacgtggacaagaacaatgcggttgagccagcaaaatcgacattcgcaatcaaggctcaaatccgtcatgctgt

SEQ ID NO: 20524 - DNA, 702 bp, Gossypium hirsutum
  Clone ID: GOSHI-09MAY01-C1419_5
cccacgcgtccgcccacgcgtccgcccacgcgtccgctttatcttttattgttgtgtcatgcagggggatatgtgcgacggtgagagtttggtcaaagcaataaagcaagttgatgtggtgatttcggttgtgggtcaaatgcagttatcagtccttgttaagatcattgctgctattaaagaagctgggaatgtcaagagatttttcccatcggaatttggaatggacgtggacaagaacaatgcggttgagccagcaaaatcgacattcgcaatcaaggctcaaatccgtcatggctgttgaggctgaagggatcccttacacttatgtgcctgcttactgctgggcaggctattttcttcctacattgtctgcagcctgtgagccacctctctccccaagagacaagggtggttattctaggtgatggaaatccttgatgcttgtttttcaacccatgaagctgacatcggaacctacaccatcaaagctgttgatgaccccagaacagcgaacaagactctattcatcaggcctgccaagaacacctactcatttaacgagctcatcgccctgtggagaagttgattggaaaacccttgagaaacatatgttcctgggaccaacttctcaacagatccagagtctgcaatccatcatatatgtgggcatagtactcatctttgcatgtgatgcaccac

SEQ ID NO: 20525 - DNA, 660 bp, Gossypium hirsutum
  Clone ID: GOSHI-09MAY01-C1419_3
cccttctctttattactagtccagagaacccaccaactgaactgccccttctcgtccgggaaacacagcccgtgccacgagtaggtgtagtgctgttcgtgttgaaggggaaatcggtcctcctgggtcgccgccgcgcctcaatcggtgaatccacctttgctctccccggcggccacctcgagtttggtgagagcttcgaagagtgcggagccagagagttgatggaggagacgggcttggaaatggggaaagcagacttcttaacagtgaccaataaagtcttcctggacaaatccaaacactgccattacgtcatcgtctttctccgtgcagtgctggcggaccctaatcaagttccacaaaacccggagccagacaagtgcgacggctgggattggtatgactgggataatctgccccaacctctgttttcgacgcttgacgaaatggtacgaagtggcttcaacccctttccctccacttgacagctgctgaatgaatacgttttcttttcttatatattgcttgcgtataattgatccatgggttactttaatttcatcatgatgtattcagtgaccaatgttgtttgtaatatgaatcttagatggtgaacttttatggtttatattatgtagctaagtgatttcaagagtc

SEQ ID NO: 20526 - DNA, 986 bp, Gossypium hirsutum
  Clone ID: GOSHI-09MAY01-C1419_2
cggacgcgtgggcaacttcatccaggacctctctttgccaactaccaattctcactgcctgtcctttctatagcagaagcattcttcaatggctggaaagagcaaggttttagtcattggaggcactgggtacatcggaaagttcattgttgaagccagtgtgaaagagggtcatcccacttttgctttcgtaagagagggttcagtttcagacccagttaagggaaaggttattaacaatttcaagaacttaggggttcatctgttgtatggggatctttacgatcatgagagtctggttaaggcaataaagcaagctgatgtggtgatatccgcggtaggttcgatgcagttagcagatcaagttaagatcattgctgccattaaagaagctgggaatgtgaagaggtttttcccatcggaattcggaaatgatgtggaccgggttcatgctgtagagccagcgaaaacagcattcgcaaccaaggctcaaatccggcgtgctattgaggctgagggaatcccctacacctatgtgtccagtaactgctttgcaggctattttcttcctggtttgtcacagccaggagccactactcccccaagagacaagttggtgatcccaggcgatggagatcctaaagaggctacatttccatacaagtgtggattggcaatcagacattcagtctttgtgaggggtgatcatacccactttgagatcgaaccgtcattccgagttgaggcttctgagctgtaccctgatgtgaaatataccacttgtgaggaatatctgagccgtttggtttgagacagaaatggaatcatatgctcctggttattgaactaatactagcaggaatcgagaaactttcaccgcctggtatatgcgtgtatgcataagtttcttgttatcattcagcagaatgtgaaccatattgttctaaattactatataatatatgaggagaatctgtttgcctaaa

SEQ ID NO: 20527 - DNA, 1339 bp, Gossypium hirsutum
  Clone ID: GOSHI-09MAY01-C1419_1
cccacgcgtccgcccacgcgtccgcccacgcgtccgccatacatctctcatctgggttgtcgtttctatagctgaagaaactcttcaatggctgaaaagagcaaggttttgatcatcggaggaactggatatctgggaaagttcattgtggaagccagtgcaaaagagggtcatcccactttcgtttttgtaagggagtccaccgtctccgaccctgttaagggaaaacttgtcgacaacttcaagaacttaggggtccatttgttgttaggggatatgtacgaccatgagagtttggtcaaggcaataaagcaagttgatgtggtgatttcggttgtgggtcaaatgcagttagcagatcaagttaagatcattgctgctattaaagaagctgggaatgtcaagagatttttcccatcggaatttggaatggacgtggacaagaacaatgcggttgagccagcaaaatcgacattcgcaatcaaggctcaaatccgtcgtgctgttgaggctgaagggatcccttacacttatgtgcctgctaactgctttgcaggctattttcttcctacattgtcgcagccaggagccacctctcccccaagagacaaggtggttattctaggtgatggaaatcctgaagctgttttcaaccatgaagctgacatcggaacctacaccatcaaagctgttgatgaccccagaacagcgaacaagactctattcatcaggcctcccaagaacacctactcatttaacgagctcatcgccctgtgggagaagttgattggcaaaacccttgagaaaacatatgttcctgaggaccaacttctcaaacagatccaagagtctccaatcccaatcaatattatgttggccatcagtcactcaatctttgtcaatggtgattgcaccaacttcgagatcgatccatcattcggatacgaagcttctgagctctaccctcaagtgaaatacaccactgtggaagaaggcctcagtcattttgtttgagaaagctagaaatcaaatcagatcattgttgttattaaactgataccagtaataatgcaaaaactgtcactgagagatttgtgcagaggacttggggattctgtgtgtacgcatgtgtgtgtttatgtcataaatttctcgttactatcattcaacataatgccaaacatgcttttcttcttgtgtcgtactcaaaattctgcacattacaaaaataaaaaaaaaaaaaaaaaaaataaaaaaaaaaaataaaaataaaacaaacttatatatttaacaaaaaacaattcctaaaaattgggggggcccttttaaaggacccaag

SEQ ID NO: 20528 - DNA, 522 bp, Gossypium hirsutum
  Clone ID: uC-gsronu33B154b04b2
cccatcttttccgcccacgcgtacggcaaaagagggtcatggcacttttgtttttgtaagggagggcaccatctccgaccctgttaagggaaaacttgtcgacaacttcaagaacttaggggtccatttgctgttaggggatatgtacgaccatgagagtttggtccaagccctaaagcaagttgatgtggtgatttcctgaaatggggaaaggcaactatctaaccaagaccagatcattcttgctggacaaatccaaacactggcattacagtattttccatctccgtgcagtgctggcggaccctaatcaagttccacaaaacccggatccagacaagtgcgacggctgggattggtatgactgggataatctgccccaacctatgttttttacgcttgacgaaatggtacgaagtggcttcaacccctttccctccacttgacagctgcttaatgaatacgttttcttttcttatatattgcttgcgtataatgattccttgattacctttaatttcc

SEQ ID NO: 20529 - DNA, 636 bp, Gossypium hirsutum
  unsure (1)..(636): unsure at all n locations
  Clone ID: LIB3828-031-Q6-K6-E11
ccatgnnnaaagtgatatgtgggaacatttacacaatncanaagncttgttgnatgnnnaccccagnnaacactgnaataagnatnncctatacnnattaggctctcctttaaaaacacctatnntcatttaatgtaggattgggggggcgtgtgtgggagaaaaattgattggggcaaannacccttgagnaannaacatatgttccagnaggnnaccaactntnnctcaaacagnagtcaaagnnaggcttacanntttccatttacagtgtntnnggattgnngcaatcagnacattttcagtcnntttgtgagggggtnngatcataccannactttgagaatcgaacggcgtcatttnnggagttgaggtctttctgagnnctgtacccnntgatgtgaannatatactactgtnnggaggaatanntctgagccgtnnttggtttgagaccagaannaatgaatcatatgnnctccttgttatnntaaactaatannctagcannataattgagaaaaactatcacnncgactggtattatgcnngtgtatgcattaaggtttcttgttnttttcattcagcagaaatgtgaacnncatattgttctaaattacttatataatantatga

SEQ ID NO: 20530 - DNA, 515 bp, Gossypium hirsutum
  Clone ID: LIB3829-033-Q1-N6-H9
aggcaaacagattctcttcatatattatatagtaatttagaacagtaaggttcacattctgctgaatgataacaagaaacttacgcatacacggatataccagtcggtgatagtttctcgattattgctagtattagtttaataacaaggagcatatgattcattttctttctcaaaccaaacggctcagatattcctccacagtggtatatttcacatcagggtacagctcagaagcctcaactccgaatgacggttcgatctcaaagttggtatgatcacccctcacaaagactgaatgtctgattgccaatccaacactgtatggaaatgtagcctctttgatctgtttgagaagttggtcctctggaacatatgttttctcaagggttttgccaatcaatttctcccacaaggcaacgatctcattaaatgaataggtgtttttaggaggcctaatgtataggatcttattcaatgttctggggtcatcaacagctttgattgtgtatgtt

SEQ ID NO: 20531 - DNA, 502 bp, Gossypium hirsutum
  Clone ID: LIB3585-061-P1-K1-E8
cttaactcataagggtggctgccaagctaggtggcagaagctctgccttggctgcaaccgagcagcggtgaagacagaatacggcacgcgtgatctggctaacattcttgaggagaccgatgcagagaaggcccttacagagctgagagcaaaggcagtcacaaaagggatcattaccctgttctggtcttactaagagtggcctgaaatgacttacttaaacacccgagctaaaccgatcttatcgagtactgtattgggattaaaacatctattatgctgaagtctgttgtttctattgtgatagaaaggctgatatgatactatagtaacatcatggatgctctattagaaacattgagtgtcatgagatgacgtctatctgaataagaaaaggacgtacacaagaacaatgctgtctgagccaagcaaaatcgacattcgcaatcaaggctcaaatccgtcgtgctgttgaggctgaaaggatcccttacacttgggt

SEQ ID NO: 20532 - DNA, 459 bp, Gossypium hirsutum
  Clone ID: LIB3585-055-P1-K1-D10
cccacgcgtccgcccacgcgtccgcccacgcgtccgctgtagctgaagaaactcttggagggctgaaaagagcaaggttttgatcatcggaggaactggatacctgggaaagttcattgtggaagccagtgcaaaagagggtcatcccacttttgtttttgtaagggagtccaccgtctccgaccctgttaagggaaaacttgtcgacaacttcaagaacttaggggtccatttgttgttaggggatatgtacgaccatgagagtttggtcaaagcaataaagcaagttgatgtggtgatttcggttgtgggtcaaatgcagttatcagatcaagttaagatcattgctgctattaaagaagctgggaatgtcaagagatttttcccatcggaatttggaatggacgtggacaagaacaatgcggttgagccagcaaaatcgacattcgcaatcaaggc

SEQ ID NO: 20533 - DNA, 385 bp, Gossypium hirsutum
  unsure (1)..(385): unsure at all n locations
  Clone ID: LIB3584-004-P1-K1-B12
gtcccgcgtccggtttctatagggggggggacgttgcggtggctgaaaanagcaagggtttgatcatcggaggaactggatatctgggaaagttcattgtggaagccagtgcaaaagaggtcatcccactttcgtttttgtaagggagtccaccgtctccgaccctnttaaggggaaagtnggggcatcttctanaacttangggtccatttgttgttaggggatatgtacgaccatgagagtttggtcaaggcaataaagcaagttgatgtggtgatttcggttgtgggtctaatgccgttngctgatcacgttaagatccttgctgcctcttcccgggctgggtgtgtctgtgctttttcccatcggcatttgggctggtcgt

SEQ ID NO: 20534 - DNA, 381 bp, Gossypium hirsutum
  Clone ID: LIB3585-042-P1-K1-D2
cccacgcgtccggcaagttgatgtggtgatttcggttgtgggtcaaatgcagttatcagatcaagttaagatcatggctggtattaaagaagctgggaatgtcaaggtgggtgtttcctctctttaatttgttttatattcaagtttggcttcaacatagtatcttacatcactgtaaatcaaattagctgcaaccactttgatataattaaacccgtatgaggccactttggtggaatggaccctccatgtgctggtagttattgtaaatgatgctgtagatgcgtagtatttactatttactaaccctggtaccgtagaacaatctaaacagttttagagctacttttacacgcatattaaattcttttccatgcattt

SEQ ID NO: 20535 - DNA, 911 bp, Gossypium hirsutum
  Clone ID: GOSHI-09MAY01-C1439_1
cttatcttggttgcccactaaccctaaccccaaccctttgctttccctattcctaccccgccccccccctctctctctctaatgctagtggctctctttctcagctctccctttggttggccactagtccaagccctacctttttttctcaaatgctagtggttcattcatttctctctttacaaccccccactgagcctttcttttgagcttcaacttctttgatgggtgtgaatacataatgttaacagctaaactataaccaaagagtttgttttttgcttagcatggggagagatggaaaaagaaactaaccaagaaaacccatctctcctctcaaataataacatctccatcactaaagaaaactcctcccctaaaaaacaccctggaaacaccgctgcggctggtggcggagataggctgaaacgtgatgaatggagtgaaggagctgtttcaagcttgcttgaggcttacgaaaacaaatgggtgcttagaaatagagccaaacttaagggtcatgattgggaagatgtggctcgctatgtttcagctcgagctaattgtaccaagtcgccaaagactcaaactcagtgcaaaaacaagattgagtcaatgaagaaaaggtatcgatcggagtctgccacggcggatggatcttcttggcctttgtatccacgccttgaccttttacttcgtggcagtactgcacctcctcctcctccgttactgccaccacagctgcaaccgtcagcggttcctcaagctgctactccaatttccactaaccctcctttcatgactttaccagagccctccatgatggtggtgctacagcaacagcatccaccaccaccaccaccacatttggctcctcagcttcctggaactacacaaaattcacacgattc

SEQ ID NO: 20536 - DNA, 568 bp, Gossypium hirsutum
  Clone ID: GOSHI-09MAY01-C1779_1
gtgagggcttatttcatcatgcagccactaacctccatcaatttgatggccaatggcgcggataatggccggatcttgccaacggaggccacgaccttggagatctggtaacctcgctccctttttttctctttttttttttaaaatgtgaatcttatgctattctttcaaaaaaatgaaataagttttgaagatttaaacaaatctttaacaccgctcgaccctcgcccacatctatgcatctctgagatgtttgggctttcattggcgtcgattcgggtccctcttcatgtgttcgtgctaaaattgcaaaccaatcaaaagaaataaaaaaattggaaatcacctttcaaacttttggcttgttttttaatatctggtgtgcgtaagtgtttacagagataaaatcaacagccttttatagccagattttcttagaataaataaaaataaaaattacatttatttgctgtattctgttagtggctcttttggtgtattcttttgcagattcacccgtacggaggagcaaggagacccgaaggagccgtgcgaagagcttctcccc

SEQ ID NO: 20537 - DNA, 916 bp, Gossypium hirsutum
  Clone ID: GOSHI-09MAY01-C1769_9
gccgccgcgccggtccagaattcgcggggccccacgcgcccgcggacgcttgggtacaaagatcagaaatgagaggttataaacccctagcagatttacacctctgtcgctctgtcgaggcagtggagtaagagaagcagtgtacagataaaccctagcaaatgctctgactctggctactcttctcgctatttttatctccctgcttaagcctctttactaaaatctctcttagttctctctgcgtagagtcgttctatcgatcgatctgctggtcaaagttttttgcggtgcttgttagggttgatcttcgtgtctgcggaagtggaaacctaaaagaggctatctgaaggtttcagcttaacagaatgattgccgcgggaagtgttgtgccaaagctgaagttgaagatcaagttcccttctcagaagatagaagatcaatcttttgagtggggccagcaactgagtagttcttttgatggaaaaaagacatcacctgctggaaattcaaaagagacttcaactgctcacaagcgtgaaccagaggggatgaatgtgggtggtccaccagagaagaggcgggagatggaccgttgcatgactcagcagggctctgccctacctcaccaaccaggattcaacatgaagggaggaaaatccaagtcagatgctacgagtgccaagctatccgtgaaatccaaagctggaaagaaatcggggaaggctgccaaggatccaaacatgccaaagaggcctgctagtgccttctttgtcttcatggaggagttccgtgagcaatacaagaaggatcaccctacaaacaaatccgttgcggctgtcggcaaagctggtggagataaatggaagagcttgtctgaagctgaaaaggcaccttatgtagctaaggcagaaaa

SEQ ID NO: 20538 - DNA, 821 bp, Gossypium hirsutum
  Clone ID: GOSHI-09MAY01-C1769_8
ctaaccctagccctctatcaggattcaaactgaaagaggtaaatccaagtcggatgccaagagcgccaagctctccgtgaataagaaatcaatcacgaaagctggaaagaaatcggggaaggcagctaaggatccaaacaagccaaagaggcctgctagcgccttcttcgttttcatgtaatcattcatgaatctctcctgtatttgtcggttttctttaaattttttggtttgttccgtttgcttcgtggaaaactctggcgtttatattcttcgtaaaaaccacaatcgaagagggaggagttccgcgagcaatacaagaaggagcaccctaaaaacaagtccgttgctgctgtaagttggcaaagctggtggagataaatggaagagcctttctgaagctgaaaagcgaccttatgttgataaggcagagaaacgaaaggtcgagtatgaaaagaacatggaagcctacaataagagacaggctgagggtccccaagaagatgaggaggaatctgagaagtctgtatctgaggtgaatgatgaagaagaagatgatgatgaaggcagtggagacgaggaagatgatgagtaggaaaaatcctgggaggatagcataatcaaagtaggctgtgatagtgtttgatcatcttatgttaatgctttttaaatgcaaatttcatttaagcaaaaatgtaactctggatggtgttggtttcttttgacgcttggaaattaatagttgtagatgggtcaaacaaaaaaaaacccaacaaaaattttaaatatcttttctctttttttattttaaaaaataaaaa

SEQ ID NO: 20539 - DNA, 624 bp, Gossypium hirsutum
  Clone ID: GOSHI-09MAY01-C1769_7
gcaggaaagaagagatgagtaggaaggtccgtggtggatagcataatcaatgtaggctgtgatagtgtttgatcaaaaccatatgttaatgctttcgatgtttccatgttattcttttagagcgcatgccatctaagggagaaatgtacctctgaatcctgttggttccttttgaccttctgaaattaatagttgtagatgggataatccgcttccatatggactttttgatttaaagttgaatggcttagataaatccctttgtagagaattagtccgataatttggtcttgctgttgccctcttttataattttgctgcttgctccaatgcgatttgacaggcgtattaatgtatatatgtcgtggatgctgctggtttgtgtggttgtgtgaatgttatttcttgggtggtggtatttaataatggtttctgtattcgcccccatgggttctcatttgtgcgtcaaatctttcaaagcaatttacagatatctttaatcgttggtcttccattgtatgctgtaagctaattattggacgtggtttatttattttatgtggtttgacggtttaaagattttattccactattatatatggtcaactgctaaagttattaaaa

SEQ ID NO: 20540 - DNA, 683 bp, Gossypium hirsutum
  Clone ID: GOSHI-09MAY01-C1769_6
ctttcttcccccctccccctgggacaggaccctaaccctacctcaccaatcagccctcccccccggcccttccttgctattcatcattttcctacaactttttcggcttcctgtcgattttagtggctttttcctgatctgcgatcttaattgcaggatacaacatgaagggaggtaaatccaagtcagatactaagggctctaggctcgccgtgaacaagaaatctagcgccaaagctggaaagaaatcggggaaggcggctaaggatccaaacaagccaaagaggcctgctagtgccttcttcgttttcatggaggagttccgtgagcaatacaagaaggaacacccaaaaaacaaatctgtcgctgctgtgggcaaagctggtggagataaatggaagagcttgtctgatgctgaaaaagcaccttatatagcaaaggcagagaagccaaaggtcgagtatgaaaagaacatgaaggcctacactaagagacaggctgaggctcccaaagaagaagagtcggagtctgagatgtcagtgtctgaggtgaatgatgaggaggatgaggacgatgaagaaggcagctgagaggaagaagatgatgactaagaaggaaggaagactgttgaggagatatagcatcacgagtataggctgggtgcttattggttatatgttaat

SEQ ID NO: 20541 - DNA, 845 bp, Gossypium hirsutum
  Clone ID: GOSHI-09MAY01-C1769_4
cgaatcgggcgccacgcgtcgcccaactcatctctatttctatcgcacttttattcccctattcctctctccctctctcatccgtaactctaaccctagccctctatcaggattcaaacatgaaaggaggtaaatccaagtcggatgccaagagcgccaagctctccgtgaataagaaatcaaccacgaaagctggaaagaaatcggggaaggcagctaaggatccaaacaagccaaagaggcctgctagcgccttcttcgttttcatggaggagttccgcgagcaatacaagaaggagcaccctaaaaacaagtccgttgctgctgttggcaaagccggtggagataaatggaagagcctttctgaagctgaaaagcgaccttatgttgataaggccgagaaacgaaaggtcgagtatgaaaagaacatgaaagcctacaataagagacaggctgagggtccccaagaagatgaggaggaatctgagaagtctgtatctgaggtgaatgatgaagaagaagatgatgatgaaggcagtggagacgaagatgatgagtaggaaaaatccagggaggatagcataatcaaactaggctgtgatagtgtttgatcatcttatgttaatgctttttaaatgcaaatttcatttaagcaaaaatgtaactctggatgctgttggtttcttttgacgtttcgaaattaatagttgtagatgggtaatttgttgctacatgtactttgcatttgaagttgaatggcgtaagataggtaaatccttttctagagaatttggtccctctttgtatggctttgttgcctgcccatattctattgcttttttgct

SEQ ID NO: 20542 - DNA, 854 bp, Gossypium hirsutum
  Clone ID: GOSHI-09MAY01-C1769_3
ttttaatttgccacttaatctctctctgtcctttccttttctgttctctttcttcccccctccccctttcacatcaaccctaaccctacctcaccaatcaggatacaacatgaagggaggtaaatccaagtcagatactaagagctccaggctcgccgtgaacaagaaatctagcgccaaagctggaaagaaatcggggaaggcggctaaggatccaaacaagccaaagaggcctgctagtgccttcttcgttttcatggaggagttccgtgagcaatacaagaaggaacacccaaaaaacaaatctgtcgctgctgtgggcaaagctggtggagataaatggaagagcttgtctgatgctgaaaaagcaccttatatagcaaaggcagagaagcgaaaggtcgagtatgaaaagaacatgaaagcctacactaagagacagactgaggctcccaaagaagaagagtcggagtctgagaagtcagtgtctgaggtgaatgatgaggaggatgaggacgatgaagaaggcagcggagaggaagaagatgatgactaagaaggaaggaagacttgttggaggagatatagcataacgagtataggctggtgcttaattggttatatgttaatgcttttgatgttcccatgttattctctctagatgggcatatgcatgtcatttaaagggaaaaaaaaattgtacctcttaatcctcttagtttctttcgacctttaagaaattaatagcctcaaaattgtacttttgattctaacgttgaagaatggcttgtaaacatatcctttttagatgatgaagttgatgcgttaatttattttatgttttgtgattacgt

SEQ ID NO: 20543 - DNA, 722 bp, Gossypium hirsutum
  Clone ID: GOSHI-09MAY01-C1769_2
aaaaaaagctgtcgacgtacaaagataagaaaagagaggtaataaaaccctagctgagacccacgcctccccccccccgtccgggcagtggagtaagagtagcagtgtagagataaaccctagcaaattctctcactctctcttctcttctcgcttttttctctctcttcttttttctcttttctaaaatctctcttaggtctctcttcgtagaatcgttctatcgatagatctgctggtcaaagttttttccggtgcttgtttgggttgattttcgtgtctgcggaagtggaaacctaaaagaagctatttgaaggtttcagctttacagaatgattgccgcgggaagtgttgtgccaaagctgaagttgaagatcaagttcccttctcagaagatagaagatcaatcttttgagtggggccagcaactgagtagttcttttgatggaaaaaagacatcacctgctggaaattcaaaagagacttcaattgctcacaagcgtgaaccagaggggatgaatgtgggtggtccaccagagtagaggccgaagatggaccgttgcatgactcagcagtgctctgccctactgaaagcactgatgaaacatccagctggctgggtttttaatcaacctgtggatcccaaagcattacagattcctgattatttatctataataaaaaaccccatggttttgggtacaattaagttcaaactagga

SEQ ID NO: 20544 - DNA, 884 bp, Gossypium hirsutum
  Clone ID: GOSHI-09MAY01-C1769_1
cccacgcgtccgcccccccgtccgccccccccgcccccccccccacgcccaatctcatctctctcctttgttttcccttttctctctctttttccaaccctaaccctacctcaccaaccaggattcaacatgaagggaggaaaatccaagtcagatactaagagtgccaagctatccgtgaaatccaaagctggaaagaaatcggggaaggctgccaaggatccaaacaagccaaagaggcctgctagtgccttctttgttttcatggaggagttccgtgagcaatacaagaaggatcaccctaaaaacaaatccgttgccgctgtcggcaaagctggtggagataaatggaagagcttgtctgaagctgaaaaggcaccttatgtagccaaggcagaaaagcgaaaggtcgagtatgaaaagaacatgaaggcctacaataagagacaggctgagggtcctaaagacgaagatgttgagtctgacaaatcagtgtctgaggtgaatgatgaggatgatgatgaagaaggcagcggagacgaagaagatgatgagtaggaaggtccgtggtggatagcataatcaatgtaggctgtgatagtgtttgatcaaaaccatatgttaatgctttcgatgtttccatgttattcttttagatgcgcatgccatctaagggagaaatgtacctctgaatcctgttggttccttttgaccttctgaaattaatagttgtagatgggataatctgcttctatatgtacttttgatttaaagttgaatggcttagataaatccttttggtaaaaaaaaaaccaaaaaaaaaaaattaatatatataaaaataacaccaggcccgccgcccgcgttctagaactagcgaacgc

SEQ ID NO: 20545 - DNA, 565 bp, Gossypium hirsutum
  unsure (1)..(565): unsure at all n locations
  Clone ID: LIB3543-039-Q1-K1-E10
ntagcataatcaaagtagctgtgatagtgtttgatcatcttatgttaatgctttttaaatgcaaatttcatttaagcaaaatgtaactctggatggtgttggtttcttttgacgtttgngaaattaatagttgtagatgggtaaaaaaaaaaaaaaaaaaaaaaaaaaaaaaaagggagggagggaaaaaaaaaaaaaaaaaaaaaaaaaaaaaaaaaaaaaaaaaaaaaaaaaaaaaaaaaaaaaaaaaaaaaaaaaaaaaaaaaaaagggggggcggttttttggggtcccaattttccttccccgggcttgccccgtttttccttttttttggggccccctttttttatttcgggggccttttttttaaaccggggggctgggaaaaccccggggtttccccactttattcccttgggggcatttcccctttttcccggggggggtttttccaaaggggccccccccttcccccttcccccctttttgccccccttttttggcaattgggcccccccttttggggggctttttaccccggtggtttgttgttttcccccccg

SEQ ID NO: 20546 - DNA, 354 bp, Gossypium hirsutum
  unsure (1)..(354): unsure at all n locations
  Clone ID: LIB3145-051-Q1-K1-B2
gctatgctttcagatgcgcatgccatataacggagaaatgtgcctctgaagacggtcggttccttttgaccttgtgataattaatgcgcgtagatgggataatctgcttctatatgtactttttgatttaaagttgaatggcttagataaatccttttgtgaaaaaaaaaaaaaaaaaaaaaacaaaaaaaaataaagatacaaacaaacaaaacacaagcatgcaacatcatagnncttctatagtgnaacctaaattaaatagaggggccgccctttaagaaaccaatgtttgtgaaagccgtggggggggcaaacttttttttttttaacccgggggggcttttttggggg

SEQ ID NO: 20547 - DNA, 384 bp, Gossypium hirsutum
  Clone ID: LIB3135-006-Q1-K1-D10
atattaaaaagccactaaatcacactttggttcttaccaaacaagaaaacaaacaggggccgtgcccctttcacatgaacccggaccctacctaaccaatcatgatacaacatgaagggaggtaaatccaagtcagatactaagagctccatgctcgccgtgatcaaaaaatctatcgccaaagctggaaataaaattttgaatgcggtttatgatccaaacaagccaaaaaggcctgctaaagccttcttcattttcatggaggagtttcctgtgcaatacattaacgaacacccaaaaaacaaaatcttcgcttattgtgttcaaaactcgatgaataaaaattaaaaaccttgtctgatgcttaaaaaaaccccttatttt

SEQ ID NO: 20548 - DNA, 425 bp, Gossypium hirsutum
  Clone ID: uC-gsflmaxxa091f10b1
cttatgcgtccgctcatcactctcctaagaaaagcgtgtggtttttaaaaccctttttccgatcctaaccccacctcaccaaccaggattcaacatgaagggaggaaaaaccaagtcagatactaagagtgccaagctatccgtgaaaaccaaagctggaaagaaatcggggaaggctgccaaggacccaaacaagccaaagaggcctgcgagggccttacatggtgcaaggaggagttccgtgagcaatacaagaaggagcaccctaaaaacaaatccgttggggatgacgggaaagctggtggagaaaaaaggaagagcttgcctgaagcacacaaggcaccgaaaggagcgaatgcaaaaaaagcggagggtgggtatgaaaagaaccatgaagggccaccataagagacaggcctagggga

SEQ ID NO: 20549 - DNA, 430 bp, Gossypium hirsutum
  Clone ID: LIB3083-065-Q1-L1-E3
tcgagttctcgagttttttttttttctgttctctttcttcccccctccccctgtcacatgaaccctaaccctacctcaccaatcaggatacaacatgaagggaggtaaatccaagtcagatactaagggctctaggctcgccgtgaacaagaaatctagcgccaaagctggaaagaaatcggggaaggcggctaaggatccaaacaagccaaagaggcctgctagtgccttcttcgttttcatgtaatcattcaaaattctatcctgtatatgtaggttttttttctttatatatttttggtttcaaggaaagctctggcgtttctattcttcgtaaaaacgccgatcgacgagggaggagttccgtgagcaatacaagaaggaacacccaaaaaacaaatctgtcgctgctgtgggcaaagctggtgga

SEQ ID NO: 20550 - DNA, 347 bp, Gossypium hirsutum
  Clone ID: LIB3493-022-P1-M1-H11
cacgcgttcgcgttcccgtgggcggactcatgggtttcacaatcaacgcctaaggcctagggttaccaatcaggatacaacatgaagggaggtaaatccaagtcagatactaagggctctaggctcgccgtgaacaagaaatctagcgccaattctggtaagaaatctttttatgcggttaatgttgcaaacaagccaaagaggcctgctagtgccttcttcgttttcatggaggagtttcgtgagcaatacatgaaggaacacccataaatcaaatctgtccctgctagaggcaaagctggtggagataaatggaacagtttgttttttgcttaaaaagcatctta

SEQ ID NO: 20551 - DNA, 319 bp, Gossypium hirsutum
  Clone ID: LIB3148-054-Q1-K1-D7
cccacgcgtccgcttttagatgcgcatgccatctaagggagaaatgtacctctgaatcctgttggttccttttgaccttcagaaattaatagttgtagatgggataatctgcttctatatgtacttttgatttaaagttgaatggcttacataaatcctttttgtaaaaaaaaaaaaaaaaaaaaaaaaaaaaaaaaaaaaaaaaaaaaaaaaaaaaaaaggaagaaaaataaaaaaggacaaaaataaaaaacaaaaaaaataaaaaataaaggggtggcctatttggaaaccaaaatttttttcccgggccctggtt

SEQ ID NO: 20552 - DNA, 565 bp, Gossypium hirsutum
  Clone ID: GOSHI-09MAY01-C1709_1
cccacgcgtccgcccacgcgtccggccgaatctaaagcttcacaactgtcccttcgtctccatattcgacggacgacgtcaaacgagggcttaatctggccctaactggccccaaattcgcgaaattttctcggctttggctgcaatcctcatctaggcttcgattaccacgaagcaaacaaggatttcgaagcttcaaaaaaaggataagtctcttccctttactcactttttttttatatttggtttcatacgcagtagcaaagctttaagaaacaggagatgaatcgaaaagaaaataaaatcatcttgtggaaaactgctctcgagatgatttcttattcaaactctttttttttgtatagatttgtatccgtaatttttctgggctcacccccttttacattcgatttcacaggctttctattattttctgtcaatctatacaaaaaattcccttagatctatttgctgtcaatctgttgtgagttggtatctattattttcttctcgcaagtgtgtatggcgcggtgttgctgacatggcgaggccattcgtgaggcgt

SEQ ID NO: 20553 - DNA, 559 bp, Gossypium hirsutum
  Clone ID: GOSHI-09MAY01-C101712_1
attaaactgagctacttacctttgctactcttcaccttcttccttgtagcacaaggatctagaactcaactaatacttccattccaacaaggggtctatcaatatcctcaattgcatatgcaagcaacccaaggcagcaatgaagcaaaaatggataggaattcaaggagattgatgattggatccccagcccctacttgcccttttaacgaatgtagaggatgcaaatacaaatgcagagctgagcaagttccagttgaaggaaacgacccaatcaatagtgcttacccctacaaatgtgtttgccataggtcatgaaaccagatatggttctaagtttactggtttagaatcaaccagcatattagaaactagattcccttctacattcaaatactactatttcgtcccaggagttttctggtttacttttttggcccatcaagaatttcctgctatcatgaaagaaagctggaatggggatcattaattccttttcttggcttcttgttatgtaaaggtttataaagttgatttgagagcaactgccttaatattc

SEQ ID NO: 20554 - DNA, 600 bp, Gossypium hirsutum
  Clone ID: GOSHI-09MAY01-C1729_1
cggtcgcgtgggcggacgcgtgggcggacgcgtggggtttccatgaaggagttgggagattgattagtcgagctgtatctcagcggcaaacatgccgatcggtcgccccttccgagttaatttctcgtcgcctcatgttctcttcctcaagaacgccgtccttgctggcggtcggaaacccaagctccgtcctttcctccaattctgagtctttagcatctttgccatctctcaagtggaaccattttataggccaaaggagaagcatgtttattcaaactcaatcaacacccaatccttcgtctttgatgttttatccagggaaagcggtgatggaagtcgggagtgctgatttcccaaatgcccgttctgcaatgacttcaccattggccaaggccttgtatggaattgacggtatcactcgagttttctttggatctgattttatcactgtaacaaagtctgatgatgcttcttgggatctcctcaagccagaaatttttgctgcttttgtgggctttctttcctccggacaaccattatttctagactcaaaaactgcatcatccatggacactgctatccatgaggatgactctg

SEQ ID NO: 20555 - DNA, 1031 bp, Gossypium hirsutum
  Clone ID: GOSHI-09MAY01-C1699_1
cccacgcgtccgcccacgcgtccgaagcaaatcctaaggaatagaagaaaaatggcgagatacgacagagcgattaccgtgttctcgccggacggccatttattccaagtggaatacgccctcgaagccgttcgtaaaggtaacgccgccgttggcgtacgcggcaccgacatcgtcgttctaggcgtcgagaaaaaatccgccgccaaactccaggactcacgatcggttaagaagattgtgaatttggatgatcatattgcattggcatgtgctggactcaaagccgatgctcgtgtcctcataaacagggctcggatcgaatgtcaaagccataggctgactgttgaagatccagttactgttgagtatattactcgttacattgcgggtcttcagcagaagtatactcaaagtggaggtgttagaccatttggtctctcaactctgattgttggctttgatccatatagcggtgtaccggcactatatcaaactgatccgtcagggacattttcagcttggaaagctaatgcaactgggagaaactctaactcgatccgagagttcctagagaagaactataaggaaacctctgggcaagaaaccattaagcttgcaattcgtgcattgctcgaggttgttgagagtgggggaaagaacatcgaagttgctgtgatgacaaaggaacatggtcttcggcagcttgaagaaactgaaatcgatgccattgcagccgagatcgaggcagagaaggaagcagccgaggctgcaaagaaggcccctccaaaggaaaaatgatgaagcatcaactgtttaagctatcatttcctttttctttttttttcttttctggtctgactgcttaatttctgcaattgaagtttcatttgccattgttggcattttatttgctttttagttgtttcagtttaagcaagtatcaatcacattcagataatatgcaaatatgaatcttgcaacattattaaatttaatatttttattttttttttattattttttttttt

SEQ ID NO: 20556 - DNA, 878 bp, Gossypium hirsutum
  Clone ID: GOSHI-09MAY01-C1689_1
ggcttcttcttcggttctcagcaagcttcttttgccccttttcctcactcatattgccgtctcgatctcgaaaaccgaagctcaagttgaagacacaaggtcgaagctggtgagagatgctttcgaatggccactttcaatgtcgtttcagggtgacttacacgacaatgaagaaggcgatgaggaggtagatgatgaagttgaaaatgggtatagtggtagatctttgttgtggtggaagagaatgaggtattacatttcgtatggggcgctttcggctaacagaatcccatgtccaccaagggcaggcaggtcttattatactcacaactgtttcaaggctcgtggccctgttcatccttataccaggggatgttccaggatcactcgctgcaggagatgaggttttaaatttagccctttttagaatctgggtctgtattagttaatcattatttttcgaaatgtggaagatttgagtgttttgggatctggggcttctttttgccctccttttagtgtttgaagagcatcatgtgtcataaggttaaactactttatggttatggtagttattatatatagttttggtctggaagggcgggggtgttcattggcagtcgctattttatatcatatatgtgatctcatcaacctacatgtaaatgcttgtaagacctgaatcctgctgttgcgtgctgcaacagacgccgcagcttgaaaaggtaatctagtcaccaagattttctgccttaattattaaataatttgaaattttttattatttaaaatagctgttatatactttttctttaaattttcatcttctttctcttttttaatatttaatattgatacttagatcaacttagatttaa

SEQ ID NO: 20557 - DNA, 550 bp, Gossypium hirsutum
  Clone ID: GOSHI-09MAY01-C1619_1
ccacctttgaaagaagctgctaggttctctgttaaaagcaacaaaatcaaaacatggcaaagcgtttaatcccttcattcagtcgcgttttggtcgagaaaataattcctccttctaaaaccacttccggaatcttacttcccgagaaaacctctaagttgaattctgggaaaatcgtagcagttggacctggagcacgagacaaagatgggaaattcatcccgcttaatctaaaagaaggagacactgttcttttgcctgaatatggtggcactgaaatcaagctcggtgaaaaagagtatcacttgtatagagatgatgatatattgggaacacttcatgaatgatttcaaacactgccaacttttgaagaaatgaaacattgattcaaatgtgttgtgttaggccaaatggtttgtctttttggactttgaccttgtatttgtttttaagacaattatggataagccatgttttcaagcatccaatttttgatggaaccatcaataaaatgtttcctagtatcttccctcaactatatatatatata

SEQ ID NO: 20558 - DNA, 767 bp, Gossypium hirsutum
  Clone ID: GOSHI-09MAY01-C1199_4
ttttgaatggatagtcattccctggggggggggggaggaacagttaagacaaagtttggttcaccgttttcttcattcggcgaatggctattcctctcttattcgttagatttaccgaatcgtcattcggcagaggggttaagaatagctcattcaacgacggatgtaatagcaaaatttgggcgcctagacaattttaccctgtatttcttcacccatccgtcaattcggtcgttgttgtaaaagtggtgcctccctcgattctatcattgagaaccgtagattcatctccgactcgttccccgcctccacaaagctgcctcctttcctttgtgagaacctctggtaaagactaacagatctcagtttcaaatgggaaatggtgctttatttggagcttgttatatccagactgcccagtctcatgatgtagcacaattacagtgggattggtccagttcctggggatattccagaagttgaggcttattgtggaacagtttgtgcggcgggtggtcaagtgacagaggaaggtctgaagtggttgattgacagaggatttaaaaccattgttgatctaagagctgagactgtaaaggacaatttttatcaatcagccttggatgatgctattttatctgagaaagttgattttttattttgcatatgaaaagaaaagaactaatgttactaaaatttagtaatttttatgtaaaatttgaagatttttatttcaccaaaagattgctataaataattaatttatt

SEQ ID NO: 20559 - DNA, 924 bp, Gossypium hirsutum
  Clone ID: GOSHI-09MAY01-C1199_1
tcattcctctctttcaactaaccgtcgcggctgttcgaatttttgcgtccaaaaaggtttttgttttccttgaacctaaaatggcggggcttgtacctccattaccaccacgattccagccgatgcatccaagacgaagaaagccgacgagaaagccgattacatgaatcttcctttccccattcctttcgaagagattcaccgcgaagctctcatgtctctgaagccagaaacttttgaaggattgcgatttgattttaccaaaggactaaatcagaaattctcactcagtcacagtgtatctatgggcccaactgaaattccttctcaatctgctgaaaccattaaaatccctacctctcactatgaatttggtgccaattatattgatccaaatttgatgcttattgggagggtcttgactgatggtatactcaatgcaataatgaaatgggatttgactgacaatcttactgtgaaggctaatgctcatctcacaaatgagccccatatgtcacatggcatggtcaactttgattacaagggtaaagactacaggtctcagtttcaaatgggaaatggtgctttatttggagctagttatatccagagtgtgacaccgcatttatccttagctggtgaagtattttgggctggtcagcaccggaagtcaggccttggatatgctgcccgatatgaaacagataagatggtagctgcagggcaagttgcaagtaccggaatggttgctttgagctatgttcagaaagtttctgagaaggtttctctagcatcagatttcatgtataactacatgacaagagacgtgacggcaagtgtgggctatgattacatccttagacagtgccgcttgagggggaagattgattctaatggatgcactactgcttaccttgaagagcg

SEQ ID NO: 20560 - DNA, 596 bp, Gossypium hirsutum
  Clone ID: LIB3582-031-P1-K1-G12
cccacgcgtccgattcctctcttattcgtctgatttatcaaatcatcattccacgaaatgggctaagaataactcattcaacgactgatgtaatagcaaaatttttccccagacaattttaccctgtatttcttcacccattgaccgccaattccgtcgttgttgtaaaagtggtgcctccttcgattctgtcgttgagaatcgtagattcatctccgactcgttctccgcctccgcaaagctgcctcatttcctttgaaatatcagtgaaagggcttgaactactaaacaaatacattggtgcttctaagcaaactgttcaagagattttctaacttttttgattaatttgattccattacccctaaaagattacatgacaacactagagtaactgatcgagttgtcaaccaagttagtatctttttgcttgctgcattttattattttgccttaactttttatgtctttctcattgttattttgctttcaaacaattcctaacttaattagatggttttgaagttttgactggtgtatttgtgtttgttgcaacaaggttagttctcatggaatcctattgtattattttgata

SEQ ID NO: 20561 - DNA, 529 bp, Gossypium hirsutum
  Clone ID: LIB3585-021-P1-K1-B11
cccacgcgtccgaataggcattccctgcttattcttaaatgaatagttaagacaaagtttggttcatcgttttcttcattcggcgaatggttattcctctcttattcgttagatttaccgaatcgtcattcggcggagaaggttaagaatagctcattcaacgacggatgtaatagcaaaaattttcccctagacaattttaccctgtatttcttcacccatctatcaattccgtcgttgctgtaaaagtggtgcctccttcgattctatcattgagaaccgtagattcatctctggctcgttccccgcctccacaaagctgtctcatttcctttggtaaagactaacaggtctcagttttaaatgggaaatagtgctttatttggagctagttatatccagtggattggtccagttcctggggatattctagaagttgaggcttattgtagaatatttagagcaactgaaaggctccataccactgtgatggagactccatgcaatccactaacaggagaatgtagtg

SEQ ID NO: 20562 - DNA, 413 bp, Gossypium hirsutum
  unsure (1)..(413): unsure at all n locations
  Clone ID: LIB3493-022-P1-M1-C6
cggacgcgtgggcggacgcgtgggtgcatagtcctcctttctttcagccccttcccatttgtacctcatcattaccctgagattttgcggcaaattcctcctccgagaaacaagagacgacaatggcggggcttgtacctcctggtacctcatccgatgcttgcaagccggctcattccaaagctgatgagaaaactgattacatgaatctcccttgccctattccttatgaagagctccaccgcgaagctctcatgtctctgaagccagaaacctttgaaggattgcgatttgatttcaccaaaggactaaatcagaaattctcactcagtcacagtgtgtttatgggcccaacaganatcccttctcaatctgctgaaaccataaaattcctactgctcactatgaaattg

SEQ ID NO: 20563 - DNA, 392 bp, Gossypium hirsutum
  Clone ID: LIB3149-031-Q1-K1-F11
agtgagatgaagaggtgttgtgagagcttaaatgtcgctcttaataactatttgacacccgatgattatctaagtctgcatgtttggaggaagtcgcaaaggttgaagaatgcttgttacgatttgggttgtccacgcaagaattaccattcatgccatacattgttcgccaactgacaatctttttgttggtccacctctaaagaagaggtagagtcaaaagattgtgaaatagaattttggaggggtggtcaagtgacagaggaaggtctgaagtggttgattgacagatgatttaaaaccattgttgatctaagagctgagactgtaaaagacaatttttaccaatcaaccttggatgatgcttttttatctgagaaagttgatttttt

SEQ ID NO: 20564 - DNA, 869 bp, Gossypium hirsutum
  Clone ID: GOSHI-09MAY01-C1159_1
caaaattaccaaggccacttgatttgtttttgaagccgaatcttgcatcgactaaccatttatcgcctccatacatgtggtttgattggtggaggcatgaggaaaatcacccactgcaaacccaataaacatcttcaaacacaatgaaaatgaaatcactgtatctcatatcagtaagccaactgtctaatatggcagtttcttcattggtgcgaaatttgccatttctgcgaagcttgactatcgccaaatgcaatggattacaatctttacagataaaagagacccaagggcttcataaattagtggtcctcgattgcccccagttacaatctctcagttttgaaggttgctgtttgaattacttcagatacggaggccacttagtttcctttcggtttgaattgtaccgcaaatgtaattcttctggcgggtttcatatacgtgaccgtggactaccccaggaagatgccatgcttgatcttaggcaatgtcctttaacagaatggacatgggactttaagccttccttttctccttattatcatgggctcttggatttggaaagaaacgattgtgagtgcgccaacaagtataaatgcttcgactcacttttaagaactataaatgggtttcgatctctaacaatatgcagatggtttttcgagacatcaatgtgcaagaaattgcccttttcaagtagagaccctcttttctgtttgaggaaactaaaagagctttggtggattgattgttcaatggaaagagaatctattaacgccttactttgctttctgaagctttgtcctaactggaaagactttatatcaccatcgatccaaaatgctacgacatgcctagcacagcaa

SEQ ID NO: 20565 - DNA, 793 bp, Gossypium hirsutum
  Clone ID: GOSHI-09MAY01-C1149_1
ttgtattgccgcatatgaggcgaccggaaaccaaattcatctaactcttgagagaggtcttccatcaatgagtggagacttcatatcaacgcatctgccatatccatcattatcatttgacaccgttcattgtgctcaatgcggtattgtttgggacaagaaacaggggattttccttatagagatagatcgggtgctcaagcctggaggttattttgttttaacctcaccaacaagtaagccacaaggaagttcaacaagtatgaagaaaagaaacatgttaacaccactggaacaatatactgaaaaaatttgttggagtcttattgctcagcaggatgatactttcatctggcagaaaacagccgatgctcattgctattcttctaacaagaagaacgatgtacctctttgcaaagaaggatatgatgcaccctattatcaggccttggtaccatgtatttctggaacttccagcaaacgctggattcctattcagaacaggtcctctagctcagatttgagctcagcggagcttgaagttcatggagttagtccagaggatttctttgaagacttgcaagtttggaaattagctttaaaaaactattggtctttgcttacaccattaattttctctgaccatcccaagaggccaggagatgaagatcctttgccaccatttaatatggtacgcaatgtgatggacatgaatgctcattatgggggtttgaatgctgcatttctggaggaaagaatcggtgtgggtgatgaatgttgtgcctgttaggct

SEQ ID NO: 20566 - DNA, 384 bp, Gossypium hirsutum
  Clone ID: LIB3196-036-P1-M1-B10
acaattccctgaaaaaatttgttggagtcttattgctcagcaggatgagactttcatctggcagaaaactgttgatgctcagtgctattcttctcgcaagcagaatgatgtacccctttgcaaaggacatgatgcttcctattatcaggccttgagcccatgcattattggaccttccagcaaacccctggattcctattcagaacaggtcctctagctcagaattgagctctgcggagcttgcacttcatggagtcagtctagaagatttctttgaagacttgcaaggtgcttgagaaccattggcttcctttaatattggaccccaatgggatggaaatgaatgctcataatgggggttaaaatgctgcattcctggaggaa

SEQ ID NO: 20567 - DNA, 1097 bp, Gossypium hirsutum
  Clone ID: GOSHI-09MAY01-C1179_2
ggttcttcatttcatcgcccttcctttgcttcttctttcttctttgttcagatctgaggtctctcagttctaagccatggccgagaaggtgactgtaatggtgctgaaggtagaccttcagtgctggcgatgctacaagaaagtgaagaaagtgctgtgtaaattccctcaaatacgagaccagatatacgatgagaaaaccaacaccgtgaccattaccgtggtatgctgcaatcctgagaagctgagggacaagatatgttgcaagggtgctggatcaatcaagagcattgagatcaaacctccacctcctcctcccaaacccaaggagcctgagaagcctaaagaacccgaaaagcccaaagaacctgaaaaacccaaagaacctgagaagcctaaagtaccagaaaaaccaaaagaacccgaaaagcctaaagcaccagaaaaaccaaaagaacccgaaaaacccaaagaacccgggaaacctaaacaacccgaaaagccgaaagaacccgaaaaacccaaagaacccgagaaaccgaaacaacccgaaaagccgaaagaacccgaaaagcctaaggaacctgagaaaccaaaagaaccaccaccaccaccaccaccaaaggttccagaaccttgtcctccaccaccaatggcttatccccccatcggatgctgttgcacggaatgctatcatggcgttggtggggggccttgctattatggtggaccacctccacccctacgcccatgttacgggacttacggtaggccagtttatgacagctggggcggcggcggcgggtatagctactgttacacgagccgcggtgaatgttttagcgacgaaaacccaaatgcttgctcaatcatgtaaggtaacgcgagcgcatcgtcaaattcacgaattcatgacatcactggcaataatttctttacatgtttctgttgaatatccacccacttataattgcacgtacatttcttgttctgaatggggtcatatataggaagatgaaataaggttggtgatggccaagcgttgggttattacaggcttacaaaaagtttcttacaaatattaataaatgagaatt

SEQ ID NO: 20568 - DNA, 1044 bp, Gossypium hirsutum
  Clone ID: GOSHI-09MAY01-C1179_1
attggttcttcatttcatcgcccttcctttgcttcttcggccgcctgggttcagatctgaggtctctcagttctaagccatggccgagaaggtgactataatggtgctgaaggtggaccttcagtgctggcgatgctacaagaaagtgaagaaagtgctgtgtaaattccctcaaatacgagaccagatatacgatgagaaagccaacaccgtgaccattactgtggtatgctgcaatcctgagaagctgagggacaagatatgttgcaagggtgctggatcaatcaagagcattgagatcaaacctccacctcctcctcccaaacccaaggagcctgggaagcctaaagaacccgaaaagcccaaagaaccagagaagcctaaagtaccagaaaaaccaaaagaacccgaaaagcctaaagcacccgaaaaaccaaaagaacccgaaaaacccaaagaacccgagaaacctaaacaacccgaaaagccgaaagaacccgaaaagcctaaggaacctgagaaaccaaaagaaccaccaccgaaaccaccagcaccagcaccaaaggttccagaaccttgtcctccaccaccaatggctcatccccccatcggatgctgttgcacggaatgctatcatggcgttggtgggggaccttgctattatggtggaccacctccacccctacgcccatgttaccagacttacggtaggccagtttatgacagctggggcggcggcggcgggtatagctactgttacacgagccgcggtgaatgttttagcgacgagaacccaaatggttgctcaatcatgtaaggtaacgcgagcgcatcgtcaaattcacgaactcatgacatcactagcaataatgtctttacatgtttctgttgaatatccagtcacttataattgcacgtacatttctttttctgaatggggtcatatattggaagatgaaataaggttggtggtggccaagcgttgggttattacaggcttacaaaaagtttcttactaatattaataaatgaaaattaactaaa

SEQ ID NO: 20569 - DNA, 526 bp, Gossypium hirsutum
  Clone ID: LIB3584-025-P1-K1-D5
cccacgcgtccggtgtttttgcgaacaagagaaatacgagaccagatatacgatgagaggggaactatttgaccattactgtggtatgctgcaatcctgagaagctgagggacaagatatgttgcaagggtgctggatcaatcaagagcattgagatcaaaccttcacctacttcttccaaacccaaggagcctgggaagcctaaagaacccgaaatgcccaaagaaccagagaagcctaaagtaccataaaaaccaaaagaacccgaaaagcctaaagcacccgaaaaaccaaaagaactccgtataacccaaagaacctgtgaaacctaaacaacccgtaaagccgtaagaactcgaaatgcctaaggaacctgagaaactcaaatgaactaccacctaaaccaccattaccagctataatggtttcagaactttgtatttaagcactaaatgtctaattcttccatctgatgctgttgcacggaaagctatcatagcgtttgtgggggacctttgtattattg

SEQ ID NO: 20570 - DNA, 345 bp, Gossypium hirsutum
  Clone ID: LIB3146-040-Q1-K1-G4
cccacgcgtccgcccacgcgttcgagcatttttatcttactcctcttagcaggagccgcaggactcaccgtctggctcatatacacgccccacaaaccccgtttcatccctgtgtaaacaaaacagaaaacaccccacccctacgcccatgttaccagacatacggtatgccagtttatgacagctggggcggctgctgccggtatagctactgttacacgagccgcggtgaatgttttagcgacgagaacccaaatgtgggcttaatcatgtaaggtaacgcgagcgcatcgtcaaattcacgaactcatgacatcactagcaataatgtctttacatggttct

SEQ ID NO: 20571 - DNA, 310 bp, Gossypium hirsutum
  Clone ID: LIB3585-001-P2-M1-B4
tgatgatatatggaattatttaatctctctgacttccatcattcacaagatacataataatttataactttacatgtgtgcgtgtacggatgtaggtgactgtaatggtgctgaaggtagaccttcagtgctggcgatgctacaagaaagtgaagaaagtgctgtgtaaattccctcaaatacgagaccagatttacgatgagaaaaccaacaccgtgaccattaccggggtatgctgcaatcctgagaagctgagggacaagatatgttgcaagggtgctggatcaatcaagagcattgggatcaaacc

SEQ ID NO: 20572 - DNA, 958 bp, Gossypium hirsutum
  Clone ID: GOSHI-09MAY01-C1169_1
tcgttttttttttttttttttttattttaattgctctacttcgtcccaaaggtaaggaaaaaaacagaggtagagaattctggagccttctttattttctctaaatctcagtcatccgttgaacaatctctcttataaattatatcccaaacccaaatcctttccctcaagcaatttgagtgattctttctttttcttgtggtctccagagcttctctgttacatcgtttattttctctcaagaactgaagaaaaaatccgaatagattaaaacttaagaaagatcaaaagatgtttggaagagcacctaagaagagtaataacaccaggtactatgagattctgggtgtttcgaataacgcttcccaggatgatttgaagaaagcttataaaaaagccgccattaaaaaccatccagacaaaggcggtgatcctgaaaaatttaaagagttggcgcaagcttatgaggtattgagcgatcctgagaaacgtgagatatatgatcagtatggtgaggatgcactcaaggaaggaatgggtggtggtgccggtgctcatgacccgtttgacatcttctcctccttctttggtggtagcccgtttggaggtggtagcagtcgaggtagaagacagagaaggggagaggatgtagtacatcctctgaaggtgtcactggaggacctttaccttgggacttcaaagaaactttctctttcccggaacgtgatatgctccaagtgcaatggcaagggttcaaaatctggagcttcaatgacgtgccctggttgccagggttctgggatgaaggtttcaatcaggcagcttggcccctccatgattcagcaatgcaacatccttgcaatgaatgtaagggtactggagacgatcaatgacaaggaccgctgccctcagtgcaagggtgaaaaggttgttcaagagaaagaaaagtttgaagtca

SEQ ID NO: 20573 - DNA, 348 bp, Gossypium hirsutum
  Clone ID: LIB3189-026-P1-K1-B8
ttctggagccttctttattttctctaaatctcagtcatccattgaacaatctctcttataaagtgtatcccaaacccaaatcctttccctcaagcaatttgagtgattctttctttttcttgtggcctccaaagcatcttttttttttctcatattttcattctaccattaactcaacatttttctttacattctttattttcctttatttttatttattatctttatatatttttttactctttttcttaattttttttcttattccttattcctatttatatattccttaactcttttttctatttatatccatctttttcattaatcttcacatcactattccta

SEQ ID NO: 20574 - DNA, 436 bp, Gossypium hirsutum
  Clone ID: GOSHI-09MAY01-C1119_1
aacgagacgaggttatcacggttggttcaatctttgcttctacggtgttaagaggtatcaagtttctagaaaatcactggcacgagctatgctatgacataaaaacaggtcgattaagcgattggatcaccgactcaggatgcagaaatgcggcatcattggtcatgaagcctaatccagaacaggctggtttgatagaaaatatatgtaattgtaaatcatgggaaggaatagtcagaaagctatggcccaaagcaaggtatattggttgtgtttgtactggcgttatgagacagtatactgcagaactcgagttctattgcagagggctccctttagtttcagcttcttatgcttgctcggaagctatttgtgggattaacttagagcctctatgcaaaccctgtgatgtctcctacacatttctccctaacat

SEQ ID NO: 20575 - DNA, 496 bp, Gossypium hirsutum
  Clone ID: GOSHI-09MAY01-C1109_3
agcaaaggacgctaaagatggaaaggatgctaaagagggaaaagactcgaaaaacggtgacaaggctgcatcgaatggaactgcagagaaaggggcacccgtttcatctgcaaaagatggcgccgcccccactggcactgctgctaataattcctccgctgaacaagatgccgccgccacgaccgctcccaccaaggaccaaactgttgcggaaccagaggcaacagcagcctaattgcttacaacacatttaccatggttgtttccttgccctattcttttttgtttttgctcaaggtttcgatttcaaattgcattgcctattaccatggtattttcctgggaaggatttagtaccattagttacatacacaagtactattcctaattagttttttgtttttttttttttaaacatttcaagagattggacgtcaactgtgatcgttttattttgcttgttgaattgactttgtggacttattatgttgcttgc

SEQ ID NO: 20576 - DNA, 773 bp, Gossypium hirsutum
  Clone ID: GOSHI-09MAY01-C1109_2
gaaagctcggccgcctgcacgtgcccgtacttactggtcggtcgactcatcccgtcctttgatgcgtacggaatggaaggggaagagattcacgctgctcctaataaccatcctttcgccgtcggcgatgagagctactcgaattacggctcttactccaacttcaccgatgaccagctgtttaccggggacgggggcgaagtggcggtagatgacgtcactacctctgctgatatcttcggattcggatcctctgatccaactcctgcctactcgcaatctccattcgctactgcgattcctgttgagaacggaaatggaaccaatggatttgatcttggaaacgatggcgttttcgcttctgatggaccggtgcttcctcctcctactgagatggagcctgaggaaggcttcgttcttcgcgagtggcggcgtcaaaatgcgattctgctcgaggaaaaggagaagaaggagaaagagttgatgagccacatagtcgaagaagccgaatgtttaaacgggctttctatgagaaaagggagaaaacaattgagaccaacaaaactaattacagaggaagagaaaagctgtacgtggctaaccaagagaagttccataagactgcggaccaacaatactggacagcattagcagaactcatttctcgcgaggtccctaatatcgaaaagaaaagaggaagaaagacaaagattaccctcattactggcttcatgaccaaaacccgaaaacactgtctttattatcgggccttt

SEQ ID NO: 20577 - DNA, 1384 bp, Gossypium hirsutum
  Clone ID: GOSHI-09MAY01-C1109_1
aaatttgggaagctctctctcttgttgtaagctaaaaaaagaggctccattttcgattcctttttctcttaattttctttagagaaagagagagatggcttcctttgatgcgtacggaatggaaggagaagaggttcatgcaggtgcagcacctaataaccatcctttcgatgtagacgacgacgagagctattccaattacggctcttactctaacttcaccgacaatcagcaattcccggccgacggtggtgatgtggcggtggatcacttggcttcttctcctgagatcttcggcttcggatcttccgatccgtcccctgcttactcgcaatctcctttcggtactacgattcctgtggaaaacggaaacggaacgaatggatttagcggtggaaacgacgatgttttcagttctgatggtcctgtgcttcctcctcctactgagatggcgccagaggaaggcttccttcttcgcgagtggcggcgtcaaaatgccattcagcttgaagagaaggagaagaaggaaaaggaattgaggaaccaaattatagaagaagctgaggagtacaagcgagcattctacgagaagcgggaaaaaaccattgagaccaacaaaactaacaacagagaaagagaaaagctatacgtggctaaccaagaaaagttccataagactgctgacacgcactactggactgcaatagcagaactcatcccccgtgaggtccctaacattgagaaaagaggcaagaaggatgcagaaaagaaaccatcagtatttgtcgtccaaggaccgaaacctggaaaaccgaccgatctttcaagaatgccacacattcttgtgaagctgaagcattcacctccacctcacatgattccttctccacccgctccagcaaaggacactaaagatggaaaggatgctaaagatggaaaagactcgaaaaacgttgacaaggctgcatcgaacggaactgcagagaaaggggcaaccgtttcatctgcaaaagatggcgccgccacctccgctgaacaagatgccgccgccacgaccgctcccgccaagggccaaactgttgcggaaccagaggcaacagcagcctaattgcttacaacacatttaccatggttgtttccttgccctattcttttttgtttttgctcaaggtttcgatttcaaattgcattccctattaccatggtattttcctgggaagggtttagtaccattagttacatacacaagtactattcctaattagttttttgttttttttttttaaacatttcaaaagattggacgtcaaatgtgatcgctttattttgattgatccatcgcctttgtggacttattatgttgcttgcaaagttacaaaatttg

SEQ ID NO: 20578 - DNA, 376 bp, Gossypium hirsutum
  Clone ID: LIB3148-054-Q1-K1-F4
cccacgcgtccgcccacgcgtccgcccacgcgtccggccctattcttttttgtttttgctgaagggttcgatttcaaattgcattgcctattaccatggtattttcctgggaaggatttagtaccattagttacatacacaagtactattcctaattagttttttgttttttttttttaaacatttcaagagattggacgtcaactgtgatcgctctattttgcttgctgaattgactttgtggacttattatgttgcttgcaaagttacaaaatttgtctaaaaaaaaagaaaactcaaatagtacgtaagaatttctaacatccgtttcttagttaaaaattaatggtaagcattttatttattataagaaaaa

SEQ ID NO: 20579 - DNA, 817 bp, Gossypium hirsutum
  Clone ID: GOSHI-09MAY01-C1139_1
gcgctgtttctctctcgcaatattgtctaaccaagttcctttgctgtgggagttctcgaaactcgaaccacataataaaaatggcgatgtgggtctttggatacggttctcttatttggaaagctgggtttaactatgatgatcgtcttgttggtttcatcaaggactatcgccgtgtattctatcaagggagtactgatcacagagggacgcctgagtatcctgggagaactgtcacattggagcctgctcctggggaagtctgttggggagctgcttacaagatatccaaggaggaagataaagaagctgcaataacgtatttagaagtgagggagaagcagtatgacaagaaagcttatgttgatctcttcaccgatcccttagctacaactccagccatttctggagtaatggtgtacatagcatctcctgacaagaagcttaatccgaactacttggggcctgcttctatagaagacattgccaagcaaattgttcgtgcggaaggcccctcgggaccaaacagagaatatcttttccaactagaaaaggctcttcttcagattggttgtaaagataaacatttaatggatcttgcaaacgaagcaaggcgcattctttcagaatccgagcatactgcatcatgatgcaaatttgttggaaaggaaaaatgagagaataaatcacaaacctaggaaaaagcatgaatggcattatagatgttagcatcatggaaattgcatgttcctccatgttttgctctggaccgggacacacaccgaaacatagtttcttatagtgtggacacagtcac

SEQ ID NO: 20580 - DNA, 1787 bp, Gossypium hirsutum
  Clone ID: GOSHI-09MAY01-C1129_1
cggacgcgtgggcggacgcgtgggccccgttgaaaaaatatgggtttccaaagaaacatattgggtttccttttcttgatattggcttcactaacaagcctctcttctagccttcctagtgaatactccatagtggaacatgagattgacgcatttctttcggaggaaagggtgttggagatcttccaacagtggaaagaaaagaatcagaaagtgtaccggcacgccgaggaggctgagaaaaggtttgaaaatttcaaggggaatttgaagtatatcctagagaggaatgcaatgagaaaagcaaacaaatgggaacaccatgtgggattgaacaagtttgctgatatgagcaatgaggagttcagaaaagcttacttgtcaaaggtgaaaaagcccatcaacaaagggataaccctgtcaaggaacatgaggagaaaggtgcagtcttgtgatgcaccctcctccttggattggaggaactatggagttgtgactgctgtcaaggaccaaggttcttgtggaagttgttgggcattctcatcaaccggagccatggaaggaatcaatgccttagttactggagacctaattagcctttcagaacaagaacttgtagattgtgataccagcaactatgggtgtgaaggaggatacatggactatgctttcgagtgggttataaacaatggcgggatcgatagcgaaaccgactacccctacactggtgtggatggcacatgtaacaccaccaaggaggaaaccaaggttgtatctattgatggctatcaagatgtagagcaatcagatagtgctcttttatgtgccgttgctcagcaacctgttagtgtgggaattgatggttccgccattgattttcaactttacactggtggaatttatgatgggagctgctcggatgatccagatgacattgatcatgctgttttaatagttggttatggttcagaaggcagtgaagagtattggatagtgaagaattcatggggaacaagttgggggatagatggatatttctatctaaaaagagacactgatttaccatatggtgtttgtgctgtcaatgccatggcttcttatccaactaaacaatcctcttcaccatccccttatccatcgccaagtgttcctccaccgccacctccttcaactccaccaccaccaccacctccatctccttcaccaagtgattgtggagacttttcctattgttcaagtgatgagacatgctgttgcctttttgaattctatgattattgcctaatatacggctgctgtgaatatgaaaatgctgtttgctgtactggaactgaatactgctgccctagtgattaccccatttgtgatgtccaagaaggactctgcctcaagaacgctggagactatctgggagtagcagctaggaagcgaaaggtggctaaacacaaattaccatggactaaaatagaggaaacagagataacatatcagcctctgcaatggagaaggaaccctcttgctgcaatgcgttgaaaaaagtgaaaaattacatatcatttcttaaaccttgaaggttgttttcaccttttttctttttctttcatttttgctttttcatttccagcaagcaaatccatgcagataagactaagaaaggggcatatttgtttagatgatgcatttgaatttggaaactgtgtttgtcattcttcaccagtggggtattaaaactactatgcttttgtttaaaaaaaaaaaaaaaaaaaaaaaaaaagtcgacgcggccg

SEQ ID NO: 20581 - DNA, 444 bp, Gossypium hirsutum
  Clone ID: LIB3197-044-Q1-M1-H2
ggggggaccggcccgcattattgtttgaccaacccgtccgcccactcgtccggaaaagcaaacaaatgggaacacggggtgtgattgaacaagttggctgatatgagcaatgaggagttcagaaaagcttacttgtcaaaggtgaaaaagcccatcaacaaagggatatccctgtcaaggaacatgaggagaaaggtgcagtcttgtgatgcaccctcctccttggattggaggaactatggagttgtgactgctgtcaaggacacaatgttcttgtgaaagttgttgggcattctcattaaccggagccatggaaggaatcaatgccttacttactggagacctaattagcctttcaaaacaagaaccttgtgattgtgataccagcaactatgggtgtgaaagacgatacatggactatcccttcgagtgggttattaacat

SEQ ID NO: 20582 - DNA, 259 bp, Gossypium hirsutum
  Clone ID: LIB3197-008-P1-M1-G5
cccacgcgtccgcccacgcgtccggcaaaaccatgcagataagactaagaaaggggcatatttgtttagatgatgcatttgaatttggaaactgtgtttgtcattcttcaccagtggggtataaaaactactatgcttttgtttatttcttcaggcttgtttcatgacgagcccatgttgatgttgccattgttgttcatctaggctttgtaatatatacatatttggattaaaaaaaattagggcctgttagtttccc

SEQ ID NO: 20583 - DNA, 459 bp, Gossypium hirsutum
  Clone ID: GOSHI-09MAY01-C1099_1
ggatgatggggtcaaaagcaaagactgcaccagcgcccgagctgctcgggatgcccccaaagtttctcatacatctaattaagcaggctttatgtgcactattgcgcgtcaacagatcgatgtagcagcagctaaaatgtgtgaagaaggcttaacttagaatcccatggagcttcatttcttctattttattggagcagggccttacatatataaaatctgggatttatgatatccatttagtaacacgccttagggtgtagttatgtggagctattgataatatattcggttcatctacttattatgttatgcctaaatgataccttatctctggacattgtcgtctggtatccaaacttttgtggaagctgtgtttttcattttataagagaccttgttaatattatataatttactgtctatgaatatgttttagaattgtctatctgacccaac

SEQ ID NO: 20584 - DNA, 893 bp, Gossypium hirsutum
  Clone ID: GOSHI-09MAY01-C1089_1
cccacgcgtccgacaaaacaaagctggagcaacttagctgatctccgtctccctgcctcaagagaaaaaggaagtatctaatagagggagatacatccccatgattctcgcggtgttattcgccaactctgaaggcaacatcttagttgaacgctttaatggagttccagctgaggaacggctgcattggagatctttcctagttaaactgggagcagataatcttaaaggtgttaaaaatgaagagctgcttgttgcttctcacaagtctgtttacattgtttacacggtgcttggagatgtcagcgtctatgttgttggcaaagatgagtatgatgaacttgcattggcagaggtgatctttgttataacctcagctgtaaaggatgtatgtgggaagctaccaacagagcgcctttttctggataaatacggaaggatatgcttgactttggatgaaattatttggaagggatatctggagaacacggataaagacaggatcaggagattagtacgtttaaaacctccaaccgagttttaggctgagaacaccctactgtcacaacccatttggaggcagtagattcagggtcctgtactcaactgaaaggcatggtatatcctctgctgtagtatgtatttactatgtgagtattgtgtaatatcatgcttcctattctgcattacagatatttttcagttctgggttggagcttgtggaactgttagatggacattgtgatatcctcgcattgataggataccagtgattttttttattatttgaagttgtgacttaagatcagtttgaagacataattgtactttattgttattttcatgaccttactaacttgagaatatatataacacaaataatttggtattgt

SEQ ID NO: 20585 - DNA, 270 bp, Gossypium hirsutum
  Clone ID: uC-gsflnu33B091e09b1
ttgatcctctgctgtagtatgtatttactatgcgggtattgtgtaatatcatgcttcctattctgcattacagatatttttcagttctgggctggagcttatggaactgttagatggacattgtgatatcctcgcattgataggataccagcgaaatgtttttttatttttttatttgaagccgtgacttaagatgagtttgaagacgtctactaaactgggagaggggtacccccccattacaaaaaaaaaagaatattaaaaggaact

SEQ ID NO: 20586 - DNA, 867 bp, Gossypium hirsutum
  Clone ID: GOSHI-09MAY01-C1049_7
ccccggcctgaagaaattcgcctctagctttgctttgtttttcgttaaccatggctcataacacgtcggaccctttcttccttttccaacttttactcattagtgtctcactaatgatcggtagccacaccgtctcgacagcggctcgacgtttattcgagacacaaacaacctcatcggagttgccacaattagcttcaaaatacgaaaagcaggaagagtctgaatatgaaaagccggaatacaaacagccaaagtatgacgaagagtacccaaaacatgagaagcctgaaattcacaaggaggaaaaacaaaaaccgtgcaagcggaacataaacatgaagagtgccacgagtcacacgaatcgaaggagcacgaagagtaccagaaagaaaaacccgagttccccaaatgggaaaagccctaaagagcatgagaaacaagatgaggataaggaacataaacatgagttcccaaagcatgaaaaagaagaggagaagaaacctgagaaaggcagagtaccctgagtcggttaaaatgcctgaatggccgaagtccatgtttactcagtctggctcgagcactaagccttaagccatatgacactggtgcatgtgccatcatcatgcagtaatttcatgggatatcataattatattgttaataaaaaagatggtgagtgggagatgtgtgtgtgcattcatccatgtagcaatgctgaatctctttgcatgcatagagattctgaattgttatagtttatgttatatcgtttgttctagtgaaattaattttgaatgttgtatgtaatgttaacatcacttggcttaaattatgtttaatgaagttatgctgtgtatttacttt

SEQ ID NO: 20587 - DNA, 1118 bp, Gossypium hirsutum
  Clone ID: GOSHI-09MAY01-C1049_5
cccacgcgtccgcccacgcgtccgattagcttcaaaatacgaaaagcaggaagagtctgaatatgaaaagccggaatacaaacagccaaagtatgacgaagagttccccaaattggaaaagcctaaagagcacgaggaacacgaagtcgaatatccggaaatacccgagtacaaggaaaagcaagatgagggtaaggaacataaacatgaggagtgccacgagtcacacgaatcgaaggagcacgaagagtacgagaaagaaaaacccaatttccccaaaggggaaaagcccaaagagcacgagaaacacgaagtcgaatatccgaaaatacccgagtacaaggacaaacaagatgaggataaggaacataaaaatgaagagtaccacgaatcacgcgaatcgaaggagcacgaagaatacgagaaagaaaaacccgagttccccaaacgggaaaagcctaaagagcacgagaaacacgaagtcgaatattcggaaatacccgagtacaaggaaaaggaagataagagtaagaaacataaagatgaagagtgccaggagtcacacgaatcgaaagagcacgaagagtacgagaaagaaaaacccgatttccccaaatgggaaaagcctaaagggcacgagaaacataaagccgaatatccgaaaatacctgagtgcaaggaaaaactagatgaggataaggaacataaacatgagttcccaaagcatgaaaaagaagaggagaagaaacctgagaaaggcatagtaccctgagtgggttaaaatgcctgaatggccgaagtccatgtttactcagtctggctcgagcactaagccttaagccatatgacactggtgcatgtgccatcatcatgcagtaatttcatgggatattgtaattatattgttaataaaaaagatggtgagtgggaaatgtgtgtgtgcattcatccatgtagcaatgctgaatctctttgcatgcatagagattctcaaatggttatagttcatgttatatcccctggtctagtgaaattaactttgaatgttctctgtaatgttaacatcacttggcttgatttttgttttaatgaagtttatgtcgccgttttttcccttt

SEQ ID NO: 20588 - DNA, 1423 bp, Gossypium hirsutum
  Clone ID: GOSHI-09MAY01-C1049_4
agaacaggggatcccccggctgcaacttaaaattcttttctttctatttggttaaccatggctcataactttcgtcatcctttcttccttttccaacttttactcattactgtctcactaatgatcggtagccacaccgtctcgtcagcggctcgacatttattccacacacaaacaacctcatcagagctgccacaattggcttcaaaatacgaaaagcacgaagagtctgaatacaaacagccaaaatatcatgaagagtacccaaaacatgagaagcctgaaatgtacaaggaggaaaaacaaaaaccctgcaaacatcatgaagagtaccacgagtcacgcgaatcgaaggagcacgaagagtacgataaagaaaaacccgatttccccaaatgggaaaagcctaaagagcacgagaaacacgaagtcgaatatccgaaaatacccgagtacaaggacaaacaagatgaggataaggaacataaaaatgaagagtaccacgaatcacgcgaatcgaaggagcacgaagaatacgagaaagaaaaacccgagttccccaaactggaaaagcctaaagagcacgagaaacacgaagtcgaatatccggaaatacccgagtacaaggaaaagcaagatgagggtaaggaacataaacatgaggagtgccacgagtcacacgaatcgaaggagcacgaagagtacgagaaagaaaaacccaatttccccaaaggggaaaagcccaaagagcacgagaaacatgaagtcgaatatccgaaaatacccgagtacaaggaaaaacaagatgagggcaaggaacataaacatgatgagtgccacgagtcacacgaatcgaaggagcacgaagagtacgagaaagaaaaacccaatttccccaaaggggaaaagcctaaagagcatgagaaacacgaagtcgaatatccgaaaatacccgaatacaaggaaaaacaagatgagggtaaggaacataaacatgagttccaaaagcatgaaaaagaagaggagaaaaaacctgagaaaaaggcagagtactctgagtggccaaagtacatgtttactcaatctggctcgggcactaagccttgaaccatatgacactggtgcatgtgccatcatcatgcagtaatttcatggtatatcttaattatatggttaataaaaaaaagatggtgagtgaataatgtgcgtgcattcctccatgcaccaatggtgaatctctttgcatacatagagattctgaatgattatagtttatgttatattttatgttgtagtgaaattaattttgaatgttgtttttaaattttgatgtcacttggcttgatttatgttttaacgaagcttatgttatgtattttactttaatgatcttgcatgtattggtaatttaacaagcttgatt

SEQ ID NO: 20589 - DNA, 811 bp, Gossypium hirsutum
  Clone ID: GOSHI-09MAY01-C1049_3
cttccgcgaccccttggccggacgcgtggccggacgcgtgggacgaagagtaccccaaacatgagaagcctgaaatgcacaaggaggaaaaaaaaaaaccctgcaaacaacatgaagagtacgagaaagaaaaacctgagttccccaaacaggaaaagcctaaagagcacgagaaacacgaagtcgaatatccgaaaatacccgagtacaaggaaaaacaagatgaggataagaaacataaacatgaagagtaccacgagtcatacgaatcgaaggagcacgaagagtacgagaaagaaaaacccgagttccctaaatgggaaaaatctaaagagcacgagaaacacgaagttgaatatccgaaaatacacgagtacaaagaaaaacaagatgagggtaaggaacataaacatgagttcccaaagcatgaaaaagaagtggagaaaaaacccgagaaaaaggccgagtaccctgagtgggctaaattgcctgggtcgccgacctccctggcttttcagcctggctcggccactaagccttgaaccatatgacgctggtgcatgtgccatcatcatgcagtaatttcatggtatatcgtaattattatagttaataaaaaagatggtgattgggaaatgtgtgtgtgcattcctccatgcactaatggtgaatctcttgcatacatagaaattctaaatggttatagtttatgttatagtgtatgttggagtgaaaataaatttaaatgttgtatctaatggtaacatcactggcttggattaaatgtatgtatgtatttactttaatgata

SEQ ID NO: 20590 - DNA, 1094 bp, Gossypium hirsutum
  Clone ID: GOSHI-09MAY01-C1049_2
cccccgcgtccggttcttttctttctatttgattaaccatggctcatagcattcgtcaccctttcttccttttccaacttttactcataagtgtctcactagtgaccggtagccacactgtttcggcagcggctcgacgtttattcgagacacaagcaacctcatcagagctcccacaattggcttcaaaatacgaaaagcacgaagagtctgaatacgaaaagccagaatacaaacagccaaagtatcacgaagagtacccaaaacttgagaagcctgaaatgcaaaaggaggaaaaacaaaaaccctgcaaacagcatgaagagtaccacgagtcacacgaatcaaaggagcaaaaagagtacgagaaagaaaatctcgagttccccaaatgggaaaagcctaaagagcacgagaaacacgaagtcgaatatccgaaaatacccgagtacaaggtaaaacaagatgagggcaaggaacataaacatgaagagtaccacgaatcacgcgaatcgaaagagcacgaagagtacgagaaagaaaaacccgagttccctaaattggaaaagcctaaagagcacgagaaacacgaagtcgaatatccggaaatacccgaatacaaggaaaagcaagatgagggtaacgaacataaacatgagttcccaaagcatgaaaaagaagaggagaagaaacctgagaaaaaggcagagtaccttgagtgggctaaaatgcctgaatggtcgaagtccatgtttactcagcctggctcggccactaagccttgaaccatatgacactggtgcatgtgccatcatcatgcagtaatttcatggtatatcgtaattatatagttaataaaaaagatggtgagcgggaactgtgtgtgcgcattcctccatgcaccaatggtgaatctctttgcatagagattctgaatggatatagtttatgttatattgtatgttctagtgaaattaattttgaatgttgtatctaatgttaacatcacttggcttgatttatgttttaatgaagtttatgttatgtattttactttaaaaaaaaaaaaaaaaaaaaaccggcacgaggggggg

SEQ ID NO: 20591 - DNA, 1116 bp, Gossypium hirsutum
  Clone ID: GOSHI-09MAY01-C1049_1
cggtcgcgtggtcctcaaaattctttgctttctattttgtaaaccatggctcataacattcgtcaccctttcttccttttccaactttttctcatttgtgtctcaccaatgatcggtagccacactgtctcggcagcggctcgacgtttattcgagacacaaacaaccttatcggagctgccacaattggcttcaaaatacgaaaagcacgaagagtttgaatatgaaaagtcagaatacaaacagccaaagtatcacgaagagtaccccaaacatgagaagcctgaaatgcacaaggaggaaaaaaaaaaaccctgcaaacaacatgaagagtacgagaaagaaaaacctgagttccccaaacaggaaaagcctaaagagcacgagaaacacgaagtcgaatatccgaaaatacccgagtacaaggaaaaacaagatgaggataagaaacataaacatgaagagtaccacgagtcatacgaatcgaaggagcacgaagagtacgagaaagaaaaacccgagttccctaaatgggaaaagcctaaagagcacgagaaacacgaagtcgaatatccggaaatacccgagtacaaggaaaaacaagatgagggtaaggaacataaacatgagttcccaaagcatgaaaaagaagaggagaagaaacctgagaaaaaggcagagtaccctgagtgggctaaaatgcctgaatggccgaagtccatgtttactcagtctggctcgggcactaagccttgaaccatatgacactggtgcatgtgccatcatcatgcagtaatttcatggtatatcgtaattatatagttaataaaaaagatggtgagtgggaaatgtgtgtgtgcattcctccatgcaccaatggtgaatctctttgcatgcatagagattctgaatggttatagtttatgttatattgtatgttctagtgaaattaattttgaatgttgtatctaatgttaacatcacttggcttgatttatgttttaatgaagtttatgttgtgtattttactttaatgatattgcatgtattgttaatttaacattgcttgatcattatactcttccactattaattataaatggcactgttttgttt

SEQ ID NO: 20592 - DNA, 571 bp, Gossypium hirsutum
  Clone ID: LIB3584-054-P1-K2-B9
cggacgcgtgggcggacgcgtgggcggacgcgtgggcttttactcattagtgtctcactaatgatcggtagccacaccgtctcgacagcggctcgacgtttattcgagacacaaacaacctcatcggagttgccacaattagcttcaaaatacgaaaagcaggaagagtctgaatatgaaaagccggaatacaaacagccaaagtatgacgaagagtacccaaaacatgagaagcctgaaattcacaaggaggaaaaacaaaaaccgtgcaagcaacatgaagagtaccacgagtcacacaaatcgaaggagcacgaagagtaccagaaagaaaaacccgagttccccaaattggaaaagcctaaagagcatgagaaacacgaagtcgaatatccgaaaatacccgaatacaaggaaaaacaagatgagggtaaggaacataaacatgagttccaaaagcatgaaaaagaagaggagaaaaaacctgagaaaaaggcagagtactctgagtggccaaagtacatgtttactcaatctggctcgggcactaaagcctgaaccatatgacact

SEQ ID NO: 20593 - DNA, 502 bp, Gossypium hirsutum
  Clone ID: LIB3584-016-P1-K1-G12
cccacgcgtccgcccacgcgtccgcccacgcgtccgcccacgcgtccgcccaaagagcacgagagacatgaagtcgaatatccgaaaatacccgagtacaaggaaaaacaagatgagggcaaggaacataaacatgatgagtgccacgagtcacacgaatcgaaggagcacgaagagtacgagaaagaaaaacccaatttccccaaaggggaaaagcctaaagagcatgagaaacacgaagtcgaatatccgaaaatacccgaatacaaggaaaaacaagatgagggtaaggaacataaacatgaattccaaaagcatgaaaaagaagaggagaaacaacctgagaaaaaggcagagtactctgagtggccaaagtacatgtttacttaatctggctcgggcactaagccttgaaccatatgacactgggtgcatgtggccataataatgcagtaaattttatgggatattttaaattatatgggtaataaaaaaaaaatat

SEQ ID NO: 20594 - DNA, 419 bp, Gossypium hirsutum
  Clone ID: LIB3584-014-P1-K1-E2
gcgcggacgcgtgggcggacgcgtgggcggacgcgtgggcggacgcgtgggcggacgcgtgggctgttaaccatgggtgataacattcgtcaccctttcttccttttccaacttttacttatttgtgtctcaccaatgattggtagccacaccgtctcagcagcaactcgacgtttattcgagacacaaacaacctcatcggagctgccacaattggcttcaaaatacgaaaagcacgaagagtctgaatatgaaaagctagaatacaaacagccaaagtatcatgaagagtacccaaaacatgagaagcctgaaatgcacgaggaaaaacaaaaaccctgcaaacaacatgaagagtatgagaaagaaaaacccgagttccccaaacgggaaaagcctaaagagcacgagaaacacga

SEQ ID NO: 20595 - DNA, 367 bp, Gossypium hirsutum
  Clone ID: LIB3083-060-Q1-L1-D4
aaaattctttgctttgatttcgttaaccatggctcataacactcggcgccctttggtccttttccaacttttactcattagtgtctcactaatgatcggtagccacaccgtctcgacagcggctcgacgtttattcgagacacaaacaacctcatcggagttgccacaattagcttcaaaatacgaaaagcacgaagagtctgaatatgaaaagccggaatacaaacggccaaagtatgacgaaaagtccccaaaaaatgaaagccctgaatttccaaggggggaaaacaaaaacccggccagctaccttaaaaagtcccccaggtaccccaattgaatgagcaccgatagttcccgaaaggaaaac

SEQ ID NO: 20596 - DNA, 326 bp, Gossypium hirsutum
  Clone ID: LIB3083-060-Q1-L1-H7
tgcaggggttctgcacgagctcgtaccgttaatgtcggacccgtctgctccacccaatatcgaccatgaccaaaggcgatcattgtctagaatatacctgcgacgctggactgtcttattaatgataggtagtcacaccttctcgtctgcggctggacatttattccagacacaaacatcctgatcagagctgtcacaattggcttcaaaatacgaaaagctcgaatagtctgaatacaaacagtcaaaatatcacgaagagtacccaaaacatgagaagcctgaaatgcacaagggggaaaaacaaaaaccctgcaaacatcatg

SEQ ID NO: 20597 - DNA, 433 bp, Gossypium hirsutum
  Clone ID: GOSHI-09MAY01-C1079_6
cccacgcgtccggctttagtttcggtttgtaaattaataggattttgagtaccctcctgtaatagtttgtaggcgcttctaaccgaaaaattaccagatggttctcctctccagacttggaagtcttcatttgctgacgttgtcaaaggaatctgtaaaatctttttagcaacttccgcattgaagaggtccttccaaacagaaatacgatcccccttaccaaccctccagcaaagtcctcattcgagaatgccttttgccgactagatacttttccaggtaagcgaacgtaaattccctaattgagcagttagaaaacacgcattcggataatatttagctttcaatactcgagctagcaaagaatctggaaaattaatgagacgccagccctgtttagctaataatgcaatattaaatttatcaagttttc

SEQ ID NO: 20598 - DNA, 1127 bp, Gossypium hirsutum
  Clone ID: GOSHI-09MAY01-C1079_5
cttcccggaccccttggttttaaacagtcgtcttttttctctcaattttgatatcttagacgctccctgtccactgctcgacgaacgatattcggaaccttcccaaccagttgctatattggggtggattactggttttgaaaccaaaaatctcccttggctactttaaaccaataaacctggaaccaatcttgcttggttgcttgatcgaaaacctgcattcaaaaaaaactgacccactcgttcttctttcttcagttctcggaccaccatttcctgccaaattacccaagcccacaacagaaaagttggcactgttcatttgaccctcgactaaaaacccatgacatccacgaaagatatgattgcaatcctcctcttcttggttgcatcgaggacaccgggcatcagcaactatacgtttaatcttcagattagcaaaagtacaatatggggaatctcttggaattacattcctacttttgctaatccccagtttctctcctctcaaattccgacccctaaacatgccgccgaagttcgacccaacccaagtcgtcgacgtattcgtgcgagtcaccggcggtgaagtcggagcagccagttcactcgcacccaaaatcggtcctttgggtctatcccccaagaaaattggtgaagacatcgctaaggaaaccgccaaggaatggaagggcttacgcgtcaccgtcaagcttactgtccagaaccggcaagctaaagtcactgtagtcccatccgccgccgctctggtcatcaaggctttgaaagagcctgaaagggatcgtaagaagacgaagaatattaagcataatgggaatattagccttgatgatgtgatcgagatcgcgaaagtcatgaagccttgatccatggctaaggacctgagaggaaccgtgaaggagattttgggaacttgtgtttccgttgggtgtacggttgatgggaaagatcccaaagatctgcagcaggagatctctgatggggaaattgatgttcccttggagtaaaaccaaatgaaagaaactgggtttttctcttttgctttacttaattgttttcttttcaaaaatttgtgttttataagttttttaagtagttggtaaaaa

SEQ ID NO: 20599 - DNA, 582 bp, Gossypium hirsutum
  Clone ID: GOSHI-09MAY01-C1079_3
gagattttaaaagagatgtccctgcttgttgtttatctgttttcatatataaatctgttcctgcttgtccagattacccaaagcccacaacagaaaagttggcactgttcatttgaccctcgactaaaaacccatgacatccacgaaagatatgattgcaatcctcctcttcttggttgcatcaaggacaccgggcatcagcaactatacatttaatcttcagattagcaaaagtaggaatgtaattccaagaaattccccatattgtaattttgactttcggggggatttgttaattccatagttttttgtaaaaggctttagtctcggtttgtaaattaataggattttgagtaccctcctgtaatagtttgtaggcgcttcgaaccgaaaaattgccagatggttctcctctccacacttggaagtcttcatttgctgacgttgccaatggaatctgcaagatctttttagcaacttccgcattgaaggtattagtaattatatcatctttccacttttctctactatctgcatcaatcaaatctgaaactaatgtaatatttccatttctctgaaaaa

SEQ ID NO: 20600 - DNA, 566 bp, Gossypium hirsutum
  Clone ID: GOSHI-09MAY01-C1079_2
cccacgcgtccgcacctctttgctcttaatcttaatatcttggattcatcctctccgctgcttgtcggatggtttttggcgtcgccccagccaggtaatgttctgcgcgcttctttaaagcttctattgcaaccaaatgggcaaaaatattatcagttctcggaatataacaaaaacagatactattaaaattggttttaatctcttgaatatctttgatgattgctccgatgaccgatctgtcttgttctgaactttgacactttttgataatcgttttcgaatctcccattatttgtaaatctttaagccccatagatcttcctaactctaaggcttgtaaccctgcatgtgcttctgccgcgaatggagttgcaatgttggtatggattactgactttgagaccaaaatctccccaccctcgcctcgaacaatcagtcctgaagcagatcttgcattttgctgatcaaaggccgcatcaaagtagactgagattctcgtgcatctctcaacagttcgcaggacaccatgtctctgccaaatgatccaaagcccgaaacagaaa

SEQ ID NO: 20601 - DNA, 761 bp, Gossypium hirsutum
  Clone ID: GOSHI-09MAY01-C1079_1
cccacgcgtccgcccacgcgtccgcccacgcgtccgctccactactcgatgaacgatattcggaacctccccaaccagtcctgcatgtgcctctgccgcgaatggagttgctatgttggtatggattactgattttgaagccaaaatctcccctccctcacctcgaacaatcaaacctgaagcagatcttgcatgttgctgatcgaaagctgcatcaaagaagactgacacactcgttcttctttcttcagttctcggaccaccatttcctgccaaattacccaaagcccacaacagaaaagtcggcactgttcatttgaccctcgactaaaaacccatgacatccacgaaagatatgattacaatcctcctcttcttggttgcatcgaggacaccgggcatcagcaactatacgtttaatcttcagattagcaaaagtaggaatgtaattccaagaaattccccatattgtaattttgactttcgaggggatttgtaaattccatagttttttgtaaaaggctttagtttcggtttgtaaattaataggattttgagtaccctcctgtaatagtttgtaggcgcttctaaccgaaaaattaccagatggttctcctctccacacttggaagtcttcatttactgacgttgcaaaaggaatctgcaaaatctttttagcaaaaaaaaaaaaaaaaaaaaaaataaaaaaataataatagtaaaaaaataaagaggggtggaaaaaaaaaaacaagggattg

SEQ ID NO: 20602 - DNA, 411 bp, Gossypium hirsutum
  Clone ID: LIB3146-047-Q1-K1-B8
aaaggaatctgcaaaatctttttagcaacttccgcattgaagaggtcattccaaacagaaatacgatcccccttaccaaccctccagcaaagtcctccttccagaatgccttttgccgaccaaatactcttccagctaacaaagaacccgaggcatcggcgtcaaaaggaaaggagaaagttatcgaggactaaaacgggagaataacggtcgatagaagtcaaaggtcccggttcagcatccatattaatcccggcttcggcaaaacttggtgatgtatttttcctttggtaaaggtggcatgtacatagattgtgtataaatgttattatgttttaatatataaatgttaaaaatgttagtattaaaaagttatgggattttaatgaaagaagtctttctattttatct

SEQ ID NO: 20603 - DNA, 464 bp, Gossypium hirsutum
  Clone ID: LIB3582-048-P1-K1-C7
gggtgccatcattctcgaatctcctactatgcgtaagtcttcaagcccgatagaccttgctcactatgaggcttgccaccctgcatgtgcctatgccgcgaatggagttgctatgttaggatggattactgattttgaagccaaaatctcccctccctcacctcgaacaatcaaacctgaagcagatcttgcatgttgctgatcgaaagctgcatcaaagaagactgacacactcgttcttctttcttcagttctcggaccaccatttcctgccaagttaagtttcctctcctcgattccttttaactctgagataaaatctgagattttaaaagagatgtctctactggttggttgtctgttttcatatataaatctgttcctgcttgtccagattaccaaagcccataacagaaaagtcggcactgttcatttgaccctagactaaaaacccatgacatcta

SEQ ID NO: 20604 - DNA, 333 bp, Gossypium hirsutum
  Clone ID: LIB3272-005-P1-K1-A8
gtctatgttgtatcaattgtgatatattagaagctcactctccactactcgatgaacgatattcggaacctccccagccaggcgctatattggtgtggattactgatgtcgaagccaaaatctcccctccctcacctggaacaatcaaacctgaagcagatcttgctcgttgcagatcgaaagctacatcaaagaagaccgacacacttgttcttgtttattcagttctcggaccaccatttactgccaaatgacccaaagcctacaacaaaaaagtcggcactgatcatttgagcgtcgactaataacccatgacatccacgaaagatatga

SEQ ID NO: 20605 - DNA, 317 bp, Gossypium hirsutum
  unsure (1)..(317): unsure at all n locations
  Clone ID: LIB3145-044-Q1-K1-A11
ttttgatattcagattagcaaaagtaggaatgtaattccaagagattcccaatattgtaactttgattttcgggggaatttgtaaattccatattttttttgtaaaaaactttactctcggtttgtaaattaataggattttgagtnaaaaaaaaaaaaaaaaaaaaaaaaaaaaaaaaaaaaaaaaaaaaaaaaaaaaaaaaaaaaaaaaaaaaaaaatttaaaaaaaaaaaaaaaaaaaagggggggcggttttaaagaatcaaatttttcttccccgggcttgcaaagtaataatttttttttgggggccccaa

SEQ ID NO: 20606 - DNA, 1274 bp, Gossypium hirsutum
  Clone ID: GOSHI-09MAY01-C1019_1
gacctcctattcctgggcaggagttgggcataacttctgatgaagcattgagtttggaggacttgcctaagcatgctgttgtacttggaggagggtacattgctgttgagtttgcatcaatatggcgagggttgggcgctaatgtcgacctctttttcagaaaggagcttcctttgagagggtttgatgatgaaatgagggcagtggttgctagaaatctggaaggaaggggaattaatttgcatccacagacgaatttgactgagttgattaaaacagataatggcataaaagttactacagaccacggtgaagagttgatagcagatgttgtactctttgccacaggcaggttaccaaactcgaagaggttgaatctggaagctgtaggtgtggaacttgataacacaggagctgtgaaggtggatgagtactcacgtactagcattcctagtatatgggctgttggtgacgttacaaatcggatgaacctaactcctgtagccttaatggaaggaacctgctttgcgaaaactgtttttggtaaggaacctagcaaaccagactacagccatgtaccttgtgctgtttttagcatccctccactttctgttgttggtctcagtgaagagcaggcaattgagcaagcaaatggtgatgttctggttttcacatcaaccttcaatccgatgaagaacactgtatctggacggcaagaaaagactgttatgaagttagtcgttgatgcggagactgataaagtactcggtgcatctatgtgtggtccagaggcacctgaaattatgcagggcatcgctgttgcactgcagtgtggagcgactaaagcgcaatttgacagcacagtcggcatacatccttccgctgccgaggagtttgtgaccatgcgatctgtttcacggcgtattacctgtagggggaaaccgaagacaaatctgtagacaacggacccgggggacttgcagccctggtgatatagaagcaacatttcttatgatcatagatatttgagagaacaggtaatatttaattggtcaggggtatatttggcttgatcattattcccattatacggctcatctatcttctgggtattttatgttgtatttgttaaaaatagtggccgcgaccaacgtatttttacctttgtaccttatcagcgcactgaaaaatttggattagcatcatttgagttctttagtaatgaagagttattattggactaaaaaaattttatagggtcacctaaattcaat

SEQ ID NO: 20607 - DNA, 1429 bp, Gossypium hirsutum
  Clone ID: GOSHI-09MAY01-C1039_1
cccacgcgtccgcgagctgctttctttgcataataaatcttataaccgacctactattttagtggcaaaaagtgtaaagggagaggaagaaattccggatggtacagttgctgtgttgacccctgacatgccagatgttttgtcacatgtttctgtccgagcaagaaattgcaaggtttgctttgctacttgttttgatcctaatattctggctgacctacaagcaaaaaaagggaaactgttgcgcctaaaaccttcatctgcagatgtagtttatagtgaggtgaaggaaggtgagctagttgattcaagttcaagcaacttgaagggagatggtccatctgtcactttggtcagaaagcagtttgttggtaaatacgccatatcagcagaggagtttacacctgaaatggttggtgctaaatcacgcaacatctcatatctaaaaggaaaagtgccatcttgggttgggattcccacatcagttgcccttccatttggagtatttgagaaggttcttgcagatgaagcaaacaaggaagtggatcaaaagttgcaaattttgaagaagaagttaggaggaggagactttggtgcacttgaggaaatccgtcagacggttctgcagctgagggcaccatcccaattggtgcaagagctgaagaccaagatgctgacttctggcatgccttggcctggagatgaaggtgagcagaggtgggagcaagcatggactgctataaagaaggtatgggcttcaaaatggaatgagagagcatatttcagcaccaggaaagtcaaactagatcacgactacctctgtatggctgtcctggttcaggaagtaatcaatgctgactatgcatttgttattcatactactaatccatcgtcaggggacacttcagagatctatgctgaggttgtcaagggacttggagaaactcttgttggagcttatccaggtcgtgctttgagttttgtttgcaagaaaaacaatctcaactctcctcaggttttgggatatccaagcaaaccaattggtctcttcataaggcgttccattatcttccgatctgattctaatggtgaagatctagaaggttatgcaggtgctggcctttatgacagtgtgccaatggatgaagaagagaaagtggtggttgattactcatcggacccgttgataaacgatggcaagtttcaacaagcaatcctttctagcattgctggtgcaggaaatgccgtagaggaactgtatggatctccacaagacatagaaggtgtgatcagagatgggaaggtgtatgttgtccagacaagaccccagatgtgatcctctcatttgtttcattttagcataattatattctttgggcagtgtttttttgcctatgccgaggttgtaaaatgagtaaaacatacaaca

SEQ ID NO: 20608 - DNA, 800 bp, Gossypium hirsutum
  Clone ID: GOSHI-09MAY01-C1029_1
cccacgcgtccggtgttctgggaccttggttctaaaacgaaaacaatacaagatctgtccaatgcaatgggttcaatgtatgctgctgttcttttccttggtatccaaaacgcttcttctgtgcaacctgttgtggcggtcgaaaggacagtcttttatagagaaagagctgctggaatgtactctgcaatgccatatgccattgcacaggtgttaatagagataccttatatttttgttcaagcttctgtgtatggccttatagtctatgctatgatcggattcgaatggacggttgctaagttcttctggtatctcttcttcatgttcttcaccttactttacttcaccttctacggcatgatggctgttgctgtcacaccaaaccattacattgcagccatagtttccgcggcattctacggagtatggaatctcttttcaggattcatcatcccacgacctagtatgccaatatggtggaggtggtactactggatttgtcctgtttcttggaccttgtatggattgggtgtttcacagtttggagatataacacacatgcttgaagacgggaacattgagacaggggggcagtacttgagaaatttttatgatttcaggcatgattatctgggattagttgctgctgtgattgttagttttgcagttctctttggagcaatctttactgtgtccataaagatgttcaatttccaaagacgttaacaaatttttggtttaaatattgtgtacaacaaaattccatgtttgtaatattagaatatattattaggaac

SEQ ID NO: 20609 - DNA, 654 bp, Gossypium hirsutum
  unsure (1)..(654): unsure at all n locations
  Clone ID: AI055384.1
agaaagagctgctggaatgtactctgcaatgccatatgccattgcacaggtaagtatttttcacattttgaagagtagttgaaatggttaagaaagttgtaggcacattataattgactccacatttggccactgcaggtgttaatagagataccatatatttttgttcaagcttctgtgtatggccttatagtctatgctatgatcggattcgaatggacggttgctaagttcttctggtatctcttcttcatgttcttcaccttactttacttcaccttctacggcatgatggctggtgctgtcacaccaaatcattacatcgcagccatagtttccgcggcattctacggagtatggaatctcttttcaggattcatcatcccacgacctagtatgccaatatgggganngtggtactactggatttgtccggtttcttggaccttgtatggaatgggtgcttcacagtttggagatataacacacatgcttgaagatgggaacatgagacagtgtagcagtacttgagaaaattttatgatttatgcatgattatctgggattagttgctgctgtgattgttcctttggcagttttttgggcaatcttactgggtcactaaatagtaatttcaagacgtgaaattttggg

SEQ ID NO: 20610 - DNA, 489 bp, Gossypium hirsutum
  Clone ID: GOSHI-09MAY01-C1399_1
cccacgcgtccgaacgtctataggttagcttgagttttgatgtgctatcggggtaagacatagtcttcaagtcaccttggatgtagtacctgtgttaaaacaagataaccatgattgtccttttatccatgggtgcaggaatcaagtgcagccaaaatggcagaaagcaagctgcaggaaaatttgagaaagttgcagggaatcagcttgaagactacagagatgcaagataatgcaaaatcattctcttccatggcaagagaactgctgcgcactaaagaaaaagaagataaatgatatctcctatatagcctataatattgttttggattaaaaaggtttgattttttacatatatgtccatgtttgtatagcagtgaaaatcaagagtacttgactgaagtgaaatattctcttctcttttcttttgttgggtattcattttgttcataggatacactttaaaacttcaaaggaatgtatttgtgc

SEQ ID NO: 20611 - DNA, 603 bp, Gossypium hirsutum
  Clone ID: GOSHI-09MAY01-C1389_2
ctttctctacaaatactttgctgcaaattctcccaaatttttcagaaaatctaacacaagttgttatcaattagggagggggatgagagagacccttcatgttcaaggtggacaatgtgggaaccaaatcggttccaagttttgggaggttgtttgcgatgagcacggcatagatccaactggaaggtacattggttcctcggatctgcagttggagcgtgttaatgtttactataacgaggcttcatgtggtcgctttgttcctcgtgctgtgctcatggacttggagcctggtacgatggacagtgtccgaactggtccttacggccagattttcaggccagacaactttgtttttggacaatccggtgctggaaacaactgggccaagggccattacactgaaggagccgagcttatcgatgccgttcttgatgttgtgaggaaagaagctgagaactgtgactgcctgcaaggtttccagtatgccactcattgggtgggggaactggttccggtatgggtacattgcttatctccaaaatcaagaggagtaccccgataggatgatgcttacgtgctccgtgttcccctcgccaaagg

SEQ ID NO: 20612 - DNA, 1671 bp, Gossypium hirsutum
  Clone ID: GOSHI-09MAY01-C1389_1
cccacgcgtccttccccgcaaatactttgctgcaaattctcctaattttttcagaaaatctaacacaagggaaaaaaatgagagagatccttcatgttcaaggtggacaatgtgggaaccaaatcggttccaagttttgggaggttgtttgcgatgagcacggcatagatccaactggaaggtacattggttcctcggatctgcagttggagcgtgttaatgtttactataacgaggcttcatgtggtcgctttgttcctcgtgctgtgctcatggacttggagcctggtacgatggacagtgtccgaactggtccttacggccagattttcaggccagacaactttgtttttggacaatccggtgctggaaacaactgggccaagggccattacactgaaggagccgagcttatcgatgccgttcttgatgttgtgaggaaagaagctgagaactgtgactgcctgcaaggtttccaggtatgccactcattgggtgggggaactggttccggtatgggtacattgcttatctcgaagatcagagaggagtaccccgataggatgatgcttacgttctccgtgttcccctcgccaaaggtttccgatacggttgtcgagccatacaatgctactctttcggttcatcagcttgttgagaatgctgatgagtgcatggttcttgataatgaggctttatatgatatctgcttcaggactcttaaattgactactcctagctttggtgatttgaaccatttgatctctgcaaccatgagtggagttacttgctgtctaagattccccggccaactcaactccgacctccgaaagcttgctgtgaacttgattcccttcccccgtcttcactttttcatggtcggatttgctccactgacctcccgcggttctcagcagtaccgagctctaactgtccctgagttgacacaacaaatgtgggatgcaaagaacatgatgtgtgctgctgacccgaggcacggtcgatacctcacagcatcagccatgttccgaggcaagatgagcaccaaagaagtggatgaacaaatgatcaatgtccaaaacaagaactcttcctacttcgtcgaatggatcccaaacaacgtgaaatccagtgtctgcgacatcccacctagagggctatcaatggcatcaaccttcgtaggaaactcgacctccatccaggaaatgttcaggcgagttagcgaacaatttaccgctatgttcaggaggaaagctttcttgcattggtacaccggtgaaggtatggacgagatggagttcaccgaggctgagagcaacatgaacgatctcgtgtccgagtatcaacaataccaggacgctaccgctgacgaggaaggcgaatatgaggatgaggaagatttggatgaagaacacatgtgatgaaagcgaaaaccaaacgaagttgtcggtaatgcagcatatacaggtatgtgattcgagtggatttgtatgtaatgagtaatgaaagtgtcttttccctatttttccctttcacgagtttgctttttttggtttctatttgagagagtaatgtataatatatccgaaaatagtaatgtaatacctatatctatgtttgtattcatttggtttttgtgtattatatgatcaatgccttatttcttctctt

SEQ ID NO: 20613 - DNA, 338 bp, Gossypium hirsutum
  unsure (1)..(338): unsure at all n locations
  Clone ID: LIB3083-060-Q1-L1-G7
cttcatgtggtcgctttgntcctttttctgtgctcatggacttggaggctggtacggtggacattgtccgaactggtccttacggccagattttcaggccagacaactttgtttttggacaatacggtgctggaaacaatttggccaactgacattacactgtactatcccactcaattgatgccgttcttgatattgtaaggaaagaagcttctaactgggactggctgctacgattttatgcatgactaataatgcttgacctaatctaatcatgaagctggtcatcaaaacttataatgatgagatcatgccatttttattggcactggttgtgt

SEQ ID NO: 20614 - DNA, 906 bp, Gossypium hirsutum
  Clone ID: GOSHI-09MAY01-C1359_1
cccacgcgtccggtttgaagtctaaccccgttggctgtgtaccggagttggaaccgggcttcccttctccttgtttctctcctattaactcctcttatcttcttttctcttctcttctgcactttttcttcaaagccttcaaagggtagaaagatcgctccaaatataagatggtggtgactgatgacatctatacaaaggatgggacagtggatatcaataagaagcctgccaacaagaaaaaaactgggaattggaaagcttgctctttcattcttggaaatgaatgctgtgaacggttggcatactatgggatggggactaatttagtcaactatctccaagaacaactcaatcaaggaaatgtcactgcatcaaacaatgttacgaattggtctggaacctgctatattacaccattgatcggagcctttgtagctgatgcatatttgggtagatactggacaattgctattttctcaatcatctacttctttggtatgacactcttaacattgtcttcttctatccctggactaaagccatcatgcactggagatgtctgccacccaacacaagaacaaatcgcagtgttctttgtagctttatacatgattgctcttggtactggtgggattaagccatgtgtctcatcttttggtgctgatcagtttgatgaaactgatgaagttgagagaaaaaggaaaagctcttttttcaattggttttacttctcaatcaatattggagcacttgttgcttcttctgttctggtatggatacaaatgaatgtggggtgggactggggttttggaatcccagctgttgcaatggctattgcagttgtattcttctttgctggtagtcgaacatatcgccttcaaaaaccctggggaagtccgctta

SEQ ID NO: 20615 - DNA, 1519 bp, Gossypium hirsutum
  Clone ID: GOSHI-09MAY01-C1369_1
atcgtctacgccatttctgtattccactgctctgctcactcagcctttgaacaacactcctctttctctctgttctatccctctctatacacatggcaaaggtgaagatcggtatcaacggattcggtaggatcggtaggttggtggctcgagttgctttaaaaagagacgatgttgaactcgtcgctgttaacgatccttttatcactactgattacatgacatatatgttcaagtacgacagtgttcacgggcaatggaagcatcatgaactcaaagtcaaggattcgaagacccttctgtttggcgagaagccagtcactgttttcggtattaggaacccagaggagattccatggggcgagaccggagctgaatacattgttgaatcaactggagtgttcactgacaaagacaaggcagctgcccacttgaagggtggtgctaagaaagtaattatatctgccccaagcaaggatgctcccatgtttgtcatgggtgttaatgagaaggattacaagccggaatatgacattatttccaatgctagctgcactaccaactgtcttgctccccttgctaaggttattcatgacaaattcggcatcattgagggacttatgacaacggttcattctattacggctacacaaaaaactgtggatggtccatcaatgaaggactggagagaggggaagagctgcttcgttcaacatcattcctagcagtactggagctgctaaggctgttggaaaagtgcttcctgccttgaatggaaaattaactggaatggctttccgtgttcccaccgttgatgtttcagtggttgacctcacagtaagactagagaaagcagcctcttatgatgaaatcaaagctgctattaaggcggcgtccgagggagaattaaagggaatcttgggttacactgatgaagatttggtttccactgacttcgtcggtgacagcaggtcgagtatctttgatgcaaaagccggaatagctctgaatgaaaattttgccaagcttgtctcttggtacgacaatgaatggggctacagcacccgtgttgttgaccttatcattcacgtggatgctgttttgaaagctaagtaagttggtcggctggattgtctcggcagctgtatgtaatttcacggatcgatccttaccttgttccgtatctatggtggaggccatgagtttaaagaaataagccttgtttagagtcttatgtcaatagttttttcctctttatctgttaaatgaaacgatatctgagttcctccctcgtttcttccgtgcgtggtcgtgctcattcgattctccatgctctttgtaattctccaggtataatcttgctatactagtttgaataatatttttccttttgaaactccaaaaaaaaaaaaaaaaaaaaaaaaaaaaaaaaaaaaaaaaaaaaaaaaaaaaaaaaaaaaaaaaaaaaaaaaaaaaaaaaaaaaaaaaaaaaaaaaaaaaaaaaaaaaaaagggggggg

SEQ ID NO: 20616 - DNA, 757 bp, Gossypium hirsutum
  unsure (1)..(757): unsure at all n locations
  Clone ID: LIB3826-002-Q1-K6-G10
gagggtataatagtagtatttaattgtgctattaaattactatagaagggatattctgactaaggaaagacttggtatttaagagatcattgtgatccacctctcttccctgggaattgaactttgtgtgattttttagtacaataatttacacgcttccgaccctattggaacaacatgtcatgggtgttaatgagaaggattacaagccggaatatgatattatttccaatgctagctgcactaccaactgtcttgcaccccttgctaaggctattcatgacaaattcggtatcattgagggacttatgacaactgttcattctattacaggtaagcttggaaacagaattctcacttttaaagtaacttagtatgttctgtttatcttattttgctcctactcagctacacaaaaaactgtggatggtccatcaatgaaggactggagaggaggaagagctgcttcgttcaacatcattcctagcagtactggagctgctaatgttagaattgtgtctagattgtagctntagagtgttaatacgaactcagacttgtacttcataattattggtcttatatnntctagaggttcaatttttataagatcttttcattacaaaatagaaagataatcagtttgatgaatttccctttccaatagtacgcatacaggaccttgatttgcagtgggttaggttgcttttccttagcatctctctccatgtatacatctaatgcagcaattctatac

SEQ ID NO: 20617 - DNA, 503 bp, Gossypium hirsutum
  Clone ID: LIB3585-062-P1-K2-A2
acgcgttcggttgaactggtaagcagtacagccttggatgcataccgaagatatgaggacaaactcgtcgctggtggcgatccttttatcactactgattacatgacatatatgttcaagtacgacagtgttcacgggcaatggaagcatcatgaactcaaagtcaaggattcgaagacccttctgtttggcgagaagccagtcactgttttcggtattaggaacccagaggagattccatggggcgagaccggagctgaatacattgttgaatcaactggagtgttcactgacaaagacaaggcagctgcccacttgaagggtggtgctaagaaagtaattatatctgccccaagcaaggatgctcccatgtttgtcatgggtgttaatgagaaggattacaagccggaatatgacattatttccaatgctagctgcactaccaactgtcttgctccccttgctaaggttattcatgacaaaattcggcatcattgaaggac

SEQ ID NO: 20618 - DNA, 391 bp, Gossypium hirsutum
  Clone ID: LIB3585-023-P1-K1-B9
tccacgcatgcgtccacgcgtgacgtcaacgcgtccggacaagccgaaatatgacattatttccaatgctagctgcactaccaactgtcttgctccccttgctaaggttattcatgacaaattcggcatcattgagggacttatgacaacggttcattctattacggctacacaaaaaactgtggatggtccatcaatgaaggactggagaggaggaagagctgcttcgttcaacatcattcctagcagtactggagctgctaaggctgttggaaaagtgcttcctgccttgaatggaaaattaactggaatggctttccgtgttcccaccgttgatgtttcagtggttgacctcacagtaagactagagaaagcagccttttatgatgaa

SEQ ID NO: 20619 - DNA, 816 bp, Gossypium hirsutum
  Clone ID: GOSHI-09MAY01-C1299_2
agtttacaaacagaagttctggcggagaagcttggaagaagccaacggaggcaattgaattaggggcaaaatggggaagaacatcatccaccaaggaagacgccggcgccctcttccattctcttcgatctgcttacgctgctacccttgtcaatctcaagatcattgatttatatgttggttttgcaatcttcaccgctctgatccaggtagtttacatggcaatggtgggatcatttcctttcaattcatttctttctggagtgctttcttgtgttggaacagcagtccttgccgtttgtcttcgtattcaagtgaataaagaaaacaaggaattcaagatcattgatttatatgttggttttgcaatcttcaccgctctgatccaggtagtttacatggcaatggtgggatcatttcctttcaattcatttctttctggagtgctttcttgtgttggaacagcagtccttgccgtttgtcttcgtattcaagtgaataaagaaaacaaggaattcaaggatctaccacctgagcgagcttttgcagattttgttctttgcaatttggtgctccatttagtgatcatgaatttccttggctaaatcgcgcctccaggtttgctgtggactgttggctgtgattcatatttaaagcatgaaatgaaattcttaggtcattactatgagtttatgcatatagcgtatatgatcaggaattgtagtaagaattcagtggtgtcttttgttaaagaattttgaagttgcttggagaggaacagtagacgttttagtgtcaatttgcttgttctgattc

SEQ ID NO: 20620 - DNA, 690 bp, Gossypium hirsutum
  Clone ID: GOSHI-09MAY01-C1299_1
tcgttcacgcgtacgggcacgcgtccgcccacgcgtccgccaaaccctttgggcaattgggaaattagggtagagcaaaaatggcgagaacatcatccagcaaagaaaatgctcaagctttattccattctcttcgctctgcttatgctgccactccagtcaatctcaagatcattgatctgtatgtgggtttcgcagtcttcactgctctgatccaggtggtttacatggctagtgtgggatcatttcctttcaactcttttctttctggagtgctttcttgtgttgggactgctgtccttgctgtttgtcttcgcattcaggtgaacaaggaaaacaaggaattcaaggatctaccacctgagagagcttttgcagattttgttctttgcaacttggtgctccatttggtgatcatgaatttccttggataaaatcataatttccaggttttgccggactgcgtgttttctcagtttccggccgtgattcataattttagcatgaaatgaagttcttagatcatcattatgagcttgagcatacatccagaactgtagtaggaatttgatattttatctttggctaaagagtttcaagatcacttgatgagaaacaaaagacatttgagtacagatttgatcgttctgatttctttcatgattggattttagcaagcactttatattt

SEQ ID NO: 20621 - DNA, 397 bp, Gossypium hirsutum
  Clone ID: LIB3148-028-Q1-K1-C6
gtccgtgctgttttctacagtttccggccgtgattcataattttagcatgaaatgaagttcttagatgcagcattatgagcttgagcatagatccagaactgtagtaggaatttgatattttatctttggctaaaagagtttcaagatcacttgatgagaaacaaaagacatttgagtacaaaaaaaaaataataatagaggataaaaaataaaaataaaaaaaaaggaaaaaacaaaaatacaaaaagaagatgaatattcaaaaaaaagacaaagtttaaagaaaaaaaaaaattattattcaatttaaaataaaaaaagggggggctcttttaagggtcccatgttttttttcctgctttttcaagaataatattttttttatggggcccctaa

SEQ ID NO: 20622 - DNA, 337 bp, Gossypium hirsutum
  Clone ID: uC-gsronu33B121f03b1
ccctctctaccgcccacgcgtccgggaaattagggtagagctaaaatggcgagaacatcatccagcaaagaaaatgctcaagctttattccattctcttcgctctgcttatgctgccactccagtcaatctcaagatcattgatctgtatgtgggttccttctctcttctttttctccttccttctatctcatttccctcccctgctttatatacttctcttttttttctcctttttattttcttccttttatcccctcattccccgtattttcccttttttcttcttcttccctttctctcattatcccttctctcctcctacttttctcccctta

SEQ ID NO: 20623 - DNA, 325 bp, Gossypium hirsutum
  Clone ID: LIB3147-034-Q1-K1-F11
cccacgcgtccgcccacgcgtccggttctttgatcattattatgagcttgagcatacatcgagaactgtagtaggaatttgatattttatctttggctaaagagtttcaagataacttgatgagaaacaaaagacatttgagtgttaaaaaaaaaaaaaaaaaaaaaaaaaaaaaaaaaaaaaaaaaaaaaaaaaaaaaaaaaaaaaaaaaaaaataaaaacaaaaaaaaaaaaataattataaaaataaaaaaagggggggctggggtgggggttttaaagattcaaatttttttttcgcgtgatttaaaatttttattttttt

SEQ ID NO: 20624 - DNA, 595 bp, Gossypium hirsutum
  Clone ID: GOSHI-09MAY01-C1249_4
tctcgcgcctcttcaaacccaaaaccctgtatgcgccaaacatcccattggaaaagggaggtcagtgaaaggccatcaactaccaaaaaacgaagttcatataaatataaatactttgcgattcaaatctaaaagctcaggcaccaaattggcaatggcatctactgaacaacaagtcccatctggaattgcagctcctacggctgatgttgtgggtaatgccttcgttcatcaatactaccttatattacaccaatcccctgcactggttcaccgattttaccatgataacagcaaactcggtcgccctgaagaagatggcggcatgagtatcacaacaaccatgcaagccatcaatgagaagatactctcacttggttatggagaatttctggctgagataacaactgtagatgcacaagactcacacaatggtggagtaattgttcttgtgactgggcatttaactggaaaggacaaggtaaagcggaaattcactcagagtttctttttggcacctcaagacaagggctattttgttttaaatgatgtatttagatacattgatgaagccaaacatcaaagtggaagccag

SEQ ID NO: 20625 - DNA, 2002 bp, Gossypium hirsutum
  Clone ID: GOSHI-09MAY01-C1249_3
gtctgcggctcttcaacctcataaaaaaccctaaaacccgccaaacaaccccctctccacagaagaggggtgagagtgagagaaagattaatcagaacataagaagaagccatctgaattcaaatccaaataagggaaaatcataacctaatagtctcttctctctcacctctcttttctttttgttcttgcgataagaatctaaaagctcaggcttcaaatcggcaatggcatctgtagaacaacaagtccctgctggaattgctactcctacttccgatgttgtcggtaatgcctttgttcatcaatactaccttatcttacatcaatcccctgagttggttcaccggttttaccatgatagcagcaaacttggccgccccgaagaaaatggcggcatgagtattacaactactatgcaagccatcaatgagaagatactctcacttggttatggagaattcactgcagaaataacaactgtagacgcacaagactctcacaatggaggagtacttgttcttgtgactgggtatttaactggaaaggacaaagtgaagaggaaattcactcagagtttctttttggcacctcaagacaagggctatttcgttttaaatgatgtttttagatttgtcgatgatacgaaacatcaacctgggagccaggacccagttaatggttttgaggcttctcttactcctgagcaagaccattctcctgttccagagaatcacattgagcaaccggctgcattgcctgaagaatgtaatggaccagaagtgtacaattcttccgagaatggagatggctctattgaggaagaggaatcaccagtggctgaggttgttgatgagattcctgatgattcaaagatggtttctgattctaagcccgaaatggaggaactgccaaagaagtcatatgcgtctattttaaaggttttgaaagagaatgcagtccctgtatcggcacctacacatccccctgtgaagcctgcagttaagagccaggagcatcctcgaattgctgcaccaccttctgctccgatgcctgcctctgatgctcaggtttctagcaacaatgttactgaaaatgggaataatcaagatgcagaggctgagggtccctctatctatgtcaaaggtctgcccttgaatgctacgcctggcatgctggagaatgaatttaagaagtttggacctattaagagtggtggtattcaagttcgaagtcagaaggggttctgttttggttttgtggaatttgaaatggcaagttctgtgcaaagtgctatagaggcttcacctattaatgttggtggacgcaaagcagttgttgaagaaaagcggtctacctcccgagggaacaaagggcggtcttcatctgtttctggggctggatatagaaatgagggagcaagggggcgcggaaactatggtggtggaaggggttatagccggggtgaatttggaaacaggagcagcaatagaggaggatattccagccgtggaggtgatggatatcagaggggtgagcacatggggggtaacggtggccgtgtgagccgctctggtgaagcaacttttaatgcatcaacaaagaatgtggcacctagggtatctgcccctgcttgaagaaagtaatccagaggggagtagtcaaaagatagcatgcagtttgtttgtagtagtgatgtatcaaattgttgcgtagcatttagtggaaagaactgactgcttggcagaggagtgcatctgagatttgtttagagcggtcgtaattcgaagttccaacagtcggaatgggaaaaggaaaaacaaaaaaagagaaagttcaaacagtcagaggataaggtgaaagtgctatgctagtagaggaaaaaggaaagcactacactgtcgactaacggtaacatggatcattgtgtttgcagactaataatttaagagcttaaatattgcaattaattgtaattgcaacggtagagttctaaatataa

SEQ ID NO: 20626 - DNA, 1073 bp, Gossypium hirsutum
  Clone ID: GOSHI-09MAY01-C1249_2
gggggggtatagacgggttccaatttattatatggattttactcaatgaataaaagccatccccttgcccagtctggggacctaaagtaaattattaaatattctcttgttctcatctcatgtttacaaggcttcatcatataaaaattgtgtcttaacagagcagcaatggaggtaccctgtgaaagcccttagtaatctagaccgcccatcgccgcctgcggtggctgccccttccttgtcatcctttggaagttcagtaacaatggcttcaggtgtggtcatccgggcgcgcgcccgtccggcatctaccaaggctgttcttatgactttcaaaggatcgataattccagctttaaccatatctacatactcacccttggcagcatcataaccgaggtcgggattgtcctgttccagtagctttccaacaaccactgcaccctcaactccagcattagatgcaattgtatgtacaggcatcttaagagcattttggatgatctgaacaccgatcttctgatcaaagtttgcagtctccaggttttcaagttccttagaggcataaagaagtgcagcaccaccaccaggaacaattccttcctccacagcagctttcgtggcatttagggcatcagtaactctatccttcttttcaccaacttctgcttcacttgctcctccaatcttcaaaactgcaacgccaccagagagctttgcaagcctctcttgtaatttgtccttgtcgtaatcagaagtgcttgattcaattgctgatcttatctgatcgcatctttcttcaatggtagccttgtctccagcgccatcaaggataattgtgtcatcctttgatactgtaacctttttgcaagagccaagcacttccgctccaactttctcaatgtcaagaccaagttcttcagttattacctcgcccccggtaagagcagcaaggtcctgcaagccagctttcctattttcccccaaacctggggccttaatggcacacaccttgattccggcacgaagcttgttcagaatgagagttgcaagtgcttcactttcaagatctt

SEQ ID NO: 20627 - DNA, 1214 bp, Gossypium hirsutum
  Clone ID: GOSHI-09MAY01-C1249_1
tcagttcagttcagtctaagcaaagatcagccccccggacatcttctccacagcttgtgcattaggcacagtactcatcttctttcacaacttgctcactgtctcatcttcaatgcacgccacaagagcttgcaagccttctgtattgtcctgtcgtatcagaagtgctgattcaatgctgatctattgatcgcatcttcttcaatgtagccttgtctccagcgccatcaaggataattgtgtcatcctttgatactgtaacctttttgcaagagccaagcacttcccgctccaactttctcaatgtcaagaccaagttcttcagttattacctcgcccccggtaagagcagcaaggtcctgcaagccagctttcctattttccccaaaacctggggccttaatggcacacaccttgattccggcacgaagcttgttcagaatgagagttgcaagtgcttcactttcaagatcttcagcaacaattagtaaaggcctttgcttcgtcaaggacaattccaaaaatttcaccaaagcaggcaagttagagatctttttctcatggatcaaaataagtgggttctccaattcacatttctggttcttctggttggtgataaagtaaggggatatgtagcctctatcaagcttcattccctcaacaacctctaattcattgtacaaggttttcccatcagcaatggtaataacaccttctttgccaactttctccatggccttggcaatgagctcgccaatctccctttctccattagcagatattgttccaacctgtgcaatttcctcggacgtgctgatcatccgcgctctactcttcaagttggtcacaactgcatcaactgccattgtgattcctcgtctgaggtccatggcattcattccagccgccactgatttacatccttcaacaaatattgcgcgggtaaggactgttgcacaagtggtgccatcaccagcccccgcgtccgtggcattggcaacctgctttacaagggaagcaccaatgtttttcactctgtctttaaattcaatgctcttggctacagtaacaccatcttttgtcaccttaggagccccgaaactttgttccaaaacaacattacgcccttttggacccatggtgactttaacagcatcggctagctcttgaacgccgccaagcatcaatgccggacgcgtgggcggacgcgtggg

SEQ ID NO: 20628 - DNA, 508 bp, Gossypium hirsutum
  Clone ID: AW187849.1
attttactcaatgaataaaagccattccatgtatcaaattaaaaaaaaaaaaaaggggccatccccttgcccagtctggggacctaaagtaaaatattctcttgttctcatctcatgtatacaaggtttcatcatataaaaattgtcttaacagagcagcaatagaggatattccaaccgtggaggtgatggatatcaaaggggtgagcacatggggggtaatggtggccgtgtgagccgctctggtgaagcaacttttaatgcatcaacaaagaatgtggcaccaagggtatctgtccctgcttgaagaaagtaatccagaggggagtagtcaaacagtttgtttgtagtgtagtgatgtatcaaattgttgcgtagcatttagtggaaagaaccgactacttggcagaggagtgcatctgagatttgtttagggttttttttaaactcccccttttgtccatttttgtcattctataaatatataataaagagagatttttactga

SEQ ID NO: 20629 - DNA, 604 bp, Gossypium hirsutum
  Clone ID: LIB3543-053-Q1-K6-E3
cggtcttactctaaaaaaccctaacccgccaaccccccccaaatggggtgagagtgagagaaagataatcagaacaaaagaagaagcgatctgaattcaaatccaaataaagaaaatcataacctaatactctcttctctctcacctctcttttctttttgttcttgcgataagaatctaaaagctcaggcttcaaatcggcaatggcatctgtagaacaacaagtccctgctggaattgctactcctacttccgatgttgtcggtaatgcctttgttcatcaatactaccttatcttacatcaatcccctgagctggttcaccggttttaccatgatagcagcaaacttggccgccccgaagaaaatggcggcatgagtattacaactactatgcaagccatcaatgagaagatactctcacttggttatggagaattcactgcagaaataacaactgtagacgcacaagactctcacaatggaggagtacttgttcttgtgactgggtatttaactggaaaggacaaagtgaagaggaaattcactcagagtttctttttggcacctcaagacagggctatttcgttttaaatgatgttttt

SEQ ID NO: 20630 - DNA, 525 bp, Gossypium hirsutum
  Clone ID: LIB3825-034-Q6-N6-B6
cagtaaaaatctctccctattatatatttatagaatgacaaaatggacaaaaggggaagttgaaaaaaaaacctaaacaaatctcagatgcactcctctgccaagcagtcagttctttccactaaatgctacgcaacaatttgatacatcactactacaaacaaactgcatgctatcttttgactactcccctctggattactttcttcaagcaggggcagataccctaggtgccacattctttgttgatgcattaaaagttgcttcaccagagcggctcacacggccaccgttaccccccatgtgctcacccctctgatatccatcacctccacggctggaatatcctggctcttaactgcagacttcacaggggattgtgtaggtgctgatacagggactgcattctctttcaaaacctttaaaatagacgcatatgacttctttggcagttcctccatttcgggcttagaatcagaaaccatctttgaatcatcaggaatctcatcaacaacctcagccact

SEQ ID NO: 20631 - DNA, 475 bp, Gossypium hirsutum
  Clone ID: LIB3493-004-P1-M1-D6
cccgagggaacaaagggcggtcttcatctgtttctggggctggatatagaaatgagggagcaagggggcgcggaaactatggtggtggaaggggttatagccggggtgaatttggaaacaggagcagcaatagaggatattccaaccgtggaggtgatggatatcagaggggtgagcacatggggggtaatggtggccgtgtgagccgctctggtgaagcaacttttaatgcatcaacaaagaatgtggcaccaagggtatctgtccctgcttgaagaaagtaatccagaggggagtagtcaaacagtttgtttgtagtgtagtgatgtatcaaattgttgcgtagcatttagtggaaagaaccgactacttggcagaggagggcatctgagaattgttttagggttttttttaaacttccccttttgtccattttgtcattctataaatatataatagagagagatttttactg

SEQ ID NO: 20632 - DNA, 390 bp, Gossypium hirsutum
  Clone ID: LIB3149-037-Q1-K1-C1
ctgaacttccaaaggatgacaaggaaggggcagccaccgcaggcggcatgggcggtctagattagctaagggctttcacagggtacctccattgctgctctgttaagacaatttttatatgatgaaaccttgtaaacatgagatgagaacaagagaatattttactttaggtccccagactgggcaaggggatggccccttttttttttttttaatttgatacatggaatggcttttattccaaaaaaaaaaaatccaaaaaaaaaaaaaaaaaaaaaaaaaaaaaaaaaacaaagcccaataaacaaatataattaaacaaaccacatagatttatacacgcaaagaaaccaaataacatcaaaaaaaaaattgggggggggccctttt

SEQ ID NO: 20633 - DNA, 417 bp, Gossypium hirsutum
  Clone ID: GOSHI-09MAY01-C2959_7
cttagttcttccttttggtggaagtcttatctccctcctccgatcttctctctttttcctctcaatctctccgtctagggttttctcttagttctgactaagatttcaaaaagaaaaataggatgtcaagtgctttagagatgtcgctagacgacctcatcaagcgcagccgtaaatccggatccggaaactcccgcggtcgcggtcgcgggcgtggatccggacctttacctgcccgccgatttcctaaccgacgcgcaaatcgctctacaccgtatacgacagctaaggcgccggagacgtcgtggcaacacgatatgtattcggataagggagcggcgttcctaggacaagcaggtcgggcctccgcaatcgaaactggaacgaaactgtgcatgtctaatttacaatatggcg

SEQ ID NO: 20634 - DNA, 911 bp, Gossypium hirsutum
  Clone ID: GOSHI-09MAY01-C2959_3
tccgccccgcgtccgccccgcgtccggcggaaccctatctctgctccttacatctcttacttctactctctacttcaatttatatttctctagctctttttgttttgttttgtttttttttttgtgaatttctaactaaagacgaacaaaaaatgtcaagtgcattagagatgtcgctagacgacctgatcaagcgtaaccgtaagtccggatccggaaatccccgcggtcgaggccgtggatccggaccgggacccgcccgccgctttcctaaccgcggtgcaaaccgctcggcaccgtatacttctgctacggcgccggagacgacgtggcagcacgatatgtattcggataagggagcggcgttccaaggtcaagccggtcgggccgctgcaatagaaaccggaacgaagctctacgtctctaatttagattatggagtatctaacgacgacataaaggagttattttctgaggttggtgacctgaaacgatatgcaattcattatgattggacggggggatcgaagggaacccctgaacttgtcttttcacggaaagcacatcctatgaagatcggtgtaaaaatacaataggcctcaacttcatggaaagcccatgaaaatcgagattgtgggaacaaacattgctacccctgctgcaccaacagttgccaatgttgcttttggaagttctaatggagcccctataggtggccgtggcaggggtggaggattccgtaagcaacgtggtgtttctggaggccgtggctttggaagaggccgtggacattgaatgggccgttgagaaaaggtttcggcagaacatcttgacgctcatctataaaagtatcacactgaagcaatgcaaacaaattgaagcatttctcatgttctgttggttgcgtttta

SEQ ID NO: 20635 - DNA, 1038 bp, Gossypium hirsutum
  Clone ID: GOSHI-09MAY01-C2959_2
tgcgagtttttttttttcccgcgggcgaaaaccctatctatcctcctctgagcttcctttttccttttccctctttcgagtccgtgcttttttctagggtttgttctttgatctaactaacgcagattattaagaaaatgtcaagtgctttagagatgtcgctagacgatctcatcaagcgcagccgtaagtctggatccggaaactcccggggtcgaggccgtggatccacggcgggacccgcccgccgcattcctaaccgccgagcgaaccgctccgcaccctataccgctgctaaggcgccggagacgacgtggcagcacgatatgtattcggataagggagcagcgttgcaaggacaagcaggtcgggcctccgcaatagaaactgggacgaagctttatatctctaatttagattatggtgtttccaatgacgacatcaaggagttattttcggaggttggtgacctgaaacgatatgcgatccattatgataggagcgggagatcgaagggaaccgcagaagttgtcttttcacggcgagcagatgctatggctgcagtcaagagatacaacaatgttcagcttgatgggaagccgatgaaaatcgagattgtgggaacaaacattgctacccctgctgcaccttcagctgccaatggcgcctttggaagttcaaatggagcccctagaggtggccgtggcaggggtggaggattccgtaggcaacgtggtggtgctggaggccgtggctttggaagaggccgtggacagggaaggggccgtggagaaaaggtttcggcagaagatcttgacgctgatctagagaagtatcacactgaagcaatgcagacaaattgaagcatttctcatgttctgttggttgggttttaagtcgtcttttctactatggacattatgtgcttgatcctcgactattttgtgtatctctaccaaattcttactctttagagcaactagtcttatggagagaactattagtgtcttgagttttatggagttggagcttttactg

SEQ ID NO: 20636 - DNA, 2024 bp, Gossypium hirsutum
  Clone ID: GOSHI-09MAY01-C2959_1
ttctacttctgttacgatggcggctactaccttctctccttccttctccactccctcggtcaattcttcctccagagcccacaaaactttaaccaaccctaatctaggctttttggcctcagtttcgagatccttgaggtctctcaaagcaaccaggctgactactgataatgcttgtggctcagctatggcctctcgtatggtctccgttcctgccgtccagacacacatatctctcgattttgagacctttgtcttcaagaaggagaaagtctccctcgctggtcaggacgagtacattgtgagaggaggaagagatttgtttaagttgctgcctgacgctttcaaagggattaagcagattggtgttattggttggggttcgcagggacccgctcaagctcaaaatttaagggattctcttgctgatgcaaaatctgatatcattgtcaaggttggactcaggaagggttctcgttcttttgatgaagctcgtgctgctgggttctctgaagagaatggcactttgggtgatatatgggaaactatttctggaagtgatcttgtgttactgttaatttctgatgctgcacaggcagacaattatgagaagatattctcctacatgaaaccaaatagcatccttgggctttcccatggctttcttcttggacacttgcaatcaatgggacttgatttcccaaagaacgttagtgtaattgctgtgtgtcctaaaggaatgggtccatctgtaaggagactttatgttcaaggcaaagagatcaacggtgctggaatcaattctagttttggagtccatcaggactttgatggtagagctactgatgttgccttggggtggtcggttgcccttggatcacctttcacctttgttactactttagaacaggagtacaagagtgacatattcggggagcggggcattcttctcggtgctgttcatggaattgtggagtgtttgtttagaagatacaccgaaaacggaatgagcgaggatcttgcttacaaaaacactgttgaatgcattacaggaattatatcaaagaccatctcaacaaagggcatcttggctgtgtacaactccttgtccgaagagggaaaaagggaattcgagactgcctatagcgcatcttattacccgtgcatggatatactgtatgagtgctatgaagatgtagccagcggaagtgaaatccgcagtgttgtattggctgggcaacggttttatgagaaggatggtctccctgcttttccaatgggaaaaattgatcagacacgcatgtggaaagttggtgagcgagtccaaaaggcacgcccatctggtgatttagggccattgtatccttttactgccggtgtctatgtggccttgatgatggctcagatcgagatattgaggaagaaaggacactcgtactctgagatcatcaacgagagtgtgatagaggcagtggattccttaaatccatttatgcatgctcgtggagtttccttcatggttgataactgctctaccacagcacgattgggatccaggaaatgggccccacggtttgattacatcctaacccaacaggctttggtggctgtcgacaagggcactcccatcaaccaagatcttctcagcaacttcttgtcagacccagtgcatggtgccatcgaagtctgtgctcaattgaggccgacggttgacatttcagtgacccccgatgctgattttgtgcgaccggagttgcgtcaatctggcaattgagtcggtagaatctcagaactggaatgagcaactatatttatagtgtgtttgagccagaacttgctcgtcatgtatgtagtgatgtagtttttgcaatgtcttggggctggctgtctttttatgtttcatttttaaatgttttatataattgaaggaccaaaaccatcagctgttttgagataatgagacttaataatgcatatctagcttgtttttgggttttcgaaaaacacaaaaaaaaaaaaaaaaa

SEQ ID NO: 20637 - DNA, 468 bp, Gossypium hirsutum
  Clone ID: uC-gsflnu33B026f09b1
acggagggagcgggaacaagctctggaagtgatctcgtgttactgttaatttcagctgctgcacatgcggacatatactactagagattctcatactggagaccataaggcatactgcagctctggcatgggtcctgtcatgtacgctcgctgtcaaagggacttgattttccaaagaacattagtgtaattgctgtgtgccccaaaggaatgggtccatctgtaaggagactctatgtccaaggcagggagatcaatggcgctggaatcaattctagttttggagtccatcaggatgctgatggtagagctactgatgttgccttagggtggacggtggcccttggatcacctttcacgtttgctactactttagagcaggaatacaagagtgacatctctggggagcggagcattcttcttggtgctgttcatggacttgtggagactatagttagaagatacact

SEQ ID NO: 20638 - DNA, 432 bp, Gossypium hirsutum
  Clone ID: LIB3165-048-Q1-K1-F2
cccacgcgtccgttcttcacgtccattttcagatcctttgagtcctctcattccaaccccactgactactcataattgctgcggctcagctatggcctctcaaacccacatctctctcgatttccacacttgtgtcttcaagaaagagaaagtctccctcgctggtcacctcgagtacattgtgagaggaggaagagatttgtttacgttgctgcctgatgctttcaaagggattaagcagattggtgttattggttggggctcccagggacctgctcaagctcaaaatttaagggattctcttgctgatgcaaaatctaatatcattgtcaaggttggactcaggaagggttctcctttttttgccgaagctcgcgctgctgggttctctgaagaaaatggcccttttgggtgatatgtgggaaactattt

SEQ ID NO: 20639 - DNA, 428 bp, Gossypium hirsutum
  Clone ID: uC-gsflmaxxa009g07b1
gtaccctatctctgctccttacatctcttacttctaccctgtacttcaatttatatttctcaagctctttttttttgtgaatttctaactaaagacgaacaaaaaaaaatgtcaagtgcattagagatgtcgctagacgacctgatcatgcgtaaccaccagttctgttccggaaatccccgcggtcgacgcctttgatacggactgtgacctaaccgttgctctactttacgaggaggaaaccagtaggacatttttgggaggggggcattcctcttggagctgttcatggaattgtggagtctttgtttagaagatacactgaaaatggaatgagtgaaggatcttgcttacaaaaacactgttgaatgcattacaggaattatatcaaagaccatctcacacagggcatgttggctgtatacaac

SEQ ID NO: 20640 - DNA, 404 bp, Gossypium hirsutum
  Clone ID: uC-gsflmaxxa009g02b1
cttcttccatcctcactccacatttcactctctttttcaactttcccttcttctctttgttttaaagaggggcttgagttttagccaaagaaaactacatggctaaacttgtggctagtgccttatagactctgatagacaacctgatcaagcataaccggaagttcggatccggaaatccccgcggtcgaggccgtggatccggaccgggacccgcccgccgctttcctaaccgcggaacaaaccgctcggcaccgtataccgttgctacggcgcctgagacgacgtggcagcacgatatgtattcggataagggaggagcgctccaaggtcaaagccgtcgggccgcttcaataagaaccggaacgaagctctacgtctctaatttagattatggagtatct

SEQ ID NO: 20641 - DNA, 740 bp, Gossypium hirsutum
  Clone ID: GOSHI-09MAY01-C102972_1
ggccttgaaaagaagatgccaccatggcggtgagcaattcaatgatgcttgatgcacatggtgattcaaagaaacaccaaccattggaatggttaatgcaccaaatgtgacttcaagttctgtaaagcaagatccccatgggagggacaggatggtatctctcaataatgaatccagggaaatggatatccctgatgtcgagtcaattgttgatccgcacagtattgttcgtgctacaagattccccaacccttactatcaaaaattaggagagcaagaagatgatgcaaaaagaatcaataaacggggaaagttttgcagaaaaatagcctcccaagacaaggtaagggaatcaacctgcattaaagaaagatgatgtcaaaatgaaatgctcaggtttatgtcatttgcttttagctatccagcttgatcccttttgcaggctatagatgtaaaacaacatgccactgctgttaatcttcctattattatggaatctaacggtaagaggaaaacagctgaacatagctacagacatatgagactgcagatgcatttgaatgagttatctgactgtgataaaaaaagctttcttcatgtgcagatataagccttcattcaaccataaatctagttaatccccagtttattttgtcaatgcacttttagggtgagtattggttaatttctggcatttatgaattaatttcaataccactttgggcctaggcatatatttt

SEQ ID NO: 20642 - DNA, 325 bp, Gossypium hirsutum
  Clone ID: GOSHI-09MAY01-C2919_1
ctgccgccgccgctgctgctatcatcactaaacctgctgcagcaatggcccctggttcaggtacagttggcagaggtgaaagcttgaagaaggttggctaaagggggggacttaattagttggcaaaaaataacaaattgggaagttggaaaagctgctcagaccaacatcatattatctgatctgtaatttccaatgtatattttttttatgaaaccagaaaattattgtttaattaatatttattcttaactagatgtttcatagcattttttcattatcttttatctacatctaagctggtcttatggacttttaggaagag

SEQ ID NO: 20643 - DNA, 508 bp, Gossypium hirsutum
  Clone ID: GOSHI-09MAY01-C2909_6
ctcatggaccaaaactttaccatcttgaggttgctgttggcccattcattgctggtgtaaaagataagtgccataatcatgtttgatgttactgcccggttgacatacaagaatgttcctacatggcatcgggatctttgcagagcagagtgtgtgagaatattcctattgtcctatgtggaaacaaggtcgatgcaaagaacacgcagggcaaggctaagcacgtcacactccacaggcagaagagtcggcgatactatgaaatttcggccaagagcaactactgtgtcgagaagcctttcttgtaaagaagggaaccttgctaggaagcttgcagggtaatatataacattgtatttgttgtgcaattaatgttttaatgctgatgcctcgatcaatgtctaaaattggtgttgttttgatgattctagtgatcctaatctccacttcgtggagtctcctgcacttgctcctccggaagtacacattgacttggctgcacagcaac

SEQ ID NO: 20644 - DNA, 1165 bp, Gossypium hirsutum
  Clone ID: GOSHI-09MAY01-C2909_2
cccacgcgtccgccccccccgccccgttccattcctctcgattctacttaacgcaaatagttcgagtttcgtaatcaatggctttaccgaaccaacagactgttgattatccgagctttaagctcgttatcgtcggcgatggaggcactggaaagaccacatttgtgaagaggcatctgactggagagtttgaaaagaaatatgagccaacgatcggtgtggaggttcaccctttggacttcttcactaactgtgggaaaatccgattctactgctgggatactgctggacaggaaaagtttggtggtcttcgagatggttactatatccatgggcaatgtgctataattatgtttgacgttactgcccgtttgacatacaagaatgttcctacctggcaccgtgatctttgcagggtgtgcgagaatattcctattgttctatgtggtaacaaggttgatgttaagaacaggcaggttaaggcaaagcaggttacattccacaggaagaagaatctgcaatactatgaaatctcagccaagagcaactacaattttgagaagcctttcttgtaccttgcccggaagcttgcaggtgatcctaatcttcactttgtggagtcacctgctcttgctcctcctgaagtacacatcgacttggctgcacagcaacaacatgaagttgagcttgcagcagcagctagccaaccttttccagatgatgatgatgatgcatttgagtagagaagagaataccaatattagctttttcactgccactgcctgaagtttggggtctaaaaaaacaatttcaatctccttttttcattaaaattttcgaaaaaattatatgggtgcagggtgcaggcagagtctggtgtttgtcagctatatttgagactacagtttttaccatttagaccagtttcttttgtctttgtttttttcttttgggttattggatttgtgttcccttcagcatggattttgcttttatagtaaaatccctttcctttataagaaccaacaaaaagaattccctattaaagaatgtcccctttccttaaaatgctacatcgattttgtcttgttgtcgtcgcggccgttcatcgtttgggcctgttataatacacattcattaaataaaaatatcgaatttaacaatt

SEQ ID NO: 20645 - DNA, 1164 bp, Gossypium hirsutum
  Clone ID: GOSHI-09MAY01-C2909_1
cgctcttataaaccctgtggctatcgccggctcccaaccccccccgccccgattcgctctgctttcgccaaacaaacgcaagatttgtagattcatttctcttgtctatctgcctccgaatcaatggctttgccgaaccagcaaactgttgattatccgagcttcaagctcgttatcgtcggcgatggaggaactggaaaaactaccttcgtgaagaggcatctaactggagagtttgaaaagaaatacgagccaaccattggtgtggaggttcatcccttggacttcttcactaactgtggcaaaatccgtttctactgctgggatactgctggacaggagaagttcggtggtctcagagatggttactacatccatgggcaatgcgccataattatgtttgatgttactgcccggttgacatacaagaatgttccaacatggcatcgggatctttgcagagtgtgtgagaatattcctattgttctatgtggaaacaaggttgatgtaaagaacaggcaggttaaggcaaagcaagtcacattccacaggaagaagaatctgcaatactatgaaatttcggccaagagcaactacaattttgagaagcctttcttgtaccttgccaggaagcttgcaggtgatcctaatcttcacttcgtggagtctcctgcacttgctcctcctgaagtacacattgacttggctgcacagcaacagcatgaggctgagcttgcagcagcagccagtcagccccttccagatgatgatgatgatgcatttgaatagagaggggtttgagttgccagagagccatcaacaatttctgctgctttttcattttcactcccgtctggatgtgtgctctcattttcgtatttaaattgcaagtagggaggagtgacggaggatgaatttgtagtgtaggatttttcgaatataattgttgttatggtggatctttggtcgtgttttcgacttttgctttttgttgtctatggattttgctgcctttagtgaaatccttgtgtgatagttattctatatgtttttgaatatgaaattcttgacaagaatattggaattcaaataatatcccatttgctcaataatatatttttaatcattttcattcggtaaaaaaaaaaaaagtcgacgcggccg

SEQ ID NO: 20646 - DNA, 570 bp, Gossypium hirsutum
  Clone ID: LIB3825-031-Q6-K6-F12
tcgtgttgcagtatccatgggcaatgtgctataattatgtttgacgttactgcccgtttgacatacaagaatgttcctacctggcaccgtgatctttgcaggtgtgttgaagttgtcttattgtttatggtttcgtttttggcttttgtggatgaacttcacgttaactatgttgtgtcaaatgcagggtgtgcgagaatattcctattgttctatgtggtaacaaggttgatgttaagaacaggcaggttaaggcaaagcaggttacattccacaggaagaagaatctgcaatactatgaaatctcagccaagagcaactacaattttgagaagcctttcttgtaccttgcccggaagcttgcaggtgatcctaatcttcactttgtggagtcacctgctcttgctcctcctgaagtacacatcgacttggctgcacagcaacaacatgaagctgagcttgcagcagcagctagccaacctcttccagatgatgatgatgatgcatttgagtagagaagagaataacaatattagctttttcactgccactgcctgaagtttggggtct

SEQ ID NO: 20647 - DNA, 343 bp, Gossypium hirsutum
  Clone ID: uC-gsflnu33B134h11b1
tgctggcagccccttccagatgatgatgatgatgcatttgtatagagaggggtttgagttgccagagagccatcaacaatttctgctgctttttcattttcactcccgtctgaatgtgtgctctcattttcgtatttaaattgcaagtagggaggagtgacggaggatgaatttgtagtgtaggattttacgaatctaattgatgtaattgccgatactccacgatcctatctcactcctcctattgagcgctccctcttcttccacctttgcaccaagactctgattctacacgctcctctctaccacttcttaccaccttttccttaaaactttttttttc

SEQ ID NO: 20648 - DNA, 368 bp, Gossypium hirsutum
  Clone ID: uC-gsronu33B125b11b1
tattagagaggggtttgagttgccagagaaccatcaacaatttctgctgctttttcattttcactcctgtctggatgtgtgctctctcattttcgtatttaaattgcaagtagggaggagtgacggaggatgaatttgtagtgtaggattttacgaatataattgttgttatggtggatctttggtcgtgttttcgacttttgctttttgttgttatgggttttgctgcctttagtgaaatctttatgttatagttactctatatgtttttgaatatgaaattcttgagaagaatattggaattcaaaaaaaaaaacctaacggagatacactctctagaccaaaaaattttattcaaaaactcacca

SEQ ID NO: 20649 - DNA, 339 bp, Gossypium hirsutum
  Clone ID: LIB3582-009-P1-K1-G3
cccacgcgtccgcccacgcgtccgcccacgcgtccgcccacgcgtccgcgctctactccgatttgctctgctttcgccaaacaaacgcaagatttgtagattcatttctcttgtctatctgcctccgtatcaatggctttgccaaaccagcaaactgtagattatccgagcttcaagctcgttatcgtcggcgatggaggaactggaaaaactaccttcgtgaagaggcatctaactggagagtttgaaaagaaatacgagccaaccattggtgtggaggttcatcccttggacttcttcactaactgtggcaaaatccgtttctactgctgggatact

SEQ ID NO: 20650 - DNA, 310 bp, Gossypium hirsutum
  Clone ID: LIB3148-059-Q1-K1-F9
ctagttctagatcgcgatcggcgccctttttttttttttttttttttttttttttttttgggaaatccaatattcttgtcaagaatttcatattcaaaaacatattgaataactttcacacaaggattttactcaaggcagcaaaatccatagacataataagcaaaagtcgaaaacaccaccaaagatccaccataacaattatattcgaaaattcccatcacttgaattgccctatctgtttgtaaatatgcaaaatgttttctgcataaaaaaactttcttttggacttttatgaaagggtaatttt

SEQ ID NO: 20651 - DNA, 296 bp, Gossypium hirsutum
  Clone ID: uC-gsronu33B057f08b1
tctctttaaaaaaattttcgtatttaaatagcaagtagggaggagtgacagaggatgagtttgtagtgtaggaattttcgaatataattgtcgttatggtggatctttggtggtgttcccgactttcgcttattgctgtctatggactttgcttgcctttagtaaaatccttgtgcgatagttaattcctatatgtctttgactatgaaattcttgactagaatatcggattcctcacacctttcatctcctttcctaccttccttcctctccttcatctctattggccgtccgct

SEQ ID NO: 20652 - DNA, 221 bp, Gossypium hirsutum
  unsure (1)..(221): unsure at all n locations
  Clone ID: LIB3147-017-Q1-K1-G5
cccaaaaaaattttcntttccgcctattttatttaaggaggcgcggcataaaataattttgtattgtaagaattttccaatataattgttgttatggtggatctttggtggtgttttccacttttgcttattgatgtctatggattttgctgcctttagtaaaatccttgtgtgatagttaattctatatgtttttgaatatgaaattcttgacaagaata

SEQ ID NO: 20653 - DNA, 650 bp, Gossypium hirsutum
  Clone ID: GOSHI-09MAY01-C2939_1
attctgctttatggaaaggctatggctttgtaaggcctcggagatggaacgagttaggccatttaaaattggggacagcgtgaagatacgggtagggcttgtgaccccaagatggggttggggaatggagactcacgccagtaaagggcaggtggttggggttgatgcaaatggaaaactaaggataaagtttcagtggagagaagggagaccatggataggagatcctgctgatgttattcttgatgacagctcgtctggcacagccaatacctcatgaatcacaccttgaactgtgttttcagttcattcctgaagctcggggttactttgctcgaaactctatcccgacctgaccatggagcaattctattacaggattatttgtatttattaagtacagggatggacatggagcatgaggaactgacttgcctcactgttaattatagtaaatacaaagagctgcccaaggagaaaaacgaaattggctatagaccatgtatctcacagatagtgatgatagattataagctggtcatatattatttagataagagatgaatatggtcatttatatgtaactttgtacaaattggacatcacttaattaattattaattaagtattgagtcttttttagctatttc

SEQ ID NO: 20654 - DNA, 572 bp, Gossypium hirsutum
  Clone ID: GOSHI-09MAY01-C2899_1
cccacgcgtccggcttgtcagcaattagagaatggaagtgatattgatgatgaggatgatactgaacatgatgaaattcttatggatgcagtttcggaccttttacctgcatttgctaagtcgatgggtgatcactttgctcctatatttgcaaaactatttgaacctttgatgaaatttgcgaaagcttcacgtcctccaccagatcggactatggtggttgcttgtcttgctgaagttgcacaggacatgggtgctccaattgcaagctatattgatggactgatgcccctagtgcttaaagagttagcttcgccatctgcaacaaatagaaggaatgctgcattttgtgctggagagctggccaaaaatggaggagagacaactttgaaatattacaatgatatattgcgtgggctttacccattatttggggaatcaaagccagatgatgctgtcagggataatgcagctggtgctgttgcaaggatgataatggtgcatccacaatccatccctttgaaccaggttcttcctgtttttctgagagttcttccattaaaagaagatca

SEQ ID NO: 20655 - DNA, 554 bp, Gossypium hirsutum
  Clone ID: GOSHI-09MAY01-C2889_5
gcgcccacgcgtccggtgtcactgcccttctctttgacggctcaaactctgataaacaaaaggaaaaatcggtggatccagacgctgtagccaaggcttttgtcgatcactactactcgacattcgatgcgaaccgggccggtttagccaatctctaccaggaacgttccatgttgacctttgaaggtcaaaagatccaaggctctcagagcattgtcgctaagctaaccagccttcctttccagcagtgcaagcacaatatttccaccgtcgattgccagccatctggcgccggcggcgtcctcgtcttcgtctctggaacactacaactcgccggcgaacaacatgctctcaagtttagccagatgtttcatttgatgccaacaccacaaggaagcttttatgtgttgaatgacatattcaggttaaactacgcgtgaagagacagaaatcactacgattaatcaggtgatgggaatacaaatctcaaggatttataaatctggttatcttttagacattttaaatgaaaaatggaaatattttttggttta

SEQ ID NO: 20656 - DNA, 534 bp, Gossypium hirsutum
  Clone ID: GOSHI-09MAY01-C2889_4
tagacgctccacccgtcccgttcgtcgagctctactacacgacgttcgatgcgaaccgggccggtctagccaatctctaccaggacggttcaatgttgaccttcgagggtcaaaagatccaaggctctcagagcatcgtcgctaagctcaccagccttcctttccagcagtgtcagcacagcatcaccaccgtcgattgtcagccctccggcgctggcggcatgctggttttcgtcagtggtaccctccaactcgccggcgaacagcatgctctcaagttcagccagatgtttcatttgatgccaacaccgcagggaagcttctacgtgttgaatgacatattcaggttgaactatgcataaagatgcaatccaaggatacaaaacaaacaatgttttggctctcagctccctgttcacgcttaggcgttctcaaatgtgaaaaccggaaaatgctttttatggtttaatcatgagttccatgtgccttaaaaaatttaaagctttatttgatgcatgattggcggggttagtg

SEQ ID NO: 20657 - DNA, 539 bp, Gossypium hirsutum
  Clone ID: GOSHI-09MAY01-C2889_3
tttctttctcctcttctttctttttttcggatcttctttctccctctctccaaagttcttcaattctttccgtctccttttcgctcgctctctggtaatttcatcttttagaacagggccggtctagccaatctctaccaggacggtttaatgttgaccttcgagggtcaaaagatccaaggctctcagagcatcgtcgctaaactcatcagccttcctttccagcggtgttagcacagcatcaccactgtcgattgtcagccctccagcgttggcggcatgctggttttcgtcagtggtaccctccaactcgtcagtggtttcaattcgtaggatgagaaccggtatagtgcaggaagaggagtgcacaaaaatctgaaacgtgcagagaaagctcgcattctagttagcaaattaccatgtaagcttctagtagtaatcttacatcttgaagtaggtttctgtgacatattaacttaatctcctttgttaaatagaaaacatgatttattgcaatgcaagatttagttgatttgctt

SEQ ID NO: 20658 - DNA, 795 bp, Gossypium hirsutum
  Clone ID: GOSHI-09MAY01-C2889_2
ttttaggataaccctctctcaaatcttggctcgccagtcgcctctctttcttcttctgcttcttcttcttcattctgttggctgctgctgctgctttggtggcgtgatttagaagccacaactcaatttcatataaagaaaaaaaaaaggtgagatggatccagacgcagtagccaaggccttcgtcgagcactactactccacattcgatgccaaccgggccggtttagccaatctctaccaggaaggttccatgttgaccttcgaaggtcaaaagatccagggctctcagagcatcgtcgctaagctcaccagccttcctttccagcagtgcaagcacaacatcaccaccgtcgattgccagccttccggctccggcggcatgctcgtcttcgtcagcggtaacctccaactcgctggcgagcagcatgctctcaagtttagccagatgtttcatttgatgccaacgccacagggaagcttttatgtgttgaatgacatattcaggttgaactacgcgtgaagacgatgattaatcaagggatgggaatacaatgcctgaggatttaaaacacgttttgcctattttaggctctaatgaaatttggaattttgtttttttgggggatgattatgtttcgtgttccattatggtttccatatctctccatatttcagggactgattggttcagttggtcaaagacgctatcctgtgaattggatgttttgattgagacttatttcagttattttcaaatcaaatgaatcattgatatgtatattccattgtgtg

SEQ ID NO: 20659 - DNA, 774 bp, Gossypium hirsutum
  Clone ID: GOSHI-09MAY01-C2889_1
tccgccccgcgtccgccccgcgtccggcccgcgtgcgccccgcgtccgccaccccccagaaatcccacctggaaactcttcttcttttttccccattttatttttcccaaaccatttctcccctaccccgattccctttatttttccccccaatttccccaaatcggcagccctctacaggccatacctactaattttttctttcttcttcctgattttttattttctcagttgtggcagtggttttattttttatttgcagtttgtgtaatgaattgtaaatttagggttccttagcaccagaacggttcaatgttgaccttcgagagtcaaaagattcaaggctctcagagcattgtcgctaagctcaccacccttctttccagcagtgtcagcacagcatcaccaccgtcgattgttagccctctggcgctggcggcatgctggttttcgtcaatggtaccctccaacttgccggcgaacaacatgctctgaagttcagccaagtaattatattttctcttacatctttgttcatttctatttttcgtggttttttaaaagaagctctagggtttttatgcgtaggtaggtgatcaatctatgacttaatttatgtgtcctgttgatttcatcgatcatatcgatggtcttaatttcactatgggatttgctagagaactgagtttttcatttggtaaaaattgaggctcaggattgaatcagtagagtcgggatcttaacaattcaattaagtgtgattttgttgtttat

SEQ ID NO: 20660 - DNA, 631 bp, Gossypium hirsutum
  unsure (1)..(631): unsure at all n locations
  Clone ID: AI727315.1
caaatcttggctcgccagtcgcctctctttctccttcttcttcttcattctgttggctgctgctgctgctttggtggcgtgatttagaagccacaactcaatttcatataaagaaaaaaaaagtgagatggatccagacgcagtagccaaggccttcgtcgagcactactactccacattcgatgccaaccgggccggtttagccaatctctaccaggaaggttccatgttgaccttcgaaggtcaaaagatccagggctctcagagcatcgtcgttaaactcaccagccttcctttccagcagtgcaagcacaacatcaccaccgtcgattgccagccttccggctccggcggcatgctcgtcttcgtcagcggtaacctccaactcgttggcgagcagcatgctctcaagttcagccagaggtcctctcagtgctcactctgaacaattatctgccatctcccttgatgttgtttcttgcgactctactggatataaaagaaaatccactaccacatgccccttcctcacctggagacattgatgatntccttatggtttatgtctttcattcacgtggagcanacttttatatgtgtttcatctatgttgatagttaaccaatgtttc

SEQ ID NO: 20661 - DNA, 468 bp, Gossypium hirsutum
  Clone ID: uC-gsflnu33B036b07b1
attattcctccgatgatgacggccacaactacgataaacatatcgatgattggacgggcgaacacggtcgatgcactgctcttattgaacgctgcttcgatacaaaggaagcggactaatccgcacaatgcaatgtctaccaggaacatcccatgatgtccaagggaggtcaaaagatccccggctgatatggcacctttgttactccaacgcccaattgcttgcgcagtagtgagcgcaaaagactcaccggctttaggcagccatgagacgctggtcgctctcttataatcttgcatggagcacatcgacctggcggtgtccaacatgctctcaagtatagccagatgttttattcgatgccaacaccacaaggaagcttttatgtgttgaatgacatattcaggttaaactaacggggggccgaaacagatatcactacaattaatcaggcgaagggaatacaaa

SEQ ID NO: 20662 - DNA, 441 bp, Gossypium hirsutum
  Clone ID: uC-gsflnu33B129f09b1
tcgtttagcccttcgctggggacggctaatactctgacgaacataactaataaaaggtggatgcacacactgtctccctggctatagtaggtcactactacttcacattcgatgctaaccactgctgtatagccaagctagagcagaaacgaatcatgaagagcttagtgggtaaaaagatcctagggtgtcaaagtaatgtcggtaatataacgagcctgcatttacagcagtgcaagcgcagtattaccaccgttgattgccagccagcggtcgctggcggcgatctagtattcgtatctagacactacaactctgtgtggaacaacatgctctcaagtttagccagatgattgatttgatgccaacaacacaaggaagctactatgtgttgaatgacatattcaggctaatctactcgtgaagaaacagaaatcacta

SEQ ID NO: 20663 - DNA, 568 bp, Gossypium hirsutum
  Clone ID: GOSHI-09MAY01-C2869_1
cccacgcgtccgattctgatcattgaagcttttcaaacttcaatagtccatggcgttgtcaaattccctttcctttccttcttctaacgccgtcgacctccgacgttccacggttcccgattccggcatcgccccttttttcacttcttttgactgttctagattccgctgcaacttttctcagtgcggcattaggcccaatttctctgcaagaaaacgcattgtttctgctgctaacaatggtttcaacacggttaattcaacttcattggggactggccaagataaagatgattatattccaatgccaattgttttgattgatcaagattcagattcagaagcaacagttgtgcagctgagttttggagatcgtttgggtgctctcattgacacgatgagagcattgaaagatttgggattggatgttgcaaagggaactgttgccactgaaggaccagtcaaacaaacaaaatttttcatcacacgattagacaatgggcgcaaagttgaagatcctgatctgttggagagaattcgactcaccattataaacaatcttttgaag

SEQ ID NO: 20664 - DNA, 334 bp, Gossypium hirsutum
  Clone ID: LIB3083-062-Q1-L1-A10
cgacgttccacggttccccattcccaccttccccccttgggtcaattcctttgaactctttctaaaattcccgctgccactttttttcagtgcggcattaaccccactttctctgcaagaaaacgcattgtttctgctgctaacaatggtttcaacacggttaattcaacttcattggggactggccaagatgaagatgattatattccaatgccaattgttttgattgatcaagattcagattcataagcaacagttgtgcagctgagttttggagatcgtttgggtgctctcattgacacgatgagagcattgaaagaattgggattggatg

SEQ ID NO: 20665 - DNA, 567 bp, Gossypium hirsutum
  Clone ID: GOSHI-09MAY01-C2599_2
cccggactggcccggtcgacccacgccgacttacgcgtttggttggagcatgtgttggatgaacacaacgcgaggagagaaggggcggaagattatgttgcgaaggacatggcggatgtgcttttgcagctttctgaggaccccaatcttgaggtcaagcttgaaaggcatggtgttaaggcatttactcaggacatgatagctggtggaacagagagttcagccgtgactgtagaatgggcaatctcggagctattgaaaaaacccgaaattttggcaaaggccacggaagaactcgacatggtgatcggcagggagcgatgggtcgaagagaaggatgttgtgagcctaccttacatcgactcgatagccaaggaaacaatgcggttgcacccggtggcaccaatgctagtgcctcgcgtgggcgcgccaagactgtggagtagccggttatgacattcccagggcaactcgagcctttgttaacgtttggacaattgggagagaccctatcctttgggacaaccccaatgaattttggcccgacaggttcatgggaatgagtat

SEQ ID NO: 20666 - DNA, 999 bp, Gossypium hirsutum
  Clone ID: GOSHI-09MAY01-C2599_1
gaacgacccacgcgtgcgaatacacggaggggagtggcgagaacgagattgtgacaccaaatgagttcaaggagatggtggacgagttgttcttgcttaacggggtgctagatatcggtgactcgatcccttggctcactttcctagatttgcagggctatataaagagaatgaaggcattgagcaaaaaattcgacaggttcttggagcatgtgttggatgaacacaacgccaggagagaaggggcggaagattatgttgcgaaggacatggtggatgtgcttttgcagctttctgaggatcccaatcttgaggtcaagcttgaaaggcatggtgttaaggcctttactcaggacatcatagctgctggaacggagagttcagccgtgactgtagaatgggcaatctcggagctattgagaaagccagaaatattggccaaagccatggaagagctagacaaggtaatcggcagggaacaatgggttgaagagaaggacattgggaacctaccctacatcaagtcaattgcaaaagaggcaatgcgtttacacccagtggcaccaatgttggtgcctcacgttgctagccaagactgtgaaatagctgattatgacattcccaaaggcactagagctcttgtaaacatatggacaatcgggagagaccctaatctttgggacaagcccaatgaattttggccagacagattcattgggaagagtattgatgtaaaaggtcatgattttgagttgttgccattcggtgccggaagaagaatgtgtcccggatatcccctaggtattaaggtcattcaagcaagtttagctaatgttttacatggatttacttggaagttgcccaataataccactaagaagatctcaatatggaggaaatattcgggctttccacccctaaaaagtacccacttgaggcaattgcagagcctaggctcccacttcacatgtactcttagtgattttagtcactgagatt

SEQ ID NO: 20667 - DNA, 739 bp, Gossypium hirsutum
  Clone ID: GOSHI-09MAY01-C102562_1
tatgccctgccattcgtggggggtgggcgtggtacctaaaatttatttattattgataatgcgtcaccttcaataatgagttttggccattgcatgtcgatgccaatttgggttgctgtcctacaagcgattgcttttttttttaaagctgataccacttgttggtgggggggggagtatgataagagaactgtaccttcactatctttggctacgatccacactgccgattgacaaagatttccatcatatgctgcgttgaagtttatcttctcgaactgaccagatctgctcgccttctcatgtattctcttgtttctttctccccaaattgcccatagagcacaacaaaaaatcctacactgggatggagtagtctgttcgaaaacccaggacactcacggaataggtggttcatggtttctgcttcttttccacatcgagggcagattgtattgttagatagctttctataatgtatattaacccctataactagataattccacgatattttccaagctgtaattctgatcttacaaggtagactaaatagccaaagttttttgtaaaatttcctatagtcggattgtaaagcataagctctaggatctatttcaatgccctgtaatagtttttaggcactatgtactgtgaattctcccgaggactcctcactccaggccagaatatcgtcatggggttttttgctagcagaatgcacagaatcttcgcagct

SEQ ID NO: 20668 - DNA, 1003 bp, Gossypium hirsutum
  Clone ID: GOSHI-09MAY01-C2519_1
gcgtgggcttaacctgagggaggacagagttcagagagcaacagtctcccccaaattgaagggaaatatgttcaatgagttcctgagcttatctcccagtttcagtttccatggtcagcaaggagtgaaactgcaacctctggtatagctccacagatagtgaaagaaaagagaatgggcaggacatcagaacttctactgtttgtttaaagaatgaatcatcagttgaaactgatgcgatggaattggatgttttccagaagagccttctttcaggagtggctttatgtccattagatcagaacatcaagggggttcataaaccatcatttccggaaactggaaatggtactggagaagctgggaatgaaatggtcaacggggaatcaacctgatatgaatgaaagacttcctgcacttccagtctgcagcaaattcaatagatgatggagggaccaatgcacctctagaatacccagagcctagatgccagagcatgctcccttttccaatgctgagtcagccttcaaattccaatgctactgcttgtccagatggtcctctggagccagatccaagcagcagatgggttaaacgtctcaaattgagcacctcacatccttttgcttctggtactaaaatctctaaaatgggagaagtttcatcctgtgtaaagattaacaagatcagcaaaatcatgaattgcagcaaaacaagttcagagcccacagtaggtagaagccatgtgagatcaaaattggcactggatcaacatccagtgctattaaagagtggcgagtccagttccagtggttcagggaggaaaagtcaagaaatctctctttcgcgtacttggattcatcgatggtgtcgtcgcatagctgcacctccaaacaagaagcctgatgctgcagtgctatgtgaaccacagagctcaaaggcaaaatcggataaactccaagagaagcagtttccaagcattgcagccatggctttgatgggg

SEQ ID NO: 20669 - DNA, 536 bp, Gossypium hirsutum
  Clone ID: GOSHI-09MAY01-C2509_2
ttaatttcctcatcttcagttcgccaccatgtcggcgaaatcgacccgtttcaatccgccggcaatagcagtaaccatattcttggtaatcgccacctttgcataccccatcaacggcttgaaatcaagggagcttgatgagagtggtgatcaaggcgtcaagtgtaccccgtcatgtacacaaaactcctcctccaccacctccgccatgccctcccccaccatcctttatatacacaactggtccaccagggagcctgtaccctattgaccagaactttggtggtgcgagccggaatttccaggtggggtatttggctttgctttctggattcatgctccttctggctttttgaatggggattatattaatatagatttagaattgggagggttcctaggatcttgttcaagaatttgatatggtaagagaaaataatttgtcggaatagaaagtttaaggaactattagtttctttacctgctctttcatttgatattgttctgtaataacaaatttacccacttttcatttt

SEQ ID NO: 20670 - DNA, 589 bp, Gossypium hirsutum
  Clone ID: GOSHI-09MAY01-C2509_1
cccacgcgtccgcccacgcgtccgcccacgcgtccgcccacgcgtccgcccacgcgtccgcttccccggggaatttcctcatcttcagttcgccaccatgtcggcgaaatcgacccgtttcaatccgccggcaatagcagtaaccatattcttggtaatcgccacctttgcataccccatcaacggcttgaaatcaagggagcttgatgagagtggtgatcaaggcgtcaagtgtaccccgtcatgtacacaaacccctcctccaccacctccgccatgccctcccccaccatcaccaccggcgctgtctccgccacctacaccgaaaaagccgccaacccattgctgtccacttccccctactccaccatctattatatacacaactggtccaccagggagcctgtaccctattgaccagaactttggtggtgcgagccggaatttccaggtggggtatttggctttgctttctggattcatgctccttctggctttttgaatggggattatattaatatagatttagaattgggagggttcctaggatcttgttcaaagaattggttatggtaagagaaaataattt

SEQ ID NO: 20671 - DNA, 474 bp, Gossypium hirsutum
  unsure (1)..(474): unsure at all n locations
  Clone ID: LIB3584-004-P1-K1-A2
tacaaaccctctcattcactccatttacaaactcccataatctcttcttctttcgcaaattaatttcctcatcttcagttcgccaccatgtcggcgaaatcgacccgtttcaatccgccggcaatagcagtaaccatattcttggtaatcgccacctttgcataccccnatcaacggcttgaaatcaagggagcttgatgagagtggtgatcaaggcgtcaagtgtaccccgtcatgtacacaaactcctcctccaccacctccgccatgccctcccccaccatcaccaccggcgctgtctccgccacctaaaccgaaaaagccgccaacccattgctgtccacttccccctactccaccatctattatatacacatctggtccaccagggagcctgtaccctattgaccagaactttggtggtgcgtgccggtatttccaggtggggtatttggctttgctttttggnttcat

SEQ ID NO: 20672 - DNA, 172 bp, Gossypium hirsutum
  Clone ID: GOSHI-09MAY01-C102462_1
ataagttgctacaaggactaaggcttactctgtttaatatgtggcttcaacaaaatggtaggtttccctgtaaatgctgtcactaaactattgttcattctgtaaactcctcgagttttggttgttaagtatcaaataaaaaaggctgcttaagtagctgaacttgcaaccc

SEQ ID NO: 20673 - DNA, 1419 bp, Gossypium hirsutum
  Clone ID: GOSHI-09MAY01-C2459_1
cccacgcgtccggggaagcctactggcataacatcggactgtgctattccgatggatagtgccagtgatattccaaggaataaacggtcaacccattatacgctcaagtagttattgtttcttctggcactattaagaagtggttgacagcacagaaagtgcgtgtgagttatgtgaaggttcttgtgtttgatgaagctgatcacatgctggctgaggatgggtttgaagatgactccttgagaataatgagggatattgaaaagatgagttctcactgccaggttcttctgttttctgccacatttagcgacactgtgaagaattttgtctcaaagatagtcaagagagatcacaatcaactttttgtcaagacggaagaactatctttggagtctgtgaagcaatacaaggtgaatgttccagatgaactttccaaagttatggtgattaaagatagaattttagaatttggagagcgcctagggcagactattatatttgtacgcacaaggaatagcgcaagcatgttgcataaagcacttgttgagtttggttatgatgttaccacaattcaaggtgctctcaatcaagctgaacgagacaagatagtcaaggaatttaaagatggtttgactcaagtgctcatttcaacggacctccttgcccggggttttgaccaacaacaggttaatttggtcatcaactatgatcttcctgtgaaacacgacaaccgtgtggagcctgattgtgaggtttacttgcatagaattggcagagcaggacgttttggtcgcaagggagccgtgttcaacttactctgtggtgatatggaccaaatgataatatccaaaatcgaaaatcattttgacagcaaaatagcagaggttcctgactggaagaatgaggaagactttaaaactgctctccggtcagccggtttattatgaacggaaaccttctgtcaaagctatcttggtgaaatgctagagaagaggaacaaacagattgtgcttatagtatgctgtatactcgactatttgtgcccgattctgttggtttgattttgatttttggtagttgcaccatgttttaataagttgctgtatgagtatttgaacggaggaaaagggcataaagtcatatgtggtctcaaattggatgcgaagtggggggtatcatgacgatttcagtggatccaaatcatattttatagtatgtaatttatgttctgaaactaaaatttgtaatttgccagcggattttcttggttcaagttcatgagaaaacaggatttcgactcggtatgttatttgttttcctcttaccagaataatcaactattgccgcttattaccgtttgtaacacacgatgattgaaagcagaaggtttaaatactagaggttgtgctccttttc

SEQ ID NO: 20674 - DNA, 657 bp, Gossypium hirsutum
  unsure (1)..(657): unsure at all n locations
  Clone ID: LIB3582-055-P1-K1-G5
cggncgcgtgggcggacgcgtgggtttagaatttggagagcgcctagggcagactattatatttgtacgcacaaggaatagcgcaagcatgttgcataaagcacttgttgagtttggttatgatgttaccacaattcaaggtgctctcaatcaagctgaacgagacaagatagtcaaggaatttaaagatggtttgactcaagtgctcatttcaacggacctccttgcccggggttttgaccaacaacaggttaatttggtcatcaactatgatcttcctgtgaaacacgacaaccgtgtggagcctgattgtgaggtttacttgcatagaattggcagagcaggacgttttggtcgcaagggagccgtgttcaacttactctgtggtgatatggaccaaatgataatatccaaaatcgaaaatcattttgacagcaaaatagcagaggtaaagccctccctgtgcgtggtgctggtgcaagtccatacatttttctttttttgttatcatattcatatgattgctttccacaacttcgttcttggatggtaggttcctgactggaagaatgaggaagactttaaaactgctctncggtcagccggtttattatgaacggaaaccttctgtcaaagctatctttggtgaaatgctag

SEQ ID NO: 20675 - DNA, 667 bp, Gossypium hirsutum
  Clone ID: GOSHI-09MAY01-C2479_1
gtcactttttttctttcgttcaatatttggctctttgtttttgttttttggtttagagagatggatcatgcagcagatgctcataggactgatttgatgacaataacacgtttcgtgttgaacgagcaatccaagtatcctgagtctcgtggggatttcaccatcttgcttaatcacatcgttcttggttgcaagtttgtttgctctgctgttaacaaggctggtcttgccaaactcatcggactcgctggggagaccaatgttcagggtgaggagcaaaagaaactggatgtgctttcaaatgaagtctttatcaaggctttagtgagcagtggcagaacttgcatccttgtctcggaagaagatgaagatgcaattattgtggagccctcaaagcgtgggaggtactgtgtagttttcgatccactcgacggttcctccaacattgattgtggtgtttctattggaacaatttttgggatttacatggtgaaagatgaccatgaaccaacactagctgatgtgctgcaacctgggaagcaaatggtagctgctggctattgcatgtatggaagttcttgcacgcttgtgttgagcactgggaaaggagttaatggattcacccttgatccatctcttggcgagttcatactaactcacccagaca

SEQ ID NO: 20676 - DNA, 1043 bp, Gossypium hirsutum
  Clone ID: GOSHI-09MAY01-C2469_1
tgaaattttattgctagaaaaagaagaagctttcgccccgcgtcccgacacctgggggttcaatattttgggggggtaacgtatcatccaatctcttctcccatccctcgtcggagaaaatggtttcaggcgcagctgctccagccacttccaacccttctgctagagtcagatatttgattcgaggccttgcttctgaagaaacccgagagcgggcgcggggggtcctttgcaagaatagactggcttatgacaatttggcagtgctgttatggcattcttttgggattatgggtgtccttttgaagataataacttcagcttaccgtccactgttgtccgacggccttactgaaaatgctgtaacacaagtctgcaatgctatagcccttttccagtgtgtagcttctcaccctgatacaaggattccatttatcagagctacaatgccagtgtatctatatcccttcttgaacaccatgagcaatgaaaggagctacgaatgtctaaggattaccagcttaggtgtgatcgggtccctagcaaaggtagaggatccagaagtgatagagtacctgctttcaactcaaatatttcccagttgcctacgctgcatggaggttggcaaaacattgtcaagaacagtgtccacatttataatttacagaatcttactaagtgagaaagggctcaagtactgtttcgttcttgctgaacgatatctctcagtatcccaatgtttggggaaattggttgaaaaccttagtgaagatgatgcagaaaatttgcctcacctcctcaaaaacatcatcggatgttacctcaggctctccgaaaacgaaaggaccaggccacaactgtcgagctatattccatggaagttgttagatggcaaatatgctaacatcgttcggagtgatccaatggcccttgctgacctacgacaattggtttgcaatttaaggaccagcaagagttgtacagcccactgtaccgatgagccaccagctagcagcgactcacccggaacgtcattccatgat

SEQ ID NO: 20677 - DNA, 472 bp, Gossypium hirsutum
  Clone ID: LIB3584-014-P1-K1-E1
tgaaattttattgctagaaaaagaagaagatatcacctggagtttcaatattttgtaacgtatcatccaatctctgctcccatccctcgtcggagaaaatggtttcaggcgcagctgctccagccacttccaacccttctgctagagtcagatatttgattcgaggccttgcttctgaagaaacccgagagcaatcacttgatgtcctttgcaagaatagactggcttatgacaatttggcagtgctgttatggcattcttttgggattatgggtgtccttttgaagataataacttcagcttaccgtccactgttgtccgacggccttactgaaaatgctgtaacacaagtctgcaatgctatagcccttttccagtgtgtagcttctcaccctgatacaaggattccatttatcagagctacaatgccagtgtatctatatcccttcttgaacaccatgagcaatgaaag

SEQ ID NO: 20678 - DNA, 812 bp, Gossypium hirsutum
  Clone ID: GOSHI-09MAY01-C2419_12
gttgatgaacttggaaggcgaaagattgctttgggacaatatgtgttgcatgtggggaacttcaaacacacattgagcttgaggattcgaagatgaaaatttcttttttcaaaatccctcacttctttttttctttctcttttggcctaaaataagtagcaattttctcagctttctttctttctttaatgtatagccaattgttcaaacatttgaaatccaaaactgaaaaaagaaaatgttgattttcaaaaaaaaaaaaaaaaaaaaaaaaaaaaaaaaaaggggcggccctgcgactaaacaaaagatcgaattaaagtagaatcagaagcttatttcgccgaggaaaacaagatgtcggggcggcgagatgaagataagaagcccggccatcagtccgcggctcacatcatcctcaaagtcaaaggccaggacgggaatgaagttttcttcaggatcaaatggagcacacaattgaagaagctcatgaatgcatattgcgaccgacaatctgtggatttcaactcgattgccttcttgttcgatggtcgccgcctgcgagcttgagatggaggatggtgatgagatcgatgctatgcttcaccaaaccggtggtactgtgtgaagcgagtactactttgccacatttagtatttgatgagttagttatggcctgattatgcagatgtttccaatgtttttatatacgatcttattgccatgttatgaagacttgtggaccttgttttgagtcatcttgctcttatagaagagctcgagtttctagtgtttacaaagagagatggaac

SEQ ID NO: 20679 - DNA, 1028 bp, Gossypium hirsutum
  Clone ID: GOSHI-09MAY01-C2419_9
gttttccataaaaagttctcattcattttcagtgtttgttttgtggaaaatgaaaacattttacaaacatggataaaatccaaagcaacattttggaaattgtcttaccgatttctaatccgtatgacattttccctttctcctttctcttctaagtaaattttcttccacatcctctgcctcctcatcttcgttcgtcacctcacctcaccatctccgtccgtcatctccatcgaccgtcggccttacttgtattttgaagaaaccctaaaattttacccgccccagtcaagaaaagaagacccagaagcaatggttctctctctgtcatcaacaggatgggaatgaagttttctttaggatcaaaagaaacactcaactgaagaagctcatgaatgcatattgtgatcgacaatctgtggatttcaactcgattgccttcttgttcgatggtcaccgcctgcgaggcgaacaaacttctaatgagctggaaatggaggatggtgatgagatcgatgttatgcttcaccaaactggtggcacaagcgcttgatgttgtcaactgtgcgaagatggggacattagtattggagcataaggatgagcgcgatttgcggctccatttgctgcagtttgctgaggttcgtgaggaggcttgttccaatttgttaccgaatggtgcgtgtgactacctctataagttatccgaaatcttctccaaattttacaacaatcctgagtgcaaggttatcgggtcagataaggaaacaagtaggctactatcccgccgtccgctgccggggggtttgagaaaatgcttcaatctcctgggaatcacacctatttacaagatatgattgtactttgaaagctttacatataacctattcttgagaagggtgggttatatattacttcatataaaatcctatgtaccgcgacaattgtattcagatctcgttactttatttatttggacagctttgattgtgcttatgtgttttagctatgaatttattcatacctgc

SEQ ID NO: 20680 - DNA, 687 bp, Gossypium hirsutum
  Clone ID: GOSHI-09MAY01-C2419_8
tccgaaaaacattttccgaaattttcggtgtttgttttgtgtaaaatgaattcccataggaaaacattttacaaacacgggtaaaatcaaaagcaaattttggaaattgtcttaccgatttctaatccgtaagacattttccctcttctcttctaagtagttgttctccctcttcctccgactcctcatctccgttcgttggcctcaccgcaccatctttgcatcgtcgtctctgtcggtcgaccgtcggccttgcctctgtattctgaagaaaccctaaaacattagggtccacagtcgagaaaaattcatccctcgagagagttaaggcattgcatatttgggacatggatgttgtagttgagcccggaattggatggatggaacttaatgaatacttggagccatatggtttatttttccctcttgatccagggcctggtgcaacaataggaggcatgtgcgcaacacgctgctctggatctttagccatgatgtagttgctactctactactgtctttctttgcattccctagtttcccccttagtctggtgaaaaattacatctgaaatctctcttactgagggtttgtagaagtttcatttcagcaattttataccaaacaagtgtattcagatatgaaatgatggatgttttttctcctggaaaatgtatatctctgttt

SEQ ID NO: 20681 - DNA, 596 bp, Gossypium hirsutum
  Clone ID: GOSHI-09MAY01-C2419_6
aaatactatagaaatccaagaaaaaattttttaaaaaaccctaattctataaaaagatcgaattaaagtagaatcagaagcaaaaatcgccgaggaaaacaagatgtcggggcagcaagaagaagataagaaacccggcgatcagtccgccgctcacatcaacctcaaagtcaaaggccaggtctctcgaaacgtttagggtttattttttatattttgatatcgctttcttgttttgaatccttggggtttttttatgttgggaggtggaatttcgagtttttaagaggttataccttttaatttgtttgtttgggttgttttgatcacttatatggaaaattatgccgatatgggtaagtattgagtttttgtaattttaaaattattgggtgtttatggtgtttttggctttgggattaatgagatggtgattggctagttgcaaagactggtttatgttatataagtgtgttttatgcctccgccgtgcttggaagatctcaccagttcaaccaccatgtgtggagtccgttaaccgcggtgatggcctcactgagtgcttcgtggctacggacacgtgaacaatacacgac

SEQ ID NO: 20682 - DNA, 624 bp, Gossypium hirsutum
  Clone ID: GOSHI-09MAY01-C2419_3
aattcctggcatttttgtagccctagcattaagatttgatgtatctagagggaaagggagccaatattttaagagtgcatttttgggatacacagtaggattggtccttacaattgttgtcatgaactggtttcaagctgcacagcctgcacttttgtatattgtaccggcagttattggattcttggctgctcactgtgtatggaatggagatgtcaaaccgttattggagtttgacgagttgaagactgcggttacgtcttcagacggtagtgatgacaaatccagcaagaaggttgaatgagttagaagcagaaacccttacactgaaaccattttattttagctccgcgcggccgatagtgttcacttttaagggcaatcttgtggctaactttttgttctactactaaacctttgtatcaggttttggaattaagcaagaaataataatacttaacctcttaaacaaaactactttcattttgcaccaatcacaatgtatttggaactataaacattgcttttggaaattaattattttactctctgtcccctccattacacaaaataaaagaatttaacaaaataaatctttttttcagttggtttattattaaaaag

SEQ ID NO: 20683 - DNA, 844 bp, Gossypium hirsutum
  Clone ID: GOSHI-09MAY01-C2419_1
gtaataaaaagaaaaaggcaaagtaaagaaaccttgcgctcggtcttcgataaatactatagaaatccaagaaaaaattttttaaaaaaccctaattctataaaaagatcgaattaaagtagaatcagaagcaaaaatcgccgaggaaaacaagatgtcggggcagcaagaagaagataagaaacccggcgatcagtccgccgctcacatcaacctcaaagtcaaaggccaggacgggaatgaagttttcttcaggatcaaaagaagcacacaattgaagaagctcatgaatgcatattgcgaccgacaatctgtggatttcaactcgattgccttcttgttcgatggtcgccgcctgcgaggtgagcaaactccggacgagcttgagatggaggatggtgatgagatcgatgctatgcttcaccaaaccggtggtactgtgtgaagcgagtactactttgccgcatttagtatttgatgagttagttatggtctgattatgtaagatgtttccaatgtttttatatacgaccttattgccatgttatgaagacttgtggaccttgttttgaatcatcttgctcttatagaagagcttgagtttctagtgtttacaaagtgagatggaactcggaactttgttccgatatgcactcgttttgaaggctgtttagcagtcactatctataagtattgatttctgggttgcttactttggattgtgagtgtttttcttgagtattttaggctgccttattgtttgatgaagcttgttatcaagcagcaaatgctttatatgtaattaaattggctataatacggagaagctttaaaacttccctct

SEQ ID NO: 20684 - DNA, 628 bp, Gossypium hirsutum
  unsure (1)..(628): unsure at all n locations
  Clone ID: LIB3825-009-Q1-K6-F3
gtagnactagnaggnaaaaaaaatcagaaacacgttgttacttcctgtcataatgaatcttttatcagttgaactggtttacttccagtcactgaatcccaccttttctaaccggtcccaattgattttttttcatcactcaccaaaacaaccaaagagtaacgaggaaaaagaaacccaacccccaagaatttagtcaattaccagcaataagaaaaattactagagcgctacatctaggatgagctatgcagatccaggggctaacaattaaatactcattcatgtttaaatcaaacacctcacaataataatgttcacgattcatagtctcttcatgtcaaaaaatttaatcgaaacaaaagtaaaattcaaagtaaagcttccgttatctcatcttttagttttttgatgaaacctttttcttggtttaatattatgtcaattgggtgaaaggtttatcatttggataatcttctgtgtatattgtgctttcagcctgcacttttgtatattttaccgactgttattggattcttggctgctcactgtgtatggaatggagatgtcaaaccggtttgttctccacccttgtttgattctctctagcattatttgcttggcatgg

SEQ ID NO: 20685 - DNA, 571 bp, Gossypium hirsutum
  Clone ID: LIB3825-009-Q1-N6-F3
aatgtgttaaaaaaacaagtattgaataattataaattgctttgaaaccacaatgagtactagaaattaataatattatctaaatacataattagtagtactaaaagtgaacactatatccttctcaaagctaaaataaaatggtttcagtgtaagggtttctgcttctaactcattcaaccttcttgctggatttgtcatcactaccatcttcagacgtaaccgcagtcttcaactcgtcaaactccaatagctgcacatcatgttagctcctattaaccatattgtaatccaaatacaaatacagaccataatcatttcattgattatattcaaagctgaatagtgaaatttatcatataccataaccaaactataatcattattcaggaacacaattaatccaacattctccaggtttttgtttgtgtcaagcataaggtcctcatgtacctctatgggaattgagtccattttcttactttttaccaagacttggacatggttcatttcataaacattaaacccgattctcaaatgcaaaatcctacttgttgctagtccttggaaa

SEQ ID NO: 20686 - DNA, 496 bp, Gossypium hirsutum
  Clone ID: uC-gsronu33B100a07b1
tcgcccctcgtccgcccacgcgtccggataaatactatagaaatccaagaaaaaaaatttaaaaaaacccctaattctataaaaagatcgaattaaagtagaatcagaagcataaatcgccgaggaaaacaagatgccggggcagcaagaagatgataagatgcccggtgatcagtccgtggttcacatcaacctcaaagtcaaaggctaggacggcatttgtttctcttttaagaccttattttttacatccctttagatactcttctacttcccatctcttctcctttctactcttttccactttcttctttactatcttcctttcctaatctattcttccactttcatctttctctctctcctcctccttccttttcatttctccttacctttctttcatttccttctattcctttttcagctcccttctcttctctcttcttataacttttatctttttatcttttactaccatcttccacttcaccttttc

SEQ ID NO: 20687 - DNA, 667 bp, Gossypium hirsutum
  Clone ID: LIB3583-034-P1-K1-D9
caataggaaaacattttacaaacacgggtaaaatccaaagcttttttttggaaattgtcttacccatttctctaccgtaagacattttcctttctccttttctcttctaagcaaattttcttccacatcttcatctccgttcatcacctcccctcaccatctccgtccgtcatctccgtcgaccgttggccttacttctattttgaagaaaccgtcatctctgtcatcaacgggtttttttttctgttaattttcactgatttgatttctagatcgggtctggttcttgcttttttcttgctagatggtagatcgggtctggttctattttttcttgatttttagatcagttcatctgtttctaaaagagaacttgaagacatgagatgggaaatactgcttgaaaattgcccaaacaaacatttacgtggcaaatatggagcctaggtgaggaatcatgtctgtagggatttcttaatggttgctcctaccagttagtccgaaagcaagagagaaatatcaattccattgacatggttactgctctatttcttgccaactggaatagcaacccttttagaaagaaagaaaaaactgatgaaatgttaatgcatattggatattcatgaatattgattaactactgctgatataatggtgcataatg

SEQ ID NO: 20688 - DNA, 435 bp, Gossypium hirsutum
  Clone ID: uC-gsronu33B141e09b1
cccacgcgtccgggtggggttggtccttacaattgttgtcatgaactggtttcaagctgcacagcctgcacttttgtatattgtaccggctgttattggattcttggctgctcactgtatatggaacggagaagttggaccgttattggagtttgacgaatcaaagatggcggttgtagaaggaagtgaagacaaacctagcaagaaagtggaatgaggtatagaaggcaaggcagacagtgaaactacttttagcttgagaaggaattagtgtttacgttaaaaggtcaatctcttggctaacttgttttactgcaatacctttgtaacaacagactttggaattaagcaagaaataatctttagcttcctaagcagagattttttattgacaaagaaggaattccaccagatcagcaaaggttgatatttgct

SEQ ID NO: 20689 - DNA, 315 bp, Gossypium hirsutum
  Clone ID: LIB3146-025-Q1-K2-B12
catttctctaccgtaagacattttcctttctccttttctcttctaagcaaattttcttccacatcttcatctccgttcataacctcccctcaccatctccgtccgtcatctccgtcgaccgtcggccttacttctattttgaagaaactgtcatctctgtcatcaacagcctgcacttttgtatattttaccgactgttattggattcttggctgctcactgtgtatggaatggagatgtcaaaaccgctatttggagttttgacgaagttgaaagactgcggttaacgtcctgaaagatggggtaggtgaatga

SEQ ID NO: 20690 - DNA, 406 bp, Gossypium hirsutum
  Clone ID: LIB3165-040-Q1-K1-E1
tttcctttctccttttctcttctaagcaaattttcttccacatcttcatctccgtggtgacctcccctcaccatctccgtccgtcatctccgtcgaccgttggccttacttctattttgaagaaaccgtcatctctgtcatcaacgggtttttttttctgttaattttcactgatttgatttctagatcgggtctggttcttgcttttttcttgctagatggtagatcgggtctggttctattttttcttgatttttagatcagttcatctgtttctaaaagagaacttgaagacatgagatgggaaatactgcttgaaaattgcccaaacaaacatttacgtggcaaatatggagcctagcctgcaatattgtatattgtaccgactgttattggattcttggct

SEQ ID NO: 20691 - DNA, 530 bp, Gossypium hirsutum
  Clone ID: uC-gsronu33B016d10b1
cccacgcgtccgcccacgcgtccgtcatgctcgaatatgttcaatcatcaggagatctggtaaagatgtggaggagctgaagaatgggacattagtattggagcataaggatgagcgcgatttggggctccatttgctgcagtttgctgaggttgttgaggaggcttgtaccaatttgttaccgaatgttgtgtgtgactacctctatagtttatccgaaatcttctccaaattttacagcaaccctgagtgcaaggttatcgggtcagataaggaaacaagtagactactattatgtgaagcaactgcagcggttatgagaaaatgcttcaatctcctgggaatcacacctatttacaagatatgattgtactttgaaagctttacatataaccttttcttgagcagggtgggttttatattaggtcatataaaattctatgtaccatttacaattgtattcagatctcattactttatttatttggacaggtctgattgcaattatgtatttagctatgaatttattc

SEQ ID NO: 20692 - DNA, 632 bp, Gossypium hirsutum
  Clone ID: LIB3828-012-Q1-K6-A12
ccccgcgtccggctcaattgaatttcaaagtttttagatcaatgatttccttgggctgcttttcacttttcctttttcttacgttagattttggaattcgatttacatttagagtgtgtttgtttggtggaaaatattttctagaaaacattttcattcatttccagtgtttgttttgaggaaaatgatttccataggaaaaaattttacaaacacgggtaaaatccaaagaaaaattttggaaattgtcttaccgatttctaatccgtaagacattttccctttctcctttctcttctaagcaatctcctctctcttctaagcaaattttcttccacatcctctgcgtcctcatctccattcgtcacctcacctcaccatcttcgtccgtcatttccgtcgatcgtcggccttacttgtattttgaagaaaccctaaaaaattagcagccacagtcaagaaaagaagacccagaagtaatggttctctttctgtcatcaataggatgggaatgaagttttctttaggattaaaagaagcactcaactaaagaagctcatgaatgcatattgtgatcaacaatctgtggatttcaactcgattgtcttcttgttcgatggtcaccgccagcg

SEQ ID NO: 20693 - DNA, 524 bp, Gossypium hirsutum
  Clone ID: uC-gsflnu33B127b02b1
ttcctcgcgtccggtttgttttgtggaaaatgatttccatgatttccataggaaaacattttacaaacacgggtaaaatccaaagcaaaattttggaaattgtcttaccgatttctaatccgtaagacattttccctttctcctttctcttctaagcaaattttcttccacatcctctgcctcctcatctccgttcaccacctcacctcacctcaccatctccgtctgtcatctccgtcgaccgtcagccttacttgtattttgaagaaaccctaaaaaaattagcagccacagtcaagaaaagaagacccagaagcagtggttctctctctgtcatcaacaggatgggaatgaagttttctttaggatcaaaagaagcactcaactgaagaagctcatgaatgcatattgtgattgacaatctgtggatttcaactcgattgccttcttgttcgatgtccgccgcctgcgaggcgaacaactcctaatgagctggaaatagaggatggtgatgagatcgatgc

SEQ ID NO: 20694 - DNA, 403 bp, Gossypium hirsutum
  Clone ID: LIB3149-032-Q1-K1-G4
gggccacactttgtctcttaatggaggtgtttgcattgacatgaccttaatgaagagagtgtaaggcgttgcatatttgggacatggatgttgtagttgagcctggaattggatggatggaacttaatgaatacttggcgccttatggtttattttttcctgatgatccagggcctggtgcaacaataggaggcatgtgcgcaacacgctgctctggatctttagccatgatgtatgtgctactctactactgtctttctttgcattccctcagtgccctcttagtctgttgaaaaattacatctgacatctatcttactgaggtttgtagaattttcattttagcaattatgtaccgaacaagttgtttcagatttgaaatgatggatgctttttgttctgg

SEQ ID NO: 20695 - DNA, 307 bp, Gossypium hirsutum
  Clone ID: uC-gsronu33B061h03b1
ctcactcgtccggcttcaccaaaccggtggtactgtgtgaagcgagtactactttgccgcatttagtatttgatgagttagttatggtctgattatgtaagatgttttcaatgtttctttataaatacttattctctattcatcaatacttgtatactctgttttttaattctcttgtttttatattattattttcttttcttttttcttatactttttatttattaatttctacccctttttttttcattatttctttatatctatactttttttatccttacttacattttttttaatttctttt

SEQ ID NO: 20696 - DNA, 594 bp, Gossypium hirsutum
  Clone ID: GOSHI-09MAY01-C102432_1
gctgcttagaaacatggttggtcctggtgaggtagacgatgaattagaagacgaggttggatccgagtgtgccaaatacggaactgttacccgagttctgatatttgagataacagagccaaacttcccagccgatgaagccgtcagaatctttattcaattcgagagatcagaggacacaactaaagcattaattgacctcgatggacggttttttggggggagggtcgttaaagcctcattttatgatgaagagaggtttagtgagaatgagctggctccgatgccgggggaaattccgggattttcttgatgcagtacaaagtccccgatgagatggttgaattagtacaccataaattgaaacatagacaaaacagcattgtttgcatactgctgtgttcatctgttttatggtttgtgtttcattagggttttatgcctttgctttatgaagttaacttgtacttagacctgttgacaggactgggtgggttttcgaaatttgaaagggtttaggtaaaaatgttaaacccgaaaaatgggcttagataaaaaattaggtttatttaaaatatgggctgaacttagttt

SEQ ID NO: 20697 - DNA, 995 bp, Gossypium hirsutum
  Clone ID: GOSHI-09MAY01-C2439_1
gtgttttccaggcttatatagaagctgctgaaatcatgcttgatgatgatgttgctactaacaaagcaatcgggtctcacggtgcaagttttctccagcaccaacagaataattcaaagagattttcggttttgacacactgcaacaccggaagccttgccacagctggatatggtaccgcccttggtgttatccgtgcccttcatgctcaaggagtgttggaaagggcatattgtaccgaaacacgacccttcaatcagggatccagactcacggctttcgagctggtgcatgaaaaaatacctgctactctagtagcagattctgctgcagctgctttaatgaaagaaggtcgtgttgatgctgttgttgttggagcggatcgtgtgacagcgaatggtgatactgctaataagattggaacctatagccttgccttatgtgcaatgcatcatcatattccattttacgttgccgcaccgctcacttccatagatttatctctttcttccggacaagaaattgtaatcgaggaaagatcagctaaggagttattgcacacacggggaggactgggagaacaagtggctgcttccgggatctcagtctggaacccggctttcgatgtcacccctgccaatctaatagccggtatcataacagaaaagggcgtaattacaaagaatgacatgaaggatgatgcgtttgacattaaggatttcatagagaaggcaacaggcaaatctaccgtatgaagttggcatctctaaccataaacgattcctaggtctcaccattcacgagactcgatatcgagaccttacttaggtatcaagttttgtaccacttgaccccgaaaccgtctgtaaattttccgttgctgtaagacttaggaaccattttagttcatttatgcccgtatggttgtatttctaactttacaaggcggatgaatgcccttggcacaatactatcggcaaataaaaagtgtcttg

SEQ ID NO: 20698 - DNA, 880 bp, Gossypium hirsutum
  Clone ID: GOSHI-09MAY01-C2429_2
cggacgcgtgggttcaactattgaatcctttggtgatgcctcctgggtgcagcttactttgttgcaggcgccgatataggaaaattcaccatgaaaactgttgatgacattaggaccttgaataagtcagttcattttaggcctgcctgcaatttctataacatgaacgagcttgcagctttgtgggaaaggaaaatccggcgaacactccctcgagttaccgtcactgaggaagaccttctctcggctgcggcagagaatattatcccacagagtgttgttgcatcattcacccatgacatcttcataaagggttgtcaaatcaacttcccaatcgaaggcccgaatgaaaccgaagcctgcagtttgtacccgaatgagccattccgaacattggatgactgcttcaacgacttcttagcaaagatgaaggatgaaaacatgaagcaaagcgacgaaaacacgaagcaaagtaacgaaatcccccccccaaagccagtagtcgaagccttcgccatcacagcaacatgtgcttgacgttaaaaatatcgacaccaaactatccttttctttacttcattcatgtagagatgtcaagtcgatttcatatgggtgtgatcacttctttattcccctttatttaccttgtggtagggaaattgtatttgaataagaggactgagtgtttagtctttaaggctctctaattagtaaaacaaaatctgttccagctataaaaggaaggtgtagcagaaggaggagaaacaaagaacaccaacctggctgttttattttataccttaatgatttgctttattattcttgtttgtatactatcccgcatttagtaatcaagatgaataattccccccgccaaaaa

SEQ ID NO: 20699 - DNA, 800 bp, Gossypium hirsutum
  Clone ID: GOSHI-09MAY01-C2429_1
cccagcaacccaagttgctttatctaatcttgcaataacgctaaccatgactgtctcggtagctaacggccgtgtcctcatagtcggagcaaccggctttattggtcggttcgtggctgacgccagcttggatgctggtcgacccacttatgttctggtcaggccaagttccggaaaccaatattccaaggacaaagtagccaaagcccttcgggacagaggcgccatactgttgaatggattggcaaatgacaaggagttaatggtgaaactgctgaaagagcaccagattgagatagtaatatcagctctgggtggcgccacaatactagatcagctgtctttggttgaggcaattcactctgccggcacagttaagaggttcttgccgtcggagtttggacacgatgtggaccgagctgatccagtagagcctgggctcaccatgtacaaggaaaagcgtcaggtcaggcgtctgattgaaaagctggagatcccttacacctacatttgttgtaattccattgcttcttggccctaccacaacaataggcatccttccgaggtcattccacccttggatcatttcgaaatctatggagatggcagcgtcaaagcttacttcgttgcaggcaccgatataggaaaattcacatgaaactgtgatgacttaggaacttgattagcagtcatttaagcctgctgcatttatacatgacgacttgcacttggtggaaggaatcgcgacattcctgatacgttggagctttttggtgggaagattttccacagttgtatcc

SEQ ID NO: 20700 - DNA, 743 bp, Gossypium hirsutum
  Clone ID: uC-gsronu33B049h01b1
cccatgcgtccggacacgatgtggaccgagctgatccagtagagcctgggctcaccatgtacaaggaaaagcgtcaggtcaggcgtctgattgaaaagctggagatcccttacacctacatttgttgtaattccattgcttcttggccctaccacaacaataggcatccttccgaggtcattccacccttggatcattttgaaatctatggagatggcagcgttaaagcttacttttttgtaggctctcatattggaaaattcatcattatctcttgttgtttacaattttgatcttgatctagttttttcttatttttgtctcttttctttgttcttttacttttttactcaatcttctcctttttctttttctctcatatcatcttttttttcttatttattatcatttccctctctttttatttatcattctattttttctccctttattcccaatattctcctttctttcttactattctctatatttttttcctaatctattttttactttttgttttattattaccttttctttctctcatttttcatctttttttatttactcttctatatctattcttcttatttttctttattttttacatctcttttattctttttcacccaattcctcttcttttattttctacctctcttttttctattcttatttattattcttatctattatttctattctcatttttctacttactttctatatacttttcaattttt

SEQ ID NO: 20701 - DNA, 243 bp, Gossypium hirsutum
  Clone ID: LIB3145-053-Q1-K1-H4
ggccctaccacaacaataggcatccttccgaggtcattccacccttggatcattttgaaaacttttgggaagggcggggtaaaacttaatttggtggcaggccccgttttaggaaaattacccttgaaaccggtggttgactttaggaccttgaccaagtcagttaattttaggcctgcctgcaatttttataacatgaacaagcttgcagtttgtgggaaagggaaattccgcgaacacttc

SEQ ID NO: 20702 - DNA, 790 bp, Gossypium hirsutum
  Clone ID: GOSHI-09MAY01-C2799_2
cccacgcgtccgaggaaatttgctacattactgcatcagtgtttgaattctatcaaaaagggttccagcaaagagatatctttggcatcccataccattgggttgctggccttaactgttggtccaggagataatgcacgggaaattttggaagaatcaatgattcctctttcacaggcttttaaatctggttctgatccttctaagacagcttcattactggagtgtatggctgtcatcacatttgttgggggcaatgatccagaagatacagaaaaatcaatgcaaattatatggcaagtggttcatcctaaattaggttctaacgtggttgctgtgaagccttctgcagctgtaataacagcagttgtgtctgcgtggtcatttcttctgacaaccatggatggttggaggcttagtccgaaactttggcaagagtccattacatatttgtctagtttgctagataaggatgaccgatctgtccgcattgctgctggtgaagcactggcagtaatttttgagatgggaagcttagaaaaatttgctgccgaaactaaaggttccagtgatggctcagcttcagaaggaaataaatctaaagaaggattctcatatatacaaggactgaagggaaaaattttgaatcaagtcagagacctctcagtggaagctggtggtaaaggttctgccaagaaagatctcaacaaccagaggaacttctttaaagatgtgttagagttccttgaggattgttatagtcccaacacatcaatgaagattggtgggg

SEQ ID NO: 20703 - DNA, 1298 bp, Gossypium hirsutum
  Clone ID: GOSHI-09MAY01-C2799_1
cccaactttggctagagtgagtgaactctatgtattatacattttttcttagtagtttagtattgaaatccctccatatgtatctcagcaaaccttgtgagattttgatgctcccacgatataatgatctaagagacccgtcaatcttgagaaattatgcagatccatcacatatttgtctagtttgctagataaggatgaccgatctgttcgcattgctgctggggaagcactggaagtaatttttgagatgggaagcttagagaagtttgccactgaagctgaaggttcaaataatggttcagtttctgaagggaataaatctaaagaaggattattacatatacaaggattgagggcaaaaattctaaatcaagtcagagacctctctgtggaagctggtggtaaaggttctgcgaagaaagatcttaattaccaaaggagtttgtttaaggatgttttggagttccttcaggatggttattgtcccgagacatcaatgaagatcggtggggagtcacttcagacatcaacatggtctcagttgattcagtcgaactttttgaggcgctttcttggtggaggtttcgctaaacacatgcaggaaaacgagttccttcaagatgtttttggtttcacgccaaaaaggaatcttgtaggcggtgaacatgtatccaacaatttaaagagaatgtacaaatcaccaaattcagtcatcaacaaagcaagaacccagcacttgaacaagcagcggatgctatccgagggtaaaaaaattgggcactttgctgtcaatgttggtgatgaagattcataagcttctacgggacagaaaccgggcattgtggtgctggattagcttgtcatttgttattaagttttggttaatatcggcgatggctctacatacagataaaattgtaattgtggcgtcgagtgcactcatctaaggcaccaataatgagtttgctctgtccacgggattgagatgctgcatttaatgaataacaagaagcggccatttcagattagtgtccatctttcctgtaatgaaccaatgatgtttctctccaagctatattatgatattacttatattcagtatgtatgattacttatattcaaatatgagcattcccccccgcatgaaagaatatgttcgtgtagaataaatatatggtgtccaaacattttattgttgagaacgagaggttatatcgaaatcgagtaggatgctcctacatatttgtaaatgacattagagatgtttatggtaaaaaaacaaaacaacccccgcc

SEQ ID NO: 20704 - DNA, 636 bp, Gossypium hirsutum
  Clone ID: AI055631.1
aaattatgtggcaattggttcatcctaaattaggttctaacgtaagtatatatgcctgattttgactgattgaaaagcatattgtgattttctaaggttcatacacttgatgctcgtaacttgttattggaagaacatgatgactattaatgcattattcattttctttatttgcgggttgattatgtcttttttgatttgtaggtggttgctgtgaagccttctgcagctgtaataacagcagttgtgtctgcgtggtcatttcttctgacaaccatggatggttggaggcttagtcccaaactttggcaagagtaagcggactcttcatactttgttctttttttccctgatagtttatttgcttttaaaccggttaatccacttggaatttaagtttaaccaattctgggatttgaaatatctaaaagaccaggtcaatgaaccttgtgaaaattatagatactacggaactacaaaagaaaaccacaatgttgaacaacttgattggcttaatagactaattagtcttggccatttatgcaagtccattacataattgtctaatttgctagataatgatgaccgatctggccgctatgcttgttgtgaaacacttgcaagtaattttgaaag

SEQ ID NO: 20705 - DNA, 409 bp, Gossypium hirsutum
  Clone ID: LIB3145-057-Q1-K1-H6
cggacgcgtgggctgtttcacaggcttttaagtctggttacgaatcttctaagatagcttcgttactggagtgtttggctatcatcacttttgttgggggaatcgaaccagaggaaacagaaaaatcaatgcaaattatgtggcagttggttcaccctaaactaggctctaatgttattactgtcaaaccttctgctgttgtaataacagcggttgggtctgcctggtcatttcttttgacaactatggatagatggagtctcagtcccaaactttggctagacaaaccttgtgagattttgatgcttccacgatataatgagctaagagacccgtcaatcttgagaaattatgcagatccatcacatatttgtctagtttgctagataaagatgaccgatctgttcgc

SEQ ID NO: 20706 - DNA, 730 bp, Gossypium hirsutum
  Clone ID: GOSHI-09MAY01-C2789_1
ggatttggtagttacttgaagcgacaaacatctagaggatcttggatgcctagaggtgatgcgttaaaaaaactggaggaaagaggagtagtggtacgatttgtaattggtcggagtgctaatcgaggtgatagcttggatcgccatattgatgaggaaaatcataggacaaaggatttctttattcttgagggtcatgaggaggctcaagaggagctccctaagaaagataaaattcttcttcagtaccgcagttcaaatttgggatgccgagttttacgttaaagttgatgataatattgacgttgacctagaggggttgattggacttctcgaacaccgacgtcgccaagacagtgcttatgttggatgcatgaagtcaggagaagtggtttctgaagagggaaagctttggtatgaacctgattggtggaaatttggggatgagaaatcgtacttccggcatgcctctggttccctttttattctctccaaaaatcttgctcagtatatcaacgcacacagtgcatctttgaagacttatgctcatgatgatacatctgtgggatcttggatgatgggtgtccaggcaatttatatagatgataatcgtctttgctgcagtagcattagacaagataaggtgtgttctgtggcttgagagaacatggctaactctgttcatcagattaaaggcagctattttgtgggttgtctgtcagtattgcac

SEQ ID NO: 20707 - DNA, 968 bp, Gossypium hirsutum
  Clone ID: GOSHI-09MAY01-C102762_2
ggaggcttatatgcaaacttgatattttcttttcatatgaagtttaagatactgacgttacttatctaactttctcaacattgttttacttgttgcaagggtatctcaagtcactcgacattgctttctggcattctaatgtttattatcacctacgcgtcacccatgtttattcttcttagccttgtaatatacatctctatgaaaaacatggcccatcttgtaattcctgagaaagcaggtcctggagatcatctcatgatgatgctgggtttttcatgcctcataccgctggtcataaattcaattctcttgacttcatacacggttgtattgctgttaatgcagaatcacttatttgtttggagtgttttctcacccaagtaagttctgagtctcatcgaaaaatcctaggtgactgatatgcgcctatgcatgctcgtatattgcactgatgacaaattgcatgaataactggtgttcttgttcttccaaaacatcgtacctatttcatgaaaaaaaccatcaaagtatttgattcatcagaattccaattaccttgtggtaaaactaatgttgctaattcttccaggtacttgtatgtttgtgctacagccgtgtgcacttatattggcgtctttatcgttgccacaactggattttatgcttattttgtactggacatgcggaagcagaaaccatacccttgttagcaacaagccaacaacactaaatagtcaatagcgaatgcagcaactagcaaactgattttgcattcttccaaacgaacggcagtgattgaagttgagttaatccttgtaggtttcagttaatttcttttatatttgattcttttaacttcttggatgtaatcttgcttgcataagatactggaagcaatgtctgctagaatgtaactttacagggtaaagaatcatgtttgggtcaaatgaagagatgattttttg

SEQ ID NO: 20708 - DNA, 590 bp, Gossypium hirsutum
  Clone ID: LIB3829-026-Q6-K6-G12
gcgttccgtcaccagtttattcttcttagccttgtaatatacatctctatgaaaaacatggcccatcttgtaattcctgagaaagcggtcctggagatcatctcatgatgatgctgggtttttcatgcctcataccgctggtcataaattcaattctcttgacttcatacacggttgtattgctgttaatgcagaatcacttatttgtttggagtgttttctcacccaagtacttgtatgtttgtgctacagccgtgtgcacttatattggcgtctttatcgttgccacaactggattttatgcttattttgtactggacatgcggaagcagaaaccatacccttgttagcaacaagccaacaacactaaatagtcaatagcgaatgcagcaactagcaaactgattttgcattcttccaaacgaacggcagtgattgaagttgagttaatccttgtaggtttcagttaatttcttttatatttgattcttttaacttcttggatgtaatcttgcttgcataagatactggaagcaatgtctgctagaatgtaactttacagggtaaagaatcatgtttgggtcaaatga

SEQ ID NO: 20709 - DNA, 969 bp, Gossypium hirsutum
  Clone ID: GOSHI-09MAY01-C2769_2
atcatccgccacttccttcgctaccattctctcttttccttgtgtctgggtgtcttttagataaaagatgagtacgctggatgcaactagagcagaacttgctcttatagttttgtatttgaataaggctgaagcaagggataagatatgcagggctatacaatatggttcgaaattcttaagtaatgggcaacctggcacagcccaaaatgttgacaagtcaaccagcttggctcggaaagttttccgtctttttaagtttgtcaatgacttgcatggtcttattagcccagttcctcgaggaactccccttccactagctctgctgggaaagtccaaaaatgcgctgttgtcaactttcttgtttctcgatcaaattgtctggcttggcagaacaggtatctataagaacaaaggaagaactgagctgattggacgaatatctcttttctgttggatgggttcttcaatctgtaccaccttggttgagcttggggagctcagaaggctatctaaatcaatgaaaaagttggaaaagaatcttaaggacagtgataagtacaagagtgaggaatactgtgccaagctccaaaaatcaaatgagaggactctagctcttgttaaagcaggactggatatagtggtagcagttggccttcttcaattggcacctaagaaagtcacccctcgtgtaacaggggctcttggatttgctacgtctctcatctcctgttatcagttgcttccgtcaccatccaagtccaaggtaaactgaagtgggaagcctgttttgctcatcaagctcgagtatcatcatctaaataaattcaacttgtgcgtttaaggtttgaagaatttgtcaacttgggggtgaacttggacttactcttcctatttatagcaccactgttgttgcattctttcaggctttcaacaaaaataatactattatacatgctatctttcttc

SEQ ID NO: 20710 - DNA, 1113 bp, Gossypium hirsutum
  Clone ID: GOSHI-09MAY01-C2769_1
ggcttatttttcccccgcgtccgaaaagattggaccaaacaagcctttatcagaagattagagaatcgaaaaacgacacattgagctgacgctggagagggcgtgacacccagagaccctaatctgcttccttgccttaaaaaaacgagtttttaataaaaaaggagaaaagtttgtggatttcgaggtgttgtgcagataaaggatgagtacactggatgcaactagagcagaacttgctcttgtagttttgtatttgaataaggctgaagcaagggataagatatgcagggctatacaatatggctcgaaattcttaagtgatgggcagcctggcacagcacaaaatgttgacaaatcaaccagcttggcacggaaagttttccgcctttttaagtttgtgaacgatttgcatggtcttattagcccagttcctcaaggaactcccgttccacttgttctgctaggaaagtcaaagaatgcactgttgtcaactttcttatttctcgatcaaattgtgtggcttggcagaacaggcatctataagaacaaagaacgtgctgagttgattggacgaatatcccttttctgttggatgggatcatcaatatgtaccacattggttgagcttggggagcttggaaggctatctgcatcaatgaaaaagttggaaaagagacttaaggatagtgacaagtacaagaatgaggagtatcgtgcgaagctccaaaattcaaatgagaggactttggcccttgttaaagcgggaatggatatagtagtagcagttgggcttcttcaattggcaccgaagaaagtcacccctcgagtaacgggagcctttggatttgtttcatctctcatctcctgttatcagttacttccgtcaccgcccaagtctaagacaccttgaagttggaagcctgtttttcccgacaagcttgagtatctctatcgtttaaataattttattgaacttgtgctttaagttcataatggtgtaagctttgaagaatttgtaaacctggggcgacctgacccgattctcttcctctgtagcaccatctgtttcaaccaaataatactaatatatatttgattttaggttgtttt

SEQ ID NO: 20711 - DNA, 419 bp, Gossypium hirsutum
  Clone ID: LIB3135-009-Q1-K1-D4
gacggaggcgtccggaccttatgcatgctaatggtcatatgttcttggatacgtagagaaaccttcgcaccagggaggagatattccaataacatatgaccttatgcatgctaatggtgtctttagcttgtatcaagataagatatgcagggctatacaatatggctcgaaattcttaagtgatgggcagcctggcacagcacaaaatgttgacaaatcaaccagcttggcacggaaagttttccgcctttttaaggtatctcacaatgtcaaatactaaaagtaactagttagtttttttgaaaaaggatgaactttgttcacttaatagataattctcttttgttctaccattgaatgtacagcactctgagttagtatttaatacttggaataaagatgtatgctttccttttggt

SEQ ID NO: 20712 - DNA, 411 bp, Gossypium hirsutum
  Clone ID: LIB3135-019-Q1-K1-E10
gtgattcgtcgaacgaggggattgcatataattcatgggggcactggaagctggcggtgcgggacttggacgaagctctttgcttgtaattacctttggagcacgggtaaggatacccggggctatacaatatgactcgaaagtcctaagtgatgggcaggctggcacaccacaaaatgttgacaaatcaaccagcttggcacggaaagggatccgtctctttaagattgtgaacgatttgcatggtcttattagcccagttcctcaaagaactccccttccacttgttctgctaggaaagtcaaagaatgcactcgtgtcaactttcttatttctcgatcaaattgtgtggcttggcagaacaggcatctataaaaacaaaaaacgtgctgagttgattggacaaatatc

SEQ ID NO: 20713 - DNA, 408 bp, Gossypium hirsutum
  Clone ID: LIB3272-051-P1-K1-B8
ttcttcctcaatttaccaaatccctagtgcttttaaattggttcatattggtttttagctgtacgaagaaaaatctcttgactgtgtcgtgcagataaaggatgagtacactggatgcaactagagcagaacttgctcttgtagttttgtatttgaataaggctgaagcaagggataagatatgcagggctatacaatatggctcgaaattcctaagtgatgggcagcctggcacagcacaaaatgttgacaaatcaaccagcttggcacggaaagttttccgtctttttaagtttgtgaacgatttgcatggtcttattagcccagttcctcaaggaactccccttccacttgttctgctaggaaagtcaaagaatgcactgttgtcaactttcttatttctcgatc

SEQ ID NO: 20714 - DNA, 824 bp, Gossypium hirsutum
  Clone ID: GOSHI-09MAY01-C2739_1
cggacgcgtgggcggacgcgtgggggatgttcatcctattacaccctcgctggataagctgtgggatggtcatgatggtgcaaagaaagagcacctacccaatgataagaagccatcctccctgctgtttccttctagcaggaggtttgcttttgctgatgatggagccagtgatcacccaatacttgattggaagtccagttcaatgtctcaacaggatgtgacgaagtcttttacagctttggaatctacccctacaccatcttccaagagtgaagagacctccatcactcctccagaagcttggggtggtgagaagatatctgacaaatttgctcaccttcgccagctgccatctcgttttgggatgccagcttctggtggtctgacaacgagctctatttatgctggacaagatcagtcgtcaatgctcagtcagaccagttctaacctgagctatgaaaatttgcacacgaaagatgcctcttcaaatcaggaggcttcttcattgggatttcctgaacatttctcctcgagctccatgtctgctttatcttttggttcaaaaggcattactagagctggcagccttgactcaccaaaactagcgtctttagcaccgcctcgaaggttttcaacatatgctgagagaattagcactacatctgcttttagtgatggaacatcccatttggtggcttctcccaaaacaaagaaaacgggagctgttaccagagaagaactgtttaatagccgatcgaggtctgattcattgactgcagcagcatcaggtgtttttccagctttgtatggaggaacatttc

SEQ ID NO: 20715 - DNA, 643 bp, Gossypium hirsutum
  Clone ID: GOSHI-09MAY01-C2729_2
gttacttctctggctctccccccccgccctttccctttcacgcagaaaccctcgccggcatcttgtccgactccgatccccttcgccggaacctttttaccgctttcttttagttatttcagaaatgtacaataacttgggagcccagcctggggtaccaagaccgccaacaaatcctcagccaaatccatttggcaattcattttatggggctggttctggtcttatccgaggtggtctgggtgcatatggagagaaaattttgggatcaagttctgagtatgtgcaaagcaatataagtagatacttctctgatccccagtactactttcaagtgaacgatcaatatgtgagaaacaaattgaaggttgttttactgccatttcttcacaggggccattggacaagaataactgagccagtaggtggcaggctttcctataaacccccaatttatgacataaacgcaccagacttatacatcccatttatggcatttggcacctatgtcgttcttgctggattgtcacttggccttcaaggaaagtttagccctgaagcacttaactggctgtttgttaaggggttgtttggctggtttctgcaagtctcgctgctgaaagtaacattactatcactgggc

SEQ ID NO: 20716 - DNA, 902 bp, Gossypium hirsutum
  Clone ID: GOSHI-09MAY01-C2729_1
ctaagttttccgctgccgtcctcaccggaatatcgtcggaggttcgatctatatcgccgggatattcttcaagccaacagctttctctttagtcgaaagaaatgtacaataacttgggagcccagcctggggtgcctaggccgcctgtaaatcctcaaccagcaccatttggtaatgcattttatggtgctggttctggtcttatccgaggtggtctaggtgcatatggagagaaaattttgggatcaagttctgagtatgtgcaaagcaatataagtagatacttctctgatcctcaatactactttcaagtgaatgatcaatatgtgagaaacaaattgaaggttgttttactgccatttctgcacaggggccattggacaagaataaccgagccagtaggtggtaggctttcctataaacccccgatttttgacataaatgcaccagatttatacatcccatttatggcatttggtacctacgttgttcttgctggattatcgctcggccttcaaggaaagtttagtcccgaagtactcaactggttgtttgttaagggattatttggctggtttctgcaagtcatgctgctgaaagtaacattactctcactgggcagtggtgaggcacctttgctcgacattatggcatatgcagggtatactttcacaggactctgtttggctgttctcggaaggatcgtatggagatattcatactactttttgatgccatggacatgcttatgcatgggagtcttcttggtaaagacaatgaagcgggtcctctttgctgaggttagaagttacgattccagcaagcaccattatcttttgctctttgttgcccttgctcaatttccactttttacgtggcttggcaacatcagtgttaattgg

SEQ ID NO: 20717 - DNA, 285 bp, Gossypium hirsutum
  Clone ID: LIB3585-028-P1-K1-D12
gcaagtcatgctgctgaaaccagccaaataatcccttaacaaacaaccagttgagtacttcgggactaaactttcctataaacccccgatttttgacatcaatgcgcccgattttttcatgcgctttatggcgtttggttcctactgtggccttgctggattattgctccgtgctaaaggatcgttttgtccccgagtactcgctgaggttctgatcaaagtctatgttggtaggattaacccaatatattggtcaatacacgagggggtggtgcgcctattttt

SEQ ID NO: 20718 - DNA, 716 bp, Gossypium hirsutum
  Clone ID: GOSHI-09MAY01-C2699_4
cccacgcgtccgtgaaattgttgtctccaaggcactggtggcaaagattgaccgaccaatgggaatagtctgcttccaggtagcaaaggatagcaatgaaattctcaattcgtgggcttcgaacttggaaaaacttcttgatcttgtcgagagggccggccgcccgcgtcccaaagaaaccatggttcacaaagctgctctgttagtatgaaaacgatgaacattcaccaagctacaggttgtggccaagttgaaatgtgctttttggagacaagtggtctaatagatggtaaaaaaaaagtatgttgctatgaccttttctataactgaagtttggttactatggggaaaaccaaaagatggtgcttgttttttatagcagttgggaggaaaacaattaggtttggtatttttattcttcatcactattcgacaatttcgcatctttcacgttatttcaccactatttcttcgagcacttcattgcacttgtattcttgcgtcactttcgtctttgatgatttccatgcgtcggagtaactcgttttaacaaagcttctttatcagtttactcccatttggtatctttaaatgattgcattgcttaaaaaaaaaaaaaaaaaaaaaaaaaataaataaaaaaataaaaaatatatataataattttattatataaaaaaaaaaaatatatatattatttaatttattattatttt

SEQ ID NO: 20719 - DNA, 456 bp, Gossypium hirsutum
  Clone ID: GOSHI-09MAY01-C2699_3
aacggaaaaaaaacaatgcgtagcgagagagagagtgaggcatatgctactgtgatggatgcttcgagaggtagcagacttaaagctccttgctgatcagtgcaaatcaaacccttcaattatccacactccctctctttccttcttcaagtcctatctcctaagtctgggagctcaaattccaaccgacccacggacggatagaggtggtgttaaaatggaagagcctgagcaacactctgatgacaagaaaccctatttttcacatgaagaagatgatgatattattgagtccgatctcgagttagataataacggtccatgtggaacctgacaacaatcctccacaaaaaatgggagactcttcggctgaagttacggaggataagcgggatgctgctcaatccgaaaaattaaaagccatggatgcgatatctggaggtaagctggatgaac

SEQ ID NO: 20720 - DNA, 637 bp, Gossypium hirsutum
  Clone ID: GOSHI-09MAY01-C2699_2
tgaacataatatccttgttgtttcaaagtactactcgaggattacattgaagagacttgcagtgttgttgtgtctcactatccaggaagctgagaagcatctttctgaaatggttgtctccaaggcactggtggcaaagattgaccgaccaatgggaatagtctgcttccaggtagcaaaggatagcaatgaaattctcaattcgcgggcttcgaacttggaaaaacttcttgatcttgttgagaagagttgccaccaaatacacaaagaaaccatggttcacaaagctgctctgaaagtatgaaaacgatgaacattcaccaaactacaggttgtggccaagttgaaatgtgctttttggaggcaagtggtctaatatgatggtaaaaaaaagtatgttgctatgaccttttctataactgaaatttggttactatagggaaaaccaaaagatggtgcctgttttttatagcagttgggaagaaaacaattaggtttgttatttgtattcttcatcactattcgacaatttcgcatctttcacattatttcaccactatttcttcgagcaagttacggaggaaaagcgggatgctgctcaatcggaaaaataaaagccatggatgcgatatctgga

SEQ ID NO: 20721 - DNA, 1630 bp, Gossypium hirsutum
  Clone ID: GOSHI-09MAY01-C2699_1
cggtcgacccagcgtccgccccgcgtccgaattcgtcctccctttttctcgccgccgggtctcgtcacttgaaggctgaagctatggagggtaaaaatgcgaatctggaagcggcgatcgaccagttgcttaatgttgagaagcagatgcggtttgccggcgatgtggttggcaccaagaaagcggtctctgacattttgcagctctgctttgaagctaaggattggaagtctctcaatgaacagatcgttaatttgtctaagaaacgtggtcaacttaagcaggcagtgactgcaatggttcagcaagcaatgcaatacattgatgaggcaccagatcttgaaactcgtatagagcttatcaagaccctgaacactgtgtctgctggaaagatttatgttgaaattgagagagcaagattgatcaggagacttgcaaagattaaagaagaacagggccttattgctgaagctgcagatttaatgcaggaagttgcagtggaaacttttggtgccatggcaaaaactgagaaaattgccttcattcttgaacaagttcgcctctgcttagatcgccaggattatgtccgtgctcaaattctgtcaaggaagattagtcctagagtatttgaggtcgatacctccaaggaaaagaagaaacccaaagaaggtgacaatgttgtggaggagcctcctgctgatataccttcactattggagttgaagcgtatctactatgaactgatgattaggtattactttcataacaatgactaccttgaaatttgccgttgctataaggcaatatacgagattccatccataagagaagatccatctcagtggattccggtcttaagaaaaatctgttggtacttgatcttggccccacatgatccaatgcagtcaagccttcttaattccacattggaggataagaatctttctgagatcccaaaatttaagttgctgttgaaacagttagttacaatggaggttatccagtggacatccctgtggaatttatacaaggatgaatttgagaatgagaagaacatgcttggaggttctttgggtgacaaagctgcagaagatttgagaatgagaattattgaacataatatccttgttgtttcaaagtactactcgaggattacattgaagagacttgcagagttgttgtgtctcactatccaggaagctgagaagcatctttctgaaatggttgtctccaaggcactggtggcaaagattgaccgaccaatgggaatagtctgcttccaggtagcaaaggatagcaatgaaattctcaattcgtgggcttcgaacttggaaaaacttcttgatcttgttgagaagagttgccaccaaatacacaaagaaaccatggttcacaaagctgctctgaaagtgtgaaaatgatgatattcagtgattgcaggtggttgaatgtgtttgtaactgaaactatagaaaacctaggaggaggaaaacaatgaagtttagttgggttatttgtattgctcaaatcattttttgagttgtgcatttgcttgtattttcccagtggagttcaattcaaattctgggtgggaaacatttagctgaagaatacaagaaaattattacat

SEQ ID NO: 20722 - DNA, 378 bp, Gossypium hirsutum
  unsure (1)..(378): unsure at all n locations
  Clone ID: LIB3584-006-P1-K1-G1
ccccgcgtccgccccgcgtccgcccacgcgtccgcacaattcgtcctccctttttctctctgctaggtttcgtcatttgaaggctgaagctatggagggtaaaaatgcgaatctggaagcggcgatcgaccagttgcttaatgttgagaagcagatgcggtttgccggcgatgtggttggcaccaagaaagcggtctctgacattttgcagctttgctttgtagctaaggattggaagtctctcaatgaacagatcgttaatttggctaagaaacgnggtcaacttaagcaggcagtgactgcgatggttcattttgttttgcatttcatttatgttgctccagatcttgtaacttcgtttgagcttantatgaccct

SEQ ID NO: 20723 - DNA, 1129 bp, Gossypium hirsutum
  Clone ID: GOSHI-09MAY01-C2689_1
ccttgatgctcgaattgttgatgttaatggcgaaatcctcgacagagcagccatgggcgaagatctggtttgggcaatcagaggaggtggaggagcaagccccgcgcgccccctcgcatggaagataaagctggttgctgttccagaaacagtggcggttttcacagttccgaagaccttggaacaaggtgccacaaagatcctgtatagatggcagcaagttgcagataagctggatgatgatcttttcatcagagtcgtcattcaagtgacaaaaacaagccaaacaggcaagagaacagtgacaacagcctacaatgccctgtacctaggagatgctgagaggctcctccaagtaatggaccaaagctttccggagttgggtttggcgcgaaaagactgtatcgaaacaagctggataaaatctgtgctctacatagctgggttcccaagtgaaacacctccagaagtactgctagaaggaaagtctttattcaagaattatttcaaagccaaatctgattttgtgcaacaacctatccttgaaaccgctcttgagaagctgtgggaaattttgttggaagaagagtctccgttgatgatatggaacccttacggaggaatgatggcaaacatttcggattctgcaattcctttccctcacagaaaaggtaacttattcaaaatccagtacgtgacctcatggtacgagggaagcaaggacgccacccgaaagcacatggattggattaaggggctgtatgattacatgagtgcttatgttcccacatctcccagggcggcatacgtcaattacagagacctcgatttgggaatgaaccacaacaacgctagcttcaccgaggctagtgtttggggcgccatgtatttcaagggcaatttccgaagattggtaaaaataaaaagcaaagttgatcccggcaattttttcaggcatgagcagagcattccagttgtcctggaataggaggagaaccaggaccgcgcttaaataaaatagattatccttgtttagtgctttctttgccctttccagtaaagcaaattaagatgactatacaataagacatgcatgtttttgttaattaattggtaaagaaggaggacc

SEQ ID NO: 20724 - DNA, 554 bp, Gossypium hirsutum
  Clone ID: GOSHI-09MAY01-C102682_1
ttggctgggtggtacctgatgactaatggagggggagatgagttattcacttgggaaatggacagattttgatatcgaggcatacgaaactggtgctgaaatgggctgggatattgttcaaactttagttgatggaatggtagacgacctggtttcctcttgaattgcatacatgccgcatgatctgtgagtatcttttgtaaatcatgttgacatgctatctcactgaattatattttccatttctgataaagaaacaagctggtaaatttgtaaaaatgggtcatagatgggaaccatgttactctgactttttcatttcccacgaattatctgtgtccgagtaacataggaacggatggaggatggtatttttgcttggggccattggagagtattgtatgagcatttgtacctgtataatctttcatcttcaatgtaacttataactcttctgtaacaaatgattagcttgaagaactactcattaatagttgttgcctaaattggaaggtaaagatcccttcatttaatggtctatttgttaaggacta

SEQ ID NO: 20725 - DNA, 867 bp, Gossypium hirsutum
  Clone ID: GOSHI-09MAY01-C2649_1
cattctcgctgtcagggaagcaacgatagagtgaatcattgctcagctattgaaatacaactccagttaactgcgtttaagactttcctagatcttgctggcaaccaacttacaggaaaggattttacagaagcatttgatgcagcttgctttcctcttactctcttctctagctcatttgatgctggttgggcttctgggatctcagctacggtgatccaaggtttgttggatatgttggtggaggggggtgcagacaatgtcaaccagtgtttccttgaagcctctcgattcggcagtacagaacttgttcgcattttattgcagattgcccaacggaatagcttggatgttgatgttgatcttgccttgggttttgcctcgcattactgcaagattgggacaatggagtgtctagtggaagagggtaatgctatggcgtttttgggccctttaatgagagcagctgaaagaggatgcatgcaggttgtccagtggtttgttaaaagaggttgtcgagacatggagctctgtctggccctcactgccgctacttccagcagccaagttggtgtggctgcatatctcctcccccatgttcctaagcatgtcctaacggccctcagcatcgaaattcttaaggctgcgggtgaacgaagtgggggatctcttgatggtgttgcgtttctcctccactctgacttcttaggtgatgctgctgctacttatgctgttgcagacagcattgcaaagtctgatgatgaggctgttgctcctgagctgagagcatttgttcaagaacactggtcagaggcagctttcttggatggattaaagcaagggcaagaacattacatgaagctgatg

SEQ ID NO: 20726 - DNA, 187 bp, Gossypium hirsutum
  Clone ID: uC-gsronu33B162a12b2
cccacgtttccgcggggtgctattgacgcctcacgggagcggatgcagcttgctttcctcttacactcttctctagctcatttgatgctggctgggcttctgggatctcagctacggtgatccaaggtttgttggatatgttggtggaggggggtgcaaacactgtcaaccagcgtgaaacttgaag

SEQ ID NO: 20727 - DNA, 907 bp, Gossypium hirsutum
  Clone ID: GOSHI-09MAY01-C2619_1
gtcaaaaggtgccaaggcaacactaaatgctcagattctcgacctaccagctcctggtaggttcgacaggtgaaatggagtggtggcgataaactgacacttaatttgccaattagtataagaactgagcaaattaaagatgaccgacctgagtatgcatccgtgcgggcaatactttatggcccatacctgctcagcggttatagcagcggtgactgggacataaaaaccggctcaacaggttcagatgcggactggatttctccagttcctgcttcttataacaatcatcttgttactttttcccaagagtctggtgaatcaacttttgtcttaacaaacatgaaccaatctatccgaatggagaagttccctaaagctggaactgatgctgctattcgtgccacgttcaggctcatctttgatgacacctcggaagcgttcgccccccgtccgccccccgtccgggggactggcgtgcttgagtcgtttgactttccaggaatggtattagtgccgcagggaacggaaaataatcttgtggtaactgatcctcccaatgatactgcaacttctagttttggcatagttcatggattggatggaaaggacaataggggggggggggggtcggtaacccaaaagggatgctacatatataacggtgtaaactatagttctagtattggcatgaagctcagctgcaattcatcctcatcatcatctgaggccggattcagtcaggcaaccagctttacaatgaacaacggattaagtgcataccatccaatcagctttgttgcaaaagggagaaataggaattaccttatggtccattgctgagcatcagagatgaatcttacagcgtttatttcaatctgcatccctggtgtttcaggttcaggtg

SEQ ID NO: 20728 - DNA, 401 bp, Gossypium hirsutum
  Clone ID: LIB3584-054-P1-K2-A2
ctggactaaaaccgctacaggtagatcggctgattctccagtctgcttttatacaatcatctcgttacttgttcctaagagtctagtgaataaactcttgtcttaacacacatgaaccaatctatccgaatggagaagttccatatagctcgaactgatgctgctattcgtgccacgttcaggctcatgtttgatgacacctcggaaaaaatttcacgcattgaagaagccattggtaaaactgtcatgcttgagtcgtttgacttttcaagaatggtattagtgccgcaaggaacggaaaataatcttgtggtaactgatcctgccaatgatactgcaacttctagttttggcatagttcatggattggatggaaaggacaatagtgtgtcattggagtc

SEQ ID NO: 20729 - DNA, 670 bp, Gossypium hirsutum
  Clone ID: GOSHI-09MAY01-C2629_1
gttttcgtcttcctcatatcggcaatccccatcgcttacatcatctctgaggaacgtgccgtgcctgccacccacgttttccactaccatagcaccggctttttccgggagtgcgccaagtgggacgaccaaggccggcgcttcctcgtcagtttcttggaaggcggcgtcggtgaaatcctggttcccgacgattacgcaccgggaccgggggatgtcgtgttgaaagaggtcaccgtggtcaaagattttgacttggccggaaattcttccctcggaatcgccgtcgacaggctcagaaaccggctgcttgtggttgtcgccgacttgctcggcaaccgatacagcggtctcgcggcttatgatttgtcatcgtggaagcggctatttctaacccggctcagtggccctagcgatgaaaaatccttcgccgatgacgtcgcaatagatgccgatggtaatgcgtatgtcaccgatgctaaagccagcaaaatctggaaagtcggtgcccatggcgagttattgtctatcataagaaacccactcttcactccaagacagtggttcaaaaccttggtcgcattgaacggaatcgtttaccaccccgccggttatttgctcgtgctccacccttttcgtggggttttgcgtttggtcggtctggcccagg

SEQ ID NO: 20730 - DNA, 731 bp, Gossypium hirsutum
  Clone ID: GOSHI-09MAY01-C2149_1
ggcattatctagagaggagcacaaacttcgctgatctggtaattttaatcaggtgaaattctggaggtggtggaaatatcagaaccaagaagatttttgttggagggttgcctccgactttaactgaagatggatttcgccaatactttgaggcttatggtcatgtaactgatgtagtaatcatgtatgaccagaatacccagaggcctcgtgggtttggttttatctccttcgacagtgaagaggcggttgatagggttttgcacaagagttttcatgatttgaatggcaaacaagttgaagtgaaaccggcccttcctaaagatgccaatcctggtggggctagccggtctatgggtggtggtgccggtggttttggaggttaccagggatatggttcttctggtgggaattcaaggtcttatgatggtcgtatggactccaattacatgcgtgcccagggcactggagctggctttccaccttatggttcatcaggatatgcacctggttatggctatggtcctgctagtaatggtgttggttatggtagttatggcaattatggtggtgcaggtgctggttatggtgcccctgccggtgcagcttatgggaatcccaatgctggctatgcaagtgggccttctggtgcccctagaagttcatggggcactcaaactccatctggttatggtgctatgggttatgggaatgctgctccttggggtgct

SEQ ID NO: 20731 - DNA, 682 bp, Gossypium hirsutum
  Clone ID: GOSHI-09MAY01-C2179_2
gcgaatatcctcctttttgcgcccttcatttccagagagagagaaagagcgttccaacaatcttcgtctctttctctcgcttgccgtttttctctcttaggttttgattcttctttgtagttcgaggtgttttaaagacaagtcaagatggtgaagtttacagctgaggagcttcgtgccattatggacaggaagcacaacatccgtaatatgtctgttattgctcatgtggaccacgggaaatcaactcttaccgattctcttgtggctgctgctggaattattgcacaagaagttgctggtgatgttcgtatgacagatacccgtgctgatgaggctgagcgtggtatcacaatcaagtctactggtatctctctttattatgaaatgtctgatgactctttgaagagctacaaaggagagagacaagggaatgagtacctcatcaatcttatcgattcccctgggcacgttgacttttcatccgaggtcacagctgctctacgtattactgatggtgcccttgtggttgttgattgtattgaaggtgtctgtgtgcaaacagagactgttctccgtcaggctcttggagaaagaatcaggcctgtcttgactgttaacaagatggataggtgcttccttgagctccaggttgatggagaggaggcttaccagacattcc

SEQ ID NO: 20732 - DNA, 1157 bp, Gossypium hirsutum
  Clone ID: GOSHI-09MAY01-C2179_1
cccacgcgtccggagtttttcttgcaatcttcatcccttttctctcgccgcctaactctaaggttttgattgttaagtgtaatttgaagacaagtcaagatggtgaagtttacagctgaggagcttcgtgctatcatggaccggaagcacaacatccgtaatatgtctgttattgcccatgtggatcatgggaaatctactcttactgattcacttgtggctgctgctggtatcattgcacaagaagttgctggtgatgttcgtatgacagatacccgtgccgatgaggctgagcgtgggatcacaattaagtctactggtatctctctgtattatgaaatgagtgatgattctttgaagagctacaaaggagagaggcaagggaatgagtacctcatcaatcttattgattcccctgggcacgttgacttttcatctgaggtcacagctgcacttcgtattactgatggtgcccttgtggtcgttgactgtattgaaggtgtctgtgtccaaacagagactgtcctccgtcaggctcttggagaaaggatcaggcctgtcttgactgttaacaagatggacaggtgcttccttgagcttcaggttgatggagaggaggcttaccagacatttcagagagtgatcgaaaatgctaatgtcatcatggccacctacgaagatcctcttcttggtgatgttcaagtctaccctgagaaggggacagttgccttctctgctggtttgcatggttgggcttttaccttgaccaactttgctaaaatgtatgcctcaaagtttggagtcgatgagtccaaaatgatggaaaggctttggggtgagaacttttttgatccagctaccaggaaatggaccaccaagaacactggcactgccacctgcaagcgtggttttgttcaattctgttatgagcccatcaagcagatcatcaacacttgtatgaatgaccagaaagataagctctggcccatgctacaaaagcttggtgtcaccatgaagtctgaagagaaggacttgatgggtaaggccctcatgaagcgtgttatgcagacctggcttcctgcaagcagtgctctccttgaaatgatgatctttcacctaccctctcctagcgtggctcaaaaatatcgtgttgagaa

SEQ ID NO: 20733 - DNA, 486 bp, Gossypium hirsutum
  unsure (1)..(486): unsure at all n locations
  Clone ID: uC-gsflmaxxa002d07b1
catcgactataaatccctctgttgctccaccctcaaaatcttcgtctctttattttctttcgccgcctttctctcccagtttgattctttgttcggggcaatttaaagacgagtcaagatggtgaagtttacagctgaggagctccgtgccattatggaccggaaacacaacatccgtaacatgtctgttattgcccatgtggatcacgggaaatcaactcttaccgattctcttgtggctgctgctggtatcattgcacaagaagttgctggtgatgttcgtatgacagatacccgtgcagatgaggctgagcgtggtattacaatcaagtctactggaatctctttgtactatgaaatgagtgaggattctttgaagagctacaagggcgagaggcatgggaatgagtacctcatcaatcttattgattcccctgggcacgttgactnttcatctgaggtcacagctgctcttcgaatactgat

SEQ ID NO: 20734 - DNA, 289 bp, Gossypium hirsutum
  Clone ID: LIB3135-046-Q1-K1-D2
tttactttaaaaacctgaatcttggcttgcttttgcttattagggatgacaaactagccctttcccctgcggatcctctggttttgggggattgcgctttcagttatttggtacttttattatatgagcactactgggcattttgttatgtcataatcttcggggtgattgcctttctatcaaatgacagaataccaaactaaaataaaaaggggagtgcggccgcattataagatgacaatgtacttacgcaagattgcaagactgtggataaactatatgggcactt

SEQ ID NO: 20735 - DNA, 262 bp, Gossypium hirsutum
  Clone ID: LIB3583-022-P1-K1-E1
ctttggttttgatgctataatttactttaaaaacctgaatctttgcttgcttttgcttattagggatgacaaactagcttttttccctgcggatcctctggtttttgggggattgcgctttcagttatttggtacttttattatatgagcactactgggcattttgttgtgtcaaaaaaaaaaaaaaaaaaaaaaaaaaaaaaaaaaaaaaaaaaaaaaaaaaaagaggaaaatcaaaaaaaaaaataagattaacccgggg

SEQ ID NO: 20736 - DNA, 912 bp, Gossypium hirsutum
  Clone ID: GOSHI-09MAY01-C2109_1
cccacgcgtccgcttgagttgtcgtttcaaaatcccatccgttcttatcagtagcagtttccaaaaaccaaaataatctatacctgctaccatcctttgataatctatttccctcaaaaactctcagtctgggttcctttgccagtgcctctcagaagcaaactcgtgccgattcaaatcttctcccatcgggtaagtggactccgcttccaacaagcgcagtttttgctattctatgtgcttatgagttccccgatctgtgaatatgctgaaaaataatctcttgaaaacacctttttctgttctggatgtcattgataatggctccaatcactgatttatccggtgaagtcgtttgggatttcttaataattgttttagagtctcccatgattgttgccgattgtaaacctagtgaaatccctaattttataccctctaaacatgcatgtgcttctgctgcaaatgaggaggaaatattgttgtgaatgatggactttaaggccatgagattccccgtcatatcgcgaaccaccagacccgtcgcagatgtgaagctactactatcaaatgctccatcaaaatagattgtcgttctcggcatgtcttcttagactctaaaaggtctgttcatatttacaggtcttttcatttttctgaccacttcatgttctgccagagacctctgtatgctttgcgctaactctctattggttgtgtttttcctttcatgcacgaactgattcctggagaaccatattagccataaagtataacaaaaaagtctacattggatgtcgtttcctctcttaaaaaccccggacagtcacggaagaaatgggggctatcttctacccaggaacaacctcgggggcatccatcatttgaaattactcttttgtactggagatt

SEQ ID NO: 20737 - DNA, 566 bp, Gossypium hirsutum
  Clone ID: LIB3582-029-P1-K1-C2
tgctattctatgtgcttgtatgttccctgatctgtaaatatgctgaaaaataatctcttgaaaacaccgttttttgttttggatgtcgttgataatggctccaatcgctgatttatcaggtgaagtcgtttggcatttcttaataactgttttagagtctcccatgatttttaccgattgtaaacctagtgagatccctaattttataccctaaacatgcatatgcttctgctgcaaatggggaggagatactgttgtggatggtggactttaaggccatgaggctccccgtcagatcctgaaccaccagacccgttgcagatgtagaactgctactatcgaacgctgcatcgcaatagaccgtcgttctcgagaaccatatgagccataaagcataacaaaaaagtctacattggatgtcgttacctctcttgaaaacctagggaagtcacggaagatatagaggctgtcttctaaccaagaacaacctcgggggcatctatcattagaaattactcttctgtaccggagattagcaaaattcggaataaaatcccaagagattt

SEQ ID NO: 20738 - DNA, 386 bp, Gossypium hirsutum
  unsure (1)..(386): unsure at all n locations
  Clone ID: LIB3148-044-Q1-K1-C4
cggaataaccgggccggccccacgcgtccgcccacgcgtccggctgcaaatgaggaggatattttgtggtgaatgatggcctttaaggcgaggggattccccgtcatatcgcgaaccaccaaacccgtcgcagatgtgaagctactactatcaaatgctccatcaaaatagattgtcgttctcggcatgtcttcttagactctaaaaggcacgaactgattcctggagaaccatattagccataaagtataacaaanaagtctacattggatgtcgtttcctctcttaaaaaccccgttgcaggacagtcacggaagaaatgggggctatcttctacccaggaacaacctcgggggcatccatcaatttgaaattactcttttgta

SEQ ID NO: 20739 - DNA, 219 bp, Gossypium hirsutum
  Clone ID: LIB3145-022-Q1-K1-B2
cccacgcgtccggtcgtttggcatttcttaataactgttttagagtctcccatgatttttaccgattgtaaacctagtgagatccctaattttataccctaaacatgcatatgcttctgctgcaaatggggaggagatactgttgtggatggtggactttaaggccatgaggctccccgtcagatcctgaaccaccagacccgttgcagatgtagaact

SEQ ID NO: 20740 - DNA, 1394 bp, Gossypium hirsutum
  Clone ID: GOSHI-09MAY01-C2129_1
ccccgcgtccgcccacgcgtccgagatgaccactccggtttgcccattcgtgaaagcggctcgaccggacgataatggttcggccaaaaaatccaccgtcggcggcagcgaagcaacaaggaaagattccggtgactccgccaccgtgtctccgaaatgcccttttggttacgattccaataattttaagctcggtcctctcagttgtatgatctgtcaagcacttctctttgactgcaccaaatgtatcccttgttctcatctcttttgcaaagtgtgtatatctcggtttaaggattgtccactatgtggagctgacatagagaaactggaagctgacaccaatcttcaaagcatggttgatcgatttatcgaagggcatgctaggatcaaaagagcacatgttggcgtcaatggtgaaggagagcaagtttcaaatgaccataagaaggtaatttacgaggatgtctcgttggaccgaggtgctttcttggtgcaacaggccatgagggcattccgtgcacagaatatcgaaagtgctaaatctagactcattatgtgtgcggaagacatccgagatcaattagagaaaatgggaaacacatctgaattgtgctcacagctcggcgcagttctgggtatgcttggtgactgctgtcgagcaatgggagatgctgctgctgcaatcaattatttcgaggagagtgttgagttccttaccaaattgccagctgatgatcttgagatcacacatacactatctgtttcacttaacaaaattggagacctaaagtattatgatggagatcttcaagcgtcaaggtcttactacttccgatcactgggtgtccgccgtgatgttatcaaaaaccatcccggtgttgcttcacagattctggatgtagctgtttctcttgcaaaagttgcagatgtagacagaactcttggaaaagaggatgtggcggtcgatggatttcaagaaggcataaaattgttagaatctttgacactgaaatccgaagaagccggtctcgagccaaggcgcctttcagtgctggcattcctcaaatctcagcttgaagagaaacagcatgaggcaactgctagctctgtatcctcataatggaaaataactatgaaccaaaataaaggagccggtttctgtacatacagaagctcgagtttgccgatcaatgagctctgccccgttccgaaaaaaagagacaatccctgtagatgtgccagtgccagagctagagccagagactagtgaatatttggttaatccttagagcacaagtagaaagtcatgcttgaatttctctgttaaatgtcacttttcaacttgagttttttatataataagaggcaaacaacaccacctccattttagc

SEQ ID NO: 20741 - DNA, 809 bp, Gossypium hirsutum
  Clone ID: GOSHI-09MAY01-C102082_1
ccgggtcgacctcgcgtccggcggccgattgtgctggaaaatctgctggatgaggggtagagttttatgatgcatgggacgagctaagctccaataatgcaccacatacttttgttcgcgacattgaagctgaactgcgtgaaataagattgaatttactcgtagagatcgaaaagaggaagaaggctttaagaaactttgggggaaatgcgatgcaagtggcaaagaatcagccaagagtttgctgtagcaggattggcattgccagtagatccggttgatgcgacagatgatgaactggtgaaaccagttgaagaactgaggcagcaagagagtgttgcccgtcttgtatctttatctgtgggaagaggcgttgcaagggctgagatgcagatggagatggattctcaaattaaattgaagaactttgaagtcgcccgattgttggcccggttgccctattacaaggctgtaaatcaggaaatgtctcagaggacccaagaggctatagagatggcccggcgtgatagccaaaggaaaaaaagaagccaaaaatgggtttggggttcgatagccgcagcaattaccctcggcatgacagcgctggcatggtcttccctcccctcaggaaaagcatcatcggggttttctgcccgcattactcaggcccctgttagtgatgatgccatcccaaaaccagctaagtgaaaaaaattattcaatcattaaagctgtggtagccccaatcttgagcttaattctgctggttaatatagtccccccataaaagtgacattcacccgttttgt

SEQ ID NO: 20742 - DNA, 734 bp, Gossypium hirsutum
  Clone ID: GOSHI-09MAY01-C2059_1
ctcgtgccgccttatgcaaaagtccttacatgctcgttaaagggtggcatcgattatttcatgaccttgtaggtcgagaaggccctttcttggagacaatatgtgtaccatttgcaggccttgccatcttactctggccactcgccgtcattggagcagtgttgggctcaatggtgtctagcatcttccttggtgcctatgccgcggtgattggttaccaggagtcctcgttttggtatgggctttgttatatcgttgcttcgttgtccatatatgatgaatacagcactgatgtccttgacatgcctgaaggatcttgccttcccaggcctcggtatcgtaggcacagaaatgaatccttctctaaatctgactccttccgtcctcctgctcgcattgattcacttacaaatgcaaggcttgatttgaagccactcgagctactcgagggcttatttaaggagtgccatgtccatggtgagaaaatggtgtctgaagggctgataacttctaaggacatcgatgatgccaagtccatcaaaggaagtagagtggtcagcattggcttaccggcttattgctttcttcaggcactcttgcgctctgtggatgcgaatagactgggcatattactgagtgacaatacagaaataacggccacaaaccgaccaaaagatgcattctttgattggtttcttaacccctttttgatactgaaagagcaaatcagagct

SEQ ID NO: 20743 - DNA, 1122 bp, Gossypium hirsutum
  Clone ID: GOSHI-09MAY01-C2049_1
caacaacgttgtactgagctctattcagaacatttaagttcaccggttgctggtagatctatgacatctcacaatggggtgtgtgtttcacaagagcagtctgattggagaactcaaactcaagtagtggaaaatacaagctccgaagtagaagaagatgtattatcttttgataatcaaagaatcaaggatccagaagtaattagccattcgagttacttgccaaattcaacagtttcgctccatttatcagatcattccagggcccattccttgcaacatagtgagacttttggtgctgttaatatgaatgctgatactccccttgtagataataaagttcgtgacaatttacatcctcatggatctcgtatttcttctttgtcaaatgaataccctgagaagtacataagtagtggtattagttctgatattacctctggaggtttccttccgcttttaaatgaagagcaagggaagcagatggggaaaccactcggtaatgctgagtgcaatactggcaaagatacaggagagaacagcataatttcaaacatattgtcactagattttgatacatgggatgaatccttaacttcaccacagaacttggctaaattgcttggggacactgacaaggagtccaattctctcaaattatccagttcgtggaaagcactgaataacaatcagtccagattcttatttgcaagacaggaggattccaaatacaattcatttgatgctgactcctcatttggtgtttttgggcaaatgctacggaaccatccttctagccaagattttgcagaaagcagggatctctatccaaataagtttgggatttcaaatggtttttcttcccgtaactttaaggattctgacaaatttaccagcagtccttcagttttctcttctaataagctttctgtagtttcaagaactcaaatttcagccccacctggattttctgttcctagcaaggcaccacctcctggtttttcttatcatgagagagtagaccctgtctttgacactgtatctgaaaatcatttgatggactcttcatccctgttaagaaattcatatcaagctcggacaagtgttggcattggtggccct

SEQ ID NO: 20744 - DNA, 1288 bp, Gossypium hirsutum
  Clone ID: GOSHI-09MAY01-C2069_2
tgaaaaaatatgatatcaagttgatcattgcaattttagctgaggagaaacacctgcccatgtatcaagaaatggcatccaagcccaatgtagagtatattgctggaggtgctactcaaaattcaatcaaagttgcacagtggatgcttcaaattcctggtgcaactggttacattggctgcattgggaaggacaagtttggggaggaaatgaagaagaactcaaaagctgctggtgttaatgttcaatatctcgaggatgaaactgcaccaacaggaacttgtgctgtttgtgttgttggtggtgaaaggtcactcattgcaaatctatcagctgctaactgctacaagtctgagcatttgaagaagcctgagaattgggcgttggttgagaaggccaagtacttctatattgctggatttttccttactgtatctccggaatccatacagcttgttgctgaacacgctgctgcaaagaacaaggtgttctcaatgaatctttctgctccatttatttgcgagttcttcaaggatgcacaagagaaagcactaccgtatatggactttgtctttggcaacgaaactgaagcaagaaccttctcaaaggttcatggctgggagactgatgatgttgcagagatagccctgaagatttcacagtggccgaaagcttctggaacatacaagaggactactgttattactcagggtgcagatccagtaattgttgccgaggatgggaaagtgaagcaattccctgttattttgttacccaaggaaaagcttgttgatacaaatggtgcaggtgatgcctttgttggaggctttctttcacaattggttcaagggaagtccattgaggattgcgtaagggctggttgctatgcatccaacgttatcatccaaaggtctggatgcacatacccagaaaagcctgaatttaaataaagctattccactttcctgatctcctctccactgttgttttcaagtttctgattgttaagaaccctcttgctaattgaattttgtttttatttttcctatttgccggtgtcatttcgatgcctgcatcttgaaatggcatatgagaataacattttatgtttattcatgaaaggagccaatcgtttcatttcataagcttatggttgagatgagtttgtggattgtggtcaatgtttttttcccctggtttttcttacattcttccatctggtacccggcccgaaggcatttcaatggcttctaatacttgtttcatttgcttgcattaatgcttagtt

SEQ ID NO: 20745 - DNA, 959 bp, Gossypium hirsutum
  Clone ID: GOSHI-09MAY01-C2069_1
cggatctcccgcgccgccctgaaaaaaaaaatcacctactctctcactttgctctcttcttgttcctgtcctctttcaccaaactatcgccgacaacctctccaaaagaatggcatatgaagggattctgttggggatgggtaatcctctccttgacatttcgttagtcgtggacgaagagttcttgaaaaaatatgatatcaagttgaacaatgcaattttagctgaggagaaacaccttcccatgtatcaagaaatggcatccaagcccaatgtagagtatattgctggaggtgctactcaaaattcaatcaaagttgcacagtggatgcttcaaattcctggtgcaactggttacattggctgcattgggaaggacaagtttggggaggaaatgaagaagaactcaaaagctgctggtgttaatgttcaatatctcgaggatgaaactgcaccaacaggaacttgtgctgtttgtgttgttggtggtgaaaggtcactcattgcaaatctatcagctgctaactgctataagtctgagcatttgaagaagcctgagaattgggcgttggttgagaaggccaagtacttctatattgctggatttttccttactgtatctccggactccatacagcttgttgctgaacacgctgctgcaaagaacaaggtgttctcattgtatctttctgcgcctttctgtcttatacataattcatatgtagctataataatgctctatgtaatgtccttatttagatattctacattgctaatcaatcttatattgatgatgttaataacgtactaatagttgatatattaaattattatatacgtcatatctttgttctcttatattattttataatacacgtactaagtatatcatcacactatcctgattactatagtatatgatgatgtgagagtctaacactttattacttctatatatt

SEQ ID NO: 20746 - DNA, 511 bp, Gossypium hirsutum
  Clone ID: LIB3583-021-P1-K1-H4
caaaacttcaaataccataataactgcttgggtctgcaccaccctgggacaatgtccaacatgaccacgagcgatgtttatttcaatagtttttccccataaaagctcactcattgcaaatctatcacctgctaactgctacaagtctgagcatctaatgaatctcattaactaacaaatgaaatggaatgcctaacacacatctattacatgacacaattccttactgtatctccggaatccatacagcttgttgctgaacacgcttctgcaaagaacaaggtgttctcaatgaatctttctgctccatttatttgcgagttcttcaaggatgcacaagagaaagcactaccgtatatggactttgtctttggcaacgaaactgaagcaagaaccttctcaaaggttcatggctgggagactgatgatgttgcacagatagccctgaagatttcacaatggcctaaagcttctggaacatacaagaggactactgttattacttaaggtg

SEQ ID NO: 20747 - DNA, 423 bp, Gossypium hirsutum
  unsure (1)..(423): unsure at all n locations
  Clone ID: LIB3828-034-Q6-K6-B5
cacaggggccgacagcagcaggaacaacaggaggacaacagaaaaaacgcaaggagcaaaaccagaaagggaggccgaccaggggaaagcgaagcacanccccgttattttcnacccggggggggcttcttgatcctattggagcaggaaatgcccctgatggaggcgtcctttcacaattggctcaagggaagtccattgaggattgcgtaagagctggttgctatgcatccaacgttatcatccaaagcgtctggctgcacatacccagaaaagcccgaacttaaataaagctagaccactttcctgatctcctctccgctgccgttttcaagttcccgatcgttaagaaccctctcgctagcattcgacctccgaatcctgcttccatgtcccctatttgctggtgtcattcctatgcct

SEQ ID NO: 20748 - DNA, 417 bp, Gossypium hirsutum
  unsure (1)..(417): unsure at all n locations
  Clone ID: LIB3146-026-Q1-K2-A6
atcaagtngaacaatgcaattttagcggaggagaaannttctcttcttctttttttttttttttttttgttcnnngnncatgtatattgctggaggtgctactcaaaattcaatcaaagttgcacagtggatgctttaaattcctggtgcaactggttacattggctgcattgggaaggacaagtttggggaggaaatgaagaagaactcaaaagctgctggtgttaatgttcaatatcttgaggatgaaactgcaccaacaggaacctgtgctgtttgtgttgntggtggtgaaaggtcactcattgcaaatctatcagctgctaactgctacaagtctgagcatttgaagaagcctgagaatttggcgtttggttgaaaggccaattactttttattttgctggatttttcctta

SEQ ID NO: 20749 - DNA, 273 bp, Gossypium hirsutum
  Clone ID: LIB3083-099-Q1-L1-C12
atcaaagttgcacagtggatgcttcaaattcctggtgcaactggttacattggctgcattgggaaggacaagtttggggaggaaatgaagaagaactcaaaagctgctggtgttaatgttcaatatcttgaggatgaaactgcaccaacaggaacctgtgctgtttgtgttgttggtggtgaaaggtaagtttgagaatgaccttatttttccttgtttcttataagctgctatttttattgttgtacttatgtttgctccaaggattatgat

SEQ ID NO: 20750 - DNA, 453 bp, Gossypium hirsutum
  Clone ID: LIB3189-005-P1-K1-F2
caaattcctggtgcaactggttacattggctgcattgggaaggacaagtttggggaggaaatgaagaagaactcaaaagctgctggtgttaatgtgagccttctttctaaaccacttaccaaacctctaaaacaattgaaaacttgaagtgggaaaaaaaattatatatataaatggagcgagagagagagagatttgtttcagttccacacagctttagccgaatggttatgcacttctgctatgtccattgaccttcctctttctggatgcatatttattttgagttgtaattttgtatttcttaagatagatctggagctgagaataatggtattattgatgttgtatgatcatgttaaatcaggttcaatatctcgaggatgaaactgcaccaacaggaacttgtgctgtttgtgttgttggtggtgaaaggtaagtttgagaatgacc

SEQ ID NO: 20751 - DNA, 250 bp, Gossypium hirsutum
  unsure (1)..(250): unsure at all n locations
  Clone ID: LIB3584-002-P1-K1-E3
aagagaactcaaaagctgctggtgttaatgttcaatatctcgaggatgaaactgcaccagcgagagacttgtgctgtttgtgttgttggtggtnaaaggattatgatgttagaaagcatctatgttttatctaccggaatagcaagattcaaacttggatctatctgcaggtcactcattgcaaatctatcagctgctaactgctataagtctgagcatttgaagaagcctgataattgggcgtttggtt

SEQ ID NO: 20752 - DNA, 249 bp, Gossypium hirsutum
  unsure (1)..(249): unsure at all n locations
  Clone ID: LIB3083-076-Q1-L1-C11
ggggggggaaaaggggatcccccctcttcaaaaaatcattaccagtagtccccactnttatgattttttttttaagaaaaaccaccccaaaaaaacatttaccacaatccacaaactcatctcaaccataagcttattaaatgaaacgattggctcctttcatgaataaacataaaatgttattctcatatgccatttcaagatgcaagcatccaaatgacacccccctatcggataaattaaaacaaa

SEQ ID NO: 20753 - DNA, 690 bp, Gossypium hirsutum
  Clone ID: LIB3583-021-P1-K1-C12
ctgtcaagtttcagttgcctgatgatgatttagatgaaagtgattgtgattttgatgagtttggtgatgagttcgatgatgaatttgatgatgagttcgatgatgatgatgatgatgaaggggaatttggtcatggtcatggatatggacatggacatggccattgccatgggcaccaaatgcaaaacaagatggtacctatgatgggaaaaggccatggatcatatggacccaatggcatggttaatggtcctcccatgaatggtaaaaagggtgggggtaatggtaaaaaaggagatgcttttgatatacctatagtaatgaaaggcatgggagaaaacaaagatgggaagcatggtaatggaggaaagataggaggtggtgaaaagaacaaaggagggaagcaaaacaaaggtggaggaggtaaaaaaggaggtggtggattactaggatttttcaagaagagtaaaggtggaaaagattgtaatcataagaaaggtaaaaatgaatgggatggtaaaaacaagggtgcctataagggaaatggaggcaagaatggtggtggaaacaataatggcaatggggctaaaaagggtggcggcagaaacggtggtgggagccatgagatgaacaagttaaaaatggtgggtttcatgacattgatgtattaatcatggtaaaaaggaggtg

SEQ ID NO: 20754 - DNA, 565 bp, Gossypium hirsutum
  unsure (1)..(565): unsure at all n locations
  Clone ID: LIB3829-005-Q6-K6-G7
cccagcgtccgtcgatgatgatgatgatgatgaaggggaatttggtcatggtcatggatatggacatggacatggccattgccatgggcaccaaatgcaaaacaagatggtacctnatgatgggaaaaggccatggatcatatggacccaatggcatggttaatggtcctcccatgaatggtaaaaagggtgggggcaatggggctaaaaagggtggcggcagaaacggtggtgggagccatgagatgaacaaagttaaaaatggtgggtttcatgacattgatgttattaatcatggtaaaaaaggaggtgggggaggtggtgctggtgctggtgctggtgctggtggcagtaagaatatggggcagatgggccaaatgggtcgtcagatgggtcaaatgggtggtcagatgggttacaatatggatcaaatgggccgaatggggaactatccaataagccagatgggaaatttccctgcagttcaaggactaccagcagcagcagcagcagcagctacagcaatgaatggtgttgggtggaggatactaccaaaggatgggag

SEQ ID NO: 20755 - DNA, 674 bp, Gossypium hirsutum
  Clone ID: GOSHI-09MAY01-C102362_1
gaaaattgaaaaatctacaaccatgagttcagccgccgtagcagcagccaaaggaggtcggggccgaggccgaggtaagccaacggccaaagccgtttccaggtctagcaaagctggtctccagttccccgttggccgcgtcgctcgtttcctcaagaaaggacggtactctgagcgcgttggatctggctctcctgtctacctctccgccgtcctcgagtatcttgccgctgaggttttggaattggctggaaatgccgcaagagataacaagaagaacagaatcatcccgaggcatattcaattggcagtgaggaacgacgaagaattgagcaggctgatgggaggtgtgacgattgcgaacggaggtgttttgcctaatatcaatcaaagtctattgtcacggaaggccgggaaaggtaaagtagagaccggttccgcttctcaggcattttaggtaattttgtgtaacatagtatgtaatggaattacgttcctgttattgcaaatatcattcctagtaatgaaatcgttgaattgagttttgttgtaagcatttttttgccttttctccattgtcttgggtgattcatatattttcatcatttcccttggaagtactttccgccaacgctgactgtaacctacctatttggcacaataaatgaaacttt

SEQ ID NO: 20756 - DNA, 820 bp, Gossypium hirsutum
  Clone ID: GOSHI-09MAY01-C2379_1
gcgttttgtggattcttcactttccagcagccggtatatattttctacttacctttcccttctttttcccagatatttttatacttctgagcggttccatttaactcattatctttcaaatgatataaatggttatttttatgtttttcctctttttcacaggaggtataaagacaaaaaggaagatgcggcagagcctgaggttgatccagaaagggatcagagaactgtatttgcttatcagatatccttgaaggctagtgaaagagacgtttatgaattcttctctagggctggcaaggtacgagatgttcgcctcataatggatcgaaactcaagacgttctaaaggggttgggtatattgagttctatgatgttatgtctgtccctatggcaatagcactctcaggacagcctcttcttggtcaaccagtgatggtgaaaccatctgaagctgagaagaatctagttcaatcaactacatctgcatcagctggacagactggtccatatgctgctggcggtagaaagttgtatgttggtaacctacatttcaacattacagaagatcaactgcgtcaggtttttgaaccttttggttctgtggagctcgttcagttgcctcttgatgaaactggtcattctaaaggttttggttttgtccagtttgcccgtctggaagatgcaacgaatgcattgaatttgaaccgacagctggagattgggggcccactaatcaacgtatccactgttactgatcaaggtgtatcgcaagattttggaacaaatgcttctgctgctgatcttgatgatgatgat

SEQ ID NO: 20757 - DNA, 659 bp, Gossypium hirsutum
  unsure (1)..(659): unsure at all n locations
  Clone ID: LIB3543-001-Q1-K1-D11
cggacgcgtggnngcgtgatcgagnacaggaaanagcgtgatcgtgaaagtgagagggatagagaaagggaaagggagagagagcggtcaaggagaagcaggagccgatcagaaagagaaccagacaagagtcgtgacatggagttcagagaaagagaaaaggagagagagccaagggaacgagacagaggaagcaggaggtataaagacaaaaaggaagatgcggcagaggctgaggttgatccagaaagggatcagagaaccgtatttgcttatcagatatccttgaaggctagtgaaagagacgtttatgaattcttctctagggctggcaaggtacgagatgttcgcctcattatggatcgaaactcaagacgttctaaaggggttgggtatattgagttctatgatgttatgtctgtccctatggcaatagcactctccggacagcctcttattggtcaaccagtgatggtgaaaccatctgaagctgagaagaatctagttcaatcaactacatctgcatcagctggacagactggtccatatgctgctggcggtagaaagttgtatgttggtaacctacatttcaacattacagaagaccaactgcgtcaggtttttgaaccttttggttctgtggagctcgttcagttgcc

SEQ ID NO: 20758 - DNA, 412 bp, Gossypium hirsutum
  Clone ID: GOSHI-09MAY01-C2369_2
cacgcgtccgcccacgcgttcgttcacgcgtttttttacgcgtccgctgaaggatctgacactggaggaaagtatatttagctgtaacagggaaaagcgaaaaggctgctttctaacattctattttgaaaagagagagggaggatggacgggggcgatgtaggcatggcggcgccggaatccactgaagctgacctcgatgacatgaaaagaaggccagaatgagacggtcgatgaagcccctgctcttcgtgagatgcaagctaaggtcgagaaggagatgggttccggacaagatcctgctgctgctgctacatctcaggctaatcgacaggaagcagattcccgatcaaatctttgttggcaatgcggattattcatgtacacccagaggaagtgcaacagcattttc

SEQ ID NO: 20759 - DNA, 1056 bp, Gossypium hirsutum
  Clone ID: GOSHI-09MAY01-C2369_1
ctcggtggaaactgatcgggctccgtcgacctgcaagtacgataagcttggacccgaattcctcgcggcggctttctatcagatttttcttttctgttctttagaaaaaagatctattaatttgaaaaaaaaaacatggaaggagacgatgtagacatggcagctgctgaatccactgaagcagatcttgatgacatgaagaaaaggttaaaagagatggaggaagaagccgctgctcttcgtgagatgcaagctaaagtcgagaaagagatgggttccgtacaagatcctgctgctgctgcagctacatctcaggcaaatcgagaggaagtggattctcgatcagtgtttgtgggcaatgtggattattcatgtactcctgaagaagttcaacagcatttccagacttgtgggactgtaaatagggttactattcgtacggacaagtatggtcagccaaagggttatgcttatgtagagttcgttgaagctgaggctgtccaggaagctcttcttttgaatgaatctgaacttcatggcaggcaattgaaggtcactgctaagcggaccaatatacctgggatgaaacaatatcgtccacgtcggtccaacccttttatgcgacccaggggtccattcatggctccatatttctttgctccatatggatatgggaaggttccacggttgaaaatggcaacgcgttacagcccctattattaggtacttggattgaactggttgttctgaatgcttttcctatccgcatctctgaggttcgttgtatcgaattgaagtcgatttgccaaagctatggtacaaaaattggcggtctactttgattgatggtgaactactttagtatgtttcttccgtgttgtctgatgatgtagacatgttttgagtaatgttgagctgccctttgtgctttttcctcaagaaacttcttgttggtacttgtttcttaagaattgaatcatcagccttttagacttatgtttaaaaccacaagtacaatttaggatgcatatgggttcaatttgaaattattttttt

SEQ ID NO: 20760 - DNA, 351 bp, Gossypium hirsutum
  Clone ID: LIB3083-082-Q1-L1-C3
ctagtctcgagttttttttttttttttttagtgttaggggtttttccccctattttaagaaaaccctaattctatgtaatgtgcaggatcttgatgacatgaaaaaaaggttaaaagagatggaggaagaagccgctgctcttcgtgagatgcaagctaaggtcgagaaagagatgggttccgtacaagatcctgctgctgctgcagctacatctcaggcaaatcgagaggaagtggattctcgatcagtctttgtgggcaatgtggattattcatgtactcctgaagaagttcaacagcatttccagacttgtgggactgtaaatagggttactattcgtacagacaagt

SEQ ID NO: 20761 - DNA, 645 bp, Gossypium hirsutum
  Clone ID: GOSHI-09MAY01-C2339_3
cgctcacctcatctccgtcccgatcgaagcacacgcctcctccctctttttctcctttttccgtaagctaaacccacgccgcccgatcttcaaatccctacaccttaatataatccattgcggttttcgttttgtgaaatgccgtacggagaggagtggcggagcgcggcgttgacgcgtattcgcgaattggtcagcttccgacccggctgcaagcccaagaagtgccgtcaggaatgcaaggaagagctgtctctctgttgttaaaaccctgggaaacctttgcattgagggttacccccctgcctcaaagattggctttcaaatctctgaggagttgtgcattggttgtggcatctgtgtcaagaaatgcccatttgaagcaattcaaatcatcaacttaccaagggatttggataaagatacaacccatagatatggccccaatacttttaaactacacaggttaccagttccaaggcctgggcaagttctcggtctggttggaaccaatggcattggaaaatcaactgctcttaaagttttggctgggaagctaaagccaaacttgggtcgattcaataatcctccagattggcaggaaatcttgacctactttcgaggatctgagttgcagaactattt

SEQ ID NO: 20762 - DNA, 679 bp, Gossypium hirsutum
  Clone ID: GOSHI-09MAY01-C2339_2
cccacgcgtccgggtttatcctccatgcattgaaaactgcgtttgtggtcgagcatgagttgggaatggcgacttacctcgcagatagagttattgtctacgaggggaagccttcagtggattgtattgcaaacgctcctcagtccttgttaactggcatgaatctgttcctatctcatctggacatcacttttaggcgggacccaaccaattaccgaccgagaatcaacaaactggactcaaccaaggatagagagcaaaagtctgctgggtcatattattacctagatgattgatcgacacatctactggcagttgtcaattgtgatgagatgaacaacaagacgtgaatgttgggtattcccgggatctctgagtggagcagtgatggtatgttgataagctgagaagaggtccgttgatggtatccatgaggcggcaagccatttgttttagaaaaatatttcaattatcctacagtgtgcttttctttatgttttagcaattttggttgatattttatgagtcaggaatactgatactcctgttttatttacttttaagagcaaaggtatgctgttgacatgagagagctttgaattatccatgtagctagagaattattattattattattattacccttttacttttaaacattagtaatttactatactat

SEQ ID NO: 20763 - DNA, 1658 bp, Gossypium hirsutum
  Clone ID: GOSHI-09MAY01-C2339_1
cgacccagctttttcccagcgtccgcccacacctccgtgggagggggggcgggatagatatggcacccaatacttttaaactacacaggttaccagttccaaggcctgggcaagttctcggtctggttggaaccaatggcattggaaaatcaactgctcttaaagttttggctgggaagctaaagccaaacttgggtcgattcaataatcctccagattggcaggaaatcttgacctactttcgaggatctgagttgcagaactattttacccgcatccccgcgcgtccgctcaaggccatcatcaagccacagtatgttgatcatattccaaaggcagtccaaggcaatgtgggacaggtgcttgaccaaaaagatgagagagagatgaaggctgaactctgtgctgatcttgaactaaaccaggtcatagatcgtaatgttggggatttatcaggtggggagctccagagatttgctattgctgttgtcgccatacagaatgctgagatatatatgtttgatgagccttcaagttaccttgatgttaaacagagactgaaagcagcacaggtcattcgatctctgctcaggcctaatagctatgttattgtggtcgagcatgatcttagtgtcctggattacttgtcggatttcatttgctgcttgtatggaaaaccgggtgcatatggagtcgtaacccttcccttctctgtaagagagggaatcaatatcttcttggctggatttgtacctactgaaaatctaaggtttcgagatgaatctttgaccttcaaggtagctgagaccccacaggaaagtgctgaagaaattgaaacctatgcacgatacaaatacccaaccatgactaaaactcagggcaattttaaacttaaagttatggagggtgaatttactgattctcagattattgtaatgctgggtgagaatggtactgggaagaccacatttattcgtatgctggctggtttgttgaaacctgataacgtaaaaggttcagatgtggagatacctgagtttaatgtttcatacaaacctcaaaagatcagtcccaaatttcaatctactgtccggcacttgctgcatcaaaagatacgtgattcatacatgcacccccagtttgtttcagatgtgatgaagcctcttctcattgagcaattaatggatcaggaagtggttaatctctctggaggagagctgcaaagagttgcattatgcttatgtcttggaaagccagcagatatttatctgatagatgaaccaagtgcttatcttgactccgagcagcgtattgttgcttctaaagtcataaagaggtttatcctccatgcaaagaaaactgcgtttgtggtcgagcatgattttataatggcgacttacctcgcagatagagttattgtctacgaagggaagccttcagtggattgtattgcaaacgctcctcagtccttgttaactggcctgaatccgttcctatcccaccgggacatccgtttttagggggaacccacccagttccgaacgaaaacccaccaactggatccgcccagggatagaaaccaaaactcgcctgggtcttttttttccccaaataatggattaacccttctccgggcagttggtcattgtgaaaagaat

SEQ ID NO: 20764 - DNA, 1030 bp, Gossypium hirsutum
  Clone ID: GOSHI-09MAY01-C2329_1
acgcttgctgacctcatcttggggatggcccaaaactcacggttttaattcaacattaaccgaacctgtggatacttctgggaatagaactgatcaaatcacaaaaaagaatcctaatttgcacccggaattaaaagaacacttaacagctctctgtgatgataaaaagacaactctagttgttcttagtgggagcaaaagtgaagtcttggataagaacttcgcggagtatgatatgtgattgcccgcagaaaatgggatgtttctacgccatacaaaggccgactggatgacaaccatgccagaacacttgaacatggaatgggttgatagtctgaagcatgtttttgagtatttcactgaaagaacaccaacatcacagtttgagatccgcactacatccctcgtatggaattacaagtatgcagatgttgaatttggaagacttcaggctagagttatgctgcagcatctctggaccggccccatttctaatgcatctgttgatgttgttcaagggagtcgatcggttgaggtgcgacctgttggtgttacaaagggggcagctattgatcgtattttaggagaaatagttcacaacacgtcgatgacaacaccaattgattatgtcctttgtgttggacatttcctggggaaggatgaagatgtttatacattttttgagccagagctgccttctgatgtaaatatggcaaaatgcaagccaatcgatgcaccaaagttacctactgagaaaaaggctccctcgaagcttccagcagccaaaagtgggccaaaatcatcacaaacaaagacacccaaaccatccccggctcctgataaaagaactggcaataaccatagcggtgggagttcacggcgtgcatcaccggaaaaggtaaaggagaaggaaaagatggcctggagcgtgcttgatctcaaaggagataactacttctcctgtgctgtcggacggaagcgtacatctgctcgatatttacttggttcatcagatgatgttgtctcgttc

SEQ ID NO: 20765 - DNA, 322 bp, Gossypium hirsutum
  Clone ID: uC-gsronu33B121b04b1
ttcccggttcgtcccacagcgttctatcttattttaggagaaatagttcacaacacgtcgatgacttcaccaattgattatgtcctttgagttggacatttcctggggaaggatgatgatgtttactcattttttgatccttttttcccttattttttttttttttattatttcatttttaatatatttttttcaatcttttttttagttatattatattctgatttcatcaagtatgctctttttatattttttcttttatattttttatttattattttaattctctttctgtctctttcttatattttttttatttctt

SEQ ID NO: 20766 - DNA, 630 bp, Gossypium hirsutum
  Clone ID: GOSHI-09MAY01-C2259_1
cggacgcgtggggctctctggtacattttgtcaatatttcattaggtagagactcttctgttttcgtgtttttgttgtgagttgattcgctagcttccatggggatttgcttggtagcattagccaaactccacctcttaactcccgctcatagtataagtgctcctttacttgcaggcttcatttgcccttttgtggtcaaacttgccttcagattcaggattgttcgtcgagtttacattgatatgctttatgcaaccaggctcttcttttttcagttgagtcagatagctttcgatgctggcggtgaccgtcagccatctccgggcgatggtgagcgatggcagcgagctcttcggttagtttccgaacgaataacccatgtgagaagatctccggtggcagattccgacgaggatagcttccatactctcaccgtactttcactttaaacagatgttcatttaggctgagtgaacatgagagtatgaaaatatatctacctagatttttcacttgttttctttgtattgtattttatttaatgccctaggaagaatgattttcatgattcttctgcctttcccatgacttaaattgtcatggttaatggaatgatatatatggtag

SEQ ID NO: 20767 - DNA, 612 bp, Gossypium hirsutum
  Clone ID: LIB3583-025-P1-K1-H2
cggacgcgtgggcggacgcgtgggtttatgaatccacaatctcgaaaaatgtgctccactgtttcttctccaaataaacaaactagacattcagcattgttcctgagtcttcgaaatttgagaatactgagtgttggaataaaattattgaccaccctccacagatgtattcttattttacttaagatcgggagattccagatctttgaataaaattctttagtgatagtttggtctgtaatataattatgtaggtgtggattcttagatattagccatttgtaagcactttgttctgtatattcgcctgatttgtcccctctctagactagaacatccggctgtatcctattcactaagggaatcgacaatactacctctgtttgctctacttcgagtgtgggtagccaagtattattccaaatatttgttgattcgccattccctatcctccatcatgttccttcctcaagcaagcttcgtgcattccaaatgctgcgccagctcttcctgaaatggctgcagcaagggctgccgtgaaattggggtctctgctcaaagaagccgccatttgatgaactaaaatctgttggattgctggtgcgtcgattt

SEQ ID NO: 20768 - DNA, 384 bp, Gossypium hirsutum
  Clone ID: LIB3196-024-P1-M1-E6
ttgtcttgtgtttgattgcaaggaatccatcccaacttcctatagaatctattttatgaatactgagtgttggaataaaattattgaccaccctccacagatgtattcttattttacttaagatcgggagattccagatctttgaataaaattctttagtgatagtttggtctgtaatataattatgtaggtgtggattcttagatattagccatttgtaagcactttgttctgtatattcgcctgatttgtcccctctctagactagaacatccggctgtatcctattcactaagggaatcgacaatactacctctgtttgctctacttcgagtgtgggtagccaagtattattccaaatatttgttgattcgccattcccta

SEQ ID NO: 20769 - DNA, 846 bp, Gossypium hirsutum
  Clone ID: GOSHI-09MAY01-C2279_1
caaaaacagaacccttgctctgtgtgggttcatttcatcacgcagcccttaacctccatcaatttgatggccagtggcgcggataagggccagatctagccaacgaaggtcacctttccaaaaatcaggtaacttcgctcctttttcttttgttttccacgaaaaaacgtaaatcttatactgttttttttaaaaaaacaaaataaatttcacatatattcaaacaaaactttaatctcactcgaccctcgcccacatctatgtatatctgagatgtttggggcttttcatcggcgtcagtctagatttcccccttttaatactcgtactaaatatgcgaatcaatcaaagaaaataaagaataaatccggaattcccctttcaaattttgggctagatttttgaatatctaatgtgcatgcgtgtattgagcgtaatcccttttgtaggtacaatcatcggcttttatagccaaaatttcagaataaaaatacattttaattcccgtcttctgccgtcttcctccgctttctgtttctatccttttctcgtgtattctaatgcagggatggagcaacggccgtacggaaaaaattgctcgtgaaaaccgtgattgcagcactggtgtgttctaaaaacccctagtgctttcagctgctgagattccccttttgggttctttcaagtttgggcctttttgcaaattgggcttattggtctttgggcctcctgtatatgtttgggctatttgttagtgtttatttaaggttgtaaatggactattgggactttatttaagtttatttgactagctattgaatgtataaataaaataaagacccgggc

SEQ ID NO: 20770 - DNA, 358 bp, Gossypium hirsutum
  Clone ID: LIB3147-032-Q1-K1-H10
ggcgaatttgcaaagtatagagaaacgttcgtacggagaaaatcgctcgtgaaagccgtgattgcagcactggtgtgttctggaaacccctagtgctttcggctgctgagattccccttttgggttctttcgagtttgggcctttttgcaaatcgggcttaaggatattggtctttgggcctctgtatatgtttgggctattcgggcattggaccagatctgtttttttatttttggggctagtataagtttagtgtttattaaaggttgtaaatagactatttggactttatttgggtttatttggctgactatttacttattgcgagtgaaaaaataaaataaagggccgggcccc

SEQ ID NO: 20771 - DNA, 912 bp, Gossypium hirsutum
  Clone ID: GOSHI-09MAY01-C102252_1
cttcgatgctcaaaatctcagactgatctggggatcgtggagtgcacgtgttctcttcttctttttcaactgtttttcttctttcagattaagacataaaatccaagcaacgacatggaggcagtgcctatacagagtgaaaacttcaagctagggttcattggagcagggaaaatggcagagagcattgccagaggagtggtacaatctggtgtttcgcctccccaacgcatttctacagcaagccactctaatcccagtcgtggtgctcccttccagtcactcggcatctctgtttataggcacaacaccgacgttgtggatgctagtgatgtgataattctttctgggaaaccccaagtagttaaaactgtggtcttgcagctgaggccgttactttcaaagaaaaagcatcttgggttcaattgctgcaggagtaaaactgcaggatctggaagaatgggctggccatggccgatttatccgggtgatgcccaacacaccatctgctgttggtatgggagcttcagctatgagcttgggaggagctgcaacagaacaggatggggaattagttggtaaattatttggagcagttggcaagacatggaaagctgatgagaaactgtttgatgctgtcactggccttagtggcagtggtcccgcttatatatatttagcaattgaagctttggctgatgggggagtgactgctggtcttccgcgagaactagcattgggacttgcttctcaaactgttttgggagcagctgctatggctgttcaatctgggaagcaccctggtcagctgaaagacgatgttacatcacctggtgggactacaattgccggcattcatgagttagagaagaatggtttccggggaacattgatgaatgcagttgtggcagc

SEQ ID NO: 20772 - DNA, 743 bp, Gossypium hirsutum
  Clone ID: GOSHI-09MAY01-C2219_4
gaaaaaaacagcaagcaagattgtttttttgtttttcccctcgatttattttatttttggcctataaaaggccctttgaaatctgtaaaagggacggagggtccccgcggccggagaggcgcagagatccgaaaggaattctttttaagcattgaggcagcatgtgctgcacatccaactgccgatgtttttattaactttgcatcatatcgaagtgctgctgcttcgtccatgtctgctctgaaacaacctaccattcgagttgttgctataattgctgaaggtgttcctgaatcagacaccaaacagttgattgcatatgcacgttccaacaacaaggttgttattggcccagctactgttggaggaattcaagctggagcttttaagataggtgacactgctggaacaattgacaatattgttcactgcaagctgtacaggcctggatctgttggctttgtctccaaatctggtggcatgtcgaatgaaatgtacaacactattgcccgtgttacagatggaatctatgaaggcatagctattggaggagatgtcttcccaggatccaccttatccgaccatattttgagatttaacaacattccacaggtcaagatgatggttgtccttggagaacttggtggacgagatgagtattccttagttgaagccctgaaacagggaaaagtgaacaagccagtggttgcttgggtcagtggaacttgtgcacgactcttcaa

SEQ ID NO: 20773 - DNA, 502 bp, Gossypium hirsutum
  Clone ID: GOSHI-09MAY01-C2219_3
cgcggaatttttgggacctcgcgcgcgcgttaccacgcgtccgaccacgcgtgcggttgagatgggctacctaaatgggctctttgtgctagcacgatccattggtttgattgggcacactttcgatcagaagagactgaagcagccactataccgtcatccatgggaagatgttctttacactaagtgagagaacattacgagcagtaggtgcaaatctcctcgagcattgttgttactggagtccttttgtctgcatttttatggggtatggttgtttggttcttagattattgtttgtaaggcaaggctaaatggtggatccccatcatttctaagttgtattcaaggtccacataggagaaaaaaaatctcaaaaatgctgcgtgattcgtttttagtttttttaccagtttcacggataaataagacatgtcttgcacattgtattggaatattttatgagaaatttcgaaattaggaatcatctatttctcggatt

SEQ ID NO: 20774 - DNA, 1133 bp, Gossypium hirsutum
  Clone ID: GOSHI-09MAY01-C2219_2
gacctctctgtgacagagggaggaaccatgctatgctggtgtgcccatgtcttccattgttgagcaaggtcttggtgttggtgatgtcatttctctcttgtggttcaaacgtagccttccacgatactgtactaaatttatcgagatatgcatcatgctctgtgctgaccacggtccctgtgtctctggtgcgcacaacactatagtgactgcaagagctgggaaggaccttgtgtccagtcttgtgtcaggtttgcttacaattggtcctcgctttggtggtgcaattgatgatgctgcacgatactttaaagatgcttacgataggggtcttacaccttatgaatttgttgaaagcatgaaaaagaagggcatccgtgtgcctggaattggtcacaggatcaagagaggggacaacagagataagagagtagagcttctccaactgtttgctcgcacaaatttcccatctgtgaagtacatggaatatgccgttcaagttgaaacctacactctctcaaaggctaacaaccttgtcctcaacgtggatggtgccatcgggtcacttttcttggatcttcttgctggtagtggaatgttcacaaagcaagagattgatgagattgttgagattggctacctaaatgggctctttgtgctagcacgatccattggtttgattgggcacactttcgatcagaagagactgaagcagccactatatcgtcacccatgggaagatgttctctacactaagtgagagaacattacgagcagcaggtgcaaatctcctcgagcattgttgttacaggagtccttgtttgtgtctgcatttttatggggtatggtggtttggttcttagattattgtttgtaaggtaaggctaaatggtagatcaccttcatttctaagttgtattcaaggtccacataggagagaagaaatctcaaaaatgttgcgtgattcgtttttagttttttaccagtttcacggataaataagacatgtcgtgcacattgtattgtaatattttatgagaaatttcgaaattaggaatcatctattctcggattatacaataaggtagttcaagttaaaacaaaaaaaataccaaaattaaaaaccaatagag

SEQ ID NO: 20775 - DNA, 1721 bp, Gossypium hirsutum
  Clone ID: GOSHI-09MAY01-C2219_1
cttttctatccatttctcgtctcgtcttttcttttcctttcgcgaggcgagcgagccactgtaatcttttcctttccttacaactttctcttcaggtctctttgagtcgaagccatggccaccggacagttgttttctcgaacaactcaagccttattctataactacaaacaacttcctattcaacgcatgcttgatttcgatttcctttgcgggagggatacaccgtccgtcgctggtatcattaatcctggtgccgagggatttcagaaactcttctttggtcaagaggaaatagcgatcccagtgcattcaaccattgaggcagcatgcgctgcacatccaactgccgatgtttttattaactttgcatcatatcgaagtgctgctgcttcgtccatgtctgctctgaaacaacctaccattcgagttgttgctataattgctgaaggtgttcctgaatcagacaccaaacagttgattgcatatgcacgttccaacaataaggttgttattggcccagctaccgtcggaggaattcaggctggagcttttaagattggtgacactgctggaacaattgacaacattgttcaatgcaagctgtacaggcctggatctgttggctttgtctccaaatctggtggtatgtcaaatgaaatgtacaacacaattgcccgtgttacagatggaatctatgaaggtattgcaattggaggagatgtcttccctggctccactttatctgaccatattttgcgatttaacaatattccacaggtaaagatgatggttgtgctcggagagcttggtggacgagatgagtattccttggttgaagccctgaaacagggaaaagtgaacaagccagtggttgcttgggtcagtggaacttgtgcacgactcttcaagtcagaagtacagtttggtcatgctggagctaagagtggtggtgagatggagtctgcacagggaaagaatcaagcactaagggatgctggagctgttgttcccacttcatatgaagctctggaagctacaatcaaggaaacatttgagaaactggttgaagaagggaagattacaccggtcaaggaagttaagcctccacaaatcccagaagatcttaacagtgctattaagagcgggaaagttcgtgctccaactcatattatttcgaccatctctgatgacagaggggaggaaccatgctatgctggtgtgcccatgtcttccattgttgagcaaggtcttggtgttggtgatgtcatttctctcttgtggttcaaacgtagccttccacgatactgtactaaatttatcgagatatgcatcatgctctgtgctgaccacggtccctgtgtctctggtgcgcacaacactatagtgactgcaagagctgggaaggaccttgtgtccagtcttgtgtcaggtttgcttacaattggtcctcgctttggtggtgcaattgatgatgctgcacgatactttaaagatgcttacgataggggtcttacaccttatgaatttgttgaaggcatgaaaaagaagggcatccgtgtgcctggaattggtcacaggatcaagagaggggacaacagagataagagagtagagcttcttcaactgtttgctcgcacaaatttcccatcttgtgatgtccatggtatatgtcctgtcagttgaaaccctcctgttacatgctacaaccttgcctaaag

SEQ ID NO: 20776 - DNA, 667 bp, Gossypium hirsutum
  Clone ID: AI055310.1
gtctcgtcttttcttttcctttcgtaaggcgagcgagccactgtaatcttttcctttcgttacaactttctcttcaggtctctttgagccgaagccatggccaccggacagttgttttctcgaacaactcaagccttattctataactacaaacaacttcctattcaacgcatgcttgatttcgatttcctttgcgggagggatacaccgtccgtcgctggtatcattaatcctggtgccgagggatttcagaaactcttctttggtcaagaggaaatagcgatcccagtgcattcaaccattgaggcagcatgcgctgcacatccaactgccgatgttattattaactttgcatcatatcgaagtgctgctgcttcgtccatgtctgctctgaaacaacctaccattctagttgtagctataattgctgaaggtgttcctgaatcaaacaccaaacatctgattgcatatgctcctttcaacaacaaggttgttattggcccatctactgttagaggaattcaacctgaagctttaatataggtgaccctgttgaacatatgtacaattagtcattgcagctgttcaggctggatctgagtgtatagacctaatcagaggtatgtaatgaaatgacaacatattgcctgtatcaaatgaattataa

SEQ ID NO: 20777 - DNA, 620 bp, Gossypium hirsutum
  unsure (1)..(620): unsure at all n locations
  Clone ID: AI726866.1
ccatttccttccaactgtctctcttcaggtaaaaaggattacatttactctcaggtccctttgagccgaagccatggccactggacagttattttctcggactactcaagcgttgttctacaactacaaacaacttcctattcaacgcatgcttgattttgatttcctttgcgggagggaaacaccatctgttgctggtattattaatcccggtgctgagggatttcagaaactcttctttggtcaagaggaaattgcgatcccagtacattctaccattgaagcagcatgtactgcacacccaactgctgatgtttttatcaactttgcatcattccgaagtgctgctgcttcatccatggctgctctgaaacagccaaccattcgagttgttgctataattgctgaaggtgttcctatgtcggacaccaagcagttgattgcatatgcacgttccaacaagatagttgttatcggcccanctactgtcggaggaattcaggctggagcttttaagattggtgacactgctggaacaattgacaatattgttcaatgcaagctgtacaggccangatctgttggctttgtctccanatctggtggtatgttcaatgaat

SEQ ID NO: 20778 - DNA, 354 bp, Gossypium hirsutum
  Clone ID: LIB3585-052-P1-K1-G12
gggaagctggagctgttgttcccacttcatatgaagctctggaagctacaatcaaggaagccctaactcctcttctcaagcaaatgcaattcctctctaggttttaagatccaatttctttcattcctcctaatcacttaatatccccaaccccgacaacaaataatttcatacttacctaaattccctttctttatttttccatgtaaaaatattgagtatgtttatatcttaaatgttctttatcttccattcatgtttaaagcctcaacgttattattaagtcattgaagattactcgaaatttttaataatttatttttatagtgaattattaaatatacatattatttt

SEQ ID NO: 20779 - DNA, 360 bp, Gossypium hirsutum
  Clone ID: uC-gsronu33B042g09b1
gctgcacgcctgccgtaccggtccgcccgggccgacccgcccctcgcgtccggcgtccagcacacacgggcagctgtagcagcttccattagctttatcaggaagctctggaagctacaagcaaggaaacatatgagcaactgagagaagaagggtagattacaccggtcaaggaagttaagcctgcacaaatcccagaagatcttaacagtgctattaagagcgggtaagctcgtgctcccactcatattttttataccatctttgaagacagaccggaggaactttttcacgtatcgttatcgcttgattttcgttccattattttacttttatattattatatagtttttttctatt

SEQ ID NO: 20780 - DNA, 303 bp, Gossypium hirsutum
  Clone ID: LIB3083-006-Q1-L1-F1
cgtttctctccatttcctttcaactgtctctcttcaagtggaaaggattgcatttactctcaggtccctttgagccgaagccatggccactggacagttattttctcggactactcaagcgttgttctacaactacaaacaacttcctattcaacgcatgcttgattttgatttcctttgcgggagggaaacaccatctgttgctggtattattaataccggtgctgagggatttcagaaactcttctttggtcaagaggaaatttgcgatcccagtacattctaccattgaagcagcatgta

SEQ ID NO: 20781 - DNA, 633 bp, Gossypium hirsutum
  Clone ID: GOSHI-09MAY01-C2239_1
aacaaattgtaaaagaagtcttgaaactggggccggtagcaatgccgatattggcgaggatccaaccaatggatttaagtgctaccaagagtgtgtttatttctgcagttcggttcgccacgtcaataggtggatcttgtccaccctttggagacgagcttaaaacatctgcacaggaacaagtggagttcatgcttggaggagatgaagacaccccattagttacagcagatgatgaagtaaaatcagtagtaaaatcaggtctttcccaagtttgttcattgtttgaaaacgagttgtcttcctttcttctcgttcccgacatcacagccgagaccgccgagactagaattttacagtgcctttcggatgtcgagtggatgtgcaacatactccccaaaatggatttaatgaaggactttgtttgtagttggggtggagatgtctagaaagattttggagatagttgaagacaagaaacttgataatgcaatgtgggtttttgaaagtgaagcttatagaagtgaccgggaaagttctggaagctgtcgggctatggaaacgtgattcttcctgcaccgggtcgagtccaattgctggagacatggctaccctattaaggaagataaagcc

SEQ ID NO: 20782 - DNA, 522 bp, Gossypium hirsutum
  Clone ID: GOSHI-09MAY01-C102212_1
tccgctcgcattcctatctccctagatagtccatagtgcgcagcagaagatcctacactgggatatcgagctcttcgagaagacccagggcacttccggaaaagatgatccatattctcttctcctaaaccacaccgggggcacacagttgtattcgacagcttcttaattaccatatttgctcgtgttgctaaaaaattccacgagcttttctatactgtaattttaatcttatatgggatatccagtagccaaagctttttgtaaaagctcttgtagtcctcctgtatcgcataagcgctaggattatctgcattaccttgtaatagtttataggcactacgcactgtgtaatcgcccgacgcctcagcacgccatacttggaaatcttcatgaggtgtctctgacaacgggatactcagaatcttctcggcaacatcctccagaaaggtagatttgattacctcctccttccatattctgttactaggatcaataaaatccgtaactctagcatcggtt

SEQ ID NO: 20783 - DNA, 656 bp, Gossypium hirsutum
  Clone ID: GOSHI-09MAY01-C3989_1
cccacgcgtccgcggacgcgtgggcgaaaatggaccaactgtaccttactatggcatctacgttaaggcctttgcaagtgaacctattatctaacaccagtgacactattgaagacctccaacggctttgtgttgtctttgaacatgtcgagaagttgttaatacttgcagcttcccttcatcgtagatttagacaagtgccacgaatctcggaagccattttcagtaactactacaacttttaccttccaaccatgggaattggcttagctgatgtagatactcagaaggaatttgacatgaagctgcaactaagtcagaatgagagacaagttgtgtcaaatatgttcacgccaccaaccgctaatcagtcatggagaaaagttttaagcatgggaaatcatctgaacggccatgaaccaatcctcagggagatcatcttctcaatgcacgataatgccagtgacaatcactacgcaagcagcagccacagagattattaacaggatacagaaacatatcggatgtatacatgcggaacctcgaatgatcttcgggtagcactttctattatctcatatgattaaaattcctttttctattaaaatttgaaaaaaaaataaatatttcttataattttttattattaatatttt

SEQ ID NO: 20784 - DNA, 1208 bp, Gossypium hirsutum
  Clone ID: GOSHI-09MAY01-C3979_1
ataataacaaaacctgtgtcttgaactctcatggcttcaagtgctgcaacccttccatctaaaatgaaagcatggacttaccctgagtacggaaaatcatctgatgttctgaaactacaatccgatgttgttgttccccaacccagggatgatcaagttcttctccaagttgtagctgctgggattaaccccattgatttcaaaagaatgcttggaatgttcaaaaacagtgattcccctttacccatcattccagggtatgatgtagcaggcgtggtggtgaaagtggggagccaagttaagaaattcaaggaaggggatcaggtgtatggagatataaatgaaaaggccatggatcacccaacacaatttggcactatagctcaatacactgttgttgcagagaagctgttggctttaaaacccaaaaatctcagctttgttgaagctgcaagcctgcctttagtcattgagactgcctatgaaggccttgaacgatgccatttttctgctggcaaatctatccttgtcttgggcggtgctggcggcgttggcaccatgattattcagctagctaagcaagtctatggagcatccaaaatagcagccacagcaagtaccgggaaactggatttgctgaagagcttgggggctgatttgcctattgattacactaatcaaaactttgaagatctgcctgagaaattcgatgtagtatacgatgcagtcggtaatattcgaatacacgatacgattacatgagcgtgttaaaatctgtacagtgacatggatttttggtttgattatgggatggtaaacagggcaatgtgagagggcagtgaaggcagtgagagaagggggggatgtagtgacaatatatggagcggtagttccaccagcaacaacattcatcctcacatcaaatggagcaattttagagaaattggagcctttcttggagagtgggaaagttaagccaatgattgatcctaatggcatatttcccttttctgaaactccacaagcctttgcttaccttgaaaccggccgagttaccgggaaagtggtcatttctataatcccatgaacattattattatatcaatattgtatgagtctaggttgtgttatcggataatgaataaagattctagtttttatgtgagatgcttgctctttataaataaataaaaacgagtagtttgaat

SEQ ID NO: 20785 - DNA, 547 bp, Gossypium hirsutum
  Clone ID: LIB3585-068-P1-K1-F2
cccacgcgtccgggcggcgtcggcaccaagaatattcagctagctaagcaagtctatggagcatccaaaatagcagccacagcacgtaccgggaaactggattagctgcagagcttgagggctgatctgcctatagattacactaatcaaaactttgaagatctgcctgagaaatacgatgtaatatacgatgcaaccaggcaatgtgagagggcaacgaaggcagatagagacagtggggatgtagtgacaatatatggagcggaagatacaccagcaacaacattcatgcttacatcaaatggagcaattgtagagaaattggagcctttcttggagagagggaaagttaaaccaatgatcgagcctaaaggcatatatcccttttaagaaacttcacaagcctatacttaccttgaaaccagtcgagaaaccgggaaagtggtcatatctataaacccatgaacaatattattatatgaatgtcgtatgagtctaggttacagttatagtgaaatgaataaagaatcctaggcttttatgtgag

SEQ ID NO: 20786 - DNA, 1700 bp, Gossypium hirsutum
  Clone ID: GOSHI-09MAY01-C3939_1
ggaaaccccctcctccactcactcctgtgctaccaaccactttcctcatttttttttttaaatgcccaaaataatatttttacatctaatttctttggcgcatatataaaaggctatccttttttactttcttcttttggcccagagttggcagaggaatgctcttttgtgctctctgaattgctctctttttgaagaacgcaaacaagggttctgtatatttcaactttagaagatgaggggaagtctttggcaacttgggcaatcaattactcgtcgtctttcacaggctgacaagaaggctgtagcacgtcggtactttgcttcagaggcagatctgaagaaaactgttctttttgatttccatgttgctcatgttgggaagatggtcccattcgcgggatggagcatgcccattcagtacaaggactcaatcatggactcaactgtgaattgcagggagaatggtggactgtttgatgtatcccatatgtgtgggctgagccttaagggaaaggactctgtttcattccttgaaaagctcgtcattgctgatgtagctggccttgcccccggaactggaactctaactgtttttacaaatgagaaaggaggggcaatcgatgattcagtgattactaaagtgaaagatgatcacatatatctggttgtgaatgcaggctgcagggataaggatctggctcacattgaagagcatatgaaagcattcaaggccaaaggtggtgatgtctcgtggcacatccatgatgagagatctcttctagctctccagggtcctcttgctgccccagttcttcaacatctgacaaaggatgatttgagtaagatatattttggggaattccgaatattggatatcaacggtgcaacatgttttctcactcggacagggtacaccggtgaggatgggtttgaaatctcagttccttcagaaaatgctctggatcttgccaaagcaatcttggagaaatcggaaggaaaggtaaggttgacaggacttggagctcgagacagtctccgactcgaagctggcctatgtttatatggcaatgacatggaacaacacatttcaccagtcgaagctggactgacatgggccatagggaagaggagaagagcagaaggtggattcttaggagctgaggtaatcctgaaacaactggcagagggtccgtcgatcaggagagtcggcttcacctccaccggcccacctccaagatctcacagtgagattcaggacgagaaagggaacaacattggtgaaatcaccagcggaggatttagcccctgcctgaagaagaacatagcaatgggatatgtgaaatctggattacacaaggcaggcaccaaagctaagattttggtaagaggaaaggcctatgatggagttgtcacaaaaatgccttttatacccacaaaatattacaagccatcctaagatggaatttacgctttcagctcctcagttttcctgcgttgtttcatctgcaatcaaatgccaatgccctgtttctcttttaacttgacatgacattacttgaacatgcatgttgtttattgcttgtattctgttcaattccaatttctcgaataatgacaatggatgttatatatcactaataaagggaaagattgaaacctggcaaagcttcattaaaaataaattatttctgatttca

SEQ ID NO: 20787 - DNA, 255 bp, Gossypium hirsutum
  Clone ID: LIB3149-033-Q1-K1-D11
attccatcttaggatggaatttgcgctttcagctcctcagttttcctgcgttgtttcatctgcaatcaaatgccaatgccctgtttctctttgaacagaatacaagcaataaacaacagcatgttcatgtaatgtcatgtcagttaaaagagaaacagggcattggcattacatgaacatgctgttgtttattgcttgtattctgttcaattccaatttctcgaataatgacaatgaattttatatatcactaag

SEQ ID NO: 20788 - DNA, 486 bp, Gossypium hirsutum
  Clone ID: GOSHI-09MAY01-C3889_2
ttcattttatcctaacgctttcattcattgctttcacactaatggtgtttcagtacaaagctcgaacaagaaggcttcctcctggtccagggaagctccctattataggcaacctacaccaactcggtgactcatcccataaatccattcaaagactctcccaacaatatgggccgatgatgtttctgcagctcggtgccgttccaacactggttatctcttccgcagatgctgcaatggcgatcttcaaaggccccggcggcggccatgatcttgccttctctggtcgacctactaatttatacgtggcgaagaagctaagttatgaatataacggcttaactgtcgctccttatggtgaatcatggtgggaaatgagggagatagcattaaccgatcttcttagtgcaaagaggggccaatcgtttcctactataacagaaggaagaagttgcatcaaatgttgaatcatatttgtataagctt

SEQ ID NO: 20789 - DNA, 667 bp, Gossypium hirsutum
  Clone ID: GOSHI-09MAY01-C3889_1
tggattttcattttatcctaacgctttcattcattgctttcacactaatggtgtttcagtacaaagctcgaacaagaaggcttcctcctggtccatggaagctccctattataggcaacctacaccaactcggtgactcatcccataaatccattcaaagactctcccaacaatatgggccgatgatgtttctgcaactcggtgccgttccaacactggttatctcttccgcagatgctgcaatggcgatcttcaaaggccccggcggcggcccatgatcttgccttctctggtcgacctactaatttatacgttgcgaagaagctaagttatgaatataacggtttacctttcgctccttatggggaattattgggggaaatggggaagtttccattcccgcatcttcgattaaaaaaggcccaatcgttttgactcttgaaaaaaagaagttccgcaatgttggaactattgtattacttcccggtattaagccctgtaaatctaaaaactatactttgtagcgaccacgtgtatgccgtcattggtaaaaatacggtgcgaagtgacggggtcgacagatccacaggtgtgctgaagtcagcattggtggagaatgtggtcgatacttcccggatggtggtgatagtgatttatgaaacagatt

SEQ ID NO: 20790 - DNA, 530 bp, Gossypium hirsutum
  Clone ID: LIB3825-033-Q6-N6-C3
acagggaaaggctatagctttcatttcataaccaaacgtagctgatcggcagcgaacatgggcacagataaaggtttaaaaaagaaaaagtttcaaattaaaggaatctagcaaaaataatgataggaggtagcagctattgctaatgcacctcactgtacaagagtgagctaacataatcagtatcaggttcggatgaaattgacaagtaaacttcaaaaattattagagcttcaaagtgagatccaattgagatgatgcatctgctcttggtggtgttgccattgctataaaacctatatttgaactttgagttggattttgacccaattccatagcttggttactcccaactctttcttcattcacctgcctgaaactccctggccaatacaagtctacctcctcatcttccatgaatatcggcatcccaaaacacccttgatcgaaccgtgctccacttcttgtatctacaggtctttgggatgatggcaacattccttggtgcatagcggaatgagctttgatcc

SEQ ID NO: 20791 - DNA, 336 bp, Gossypium hirsutum
  Clone ID: LIB3272-059-P1-N1-A8
tttttttttttttttttttttttttttttacagggaaaggctatagctttcatttcataaccaagaacagatgcatcatctccactggatctcactttgaagctctaataatttttgaagtttacttgtcaatttcatccgaacctgatactgattatgttagctcactcttgtacagtgaggtgcattagcaatagctgctacctcctatcattatttttgctagattcctttaatttaataacttttttcttttttaaacctttatctgtgcccatgttcgctgccgatcagctaagtttggttatgaaatgaaagctatagcctttccctgtg

SEQ ID NO: 20792 - DNA, 770 bp, Gossypium hirsutum
  Clone ID: GOSHI-09MAY01-C3869_1
cggacgcgtgggctgattctgtagtaactttttaggaacgaaaaatcccttcagataggagatcgtgagaattttgtgtcatggcttccacaatggtaaatgctccctgcacggttccttctgttaaaggttttgagactcaaaactacgttggtcttagaccaatttctagtttaaggttcaattctggtaggacttcaacctcaggacgttctcggggcctttttgtggtgagggcatgcgaaaggcatgatggacatgtgaaaaagattgaaatgagtattgaagaatgtgaggctgctgttgtagctgggaatgcgcctgaagctcctccagttccccctaagccagctgctcctgttgggactcctgtgattaaaccttatcaacttaccaggcgtcctcgtcgtaaccgtaagtcccctgcattgagagcatcattccaggaaacaagtatatctcctgcaaattttgtatatcctctttttattcatgaaggtcaggaggacacacccattggagctatgccaggatgttataggcttggatggagacatggacttgttgaagaggtggcaaaggcccgggatgttggagttaatagtattgtgctcttccccaaagttccagatgctctgaaagtcttccacaggggatgaagcctacaatgacaatggtttagtgcctcgaacaattcgtctgcttaaggacaagtccctgaccctgttatctataccgatgttgctttagatccatactcctcaaaatgg

SEQ ID NO: 20793 - DNA, 616 bp, Gossypium hirsutum
  Clone ID: GOSHI-09MAY01-C3839_1
ctggaactcagcttagacacgcctgataacgtgtgttttcccgataaacacgtgcggcggattcatcgggcgctggaatcggatgacgtcgagttacttcgaatgctactgaaagagggtcatacgaatttagacgaagcgtatgcgcttcactacgctgtggcatactgcgacgcaaagaccacgactgagttgcttgaccttggactcgcggatgttaaccataggaactcgagagggtacacagtgttgcacgttgccgcgatgaggaaagagcctaagattatagtttctcttttaacgaaaggtgcacgaccatccgatctcactattgatggtagaaaagctcttcaaatatcgaagcggctcacccgggctgccgattactataaatcgaccgaggaaggtaaggcttcgccgaaggacaggttgtgtatagagatactagagcaagctgaaagaagagacccgtggcatggtgaagcttctttgtctcttgccatggctggtgatgatcttcggatgaagttattgtatctcgaaaatagaagtgggctggcgaaacttttattcccaatggaagctaaagttgtgatggatatagctcaagtggatg

SEQ ID NO: 20794 - DNA, 1095 bp, Gossypium hirsutum
  Clone ID: GOSHI-09MAY01-C3829_1
agacggtgccgatgtcacaatgagagatatcactaacgataccaaagggtcgcaattggatccctcggaatcgacatttttgggtttagatgataataggttgtgtcaatgggatatgagagatagaaaaggggtggttcaaaacattgccacaagtgattcacctgttttgcattggtctcaagggcatcaattctcgagagggacaaattttcagtgctttgcgagcactggagatgggtcaattgtggtcggatcacttgacgggaagattcggttgtattcgaagacatcaatgaggcaggccaagactgcatttcccggtctcggttcaccgatcactcatgtggatgttacctatgatgggaagtgggttttgggcacaactgatacgtatcttgtcctcatttgcactctgtttacagataaagacgggaagccaaaaaccgggtttagtggtagaatggggaataaaattccagcacccagattgttgaagttgactcctctggattcacatctagctgggaacaataataagttccatggtggccatttctcatgggtcaccgagaacggtaaacaagagcgacacctagttgcaaccgtggggaaattcagcgtgatatgggatttccagcaagtgaagaacagcgctcacgaatgctatcggaatcaacagggtctcaagagctgttattgctacaaaatcgtattgaaggacgaatctatcgtagagagtcgattcatgcacgacaactttgccgttagtaactcacccgaagctccgctggttgtggcaactccgatgaaagtcagctctatcagcctctctggcagacgatgacatttgcccaagtagaggatattacttttcatatacgtatagagaaacttatccatatctgacattcgctcacatcatatgctttgtgtttgtattaaattttttttttccattctgcatcttgtaattggttaaaaagcttatccatatctcacatcatatgcttggattgttgaacaacagtgtgattgtttttcttttcacatcatcttgtaaataatatatagtatatgagtttctctgtcgac

SEQ ID NO: 20795 - DNA, 992 bp, Gossypium hirsutum
  Clone ID: GOSHI-09MAY01-C3559_1
attttatgctggaacaggtaacttgttgtgtaagtctgaggatacagtatgtatatttgatctccagcacaggcttattcttggcgatcttcaaaccccttttgtgaagtatgttgtttggtctagtgacatggagagtgttgctttgctcagcaagcattccattatcattactagcaagaaacttgtgcaccagtgcacttttcatgagacaatacgagttaagagtggagcctgggatgagaatggtgtttttatttacaccaccttaaaccatataaaatactgccttcccaatggagatagtggaataatccgaacgcttgaggttcctatatacataactaaggtttctggcaatactatattttgcctggatcgtgatgggaagaataagactctcgtcattgatgctacagaatacatttttaagctgtctctgcttcggaagaggtatgatcatgttatgagcatgataagaaactcccagctttgtggtgaggccatgattgcttatctgcaacagaaggggttccctgaagtggctctccattttgtcaaagatgagaaaactcgctttaacttggctatagagagtgggaacattcaaattgctgttgcatcagctaaggagattgatgacaaggatcattggtataggttgggtgtggaggcccttcgccaaggcaatgctgctatagtggaatatgcctaccagaggactaagaactttgagagattgtcttttctttatctcataaatggtaacctggaaaagctatccaagatgctgaaaattgcagaagttaagaatgatgttatgggtcagtttcacaatgctttgtaccttggtgatatacaggaacgggttaagatcttggagaatgctggtcatttgcctcttgcttatgttacagcatcagtccatgggctacatgatgttgcagaaaggttagctgctgagttgagagatgattgtcctttttttccgg

SEQ ID NO: 20796 - DNA, 1550 bp, Gossypium hirsutum
  Clone ID: GOSHI-09MAY01-C3549_1
tggactcgtgggctccaggcaaattcttcgggtctcaatacaacacctctatggttccttcttttgggggaggtgtactatgtgccaaggcctcaatgctgcttcagagtgtccctcctgcattgcttgttcggtttttgagggagcatcggtccgagtgggctgattatggaatcgacacctactccgcatcttgtttgaaacctaatccttacactgtcccgtgtgctcggcctagtggtttccctagtagtcaggtcattctacctcttgcgcatacagtagaacatgaagagttccttgaagttgttcgtctagaaggccaggcattcacgcccgaagatgtagctttggcacgggatatgtacttattgcagctttgcagcggaattgatgaaaatgcagtcggtgcctgcgcacagcttgtttttgcacctatcgatgaatccgttgccgataatgctccattgcttccatctggatttcgagtcatacctctagattccaagccagttatggatggaccaggagcagctcgaacattggatttagcttctaccctcgaagttggtcctggcagcaatcgctcaactggtgatggtgagccgaacagttataaccttagacccgtccgtccgattgcattccaattcactttcgagaaccacttgagggatgacgtggcttctatggctcgtcaatatgtacgtagtgttgtgggatctgttcaaagggttgccatggctattgctccatcccgtattagccctggcttgggaccaaaaagcctccctggttctcctgaggctcttactttggcgcgttggatttgccgaagctacaggattcataccggtggagaactcctacgagctgattcacaatccggtgatactttgctggagcaactgtggaaccattcagatgcgataatgtgttgttcattgaaaacaaatgcgtctccagttttcacctttgcaaaccaggctgggcttgatatgctagaaactacattggtagcccttcaagacataatgctggacaagattctcgatgaagccggccgaaagagcctatgcaccgagttctcaaagatcatgcaacaggggtttgcacatctaccagcagggatatgcgtatcgagtatgggaaggccggtgtcctacgagcaggccattgtgtggaaggttgtcgatgacgacaacgatgatgctgccaatcactgcctcgccttgatgtttgtaaactggtcttttgtgtgagatctttactgatcgacgtatcgaaaaattaactcttaggtatctatctatctatccatctatatatattaagttatatatacatgtttttagtgcttaaaaaggattatattatatatatttatgaagttattggcaggatttaatggatattatcaagtgttttatgggatatatatggctagacatggatgttggtttgcttatttcttgatatagaatggataatttatgctaaaagaatgcggctggatatttcatttagaaaataaaaattggattgttgtg

SEQ ID NO: 20797 - DNA, 1041 bp, Gossypium hirsutum
  Clone ID: GOSHI-09MAY01-C3519_1
aggcgacgcggtcaggcgacgcgtcgaggccacgcgtgcggtcacacgggctgcatctcacaatcaaaatccatcgttagttcatcgacgcagcctcgttcagattcaactatagaagcgaaatggctggttccagggttgctcatgctaccttgaaaggaccaagtgttgttaaggagatagttatcggaataacacttggcctttgtgctggtgggctttggaagatgcatcactggaatgagcagaggaaagtgagagcattctacgacatgctcgagaaaggtgaaatcagtgtcattgcagaagaataaatgttcttttagtcttgtgaaagtgtggacagcttcagctgtgtttcgttatatgcattctcttcatttggctcttagatagaagatgagcaaaacacaatttggagcttctaagaataatgtcatcattttgggatcttgatttcatatttgcatagcaaatccaagcgatttttcaatctagtgcctttgttggtttccatttgacattgttgtttgatttggagatgtttgaaagctctttatatttctactcaattgttatttgtcacagttacgccgttttaggcttaataatggaaatcggctgaacatgtgtatcttttttcatttcattttcttcctttttttttcctattatctctcttttttttttttacttgttatcgggtcattcctctcttattatttttctatttcttttttttacttttctttttccttatttttatgtctttttcaatatgtttgttcctctatttctatttcttttgttctctgctatttaattttgttttttatttgtgttctttttttttttctttttctatttatctttgttctttcatggtttctctactctttttttttttgttccttttttcccattttttgttcattttcactttatcttttttttctttttttttttttttctttatttttttttttctcttctttcttcgttacttttctttttttctttttttccttctttttttttttt

SEQ ID NO: 20798 - DNA, 234 bp, Gossypium hirsutum
  unsure (1)..(234): unsure at all n locations
  Clone ID: LIB3147-023-Q1-K1-A4
aaatccaancgaattttcaatctagtgttcctttgtgggtttctatttgacattgttcgcggatttggagatgtgggaagagctctttatatttcttctcaattgttatttgtcacagttacgccgttttaggcttaataatggaaatcggctgaacatgaaagatttattaaataaactaaaaaaaaaaaaaaaataataaacaaaacaaaaaacatacataaaaaaattatg

SEQ ID NO: 20799 - DNA, 2423 bp, Gossypium hirsutum
  Clone ID: GOSHI-09MAY01-C3499_1
cccacgcgtccggtgcctaaaaattccgaacaactaccggttgggcggtcaatttcgttggttcggttacccacggaaggtgcggaccgtggagtgcttctcactcttcatgttatcgtctttttacttttactagcctatttcgagtctattatttaacactgtctccaaataaatctctctttttctctatataacatatctcacaaaattcaagatttaaaccggtttccgatctcattcaaatccttaatataccggcgatcgaaatggatagaataagggcgtttttggtagccgtggcggttgtcgccatatgcggcgtacctcaggtcagatccaccgcttccgatcatcgttacaaagctggtgatgaagttcctctttatgctaataaagtaggtccttatcacaatcccagtgagacctaccgttacttcgattttccgttctgttcctcagctcccgtgaaggagaagaaggaagctttgggtgaagtattgaatggcgatcgactagtgagtgcgccttataaacttgagtttttgacggagaaagaggctgaaattgcttgtaaaaggaagcttacgagggatgaagtggtcaagttcagaaaagctgtctcgaaagactattacttccagatgtactacgatgaccttcccatttgggggttcttggggaaagttgaaaaggaagggaagaccgatccagctgattacaaatattacctctttaagcatctcgtttttgagatccatcataacaaggatcgcgtcattgaggtcactgttcgatctgatcccaacgcccttgtggatctcactgaagatgtaccagttgatgtggatttgatgtacactgttaaatggaaggaaaccaacactccttttgagaaacggatggacaagtactcgctatcttcttccttgccacaccatttggaaatccactggttctcaatcatcaactcatgtgtcaccgttttgttattgactggtttcctggccaccattcttatgcgagtcctgaagaatgatttcatcaagtatgcacatgatgaggaatcggcagatgaccaggaggagtctgggtggaagtatattcatggtgatgtgttcagataccccaagcacaagtccttgtttgccgccgcccttggttctggcacccagctcttcactcttacaagtttcatttttatccttgctctagttggggtcttttatccatataaccgaggagctcttttcactgctctggtcgtcatttatgcccttacatctggcattgctgggtacactgcagcttctttctattgccagctagaaggaacaaattgggtgagaaacttattactaaccggaagcttgttttgcggacctctttttgtcacattttgctttcttaatactgtcgcaattgcttataaagccacagcagcattgccatttggaaccattgtggtgatttttctcatatgggctctagtcacttcacctttattagtattaggaggtattgctgggaagaatagtaaggcggagtttcaagccccttgtcgcaccacaaaatatcctagagagatcccaccattgccttggtaccggaaaactattcctcagatggcaatggcaggtttcttgccattcagtgctatctatattgaactttactacatatttgccagcgtgtggggacataggatctacaccatatacagcatcctgtttattgtctttatcattctcttgattgtcactgcttttatcactgtggctttgacttattttcaacttgctgctgaagaccatgagtggtggtggaggtccttcctttgtggtgggtctaccgggctgttcatatacgcctactgtttgtattattacaatgcacggtcagacatgtcaggcttcatgcaaacttcgttcttctttgggtacatggcctgcatttgctatggctttttcctcatgcttggggctattggcttccgtgcatctctgctctttgttcgacacatttaccgttctatcaagtgtgagtaggaagttggatggtcttccctgttcacaagaagtaagcatacctttgctttatcagaaccagttgataggtagtttatcaaaagattctacgacgatgattacgaaaagagcagactggaagcgcatgggtgctttgggctgctttggcagtgttgtatgaaatatgaaccattctaaaccatagttgatgccaacaaaaactttgcattcctcacttcaccattcccattttgtttacaattattattatttttgttggagtgaaaacatgttgaatactcagatgcatacttctaggcccagcttttgttattacgcggtcattttcatgttgttagctctaaaaacaataacatatgtctacattttgcaatc

SEQ ID NO: 20800 - DNA, 178 bp, Gossypium hirsutum
  Clone ID: uC-gsflnu33B113d06b1
aaaaaaaaaaaaaaaagaaaacgaagaagaaatatggcatgagagaatgaaatatatttttgttggagtgaaaacatgttgaatattgagatgcatacttctaggacgaacttttgttattacgcagtcattttcatgttgttagctctaaaaacaataacatatgtctacattttgc

SEQ ID NO: 20801 - DNA, 1005 bp, Gossypium hirsutum
  Clone ID: GOSHI-09MAY01-C3479_1
gtttattctattttcgacagccgctggggggggggtcaaaaagattcaggaggagtggaaaatacttgagaaggatttgccagatactatttttgttagggtttatgaatcaagatggatctcctaagggctgtaattattggagtagaaggcactccttaccatgatggtctgtgcgggtttgatgttttcttccctgctagctatcctaaagaaccaccagtatgtaattaagggttatgaatttgaatattaatttgcatcttaatgtgatatctggtgtacgtgtttggtccgatgactaggaaattgcttgtttcagcatgtttactatcactctggcggacttcgactcaacccaaatttgtatgactgtgggaaagtttgccttagtcttcttaacacctggtctggtaaaaagaacgagagatggatacctggcatgtcaactatgctccaagttctggtatccattcaagctctaatcttgaatcagaagccttactttaatgagccaggttgggaacgtcttagtggcacaccatcgcggccgcgtgggtccaggcaatacaatgaagagacatttatcttgtcactaaagacaatgatctattcaatgaggaggcctccaggcattttgaggactttgttgtcggccatttctacacgcgtgctcaagatattcttctggcatgcaaagcatatatggatggggctcaggtaggttgcccggtaaaaggtggtatccaagatgtcgaagaaggtgagaagagttgctcaccgaagtttaaggtctccatggctggatgcgtaaatatgctcgtgaaagaattcacggttttgggagtcaaggattgtgagaaattccttgttgcccctgaatctcgaaataatggagttgatagtatgcccatggctgctgcaaatatgaactagcttttgaaaccaaaaattctgaaaacttggccagaatggtttttatttataaattttgcacagaagttc

SEQ ID NO: 20802 - DNA, 473 bp, Gossypium hirsutum
  Clone ID: uC-gsflnu33B005d02b1
ttaaggcactccttaccatgatggtctcttcttctttgatgttttcttccctgctagctatcctaaagaaccaccacatgtttactatcactctggcggacttcgactcaacccaaatttgtatgactgtgggaaagtttgccttagtcttcttaacacctggtctggtaaaaagaacgagagatggatacctggcatgtcaactatgctccaagttctggtatccattcaagctctaatcttgaatcagaagccttactttaatgagccaggttgggaacgtcttagtggcacaccaaaaggtgaattaatgtccaggcaatacaatgaagagacatttatcttgtcactaaagacaatgatctattcaatgaggaggcctccaaggcattttgaggactttgttgtcggccatttctacacgcgtgctcaagatattcttctggcatgcaaagcatatatggatggggctc

SEQ ID NO: 20803 - DNA, 583 bp, Gossypium hirsutum
  Clone ID: GOSHI-09MAY01-C3789_1
cccacgcgtccggtaaaaacttcagttttttttttttgcaggatatggctgagagaaagagaaggaagcttaagttgttagccgaaacaataaatttggatgaaaaaaaagcaaccgaggaggaggagagtttgaagctacaaacgtgggctgatcttcctgtggaacttttggaattgattctgtgccgcctaacactagaggacaatgttcgagcttctgctgtatgtaggaggtggcataaggttgcagttgcagtccgggtggttaaccaatcaccgtggcttatgtactttccaaaatatggtagcttgtatgagttctatgatccagcagagcgtaaaacctactctctcgagctgccagagctacaaggatccagggcttgttacaccaaagatggttggttgttgctgtaccgacccagaaatcacggtgtgttcttctttaatcccttcaatcgccacatgattaagcttcccagatttgagttgacatatcagatggttgccttctccgatgccccaacatctgacctgtgtgtggtttttacgattaaacatatcagtcctactgttgtcgc

SEQ ID NO: 20804 - DNA, 914 bp, Gossypium hirsutum
  Clone ID: GOSHI-09MAY01-C3759_2
cgcaaccttattccttcttagctgacactaaaccttttgagaacaaaaaaaatcttctagtatgctaaccctcgcctccccacggctgattctgtggaaggaaaatgcaggaatggggtcgggcgtgatataaagagcgatgaactggtattcacatttctcaatatattcggagaatacacgagatgaatggacagcttctgaacttgattgttccaacagtgtactcgactctttctaatggtaatgaaaaggaggtccgagaattttgtgacatttaactctcattcttcaaagaatatggattcattgcaggactcggctttttattctggacaaaagtgcgatggattgtgaattgcctgaattggtagttggttataaagagagtacatatcatgttgtcaaggacatttgtattgatgagggagttccgacacaagacatgttcttgtttgaaagcagtgtggacgagaagagcgagtgcaacttttcgtatcccaaaaaggatcaagataatgaactaatgaaagaaatgtcagagactgatatgcccatgcaagacatttccttttctccggaagaaaatcaatctgggaaggatattgacaatgaaggtggctctaacaaaaaactcgacgccgatacatatatgcaggatattgccttatctctagaagaaaacaagtctaacaagggaatttcgaacgaatgggatcctagggatttgctggtgacaagagacatgaaggatgatgcaatggaaatgatgtcaaatgacggctccaaagaggtgtttaccctaggagacatactttcattgcctgaattgaccacactgaaatctgagcccgtgccgcctgattgcaaaagtgacagaattgaacaacagtcctttgagaactcaagtaaaa

SEQ ID NO: 20805 - DNA, 910 bp, Gossypium hirsutum
  Clone ID: GOSHI-09MAY01-C3759_1
aaaacacccaaagctggggtttagagctttgttttttaagcttctttattcctattatttactttgtttcctttcgagctatcccaaactccaaagactcttcctcacccttaaggccccctttgtttcatgtacaaccttgtttatgttttcacttggcttttacagtgaagattgttggaagttccagcactgaatcaacagagaagaaccaaaaaaaaagagaatagttcacaaatgccatgtggtttaagatatcaactcgtagcaaccacgaggcctattgatgtaaaacatgaaacttgatagtgaacaagtgctttgccattcaactgtaggcctcaagagtgactcaaagccgtattcctttatagactctaaacctttcaaaaacaaagagaagcctctggattctgttggactgaatgcagaaggatttgtgaaggatgatttgaacagggtaatgcatgatataaaaggaaatgatggagatacggaccccatgctatatctagagaagacaggagatggatggccagcatcaaaacttaattgttctatgagtgtaaatgacttttccaatggtaatgaaaaggaggcccgagatttcgtgccaccaaattctcattctttgaagaatatgggttcatttcaggactcggttttttatttggacaaaagtgtaatggaatgtgcattgcccgaattggtagtttgctataaagagagtgcatatcatgtcgtcaaagacatctgtattgatgagggagttccaactcaggacaagttcttgtttgacagtggtgtggacaagaagagtgattgcaactttctgccttctgaagaggatcaagacagtaagctgctgaaagaaaaaccggagagtgatatatctatgcaagctggttca

SEQ ID NO: 20806 - DNA, 412 bp, Gossypium hirsutum
  Clone ID: LIB3146-060-Q1-K1-F11
cccacgcgtccgcttgataatgtacaagtgatttgccattcaactataggctacaagaatgattcgaagccttattccttcttagttgacactaagccttttgagaacaaagaaaagtcttcagatgctactgaactgagcacagatgatactgtgaaggaaaatcagaatggggtcatgcatgatataaagagcgatgaactggattcagatttctcaatatattcggagaatacacgagatgaatggacagcttctgaacttgattgttccaacagtgtacacgacttttctaatggtaatgaaaaggaggtccgagatattgtgacatttaactctcattcttcaaagaatatggattcatttcaggactcggttttttatttggacaaaagtgtaatggattgtgaat

SEQ ID NO: 20807 - DNA, 1132 bp, Gossypium hirsutum
  Clone ID: GOSHI-09MAY01-C3709_1
gcgttcgctaaacccaactcaccacaattggctgcatgtgtgtaaaaccgacgccctcaaccgcggccatacgccgtcaacgttctccggtctcatttcagcgtccaggtaaacttcacaagccagatgaagtttgggctgtagatgagcaagtgactttgtcttgatgctattgaactagttattgtggggggtgggataatggctttgtcgatctctagaagggttgtacgttcttttggttcactgtctgccttgggcttccgcgaatatccaactgtcgcaggtcgatcatttcaagcttctgatttgagtggtcgaattgctggggataacttgcttcatgcagaatgttttagcctttccaagggtggtccatctttccttggttttcggaggttttcaaccacaattttgactcctgattcaaatggaggtgcttttccatcggatttactgtcttcaaagactgtgctaacaccagaccgtactataggactttatgaacacctggtagttcctgtgacaaattttcataatgaagaccatggcttgatggttttggctggtgatgtttttgatgtacctattagaaaggatattatccaccgtgttgtacgatggcagcttgcaaaacgacaacagggaacacattcaacaaaaactattagtgaggttagggggactggtaggaagccctggcaacagaagggtcttggtcgagctaggcatggatcactgcgtggtccccagtttcgaggtggtgctactatgcatggccccaaaccaagaagtcatgcttttaaattgaataagaaggttaggcgtcttggactgaagattgcactgactgcttgtgctgctgaaggaaagcttcttgtcttagaggatttggaggtccctacacataaaacaaaaaatatagtgaactatgtaaatcaaatggagaataccaagaaacttctgctggtggatggtggccccataaatgaaaagttgaagctagctacacataatttacattatgtcaacgtgctgccatcaattggcttgaatgtctatagcatcttgcagcatgacacattagtgatgtcccgtgatgctgttaacatgattgtcgaacgaatgcaca

SEQ ID NO: 20808 - DNA, 248 bp, Gossypium hirsutum
  Clone ID: LIB3120-022-Q1-K1-A11
cacacattgcctccattctctaaaaccgacgccctcaaccgcggccatacgccgtcaacgggctccggtctcatttcagcgggcaggttcccgccacgttcgtcttttggtaaacttcataaaccagatgaagtttgggctgtagatgagcaagtgactttgtcttgatgctattgaactagttattcttggttattggataatggctttgtcgatctctagaaggattgtacgttcttttggttcac

SEQ ID NO: 20809 - DNA, 593 bp, Gossypium hirsutum
  Clone ID: GOSHI-09MAY01-C3739_1
gtagtgaaaggactgtgaatggagataaccctatctttaaagagaagccattaagatctgtacagtgttgccttcccagcttggtttcatgtagtagttttagtgagaggaagaagaagatgagccctgcaatagctgcaaacgataagccgtaacttccatccgctaccagcaattagattgaagaagcctggatcttgattcccagagatcatttgctcaagatgacttcaaatttttgtcagaattaacgaagtcttggtgtcatggttacttaaatatgggattttcggattcagggaaatgaaaaaaagctgccctggcctattagtagtataccgtctcagtcaacctgaaggtattaattttcttttcgacacgaagtttataacattacaggtattgtgtgataaaaatgcaaaagaatcaaaggaaaacttgtaaatgactcttgtaatcaatttcatatatattatgtaaagtattttttatttaaaaaaaaaaaaaaaaaaaaaaaaaaaaaaaaaaaataaagaaacaaaaaaaaaaaaaaaaaaaaagatatataaaatcaaaaaaaaaaataaaaaggg

SEQ ID NO: 20810 - DNA, 1288 bp, Gossypium hirsutum
  Clone ID: GOSHI-09MAY01-C3729_2
cggcgcgtgggtaaaattcgaaaccctaaaaaggttctcttcgaaaatctccgtctcggaactacctgtcttcacgcaggaaagtgaaaagatgagtagccgttccagcaggactctttacgttggaaatcttcccggtgatgttcgcgagagggaagtggaagatttgttttataagtatggtcccatagctcaaattgacttgaagattccaccaaggcctccaggttatgcatttgttgagtttgaagaagctcgagatgctgaagatgccattcgtggtcgtgatggatatgactttggagggcatcgtttacgggttgaacttgctcatggtggtcgtgggcgctcttccatagatcgtcacagcagttatagtagtgggcgtggacgtggaccatccaggcgttctgaatatcgcgtgctagttactggattgccatcttctgcttcgtggcaggacctcaaggatcacatgcgtcgagcaggagatgtttgtttttctcaagttttccgtgatggtagtgggactacagggattgtggactacaccaactatgatgatatgaagtatgctattaagaaactcgatgactctgagtttcgtaatgcattttctcgggcatatgttcgggttaaggaatatgattctaggcgggattcctctcgaagccctagtcgtggccgatctctctcaagaagcagaagccgaagccgaagtagaagccgaagcaaaagccgtggtcggagctatagccgaagcaagagccgcagcaagtctccaaaggcaaagccttcgcgcaagtcacctgaaaagtctagatcaaggtctcctcgttcccgctctgcatcaaggtctcgctctttgtcaagatctccttcaaggtccaggtctcctttgccttctcgtcaaaaaggaaggagcaagagtcccaaaagacgcagtgttagcaggagtccaagtgggagcaggagcaggagcaggagcaggagcaagagtgtatccgggtcttgatctgaagctcctctgttgtcttttcactggtgagatgctattgcggggtgtatcaggagctgaagatgcctatgaagcttttatgtttggataaaaattagcatggagtagtgcgtaacttattagagttgtatcaactatgctggatttgatcttcattgctatattcagaacatcggacgttgggtgtgttattttaactagactgttacatacctggttttggatactttttaacatgatttgattgttgggtgccaaaagtagcatttt

SEQ ID NO: 20811 - DNA, 844 bp, Gossypium hirsutum
  Clone ID: GOSHI-09MAY01-C3729_1
tcgtaaaaccgaaaaaagggagaaacccaagtatgttgttggagtgaaacactgtctgtttgtgaagttaagaagtccagtgtgtagctgtgtacggaaaaaaaagcatggtttctgcatcagagattgcaacaaagttgaatctggcttcccaccctgaaggtggcttcttttctgaaacttttagggatagttctgttatgctctccacatctcaacttcctcctcaatacaaagtcgatcgtgccgttagcacatctatttacttcttgttaccggctgggagcgtgtctcaccttcaccgtataccctgtgctgagacctggcatttttatttgggagaacctcttacggtcttggagctggatgagaaagatgggcaagtaaaactaacatgtcttggacctgatttgttgaataatcagaaggtgcagtacacagtgcctccaaatgtttggtttggtgcatttccaacaaaagatttcaacatttcgactgatggggcagtgacaaaaaatgatccaagggatgctgagagccattattcacttgtaggatgcacctgtgcacctgctttccagttccaagacttcgagctggcaaaacgatccgagcttgtaactcgcttccccaaacatgagcatctcatttctttactcacttatcctgattgaaacaaagcttctcaaattcatctcacaatcacgaatctgtattattttcccatcttctgctgtgttagtataaggttaaaaacgatctagtctacctgtactgtcgactccattctgctatgtatgttgtcatacatggcagaagagattaataagaaactcgtgccctg

SEQ ID NO: 20812 - DNA, 598 bp, Gossypium hirsutum
  unsure (1)..(598): unsure at all n locations
  Clone ID: LIB3543-065-Q6-K6-D12
cccagcgtccgtaaaatcggggctgaaggggtgtttcaaaaatctcgctggacaacctgtcttaccagaaatgaaaagagagtagccgttccagcaggactctttacgttggaaatcttcccggtgatgttcgcgagagggaagtggaagatttgttgggtaagatggggccatanctcaaattgacttgaagattccaccaaggcctccaggttatgcatttgttgagtttgaagaagctcgagatgctgaagatgccattcgtggtcgtgatggatatgactttggagggcatcgtttacgggttgaacttgctcatggtggtcgtgggcgctcttccatagatcgtcacagcagttatagtagtgggcgtggacgtggaccatccaggcgttctgaatatcgcgtgctagttactggattgccatcttctgcttcgtggcaggacctcaaggatcacatgcgtcgagcaggagatgtttgtttttctcaagttttccgtgatggtagtgggattgtggactacaccaactatgatgatatgaagtatgctattaagaaactcgatgactctgagtttcgtaatgcattttctcgg

SEQ ID NO: 20813 - DNA, 476 bp, Gossypium hirsutum
  unsure (1)..(476): unsure at all n locations
  Clone ID: uC-gsronu33B079g04b1
ctctaaattttgaaaccctaaaaaaggggctcgccaaaagggggcgttttgaaacgatctttcgggacgcacgacagngaaaagatgagtagccgcaccagcaggactctttacgtaggaaatcttcccggtgatgatcgcgagagggaagttgaagacttgctttataagtatggtcctatagctcaaattgactagaagattccaccaaggcctacaggttatgcatatgaagagactgaagaagctcgagatgctgaagatgccattcgtggacgcgatggatatgactttggagggcatcggttacgggctgaacttgctcatggaggacgtgggcgctcatccatagatcgacacagcagctatagcagtgggcgcggacgtggaccatccaggcgaaccgaatatcgcgagctaggaactggatagccatcttctgctgcatggcaggacctcaaggatcacatgcgccg

SEQ ID NO: 20814 - DNA, 329 bp, Gossypium hirsutum
  Clone ID: LIB3135-053-Q1-K1-C2
gatttgttgaataatcagaaggtgcagtacacagtgcctccaaatgtttggtttggtgcatttccaacaaaagatttcaacatttcgactgatggagcaggagcaggagcaagagtgtatccgggtcttgatctgaagctcctctgttgtcttttcactggtgagatgctattgcggggtgtatcaggagctgaagatgcctatgaagcttttatgtttggataaaaattagcatggagtagtgcgtaacttattagagttgtatcaactatgctggatttgatcttcattgctatattcagaacatcggacgttgggtgtgttatttt

SEQ ID NO: 20815 - DNA, 885 bp, Gossypium hirsutum
  Clone ID: GOSHI-09MAY01-C3689_1
ccccgcgtccgggacaatactcttcaggccccgactcaggtagccacaagcgcaaatcgatgaccaggggccgccgtcttccgttggccggaggtccacagggttctcgtctccagattccgctcctcctccttcctatgacagcgtcccgccaccgcttgacggcatcgagatggccaagcagcgagctcaggagattgctgctcgccttacggcggcctccgctggctctgaagccaagcgccctcgtgtcgagaacggttctggcgggggttggggataacgagaagggatttatgtccgctccttctgatataaagcacatgtcaagctctgctccttcggcaatacctgcttcatatggtagctaccatggtactagcaaaaagattgacattccacaaaatagggttggtgttataatgggcaaagctggagaaaccattaaatatcttcaactgcaatctggcgcaaagattcaggtccagcgagatatggatgcagatcctaattccgtgactaggcctgtggagctcatgggtactgctgaacaaatagctaaggctgagcagttgataaatgatgttctggcggaggctgaagcaggaggttctggcatagtttctcgaagattgacaggacacgctggaagtgagcactttgaaatgaagataccatataacaaggttggcctgctgattggtaaaggtggtgaaacaattaaaaatatgcaagctagaactggagctcgtattcaggtgatcccgttgcacttgcccccaggtgatacatctacagaaaggacattacacatagatgggactagtgaacagattaaaactgctagagaattggttgatgaggtcataagtgagaatcgtatga

SEQ ID NO: 20816 - DNA, 610 bp, Gossypium hirsutum
  Clone ID: GOSHI-09MAY01-C3629_1
cggccgcgtgggcaaaaacaggcaaagagagtgtgacagagtttaatgaacttcaaccttcaaagcatgaacccatcatcatcatttgtggctaccagagatcaagctctctctgttttcaaccaccctttctcacaatctcactctttccttgtttctaatttcaaaaatggctcctttctatctcccatcaatacccacacaagaaggccaaagacccacacttcttttaccactcctaagcgattccaacccatcactggttgtttaggtgagaggaatacacctgcaaaggcacttagacagattctggaatcgcctggtgctcaccaaggccctgcttgtttcgatggtctcagtgctaagcttgttgaaagagctggctttcagtattgtttcaccagtggattttccatttctgccgctcgcctgggactaccagacaccggatttatttcttatggagaaatggtggatcaggggcaacaaattactcaggctgtatcaattcctgtcatcggagatggtgacaacggatacggaaatgcgatgaatgtgaagagaactgttaaaggatatataagagcaggctttgccgggatcattctcg

SEQ ID NO: 20817 - DNA, 1437 bp, Gossypium hirsutum
  Clone ID: GOSHI-09MAY01-C3199_1
cgagtttcaaggtcgtccccttgcagatcatccagctgtgaagaatgggcgcccacctggtgctctcaccattccccgtgaacttcttgatgcctcgacagttgcagaggcaatcagtgtcatttcatgctggtatgaggataagactgagtggggacaccgtgttgggtggatttatgggtctgttactgaagatgtggtcacaggatatagaatgcacaacagaggatggagatcagtttattgtgtgactaagcgtgatgcattccgtggaactgctccaatcaatctcactgataggcttcaccaagtcttgcgttgggctactggttcagttgagattttcttttcccgtaacaatgctctcctagccagtcctagaatgaagattctacagagaattgcctatctaaatgttggaatctaccccttcacctccattttcttgattgtctactgttttctcccggcactttcgttgttctctggccagttcattgtccagactctcaacgtaacattccttacttacctcctcatcataacagttactctttgtttactagctgtgcttgaaattaagtggtctggcattgagttagaagagtggtggagaaacgagcagttttggttgatcggggggacaagtgctcatcttgctgccgtgcttcagggtctgttgaaagtgattgctgggattgagatttctttcaccttgacatcaaaatcagcaggagatgacttggatgatgagtttgctgatctctacgtagtcaaatggacatccttaatgataccaccgatcacgatcatgatggtcaacttaatagcaatagcagtcgggttcagccgaacaatttacagtgttatccctcagtggagtcgtctactaggtggagttttcttcagcttctgggttctggctcatctctatccttttgctaaagggctgatgggaagaacagggaggtacacctaccattgtgttcgtatggtcaggtcttatggccatcaccatatccctcctttgggttgcaatcaatcccccatccaccactaaccaaattggaggatcattccagttcccttgattggacattttttatgttaaaggtgaaacacttctattatcgtattcctttatttattccttttttcttcctcctccaagctgatatgctggtgaaaaaactaggcatgttctatgttatcatgtgccaattggaatatacttttagcagcatttttagtgagttttcatgggatagatccaacaaaaaactggtttccctgctcttttgttcttattgtatgatgtttacgtgtactcactgaatagataacttttttcttcaactttttctggtggatcgccatctatatttatgcttcaatgcaattagtttttttgggtagcttttaattgattgatgaaca

SEQ ID NO: 20818 - DNA, 757 bp, Gossypium hirsutum
  Clone ID: GOSHI-09MAY01-C3079_3
ggaatttccacatcttcctctagctggcatgagagaagtggaggacgcacatatgatcgtgagtctcgcgacagtcgtggtttccgtgatagttatgacaagggaagaagtcgcagtcgaagtcctgcaggttggggtgatcgccataaaactggtgtccgtgaccgcagctggagtcgtagtgctgaaaggtatgatagtggtgctggacgtcaacgttccccaacgcgcagttttcttgaggtggggatgaaacgggaccggttgtctccatcccaacagcgtgggccacttcaaaataattagaattcaatcgaacactgaaattcatgtagcccaattcttgagaggtcaaggtcaccttatgctggtgatcggggaagatggtgtggtgactcagcaggagaggggaagacgagtatatgctaatggacctcaggtggaaggcatggtacctcctgtcattgatctcttttgacctttggatttagtaatttgttggttatgtaatgcttttctggtaccgtcttctttcgcagttcgattctagttatatatatatatatagtttcagaagttgaaattacacgggattatttgatggatttttgggttagactttgtagtattttagatgaatggaggaaaattttagaagtttttaaaggcaaaataaaagtttgtaatgtatgaaggatacaaaccttcatctctttttaatcttttaatgtattagttgtgtgaaatctcttctact

SEQ ID NO: 20819 - DNA, 1043 bp, Gossypium hirsutum
  Clone ID: GOSHI-09MAY01-C3079_2
gggcaccaagggtcctcagttgagagagattgagagaggagtggatatcgtggttgccaccccaggccggtcccagcgtccgccggagatgaagagaatcagcctccatcaagtttcttaccttgtgttagatgaggctgatcgcatgttagacatgggttttgaacctcaaatacggaagattgtgaaagaagtgcctacacggaggcagactctaatgttcacagcaacatggccaaaggaggtccgggaaaattgcagcagatctactggtaaatcctgttcaggtcaatattggcaatattgatgaacttgtggcaaacaagtctattacccagtatgttgaagtattatcacctatggaaaagcacagaagattggagcagatactgcgttcgcaagaaccaggatccaagattattgttttttgctcaactaagaagatgtgtgatcaacttgctcgtaacctcactcggcagtttggagctgctgctatacatggagacaaatctcaggctgacagagacttcgtgctgagtcagtttcgcaccgggaggtcaccagtgcttgttgcaaccgatgttgctgctcggggattagacattaaagacataagggtggtaatcaactatgacttccctactggagttgaggattatgttcacaggattgggaggacagggagggcaggtgcgaccggattggcttatacattcttcgtcgatcaggattcgaagcatgcttcagatctcatcaaagttctggaaggagcaaaccagctggtgcccgctgaacttcgtgatatggcttcacgtggtggtttgatgggaaggcctaggcgttgggctccaagttctggtggctttggtaggggacgtggtggacgtactgatttgggctatggtggctgggacagtggaaggggtggtcgtggaatttctacatcctctacctggcttgagaaaagcggcggaagacgtggaaatgatcatgagtctcgcgataggtacaatcgtggtttccatggtagtaatgataggaga

SEQ ID NO: 20820 - DNA, 1110 bp, Gossypium hirsutum
  Clone ID: GOSHI-09MAY01-C3079_1
cccacgcgtccgcgatgagcttgtggcaaacaagtctattacacagtatgttgaagtattatcaccaatggaaaaacacagaagattggaacagatactgtgctcccaagaatccggatccaaaatcatagttttttgttcaaccaagaagatgtgtgatcaactcgcccgcaacctcagtcgacagtttggagctgctgctattcatggagacaaatctcaggctgacagggacttcgtgctgagtcagtttcgcaccgggaggtcaccagtgcttgttgctaccgatgttgctgctcggggtttggacattaaagacatcagggtggtaatcaactatgacttccccactggagttgaagattatgttcacaggattgggaggacagggagggcaggtgcgaccggattggcatatacattctttggtgatcaggattcaaagcatgcgtcagatctcatcaaggttcttgaaggagcaaaccagcgggtgcctgcagaacttcgtgatatggcttcacgtggtggtgggaggggaatgcctagacgttgggctcccagttctggtggccgtgatgaggggcgtggtggacgtgctggttcaggatatggtggtagggaaggtggaagaggcggtcgaggaatttccacatcttcctctagctggcatgagagaagtggaggacgcagatatgatcgtgagtctcgcgacagtcgtggtttccgtgatagttatgacaagggaagaagtcgcagtcgaagtcctgcaggttggggtgatcgccataaaactggtgtccgtgaccgcagctggagtcgtagtgctgaaaggtatgatagtggtgctggacgtcaacgttccccgacgcgcagttttcttgaagtggggatgtacccggaccctttttccccctccccactgccttgggcccgtcccaaagaatttgaattcgctctcaaggccggaatgcccttttccccgtggctcgaaaattcaaggtccctgtgtgctggttatggggaagaatgcgttgtgaggcccccccgagagcgcgtcagctgcgcagtcgcccggcgcccgtctcgcggctgacgttgagctccgctccg

SEQ ID NO: 20821 - DNA, 1061 bp, Gossypium hirsutum
  Clone ID: GOSHI-09MAY01-C3069_1
gcgcccacgcgtccgcccacgcgtccgagatgtcaaaaaccaaagacttgttttatgtaactaaacgacggcgtatggacaacttcctttagtttggtcttttcctatgaccactatttgattgtcttaagatctctcctcttctttaactttctctccgattattccgtctgaacccttatatttttctttgtataaaacaaagtttctaactttctatctcagcaatctcgttttactcttgaaccatgtcggctgctgaatcagctactgcaattcacagaaaccaagttgatctcttggattttattgattggtctggagttgaatgccttaatcaaagctccagtcaccctttgcccaatgctctcaaacagggttatagagaagatgaaggcttgaacctagagagcgatgctgatgagcaacttctgatttatatccctttcactcaagttattaaactacattccattgttgtcatgggatctgaagaggatggtcctaagacagtgaaactttttgcaaacagggagcatatggggtttagtaatgtcagtgacttccctccaagtgacacctgttgttttatcccaggataatctaaagggaaaacctgtagtcgtgaagtatgtcaagtttcagaatgtccgtagcttgacaatatttattgaagacaatcagtcaggttcagaaattacaaaggttcagaagattgctttgtatggatcaacggtggaaacgacggacatgaaggggttgaagaagattgaggatcattaaccctgcgtccggcttgaaggaaaaagcaaggacatggatgaactcttgtggcttgggatactataagcattgttatccatttcgaaaaatgttatatttatgtgacagcatcagcttttgacatcacattgtggttgtcgttgttgttgatgtgatgtctttaaggttcttctgattgtgtttcatctgggttggttgttgaaaattcggttcattattttgatcatcgtttaagttcgttttctttcttttaaatatatatataaaaatactataat

SEQ ID NO: 20822 - DNA, 625 bp, Gossypium hirsutum
  Clone ID: LIB3543-043-Q6-K6-F1
cttggattttattgattggtgctggattgaatgccttaatcaaagctccagtcaccctttgcccaatgctctcaaacgggttatagagaagatgaaggcttgaacctagagagcgatgctgatgagcaacttctgatttatatccctttcactcaagttattaaactacattccattgttgtcatgggatctgaagaggatggtaaagttttgtatgttttttacctttccatatgcattcaatcacatcgaagcaaagtcccattggcttattttattgacggatcacgaatgccagttctgagttgtactctagtagaattaccattgatgttgctgattgttgaacatgatgattgtcttttcaggtcctaagacagtgaaactttttgcaaacagggagcatatggggtttagtaatgtgagtgacttccctccaagtgacactgctgttttatcccaggataatctaaagggaaaacctgtagtcgtgaagtatgtcaagtttcagaatgtccgtagcttgacaatatttattgaagataatcagtcaggttcagaaattacaaaggttcagaagattgctttgtatggatcaacggtggaaacgacggacatgaagggg

SEQ ID NO: 20823 - DNA, 903 bp, Gossypium hirsutum
  Clone ID: GOSHI-09MAY01-C3019_1
tcctcccattacttggtttggccactttgatgggaaaaaggaaaaaagaggcagaaatttagagaagttgattcaaacagaaagggtgatggaactgagcattcagaaaatagaagccttgattaggctaagtacgatagtgatgttggttttaacagcttgtttaattgggttggattctcaaacaaaggtcatcttctacgttcaaaagaaagcttctttcaaggatttgcgtgctcttgttggattgctgtatatcacttcattggctgctgcttataatctacttcaactatgctgttcttcattctcagcttcttacaaaggaacctcgctgcaatcttacgcatatctggcttggcttcgttatattttggatcaggcagtagtgtacgcagtgtttgcgggaaacctagcggctttggagcattcatttttggtattaaccggagaagagaacttccaatggctcaagtggtgcaataaatatactcgattctgcacccaaatcggaggatccttgctctgcggcttcgttgcaagcttactaatgttttccatcgcttccatctccgcattcaacttgttcaggctgtattcccccaccaagttcatgcacttgaaactctaatcataaattacggttaatgtggtattaaaaattttttaacttcataatttgattgatattttgccatataatttaaaatttttaaaaataaactgtttgtgtaggtaaaaattttcatgccaaataattacttatgttaatattattatttataaaagaaatgaaaaagttacaaaaaaaaatgtagcattggatttttattattaataggatggctacggtataacttttgttcataaacacttaagttaggcgtatttttttttttgaat

SEQ ID NO: 20824 - DNA, 349 bp, Gossypium hirsutum
  unsure (1)..(349): unsure at all n locations
  Clone ID: LIB3135-020-Q1-K1-D10
acggcagaatcgagtatatttattgcacccaaatcggaggatccttgctctgcggctgcgttgcaggcttactaatgttttccatcgcttccatctccgcattcaacttgttcaggctgtattcccccaccaagttcatgcacttgaaactctaatcataaattacggttnaaaaaaaaaaccactaattttaacacgatattacattaatacgcgaataagaagaggggaaaaggcactatttttgccccccaaagacatatcttgtccgacgaaccatgcggaaaacataaaaaaaaaaaaaaagggggcccccttttaagagatccaatttatattccgcgggttt

SEQ ID NO: 20825 - DNA, 789 bp, Gossypium hirsutum
  Clone ID: GOSHI-09MAY01-C3009_2
gtaccggtcctgcatggctggaccgacgcgtccgcccacgcgtccggttggacatttggaagaacacaaaaggcagttacaaaaagaaagagatcgcagggttgaggattctaccaaacatttgaacagtgtgaagtcggaggtgttgtctaagcggtgtgagctggaagcaaggcaaagaaggttgaagatgtggtagcagaggtggactccataaccctacgcgccagcctgccgagagaatctggagctgctaaagttcagcatttgattagtaagtgtgaagagattgtaaaacagtttcaacaaaattcatcctctattgggctcctcttgccagtggatgggaatggaacaaagacaacatttgagtgagtagctataaccaggcttcaactttaatttcaggaagccactcgattgtaagttgttattcgtgcgtagcagtaatatatattgatttgatcgcctattgctagtaatttcatatggacttcccattactgtatatgaggcttgtaagcaagttgaatttatagtgtgtacccaaaaaacaattctaatatcaacttgttatggtgttccgtagaagatatgtaaggtagtgttaccctttagcttgtatgttgcttgcttgatttccagttcaaaggtgatgaatggacccataatataatgttaatattaaaaaaaaaaaaaaaaaaaaaaaaaaaaaaaaaatataaaaataaaaaccaaattaaaaatcatattcataattacaattttctcccttttttaaaaacaaaa

SEQ ID NO: 20826 - DNA, 1112 bp, Gossypium hirsutum
  Clone ID: GOSHI-09MAY01-C3009_1
cttgacgctctcacgaggaagaccaaggcgagttgagttttcagcattggagcaaattgagaacccagatcttctaattggttcattccaggttatgaatttgtattgcagactaagagaggtgatggcttctcttaattgtccgatgcaatttaaccttagggatttgatcaaacctgatccgcgtcggaccgagcatttcctcagcggaatcctcaatttttgtctttataaagaaacaaaaatgaatcttctaagacctattgtagaggaactggcccttctagatgatcagcggaaggagtgggaggctaagatttctcagttgaatgcggagattgcaggttacagtgaagcaagagaaagggagtttccactagttcaagaggtagaatcaaaagttaaagaattgcgtgagatgattgctggcctcaacagtaaccagatgtcactgagaacttcttttcggaatttgaaggagaagactgggcaaatggatgagaagatttcgaaggctgagtttgacctggttcaaagtgtccaagaaaatgcaaatctgcgttcaaaaatagttcagtcaccagataaactacagagagctttagaggagaagaaattagctcgagatgaggcaaagtatgctgagaggtcagctattcagtcatttcaggagaaaactgccacggttgaggtctacagcaaggctctaaagaaaatgtcgaagcactttgccatgatgcaagctatacatgaacaggtgaactctgcaaaatcagttgaaaaagaatgcaagggtttgaaagctaagttaagtgatgatgttgtgttagacaagtcacttgaagctaaactaattgaacgggaaggaaaagttggacaattggaagaacacaaaaggcagttacaaaaagaaagagatctcaagtttgaggaatctaccaaacatttgaacagtgtgaagtcggaggtgttgtctaagcggtgtgagctggaagcaaggcagaagaaggttgaagatgtggtagcagaggtggactccataacgataaagaccagtatggtaagagaatctggagctgctaaagttcagcaattgattagtaagtgtgaag

SEQ ID NO: 20827 - DNA, 402 bp, Gossypium hirsutum
  Clone ID: LIB3146-030-Q1-K1-A12
cccacgcgtccgcccacgcgtccgcccacgcgtccgcagtttcaacaatcttcatcctctattgggctcctcttgccagtggatgggaatggaacaaagacaacatttgattgagttgctataaccaggcttcaactttaatttcaggaagccactcgattgtaagttgttattagtgcgtagcagtaatatatattgatttgatcgcctattgctactaatttcatatggacttcctattactgtatgatgaggcctgtaagcaagttgaatttatagtgtgtacccaaaaaacaattctaatatcaacttgttatggtgttccgtagaagatatgtaaggtagtgttaccctttagcttgtatgttgcttgcttgatttacagttcgaagttgttacaat

SEQ ID NO: 20828 - DNA, 1335 bp, Gossypium hirsutum
  Clone ID: GOSHI-09MAY01-C3039_1
cccacgcgtccgggtcaatgtggtggatgggctaaaattgtatgagaaactgtttgatgagaaggaagtttctgaccttgtctccttgataaatgatttaagggctgctgggaaaagaggacattttcaagttcagacatatgtagcttcaaaaaaaccgatgaagggacatggcagagagatgattcaattgggccttccaattgctgatgcccctctggatgctgaaactgctgccaggacctccaaagatcggaaaatagaagccattccttccttgttgcaagatgctattgaacgtttggtcgacttgcaagttattaatgcaaagccagactcttgcatcattgatgtctataatgagggggatcattcaccgcctcgaatgtggccaccttggtttggaaaccctactttcgtcttgttcttgactgagtgtgacattacttttggaagggttattggggttgatcatccgggtgatttcaaaggctctctaaagctttctctttcacctggatcgctcctcgtaatggaaggaaaatcggctgattttgccaaacatgcactaccttctgtccgaaagcaccgcatgcttgttatatttaccaagtatcaaccaaagaaatctgtggctgacaaccagaggcctccttcaccttcggtttctcagtcttcacaatggggtccaccatctagtcgccccccctcccgttttcgccattctgctggccccaagcattttgcagcaataccaacaactggtgtactgccagctgcagcaattcggccacaaattccacccgcaaatgttgttcaaccattatttgtgcctgcacctgctattccatttcctgctccagttcccatcccgcctggttcgaccgggtggtcagccgctgctggtcaaaggcattttccacctcatctacccattcctggcactggagttttcttgcctccaccaggctcaaattcatcgtctcaacagttgtcaactattgcaaccgaactcaatgttcccatggagacgatttcccctttagaaaacagtaatggttcagggaaactcactcaccataaaacttcacctagagggaagtgtgatagaccgtcaccaaaacaaggctgcaatggaagtgtagatgaaactggtaatggaagtgctatgatgaaggaagaacagcaatgtgcttgacaagcgaacctgcaaatgcagtttagagagagagaaagagaaagaggtaggctgcaaacagaaatgagtttcaagcaaatgtaaagatcgggtggcattcgaaactttttttgacatttcatactggtgggggaaag

SEQ ID NO: 20829 - DNA, 566 bp, Gossypium hirsutum
  unsure (1)..(566): unsure at all n locations
  Clone ID: LIB3584-002-P1-K1-C3
cccacgcgtccgaaagaactgtggctgacaaccagaggcctccttcaccttcgtttgagtcttacaatggggtccaccatctatcgatcacccaaccattttcgccattctgctggccccngcattttgcagcaataccaacaactggtgtacttcagctgcagcaattcggccacaaattccacccgcanatgtgttcaaccattatttgtgcctgcacctgctattcatttcctgctccagttcccatcccgcctggttcgaccgggtggtcagccgctgctggtcaaaggcattttccacctcatctacccattcctggcactggagttttcttgcctccaccaggctcaaattcatcgtctcaacaggtggcaactattgcaaccgaactcaaagtgcccatggagacgatttcccctttagaaaaccagattgggtcagggaaactaactcaccatatacttttctcttacgtaaagtggttttcttggttcgtatgaattgttaattatgggtatggattaatttgtgtgttggggggggggcctccccccccccccccc

SEQ ID NO: 20830 - DNA, 1330 bp, Gossypium hirsutum
  Clone ID: GOSHI-09MAY01-C3029_1
ataaaattcgaaatttatagcttagtcggttgattctggtggagattggcttgaggtcaagtccaatatgttgttatcggttaaaaacttgaatcctgacaccacattggttgtattttagtgtttactatggcttgaatgaagtcgtctttcagcataaagttgccgatcttgctatgattttgaagctctatttggttcattgcagacagatacagcttctgtcctcctgcaggcaatggagtacatacagtttcttcatgaacaagttaaggtcggtttttcttttccgtattagttggtattagttgcaacttctaaatgcatgcttctgaagatcagcaattgaaatttcaatgaatacaccacctatttaaacatgaacctagggagatttgacagttgtggtctcggtctggaatcaagctttgaacaatttcagcctaggttttaagagattcaagctttgactgacttaaaaatgtctccgggggaggttttggctgtgcagttggtcttacctcttctttcggacgttggcaattttcaaaagggaaacaaaaatgactatcaaagaaaacaaaaggcgggagtgaaaacgaaataattgcttttaactttttcattttaaaggtcattatagcatttttaatggatataactgtggtttcaggttttgagtgctccgtatcttcaaacctcaccgacaaataatatgcaggagcaagagcattatagccttagaagccaaggtttcggtcttgttccactctcgtataccatgggagttgttcatagcaatggtgctgatatttgggctcccatcaagaccgcttcaccaaaatttgacaagcctttctcacaattcaattgacatattttccttcatcggtgaccggtaggctttgaacgtttcattggaaccggttttaaagcccacccgcccgccctcgcgtccgcaaaattttcctaatcagatgcaaaatttatagcacagtgcactgacataggatgttagtatcgagaaactagtaggattgtgtatccagaaatgcagtcctgtgcctacttagttttaagccagtgatctgcatttaatatctgtattgaattatagaaattaattgatctctcctaatcatgtattgtaaaatgtaacttgatgaacatgagttgattaaccacttttaacatgtatggcgctcgaataaaatatacggaataatgtgccagtcactgattaaaaaaaaaaaaaaaaaaaaagaaaaaaaaaaaacaaaaaaaaaaaaaaaataaaaaggaaaaaaaacaaaaataagggtgcaaaata

SEQ ID NO: 20831 - DNA, 660 bp, Gossypium hirsutum
  Clone ID: GOSHI-09MAY01-C3339_3
attatgggcattaacatggatcttaatttcaatctccttgaaactggctctctcgctctatgcattattgctgttgccttcactttacaggatggcacttctcacccccgcgtccgcctggttcttctactgctctacattgttattggagcttgctttttcgtatctaaaacacctctaaaccaagtaaacatcacaaactcgggagctgaacttgccacaatcctcagagcttgataagctttgccgtcccgggggatgtcgttactccacccccccccccttttgatgatgaaatgtttgaaacttgaacagagatttcatgcattggttattctttcatatctggggcctggcggaaagctgacaatttgcagttactaggccgcatacaagttgtcatgccttcaaagttgagatggatactatctataagtataccgttgaagcttgatgaagacaggctatacaatacacagcacattgttctgtctgtgtatacatctctcttaggtgtgtttctcagttatgcccgtaattaagtagtggcagcaaatgagctacacatgtggtggtttgtttccctcttgtactgcagctatcaaaataaatgaaatcgttgttgttctttatttgccaaaaaaaaaaaaaaaaaaaaaa

SEQ ID NO: 20832 - DNA, 1078 bp, Gossypium hirsutum
  Clone ID: GOSHI-09MAY01-C3339_2
gaggaatcggacaatgacgaaaatggaggtggaggagaagaagaaccaggattttggaggggatttatttggcttgttggaatgactgctgccatctctttgctctctgaatatgttgtgcaaacgattgaggatgcttcagattcttggggaatatctgttagcttcatcagcattattttgctacctattgttggaaatgcagctgaacatgcaggagctatcatttttgcttttaaaaacaagctgaatatttctttaggtgtggcattaggatctgcaactcagacttccatgtttgtggtcccactttatgttattacggcttggattatgggtattaagatggatcttaacttcaatctcctcgaaactggctctctcgccctatccatcatcgccgtggccttcactttacaggacggcacttctcactacatggaaggcctggttcttctactgctctacattgttattggagcttgcttttttgtatccaaaacacctctaaaccaagtaaacatcacaaactcgggagctaaacttgctattgacacaatcttcagagcttgataagctttgccgtctcgggggagtaacacttgaagcaaaaatggaaatggtaccacctttcaccagaaaggtgtaagaaatagtacaaaataaagggatcgaagtattgtggcttaggtgtcttgacttccatggccacttttatctcagataattttaatttgaggcttaaaccatagaagaatggaggtggggcactgatagtggtccacagctgggtcagaaaagagaagaggggtaattgtagaagtcagtcgctttgcaagagagaaagggtacttgagtaacgaacaaggaactcttatgatcttcaaaacgcataatcacatatagcttgtcggctcatggcattatgttttaatatctttgaagtgtccaccttgaaggctattaagtctatttacaaagatgttttcttgatcataaatctaccttaataacttattatgaaaaaaaaaaatattttaaagatatattactgtatacttaattaaagtaaaataca

SEQ ID NO: 20833 - DNA, 1277 bp, Gossypium hirsutum
  Clone ID: GOSHI-09MAY01-C3339_1
tggtccaacagtgggagggctgttgaatgcaacatgcgggaatgcaaccgagctgatcatagcaattttcgcactaagccaacataaaatagatgtggtcaagtattcccttctgggttcagtcctatcgaacctgcttttggttcttgggacctctctcttctgtggcggtattgccaacatcgcaagggaacaatcgcggacccgtgggcaagcggatgtgaactctctccttcttttgcttggattattgtgccattcgctgccattgctgttccgtatgagtggagcatccgctgctctcacagccgacccaacgctgcagttgtcaagagcaagcagcattgtcatgttgattgcatacgtgtcatacatagtcttccaactattcactcacaggcagttgtttgaagctccagaggaagcagaaggcgacgacgatggaatatcagaagaagagccagtaattggattttggagtgggtttatatggctagttggaatgactgttgtcatttctctcctctctgaatatgttgtagaaactattgaggatgcctcggatacttggggaatttctgtaagtttcatcagcattattctgctacccattgttggaaatgcagcagaacatgcaggagctatcatttttgcttttaaaaataagctggatatttctttaggtgttgcattagggtctgcaactcagatttccatgtttgtggtcccactctgcgtccttgccgcttggattatgggcattaacatggatcttaatttcaatctcctcgaaaccggctctctcgccctatccatcatcgccgtggccttcgcgttacaggacggcacttctcactacatgaaaggactggttcttctattgctctacatagttattggagcttgcttttttgtatccaaaacaccactaaaccaattaagcaccataaactcaggaactaaagcagccatcgatacaatcttcagagcttgaaaaggtttggacgtgttggggacaaagatttccatgcattttgttattcttttgctatgttgtgcgtggcactgtcggaaagctgacaaatgaaggttgatatataccattgaagcttgacgaagacaggctatatatgagtacacaatgtactgttttgtctgtgtatagatctatctcagtgttttgttttgttctttaaggggggtttcagttgaggtttggttctaaattatgaccttaaatagtagcaaaatgagctatattgcaatgcaagtttgat

SEQ ID NO: 20834 - DNA, 766 bp, Gossypium hirsutum
  Clone ID: GOSHI-09MAY01-C3289_1
gttggaatcctgcatgtgcttacgccacgaacggagatgcaacgttgacataaaggatcgattttgttgctatggttctgcctccctcatctttaacaactaagcctgacgttgatcggaagtttagtgagtcaaaagccgcgtcgaaatatataaccacgttcgccctttgtacttgctgtttgggtctcgcatttgtttccaagataaatgccttgttctttataccgtccagttctgaaatgtaactattaatttgtttggagatatcgtgactagtgcttgacttgccttcatatattaccttgttcctattcgcccagatgagccaaagtccgcaacaaaaaagtctgcattgctcattcgtcccttgattgaaaacccaagacacaatcggaaaacgtggttggtatcttcttctccttgatggcatctcacgcagcgatcctcgaccgtcactcttctcagctttggattagaaaaagtgggcatgtaattccacgaaattttccacactgtaattttgattttcgagggcatgtttaggcgccacagtttcctgtaaaagtttttagtctcggcctgtgcgtaattactaggattcattgtagtatcctgtaatagtttataggtacttcttactgaaaagttcccagatggctctcctctccacacctgaaagtcttcatgggtagactttgttagcggaatttacagtattttcctagcaatatctgtaggaaatgtacggactatcaaatcactt

SEQ ID NO: 20835 - DNA, 403 bp, Gossypium hirsutum
  Clone ID: LIB3146-018-Q1-K1-D4
agccttcgccttgatccttttaaaccggggatcaaaaatgctgggctggagtttcactgaattttacgcgggggacttttgattgtgagagggcatgtgtatgcaccacattatattcagaagtgatagcttacactctgtgcggagcctctaggactcaatgttgtaatctgtaatatgattataagtacatggttactgacacgcctccagattgctctcctctccacacctgaaagtcttcatgggtagactttgttagcggaatttacagtattttcctagcaatatctgttggaaatgtacggactatcaaatcactttttcatgttcgattatcttcgtcgattaagtcagacactaatctaatgttcgaaaaaaaacaaaatggagacggggaaaa

SEQ ID NO: 20836 - DNA, 608 bp, Gossypium hirsutum
  Clone ID: GOSHI-09MAY01-C3259_1
cccacgcgtccgctttcgtacagcttatatttccacccctccgcttccccctgaaaatgggttttgctggggttttgttgttgggttttctagcaatggtctcatctggtcatggatatgatggtggttggatcaatgctcgtgccaccttctatggtggaagtgatgcttcaggaacaatgggtattgggcgccaattgaaaacaccttgtttgtaatattttgactaattcttgagttgatttttcaggtggagcttgtggttatggaaacttgtatagccaaggctatggaacaaatactgcagctttgagcacggctctgttcaacgatgggctgaactgtgggtcttgctatgagattaagtgcatgaatggtgatgttaaatggtgcttgcgtggctccattgtggtcacagccactaatttctgccctccaaatgatgcaggagggtggtgcaaccctccacaacatcatttcgacctttctcagcccgttttccaacacattgctcgatacaaagctgggatagttcctattgcttatagaagggtaccatgcaagagaaatggtggcatcagattcacaatcaacggcaatttttactt

SEQ ID NO: 20837 - DNA, 418 bp, Gossypium hirsutum
  Clone ID: LIB3583-028-Q6-K1-C9
cccacgcgtccgtttcgtacagcttatatttccacaattcctattctccatgaaaatgggttttgctggggttttgttgttgggttttctagcaatggtctcatctggtcatggatatgatggtggttggatcaatgctcgtgccaccttctatggtggaagtgatgcttcaggaacaatgggtggagcttgtggttatggaaacttgtatagccaaggctatggaacaaatactgcagctttgagcacggctctgttcaacgatgggctgaactgtgggtcttgctatgagattaagtgcatgaatggtgatgttaaatggtgcttgcgtggcttcattgtggtcacagccactaatttctgccctccaaatgatgcaggaaggtggtgcaaccctccacaacatcatttcgacctt

SEQ ID NO: 20838 - DNA, 1310 bp, Gossypium hirsutum
  Clone ID: GOSHI-09MAY01-C3239_2
cgaaaaaggctgatttgagagaagaacacggcaaccctattcaactcaccgacgaacacggcaacccggttcaactcactgacgaacacggtaaccccatttatgtcaccggtattgccaccaagcatcccacgacgacaacgtcactgtcgggtttaatgggatatggcaccggttccgccgtcgccactgatcagtcacaacagcagctgcagccaccgcctccgcagcaaacacagccgctgcattacgaggtttccggcaaggaaaagattcaacgctccagcagctccagctccagctccagctctagctcggtaatgaaaattaaaaaaaaaaaaacccccgccatgggcatctatgcagtatttgttttagtattgcttttttgcttctccaaaaatgttttgcaaatggtgtttttaaagtgcttttatgatggaagattgtgtttttttacttaaaatgtgcataagtttttgtaattttcatttgaaatttaatttttatatttttatttttagaaatttagtctctttattttctagagattttaatttttaaaatattattaaaattattttgtcaaattcaagtttattagcaagtatttttcctattttaaaagtcaaataaccaaaattttaaaaaataaaatttaccagaaagtgatgtaattaaaattttaaaaataatagtatagaaattaaatattaaatttgtgaagaacatattttaaatttttttttattatcaaaatcaaaagttggtttgaagtgtttttgctattaataattacatatttatatgtttaaaattttatgttatatttataatttttaaagttacttaaagaaaatttctttgttaatgaagttttaaaaaaaaatgtcttgaataaatttttaaaattatttatttatggatttggatttagtcggaggatgatgggatgggcggtagaaggaagaaagggctgaaagagaaagtaaaggagaagctaacaagtggaaagaaggaggatcaatctcagaccaaaacttcggctgtcaaaaccaccgcgtcaaccacaaccaccacgactgatcccccgcctggccagcaccacgagaagaagagtgtgatagagaagataaaggaaaaactacctggtcatcatgctcattaaccactgaaagtttgtagttgtgtgaattatttactttctaccgtgatgttgtatttgtgaattctatgtcttttatttttgaactttgaagtgtgctacgtttgtgaaatgtgtaatattagtattttgttttttttttttt

SEQ ID NO: 20839 - DNA, 632 bp, Gossypium hirsutum
  Clone ID: GOSHI-09MAY01-C3239_1
cggacgcgtggcgaaaaatggctgatttgagagacgaacacggcaaccctattcaactcaccgacgaacacggcaacccggttcaactcactgacgaacaccgtaaccccatttatgtcaccggtattgccaccaagcatcccacgacgacaacgtcactgtcgggtttaatgggatatggcaccggttccgccgtcgccactgatcagtcacaacagcagctgcagccaccgcctccgcagcaaacacagccgctgcattacgaggtttccggcaaggaaaagattcaacgctccagcagctccagctccagctccagctctagctcgtcggaggatgatgggatgggcggtagaaggaagaaagggctgaaagagaaagtaaaggagaagctaacaagtggaaagaaggaggatcaatctcagaccaaaacttcggctgtcaaaaccaccgcgtcaaccacaaccaccacgactgatcccccgcctggccagcaccacgagaagaagagtgtgatagagaagataaaggaaaaactacctggtcatcatgctcattaaccactgaaagtttgtagttgtgtgaattatttactttctaccgtgatgttgtatttgtgaattctatgtctt

SEQ ID NO: 20840 - DNA, 544 bp, Gossypium hirsutum
  Clone ID: LIB3825-030-Q6-N6-F8
gaagttcaatgagtaggcgtcttgttcagtccatgaactgcaatcttattgatttcataaaaccaacattactcaacatagtagatttagtagtacacaattataacaaaatataacatggtaatacagttcgagaacgtagatctcgagtataggactcaatttattatttgtaacattaatttaaaaccaaaaccaaacttttacttgtctatatgagcatgattttaattggaaactggtggtgagaggccagcaaagacatggagcaactccccgttgtcgatgtgccttgcaggatcggaaaaggcataaaggaagaactccatgaaatctaagtccttgaaaagccgaggatgttggtcatctataaactctttgggtgtcttgattatagtaccctcatttggaatgacgaaagctgctatagagtatcgatctttgtctccgctcatcatcactctgtgattcactgatttcaatctcccattgctccaagctggtttatcagtatgagcaaagagtcctctttcatactctcctg

SEQ ID NO: 20841 - DNA, 599 bp, Gossypium hirsutum
  Clone ID: LIB3831-001-Q1-K6-C4
atttcagtctcagtaaagctttttttgcaccagccaaatgggttcagttatatactctttctcggagtgagggcttttgttccaagtggtttactgcttcagccttcagcttcaggttatggcatcaggaagctctccggaagatactaccagggtcaactcatgcagatgacaatgatggccacacccaatatcaacaaggagctgcagtacttgaacaaggaagacagactgttgcgttggcttttagttaagcatcgtgactcgaaatatgggctggaattccttaatgaagatgatggggaattggagcttagcaaactctctcgaggcaatatatatgaagaggacattgatgacgacgacgatgatgatgatgatgaatacgatgagaacccgggcaatggcggaaaactctgatcggtataagattttgataatccgaggatagagtagaacctgatagataattgaagtcgataactatgttctttgtctttgtagcatgcctttttaaagttttgaatgatccaacttatgttgtttgtaggtctttaagagactagaagaagtacagggaattgcgaccatatttcaat

SEQ ID NO: 20842 - DNA, 582 bp, Gossypium hirsutum
  Clone ID: LIB3582-052-P1-K1-E2
cccacgcgtccgcccacgcgtccgcaaaatacagagctatcgtaatcatggtgaggaataagtcagcttgcgtagttttgctcttttctcttttcctttcctttggcttgctttgttctgccaaagactttcccggcagaagaggcgacgatgatccttcgaagaggtacgaggactgccggaggcgatgcgaatgggatacacgtggacaaaaggagcaaagctcatatgaagaagaagaagaagaagacgaagaagaagaacaagaacaagaagaggaaaggagaagtggacaatacaggaaaataaggtcccggttgtcgcgtggagacatatttgtagtcccagcaaactttccagttacattcgttgcatcccaaaaccagaacctgaggatgactgggttcggtctttacaaccagaacattaacccagaccataaccagaggatcttcgtggctgggaaaatcaaccatgtgagacaatgggatagccaagccaaggagttggcctttggggtgtcatcgaggttggtggatgagatattcaacagcaacccacaagaggcttacttcgtgtctc

SEQ ID NO: 20843 - DNA, 538 bp, Gossypium hirsutum
  Clone ID: LIB3582-033-P1-K1-F10
tacagagcttatcgtaatcatggtgaggaataagtcagcttgcgtagttttgctctttggtgtgttcctttcctttggcttgctttgttctgccaaagactttcccggaagaagaggcgacgatgatcctccgaagaggtacgaggactgccggaggcgatgcgaatgggatacacgtggacaaaaggagcaacagcagtgtgaagaaagttgtaaaagtcagtatggggagaaagatcaacagcagcgccaccgccctgaagatccccagaggagatacgaggagtgtcagcaagaatgccgacaacaagaagaaaggcaaagctcatttgaagaagaagaagaacaacaacaagaacaagaacaagaagaggaaaggagaagtgggcaatacaggaaaataaggtcccagttgtcgcgtggagacatatttgtagtcccagcaaacttcccagttacattcgttgcatcccaaaaccagaacctgcggatgactgggttcggtctttacaaccagaacattaacccagaccataac

SEQ ID NO: 20844 - DNA, 476 bp, Gossypium hirsutum
  Clone ID: LIB3543-022-Q1-K1-C4
cccacgcgtccgcccacgcgtccggtgaacttcagtgaccacgccacttcaacaacttccatcactcctaacccagctgcactcactttcgatcaatggcaaccctgacaacctcacactttgtttcgacatgttcacatttcagcagccatggagcagacactaaggccaatcttgcacaggttggtgccaggaatcaagccatgactcacaatggtttgcggtctttgaacaaggtcgataggttgcagatgaggaccaccaacgcaaaggctgtcgttacgaaagccatgaaacaggcagatcacaggcctttgggaaaaattatttgcggaatagggatgaatatagtgtttgtgtcagctgagtgtggcccctggagcaaaactggtggacttggtgatgtcctcggtggacttcctcccgcaatggctgccaaaggacaccgtgttatgacagtgtgtcctcgctatgat

SEQ ID NO: 20845 - DNA, 571 bp, Gossypium hirsutum
  Clone ID: LIB3543-045-Q1-K6-G8
gcgttcgattggcaggacctatgtgaacttgagtggcgacgccacttgaacaacttgcatcactcctaacccatctgcactcagtgagtgaaccatctggagttcttgagcagacatggagcaaacactataggccaatcctgcacaggggggtgccagcaatcaagccatgacttacagtggagttgcggcgctttgaacaaggtcgataggtggcacatgaggaccaccaacgcaaaggctgtagttacaaaagccatgaaacaggcagatcacaggtcctctgggaaaaattataagcggaataaggatgaatatagtgtttgtgccagctgaccgtggcccctggagcataaactggtggactcggtgatgtcctgggcggacttgctaccgcaatggctgccaaaggacaccgcgttatgacagagtgtcctcgctatgatcagtacaaggatgcatgggatacaagtgtgatacttgatctaaaagtccgagacaaagttgtaactgctcggctcttacactgctacaaacgtagaggagatcgagtctttgtcgatcaccccat

SEQ ID NO: 20846 - DNA, 427 bp, Gossypium hirsutum
  Clone ID: LIB3582-013-P1-K1-B10
gtcagtaagggaacatcagctcttgtctctatgcctttccttggccttgctaagctctggcaaagactgacccggcagaagaagcgaggatgatcctcaacagaggtacgaggactgccagaagcgatgccaatcgtagacacggggacaaacggagcatgacatgagtgaagacacgtgtgaaacgcagttgaaggaagagcatcatcgagaccgagaagatcctcagaggcagataccaagattgcctactacactgtcaacacgaagaaagacagctgcgttcacatagccaacaaagctcgctggaacaatacgagaaacaaccaacgcaacaggctcactagcaattcaaggagagtgaacagcgttgccaatggcaagagcaaacgcccgaacggaagcaacaatgtgtgaaagaatgcag

SEQ ID NO: 20847 - DNA, 375 bp, Gossypium hirsutum
  Clone ID: LIB3048-008-Q1-L1-F3
gcaaaactggtggacttggtgatgtcctcggtggacgtccttccggaatggctggcaaaggacaccgtgttatgacagtgtgtccttgctatgatcagtaccagggttcctgggatacaagtgggttaattgatctaaaaggtcgagacaaaggtggtactggtcgggtcttccaattggtccaaactggaagtgatcggggtcttgtcgatcaccccatggtccttggaaaaggatggggcaaaaacagcatccaaaaatctatggcccccagagcaggttttggaactacgaagacaatcaactgcggttcagcttgttatgccaggctgctttggaggcacctagagttctaaatttaaatagcagtaaaaa

SEQ ID NO: 20848 - DNA, 425 bp, Gossypium hirsutum
  Clone ID: LIB3083-015-Q1-L2-B1
tctagaaccacgtggatccgcaggaattcaggactagtttacgaggatatatgagattggcccccggagcaaaacagggggacagggggaaattctaagaggactccctcccgcaatggctgccaaaggacaccgcgatatgacagtgtgtcctcactatgatcagtacaaggatacatgggatacaagtgtgttaattgatctaaaaatcggagacaaagttgtaactgttcagctcttccactgctacaaacgtgcaatacatcgtatctttgtcgaacaccccatgttccttgagaaaggatggggcaaaacagcattcaaaatctatggccccagagcaagtttggactacgaagacaatcaactgcagttcaaattgttaatccaaactgaatttgaagcacctagaaatctaaatttaa

SEQ ID NO: 20849 - DNA, 361 bp, Gossypium hirsutum
  Clone ID: LIB3048-045-Q1-L1-D4
cgaggcataaactgtgtggactttaggtgatgtgcctcggtgtgactttcggtacgcgcaatggcatgccaagaggacactcgctgttattgaccagtgttgtccctcgcatatttgatcagtacattaggatgcatggtgatacaacgtcgtgttacgttgaatctataaagtcgcgagacaaatgttgtaacctgttctggttcttccacttgctacataacgtggagttgatcagtgtctttcgtcgatcacctccatgttcacttgagaaggtatggggcaaaacagcttccaaaatctatggccccagagcaggttttggactaccaagacaaatcaacttgcgttcagattgtta

SEQ ID NO: 20850 - DNA, 392 bp, Gossypium hirsutum
  unsure (1)..(392): unsure at all n locations
  Clone ID: LIB3582-002-P1-K1-E7
gtcacgaagctttcttgagagtattttttagnngaatnaactctgggcggggggtgatagctagctctccaaaaatatcccggaaaagaaccaggatgatcccaacagagtacgaggactgtcggaagcgatgccaattggagacacgtggacaaacggagcaagacaagtgtgaagacaggtgtgaaacgcattttaaggacgagcagcaccgtgactttntaatatccccacacgagataccagcaattcctacaacactgcccacacgaataaaaaaggctgcggccacattgctaacaaaactgcatggaacaataccagaaacaacaccactcaccactctgacaagaaaattcaaaggagtgtcaaacaaacaactcccaaatggc

SEQ ID NO: 20851 - DNA, 476 bp, Gossypium hirsutum
  Clone ID: LIB3583-015-P1-K1-D3
tctgttttcgtagttttgctcttttctcttttcctttccttaggctagctttgctctgccatagacttccccggctgttgatgcgtggatgttcctcgactgaagtacgtggtctgcctgaggcgaagcctgtcggagactcgtggtctttcggtactagtcaagtgtgatgtctggagtgtttggctgtttttaggtggtgctgctgcgtgtcggagacgttcctcagaggtgatacctggattgccgacttctctgccttctggttgatagtaggctgcgtccactgtgcgtactttgctgccaggtactattcgtgagacttctgcagctgctgcctgacaagcgattcaaggagagtcttcaccgttgcctacggctagagctagggcccgtacggtagcttctttgtgtgtaggtatgctaggttcagttcctagaggttccatggtaaggagagagagttttctagtgga

SEQ ID NO: 20852 - DNA, 465 bp, Gossypium hirsutum
  Clone ID: LIB3583-015-P1-K1-D11
taaatattcagttcttataggttatcaaggagaggaacaagtctgttttcgtagttttgctcttttctcttttcctttccttaggcttgctttgctctgccaaagacttccccggctgatgatgcgtggatgatcctcgactgaagtacgtggactgcctgagagcgaagcctgtcggagactcgtggtctttcggtgctagactagagtgttgactggtgtgaatggctgtttaaggtggtgctgctgcgtgacggtgacgatcctcagagagagatacctggattgccgtcttctctgccaactggatgatagaaggctgcgtccactgagcgtacaaagctgcctggttctattcgtgagacttctgctgctgctgcctgacaagcgattcaaggagagtcttcaccgttgcctacggctagagctagggcccgtacggtagcttctatgtgtgtaggtttg

SEQ ID NO: 20853 - DNA, 462 bp, Gossypium hirsutum
  Clone ID: LIB3583-015-P1-K1-B11
ctcttttctcttttcctttccttaggctagcttagctctgccatagacttccccggcagaagaagcgagagatgatcctcaactgaagtacgtggtctgccggtagcgatgcctataggagactcgtggtctttcggtgctagtctagagtgttgtctggagtgttacgctgttgttggtgagtgctgctgcgtgacagtgatgatcctcagaggtgatacctggattgccgacttcactgccaactggatgaaagaaggctgcgtccacattgcgtacatagctgctaggtacatttcgtgatactgctgctgctgctgcctgacaagcaattcaaggagtgtctactgcgttgccaaaggctagagcataagcccgtacggtagcttctatgtgtgtaggtatgctaggttctgttcctagaggttccttggtagggtgagagagttttctagtggagag

SEQ ID NO: 20854 - DNA, 350 bp, Gossypium hirsutum
  Clone ID: LIB3583-015-P1-K1-B1
agttccatggtagaggtgagagagttttctagtggtgagtagtagtagaggagagttagtgtcgttagtgagcttcttcttaagttcttcccttactacttccatagcagatcgttcctagttcgtttctaggttgtacatggctatttctgagtcctccagagagtttgctgccaaacatcatttacttaagggcatcaacgagttccgcatagccattttagaagcaaaccccaacactttcgttctcccacaccattgtgacgcggagaatatttacgttgtctctatcggtagaagttcaatttcgttcgtgacacatgaatacaaagagtcatacaatgtagctc

SEQ ID NO: 20855 - DNA, 456 bp, Gossypium hirsutum
  Clone ID: LIB3583-015-P1-K1-F9
cggtcgcgtggggctatttctgagtcctccagagagttagctgacttacatcattttctttgagggcatcaacgtgttccgcatagccatttttgatgctttccccttctctttcgttctccctctccattgagtcgcggtgtttatttacgttgtctctatcggttgaagtactgtttcgttcgtgtctcatgttaacattgtgtcttactatgttgttcctggtgttgttgtatgtattcctgctagttgctctgagtacttggccatccttgtctactgggtatagctaaccattgctgtgctccaccgacctgtctataaccctggacaattcctgaaattcttccctgctggactggaaaatcctcagtcatacttacgaatcttcagccgagaaattcttgaagctgtcttcaattctcgtagagagctgctagtcgagctgtttggtgg

SEQ ID NO: 20856 - DNA, 418 bp, Gossypium hirsutum
  Clone ID: LIB3582-004-P1-K1-G5
cccacgcgtacgctaaaaaatacagagcttatagctaatcatggtgaggaacaagtcagctttcgtagttacggtgtttactcttttcctttcctttggcttgctttgctctgccaaagactagcccggcagaagaagcgaggatgatcctcaacagacgtacgaggactgccacaagcgatgccaattggtgacacgtggacgaactgtgcacgacacgtgtgaagacaggtgtgaaacgcatatgaaggaggagcagcagcgtgacggagaagatactcacaggagataccaggattgtcgaccacactgtcaacaggaagaaagaaggctgcgtgcacattgcgaacatagctgctgggaacaatacgagaaacagctgccgcggcagcctgactagcaattcaaggtgtgtcaa

SEQ ID NO: 20857 - DNA, 482 bp, Gossypium hirsutum
  unsure (1)..(482): unsure at all n locations
  Clone ID: LIB3582-059-P1-K1-A2
actagtcctaccctacccgtactgaaaaaacgaatatcttatgggaatcatggtgtagagtacaagttatttgtcatagtttagctatcacttcttatcctttccttaggcttgctaagctctgccaaaaacttcctgaaatagcaataatctatgattatcctcctcagatgtactatgactgtcagatgcgatgccatacaaagacacatggacaaactgagcaagacaagtgtgaagacaggtgtgaaaggcattttaaggaggatcagcagcttgtctgagacaatcctcagaggagataccatgattgccgacaacactgtcaacaggaagaaagaaggctgcgtgcacagtgcgaacaaagctgccaggaacaatacgagagacatcagcagtagcagcctgacaagcgattcaaggagtgtcaacaccgttgtcaacggtaagagcaagggcccgaacggaagctacnatgtgtg

SEQ ID NO: 20858 - DNA, 513 bp, Gossypium hirsutum
  Clone ID: LIB3583-015-P1-K1-E5
ggcggagagcttatagttatcaaggagaggaacaagtcagttttcgtagttttgctcttttctcttttcctttgctagaggctagctttgctctgccaaagacttccccggcagaagaagcgaggatgatcctcaacagaagtacgtggactgccggaagcgaagccaattggagacacgtggacaaacggtgcaagacaagagtgaagactggagtgaaacgcagttgaaggtgagtgctgctgcgtgacagagaagatcctcagaggagataccaggattgccgacaacactgccaacaggaagaaagaaggctgcgtccacattgcgaacaaagctgctaggaacaatacgagaaacagctgcagctgcagcctgacaagcaattcaaggagagtcaacagcgttgccaaaggcaagagcataagcccgtacggtagcaacaatgtgtgtaggaatgcaaggatcagttcctagaggttccttggtagggagagagagttttctagtgga

SEQ ID NO: 20859 - DNA, 667 bp, Gossypium hirsutum
  Clone ID: AI055596.1
aatttaagaaaacatttccttagagcatttaaaaaagaagtttagaacatgggtgtcaatgctgagattgagtttccagtcattcagttccgttcatcagatttggagcgagggaccgatggatggcgctgtttgtgcaagagggttcgagaggcttgcgagacttttggctgtttcgagggtggtgtacgaaaagatatcaacaaaagttcgagaagagacatttgggttgatgaaagaactggttgaggtcccattggagaggaaacagaagacgctagtcccatgccttaccatggatgggttggaccatgcattcaggttctttgttgtatgaaggcttcggacttggagatgcctcaatatgactctgtaaaaagtttgctcaacttatgtggctggatggtcacccacgcttctgcacactgtacataccatggcgactcaataggggagtgaaccagttatatggtaatgtaattgatagctatgatagagaaaatggagtcagtgatgataactacaaaagctatgcgggtatgaaatcatgcccctcacctgggagtacagagagacctttgctatctgataactgtagccaatctttgtgaaatctgttaggctgaaatgagccatgtggcatggatagtgttattcctttctttgt

SEQ ID NO: 20860 - DNA, 512 bp, Gossypium hirsutum
  Clone ID: LIB3583-026-P1-K1-G10
cccacgcgtccgcccacgcgtccgatcatggtagaggaacatagtcagttttcagtagtttagctcttttctatgttcctttccttaggcttgctttgctctgccaaagacttccccggcagaagaagcgaggatgatcctcgacagaagttcgaggactgcctgagagcgaagccagtcggagacacgtggtctaacggagctagactagagtgatgacaggtgtgtaaggctgtttaaggaggtgctgctgcgtgacagagacgatcctcagaggagataccaggattgccgacaacactgccaacaggaagaaagaaagctgcgtccacagagcgaacaaagctgccaggaacaattcgtgagacaactgctgcagctgcctgacaagcgattcaaggagtgtcaacaccgttgccaacggcaagagcaagggcccgtacggtagcaacaatgtgtgaaggaatgcaaggtacagttcctagaggttccatggtagggagagagagatt

SEQ ID NO: 20861 - DNA, 576 bp, Gossypium hirsutum
  Clone ID: LIB3583-026-P1-K1-F6
aagagagctagatcttagccatttccctttccacttccatcagcagatcattccaatctcgattctaggaagaacatggctttttctgaggtcctccaaagagttagcttcaagagcatcctattctttgagggcatctatgtgttccgcttatctatctttgatgcaaaccccaactctttcgttctcccacaccattgagacgctgtgttaatttaccttgtctccaacggaagaagaacgcttacgttcttgactcatgaattcatagagtcctacaatatagtaccgggagttgttgtctaagtccctgcaagatgcactgtgtacttggctatccttgtcttctaggtttagctaatcattgctgtgcttcaccgccctgtttataaccctggacaattcgaggaattcttcccagctggaagccaacgccctcagtcatatctccgagcctttagtcgagaaattcttgagcctgccttcaattcacgtagagagcagctagacgagctgttaggagggaggcttagccgtcgttagctgctaggtcagggtttgttccgttaagccagc

SEQ ID NO: 20862 - DNA, 503 bp, Gossypium hirsutum
  Clone ID: LIB3583-018-P1-K1-D1
cccactcgtccgggagggctgcaactgggggacagccgtttctggctcccatcgccaaggcgttccaagggcgaggcaggaagaacatggcgctttcacagtcctccacaggtgggctgccaaacatcattaacttaggggcatgaacgagctccgcatggccatcgaacaagcagacccctgcactagcgttctctcacaccatagagacgcggaggaaatgtaccatgtcactaacgggagctgtacaatgactttcgtgacacatgcatacaaccagtcatacaatgccgctactgcagttgtagtgagacttccagcaggaagcactgagtacttggccaaccaagacatcagggtagagctaaccatagcagcgcttcaccgggctgtcaatgaccgcggacaattccagaaatgcttcccttgcggacaggaaaatcctcagtcatatgtacgaactcttagccgtgaaattcttgaggcgtgtcttcaatacacga

SEQ ID NO: 20863 - DNA, 512 bp, Gossypium hirsutum
  Clone ID: LIB3583-026-P1-K1-A2
ttcagttctcatggttatcataggcgaggaactagtctgttttcgtagttttgctcgcttagatcgtagttgaatccgacttgctttgctctgccaaagacttccccggctgaagaagcgaggatgatcctcgacagaagtacgaggactgcctgaggcgatgccagtcggagacacgtggacaaacggtgcaagactagtgtgaagacaggtgtgaaaggctgtttaaggtggagctgctgcgtgacggagacgatcctcagaggagataccaggatagccgtctacactgcctacaggaagaaagaaagctgcgtccacagagcaaacgggggggcctcctacaggaccaaagactacagcagctgcatcctgacaagcgattcaaggagagtcaacaccgttgccaacggcaagagcaagggcccgaacggtagcttcagtgtgtgtaggaatgctcggtacagtaccaagaggatccatggtaaggtgagagagaaaacaagtggaga

SEQ ID NO: 20864 - DNA, 348 bp, Gossypium hirsutum
  Clone ID: LIB3166-055-P1-K1-C1
aagcgggagacacagctgtaactgttcgtttcttccactgctacaaacgtggagttgggcgtgtctatggcgatcaccccaatttccttgagaaggtttggtgcgaaacagcattcaaaatctatggccccagagcaggtttggactaccaagacaatcaactgcggatcaccttggtatgccaggctgctttggaggcacctatagttctaaatttaaatggcaggtaaaatttctcacgaccatatggggcagatgttggctctattgcacatgattggctcactgctcttattgcatgctatttaaaaagcaatgtccattgaaggggcttctacatgaatgtca

SEQ ID NO: 20865 - DNA, 496 bp, Gossypium hirsutum
  Clone ID: LIB3583-026-P1-K1-B3
cccttactactagcatcgctgttcgttcctagtacgattctaggttgttcatggctatttctgagtcctcctgagagtttgctgtctatcatcatttactttagggcatcttcgtgttccgcattgccatttttgtagcattccccaactctttcgttctccctctccattgtgtcgcggtgataatttacgttgtctctatcagatgaagatctgttacgttcgtgtctcatgttaacttagagtcatactatgttgttcctggagttgtagtatgaattccagctagatgctctgagtacttggccttcctagtcttctaggttttgctttccattgctgtgctccaccgtcctgtctataaccctggacaattccagtaattcttccctgctggacaagaatatcctcagtcatacttacgtatcttcagccgtgaaattcttgaagctgtcttcaattctcgtagtgagcagctagacgagctgtttggtgg

SEQ ID NO: 20866 - DNA, 521 bp, Gossypium hirsutum
  Clone ID: GOSHI-09MAY01-C19_27
agagagcccagttatctaccggagacctattagtagtcccagcagagccatccagtcacattcgttagcctcagaaatcgagagaccttagatagctcgggttcggactctactacggccttgacaacaagagagatcttcgaggctgggaaaaccaactaagagtgatcaaagggatcgcctggccaaagagctggcgtttggagaggagtcttggttggaggaagtgagtattcaacaacaacccgcaagaatcttacttcgagtctggacagagtcggcgtggatttgttgtgaggaggggttgttttttccccttatcgccgttcctggactttgcacgcttgttctaagtagtagttttgtaaggcatgttaaggaggtatttaattagggaggcctatgttaagaggatgagcctagttttgttgagagttttggagtcctttggttttaaggaataaataaagagggaaatctttactttttccttttaaaaaaaattattactttataaataa

SEQ ID NO: 20867 - DNA, 186 bp, Gossypium hirsutum
  Clone ID: GOSHI-09MAY01-C19_28
cgtaatttccaaagcagcaactccaagaaagtggattcctccgttgttgccttttcgaaataaacaaaggatgctgatcttcgtaccgcactttacaattcaaaggctttacattgtggtcctgcaccgacggtaaatggttctatgttgaaatggttttgttttttattttttttaggagagttt

SEQ ID NO: 20868 - DNA, 425 bp, Gossypium hirsutum
  Clone ID: GOSHI-09MAY01-C19_29
ttatcattttacttactctaagaatataaacttgttagagtattttttaaaaaatcaagcacatgggtgttgatgctgaacttgcgatcccggtcatcgagtttcggaccggttcgcgggatttggagcgagggactgaaggatggcaccatttgtgcaagagggttcgagaggcttgcgagacctacggttgtttcgaggtggtgtacgaaaagatatcgagagaagtccgagaggagacgtttgagttgttgaatgaactggttgaggtcccgttagagaggaaacaattgaacgttaatcccaagccttaccatagctattttggaccatgtagccaagcttttttgtatgagggcttcggcattgaagatgcccccaactacgactctgttaacaattttgctcaacttatgtggtcggat

SEQ ID NO: 20869 - DNA, 670 bp, Gossypium hirsutum
  Clone ID: GOSHI-09MAY01-C19_30
cccacgcgtccgctcagaagagctcatactaaatcatatttgtctcaccacggctcttctaataaaattttctttctttctttccttttgtcttttcctttttgtgaaacgcttgcaaaactctgcttttatccactcttcttcattaatttttctttttttgtgtgcttaatcttgaagaaagggataaaaccctagaaaaaaatgggggaatccatgagaatgatcgatgtggagaagctgatatcttacagtgacgacgtggtggaggtattgaaggacaaaagggacattaacaacttgacgcagtgttttcagcactttaacgatctccgctcgcattgcgacgctgattccaatgaggttcatcgattgcttcgagaatatgaggaaaagatagaagcgtgcaagaagaaaacagaacaggcaaaattggaggttgctgatggtgctgaaatggagtatctgcagaaggaataccaagaagagcttgaaaaagaacgtggacttgaagaggagcttagataagtatatgacttttgatatatatatttaatgttttggtgttatggtgtttgattgatttgttaaatcttcttctataagaacacagctgttagcaatgagataacattagccttagataaatggcaaaaattgttttttaatg

SEQ ID NO: 20870 - DNA, 720 bp, Gossypium hirsutum
  Clone ID: GOSHI-09MAY01-C19_31
atgaacatggttattgattttattccatgaaaagagaagaagaagaagaagaagaagacaaagaagaagaacaagaacaagaagaggaaaggagaagtggacaatacaggaaaataaggtcccggttgtcgcgtggagacatatttgtagtcccagcaaactttccagttacattcgttgcatcccaaaaccagaacctgaggatgactgggttcggtctttacaaccagaacattaacccagaccataaccagaggatcttcgtggctgggaaaatcaaccatgtgagacaatgggatagccaagccaaggagttggcctttggggtgtcatcgaggttggtggatgagatattcaacagcaacccacaagggtctcctcctttacataggtcaccatttttatttcattacatgcctgcttaaaactagaaaatttcacattagtccataaacacgagactatgtgattattattgcctttaactctttattcagatgcacgctgcctctgtcgagacacgaagtaagactcttgcccaatgggatcatagtgccaagggctggtgagcatgatcatgatgggataaacttgagagaatggctgaaagttcagtctcataaagcaaacaaagctgagtgcttgtatatatttagacaaattgtggatctggttgattattctcattctcaaggagctatcttgcatgacttgcgccct

SEQ ID NO: 20871 - DNA, 684 bp, Gossypium hirsutum
  Clone ID: GOSHI-09MAY01-C19_32
atggccaggaccgacctggagatgcagatcgaaggcctgaaggaggagctggcctacctgaggaagaaccatgaggaggtgcggttgctgctggcttccggggtgggaggctggtttggtggggttgccagatgcacccagggccaggagaggagtctgctgagctgactgcctcctgccatcccttcccaggagatgcttgctcttcgaggtcagagcggtggagatgtgaacgtggagatggatgccgcacctggcgtggacctgagccgcatcctgaatgagatgcgcgaccagtacgagcagatggcagagaaaaaccgcagagatgctgaggcctggttcctgagcaagaccgaggagctaaacaaagaagtggcctccaacagcgaactggtacagagcagccgcactgaggtgacggagctccggagggtgttccagggcctggagattgagctgcagtcccagctcagcatggtatgaaggacccggtacagcagcagcccccaagccaccagtaatggccaccaccccctcaacaagccacaatctagttgcacctttcttttctcaggatgggaccagatgactcatgggacccattatatagacagagaaattaagccctagaatagtgggctagcttttttccatattgtctggcccgtcagtaccccaact

SEQ ID NO: 20872 - DNA, 807 bp, Gossypium hirsutum
  Clone ID: GOSHI-09MAY01-C19_33
cccacgcgtccgggaggaaagagttgaagccgcttaagttttcaaatcaggagggttcggtgatgtcttgaccgacaaaaccgtggacaaggcgaaattaattgatgatgtaaggcaagcactttatgcatccaagatctgcagttatgcacagggcatgaatctcattcgtgcaaaaagcatcgagaagggttgggacttaaagttgggggaactggctagaatatggaagggaggctgcatcatcagagctattttccttgaccgaatcaagaaggcatacgacagaaaccctgaccttgcaaaccttcttgttgatcccgagtttgcaaaggaaatcatcgataggcaatctgcatggagaagagttgtttgtcttgctatcaactccggtattagcactcccggcatgtctgccagtcttgcttattttgacacttacaggagggaaagggtacctgcaaacttggttcaagctcaacgagattatttcggtgcccatacttacgaaagagtggatatggagggatctttccacattgagtggttcaagacagcgaaacagctgaaaaattaactttaccgatggggtactctcctgagcagcgaatgcttgcgatagtatctgctccgtacttgtgctctaccaagctacaccatgattatttcctttttctctcaacatcgtttctcaaatttatctgcaaattttagacagtgtcatattgtgtttgaatgtggtgttccattttgttttgtttctggtttcgagcattaatcaatcaagcctgcggaccctttttattt

SEQ ID NO: 20873 - DNA, 792 bp, Gossypium hirsutum
  Clone ID: GOSHI-09MAY01-C19_34
ttctcttttactttccttaggctagctttagctctgccatagacttccccggctgaagaagcgtagatgatcctcgtctgaagttcgtggtctagcctgaagcgaagcctgtcggagtctcgtggtctttcggagctagtctagagtgttgactggagtgtttggctgttttagagagagtgctgctgcgagtcagtgtcgttcctcagaggagataccaggtttgccgacttcactgcctactagaagatagatgagctgcgtcctcagtgcgttcatagctgcctggtacaattcgtgagacttctgctgctgcagcctgacaagcgtttctaggagagtcaacaccgttgcctacagctagagcttagagcccgttcagtagcttctttgtgtgtagagtatgctaggttctgttccttgagagttccttggttaggtgtgagtgttttctagtggtgtgttgttgttgttgaggttagtgtcgttagtgtgcttcttcttaagttcatcccttactacttccatcgcagatcgttccttgttcgtttctaggttgttcatggctatttcagagtcctccagaagttagctgacaaacatcatttacttaagggcatctacgtgttccgcattgccattttagatgcaaaccccaactctttcgttctcccacaccattgtgacgcggagtaaatttacgttgtctctatcagtagaagatctgtttcgttcgtgactcatgaaaactaagagtcatacaaagtagttcctggagttgtagttagtatt

SEQ ID NO: 20874 - DNA, 532 bp, Gossypium hirsutum
  Clone ID: GOSHI-09MAY01-C19_35
cccactctttcggctcatttagttcaagagaacatttcggtggagcataaaaaaaagttgagaacatgggtgtccaagctgaaattgagttcccagtcattgagttccgttcagcagatttggagcggggaaccgatgggtggcaccgcttgtgcaagagggttcgagaggcttgtgagactttcggctgtttcgaggtggcgtataaaaaaatatcgacggaagttcgagaggagacatttgggttgatgaaagaattaattgaggtcccagtggaaaggaaacaaaagaacgctagtcccatgccttatcatggctgggttggaccatgcaatcaggtttctttgttgtatgaaggctttggacttggagatgcctcaactatgactctgttaaaagctttgctcaacttatgtggccagatggtcacccacgcttttgcaccaccatacatacaattggcactcaaataagagagttggataagttaatctggctaatgttaatcgatagttatggatcgggggagaaa

SEQ ID NO: 20875 - DNA, 867 bp, Gossypium hirsutum
  Clone ID: GOSHI-09MAY01-C19_36
gtcagttttcgtagttatgctatacatctctttttctttcctttggcttgctttgctctgacaaagacttccatggcagaagaagcgaggatgatcctcaacagaggtgctaggactgtgcgtaagcgatgcctattggagacacgtggacaaacggagcaagacacgtgtgacgacaggtgtgaaacgcacctgaaggacgagcaacagcgtgacgagaaccatcctcataggagataccaggatcgacgacaacactgtcaacaggaagaaagaaggcttgatccacattgcgaacatagctgtatgtaacaatacgagaaacagcagcagcagctggctgacaagcaattcaaggagtgtcaacagcgttgccaatggcaagagcaaatgcctgaacggaagcaacactgtgtgaaggaatgcagggtacagtacctagaggttccatggaacggagagagcgaaaacaagagagaaaagatagaagcttgcaagaagaaaacagaacaggcaaaattggaggttgctgatggtgctgaaatggagtatctgcagaaggaataccaagaagagcttgaaaaagaacgtggacttaaagaggagcttagagctgttagcaatgagataattgaactagagcgccagagggtttctattgaagaacgcaagaaaaacctaaggaaatacgagcaagacaaactcaaagaacagaggaagctttcaatgtatgcttctataactaatattattccagacttggaagaccaatccagaatctcaggccatatagtagatagagataaaaaggtgataaagaagtttgaattcgatacatcaaagatgactgcttttgatgcctgtgat

SEQ ID NO: 20876 - DNA, 1198 bp, Gossypium hirsutum
  Clone ID: GOSHI-09MAY01-C19_37
tttgtcgcgtgggctactacttcagatagcaggggaaggaaaaatcggcggcggcagaagaagacgatggtggtgcaccccgttcaacggcttttcgatgcttgcaaggacgttttcgcccatgccgggactggatttgtcccaccccctgataaaattgagcagcttagcgctcttttggatgacattaagccggttgatgttggtcttagtccacgaatgtcatttttcagtccgcaagcagctcggcgagctccaacaataacctacctgcatattcatgaatgtgaaaagttttcgatgggcatcttttgcttgcctccatccaaagatactaccgttcgcactcatcaccgaacgacagtataaaggctacattcgttgtcctctatacccatcgaatcggccacatcgaaatggtctgcccttacctttctaggcagatctcacactggctctaccgagaggacgatgaacaagaagaacatgaagttgaaaggagaagtggacaatacaagagagtgagagcccaattatcaaccggtgacctattggtagtcccagcaagccatccagtcacattcgttgccttccaaaaccgaggacctaggattgctcgggttcggactctacaacggccaagacaacaagaggatctgcgtggctggtaaaaccaacaatgtgagacaatgggatcgccaagccaagagaatgactgtcggaggcgattcaaaggtgatacacgaggacaaaaggagcaacagcagtgagaagaaagttgtaaaagtcactatggcgagaaagatcaacagcaacgccgccgacctgtagatccttataggagatacaggactgtcacgctagtgctaactacaagtttagtagcgcatgctacggtggcaacaaaagagcgggaactatttaagcaggaacaacatcaattccataggcagtttcaggagtgttagcttcattggcaccaaaaagtcttaatgtttgattccctccatggaagaacttgcttgcactatgcagcctattatggccactttgactgccttcaagccatactctctgctgctcaatctagccctgttgctgtttcatggggatatgcacggtttgtgaatataagagacgctaggggagccactcctttgcacttaacagcttgtcaaaaaacggcccgaatgcgttt

SEQ ID NO: 20877 - DNA, 683 bp, Gossypium hirsutum
  Clone ID: GOSHI-09MAY01-C19_38
atatgctttgagcaaatctgcacaattgaagttcaagactgtggtcaccagatgtgtgcacaatgcacactggcattatgctgccacaacaagccaaaccctacaactgcaagtctaacaccccccgcatgccccttttgccggagcaccattgtccgattggtggtagccaagataaagaatcatgatgatgtggatcatgacatcggagaggttagttcctcaaagctgagaaaaacaaggaagtcaaggaattttagtgaaggaagcagtagcttcaagagcttatctgcagttggttcattcagcaagatcagtggccgaggctccggaaggattgctgcagaaaatgaatgtattgataagccttgaaaaaacatgggttgtcagtcaaggacattctctttcacacaatgggagaaaaatcgagcaatcatggtcagtgctagacccattagttatatatgttagatggaagggaggtccatatgtagattttgggggaaaataagcgaaggaaataagtttcattgacttggtaagtttgaaaatagcttcattgggtcctataattgttggaatctcttgtttgctttagattgaagtggcgttggccttattgagggtgtattaatttaaatgcctgaattaatagggaaaaaatatattccaagtgaaataag

SEQ ID NO: 20878 - DNA, 468 bp, Gossypium hirsutum
  Clone ID: GOSHI-09MAY01-C19_39
cattggcaatgccggtgatgccagttttactaataatgtgaccccgctctacacctttgttttcaccagatacaagctcgagggcatagtatgggcttacagtcaagactttatgtgattccaatattccagctttcatccaatttaattttctttcccttgttgggcttgttatacccatgatcgcatgattaacatagaaaagtttataacgaaagaataagtgaaaaatccagggcttttcttatttgttttatcaacaacaaaattagaacccccaaaaagaaattaagcatgaacaactccctccaaacatggaaattattaacagaggcaaagatatggttctgtcataactcaggcagtagtgttgttattttggagcttcaaatccttggtaaacctattaatgaagtcctccgcagccttatctacgttgccattaccttcatcaacatctcttaaagg

SEQ ID NO: 20879 - DNA, 1371 bp, Gossypium hirsutum
  Clone ID: GOSHI-09MAY01-C19_40
atgcatgggaagatctcctgtgtgaagaggctcattgaagctggggcaaatatattaatgtttgattcccttcatggaagaatttgcttacactatgcagcctattatggtcactctgactgccttcaagccatcctctctgctgctcaatctagccctgttgctgtttcatggggatatgcacggtttgtgaatataatagatggtaggggagccactcccttgcacttagcagcacgccggaagcagcctgaatgcgtacatatcctgttatacaatggtgctcttgtttgtgcatcaactggtcgatatggtttcccaggaagcactcctcttcatttggctgctagagggggctctcttgattgcattcgtatgttgttggcttggggtgcagatcgtcttcaaagagatgcatctgggagaatatcatttgtcgttgcgctaaaacacaaacatggagcttgtgcagctcttctaaatccttcatcagcagaacctcttgtctggccagcaactttaaagttcattaccgagcttaatgaagaggcaaaatcactattagaacaggccttaatggaggcaaaccgggaaagggaaaagaacatcttaaagggaacagcttactcacttccatcaccctcacattctgactcagggttagatgacagtgtttctgaggctagcgatactgaagtatgctgtatatgctttgagcagctctgcactattgaagttcaagactgtggccaccagatgtgtgcacaatgcacagttgccttgtgctgtcacaacaagccaaaccctgtgactgcaagcctaacaaccctggtatgccccttttgccggtgcaccattgtccgactggtggtagccaagatgaaatgttatgacaataccaatcgctctactggagaagatagtacttcaaagccaagaaaatcaagaaagccaaggaatttcagtgagggaagcagcagctttaaaagtttatccgcaataggttcattcagcaagattggtggccttagctcaggaaggattgctgcagaaaatgaatggattgataagacttgaaacttggcactttgtcagccattgcttattgaaagtttcagattgtcacattccttttcacacaacgaaggaaaataaaaaagggcagagagaaaaaatcaagcaatcatggttaggactggactcatttggtctatatacatgtgaaataggtgaggtccatctgctacataagcaaagaagtaagtttgcttagggttattttgttagggttggtaagtttggtttattttgttgtaatcttggtttacttgagactgagatgaacaatgctactaaagattctatttttat

SEQ ID NO: 20880 - DNA, 1287 bp, Gossypium hirsutum
  Clone ID: GOSHI-09MAY01-C19_41
cgcagtgccgacccacgcgtgcgcggtcgcgtgggctagatcttagccatttccctttcctcttccatcgcagttcattcctttctcgattcaaggaagatcttggctttttctgggtcctccttaggttagcttctaggcatcctattcttaggggcatctatgtgttccgcttatctatcttagtagcataccccaactctttcgttctccctctccattgagacgctgagattattttccttgtctccttcggtagaagtacgcttacgttcttgacacatgtatacaaagagtcctactatatagtaccgggtagtagagtctaagtcccagcaagttgcactgagtacttggctatcctagtcttcaaggtatagctaatcatagctgagcttcaccgccctgttaatatccctggacaattcgagagaattcttcccagctggaagccaacgccctcagtcatatctccgagcctttagtcgagaaattcttgagcctgccttcaatacacgaagagagcagcttgacgtgctgttaggtgggtgagctaagcctccgtaagctgctaggactgggaaagttccgtaaagccagccatgatcatatataggcttagagccaagataccacttctcctaaggtgaatagaggcgtgagattcgccttcaacttattgtaccaaacccctcgctactccaaccaaaacggccgcttctatgaagctagcccacgtgaattccggctactcaaggacatcaatgtcaccgtttcagccttgcaattaaaccaaggatcaatctttgtgccgcactacaattcaaaggctacattcgtggtccttgtttacgaaagaaatggatacgttgaaatggtttctcctcatcttcctaggcaaagctcatttgaagaagaagaagaacatcttctagatcttgatctagtagaggataggagttgtgggctattctggaatattaagtcccagttgtcgcgtggagacatatttgtagtcccagcaaacttcccagttacattcgttgcatcccaaaaccagaacctgcggatgactgggttcggtctttacaaccagaacattaacccagaccataaccagaggatcttcgtggctggaaaaatcaaccatgtgagacaatgggatagccaagccaaggagttggcctttggggtgtcatcgaggttggtggatgagatattcaacaacaacccacacgagactatgtggttattattgcctctaactcttctagttctagatcgcga

SEQ ID NO: 20881 - DNA, 1032 bp, Gossypium hirsutum
  Clone ID: GOSHI-09MAY01-C19_42
gctgcgtcctcatagcgttcttagctgcaaggttcttttcgagtttctgctgctgctgctgcctgactagcttttctagagagagtctactgcgttgcctttggcttgtgctttggcccgttcggttgcttctttgtgtgttggtatgctaggttctgttccttgtggttccttggttgggtgtgtgtgttttctagtggtgtgttgttgttgttgtggtttgtgtcgttagtgtgcttcttctttgagttcttcccttactacttccatcgcagttcgttcctagttcgtttctaggttgtacatggctatttctgagtcctccagaagtttgctgtctatcatcatttactttggggcatctacgtgttccgcatagccatttttgttgctttccccttctctttcgttctccctctcctttagagtcgcggagtttattttcgttagtctctatcggtagtagttctgtttcgttcgtgtctcttgttttctttgtgtctttctatgttgttcctggagtagttgtttgttttcctgctagttgctctgagtacttggccttcctagtcttctgggtttagctttccattgctgtgctccaccgacctgtctataaccctggtcaattcctgatattcttccctgctggactggattatcctcatgtcatatcttatcgtttcttcagccagagttattcttagagagctagtcttcaattcatcgaagagatgctgctagtcgtgctagtttaggagagtgagcattgccattcgaaagctgctaggtctgggtaagttccgtttagccagccaagttcttataaaggcattgagccaaagagctacttctccaaagggagtaaggtagcgagggatacgccttcaacttattgaaccaaacccctcgctactccaaccataacggccgcttttacgagagcttgccctcgttatttccagcagctactccgagaagtggattcctccattgttgccttcgttatattcataagatcgatcttcgtac

SEQ ID NO: 20882 - DNA, 995 bp, Gossypium hirsutum
  Clone ID: GOSHI-09MAY01-C19_43
tgtaatttcgttcaaggaaaccttcccttgagagtataaaaaaaaaattaagaacatgggtgtcaatgctgagaataagtttccagccattgagttccgttcatcggatttgaagcgaggaaccgatggatggcgcaatttgtgcaaaaaggttcaagaggcttgtgagaaattcggttgttttgaggtggtttatgatacgatatcgacgaaagtccgagaagagagttttgggttgatgaaagaattggttgaggttccggtggaaaggaaacaaaagaacactagtcccatgccttatcatggctgggttggaccatgcgagcaagtttctttgttgtatgaaggtttcggaattggaaatgcctccaactatgactctgttaaaagctttactcaacttatgtggcctgaaggtcacccacacttttgcgacactatacatactattggaacacaaatggaggagctaaacaaattaatctggttaatgctaattgatagctatggattaggagatgactcattgaagttgaactacacaacattagtgcggatgatgaaatatatggctcctccaccgggggagtatgagagaggactctttgctcatactgataaaccagtcagcacacttatttgtgaggatcaagtttcaggattggaaattgaggtcaacgatggccaatggatcaagttgaccaatttatctccttcttctttttgctttgtggttggggatcctctcaaggcatggagtaatggaagattaaaagcggtcaatcatagagtgatgatgagtggggacaaagatcgactttctttagcagccttcgccattcccgttgagggtaccataattaaggcacctagagagcttatagatgagcaacattctcagctttacaaggactttaattttatggactttttcctttttgccttttccgacccggcaaagcacatcgactctggcgagcagctccagcttttgc

SEQ ID NO: 20883 - DNA, 1167 bp, Gossypium hirsutum
  Clone ID: GOSHI-09MAY01-C19_44
gattgattttcagaaaacatggccttagagcataggagagagttatgaacatggctattgatgctgaaattgagttcccaaccattgagttacgttcatcggatttgaagcgaggaaccgaagggtggaaccgtttgtgcaagagggttcgagaggcttgtgagacttttggttgtttcgatgtggtgtacaaaaagatatcaacaaaaatccgagaggatgcatttgaattgcagaaagaactagttgaggtcccagtggagaggaaacagaagaacaccagtcccttgccttgccatggttgggttggaccatgcgagcaggtttctatgttgtatgaaggctttggagtcgcagatgcctccaactatgattctgttaacaactttgctcaacttatgtggcctaatggccagccacgctttactgacactatacataccctagcgacgcaaatggaggagctgaacaagttaatttggttaatgctaactgatagttacggattacaggaggattcactgaagatgaactacaaaacgttggtgcggatgatgaaatacctggcccctccgcctggggagtatgagagaggattctttgctcatactgataaaccaattagcacactcatttgtgaggacaaatcagggctggaaattgaggtcaataatgaccaatggattaagttgactaatttatctccttcttcctttgtttttattggtggagatcctctcaaggcatggagtaatgggagattgaaaccagtgaatcacagagtgatgatgagcggagacaaagatcgatattctatagcagcctttatcattccaaatgaaggtacaataattaaggcacccaaagaacttatagatgaaaaacatcctcagcttttcaaggaattcgatttcatggacttcttcctttatgccatttctgacccagcaaagcacatcgacagcggtgaactgctccacgcctatgcttctctttcaccacctgtttccaattaaatgcataccgatatcaacaagtaaaagcccaattttagtattaaattaatgttacaaataataaatggagtcctatacttgggatttccattcttggaatgtattaccatgttgtagttttttttttctcattaaagaaaattttattaat

SEQ ID NO: 20884 - DNA, 1162 bp, Gossypium hirsutum
  Clone ID: GOSHI-09MAY01-C19_45
gtgttagataatcatttccttaggagctaaaagaagttaagaactggctgttgatgctgaaattgagctcccaaccattgagttccgttcatcggattctgaagcgaggaaccgaagggtggaaccgtttgtgcaagagggttcgagaggcttgtgagactttcggttgtttagatgtggagtacaaaaggatatcaacagatattcgagaggatgcatttgaattgttgaaagaactagttgaggtcccagtggagaggaaacagaagaacactagtcccttgccttaccatggttgggttggaccatgcgagcaggtttctgtgttgtatgaaggcttcggagtcggagatgcctccaactatgactctgttaaaagctttgctcaacttatgtggcctaatggtcacccacgctttactgagaccatacataccctaacgacgcaaatggaggagctgaacaagttaatttggttaatgctaactgatagttacggattacgggaggattcactgaaaatgaactacacaacgttggtgcggatgatgaaatacctggcccctccaccaggggaaaataagagaggactctttgctcatactgataaaccagttagcacacttatttgtgaggacaaaatttcagggttggaaattgaggtcagtgatggccaatggatcaagttgactaatttatctccttcttcctttgtttttatggttggagatcctctcaaggcatggagtaatgggagattgaaatcagtgaatcacagagtgatgatgagcggagacaaagatcgatattctatagcagcctttgtcattccaaatgagggtactataatcaaggcacccaaagaacttatagatgaccaacatcctcagcttttcaaggaattcgatttcatggacttcttcctttatgccttttctgacccagcaaagcacatcgacaacggccaactgctctactcctatgcttctctttcaccaccggtttcccattaaatgcataccgatatcgacaagtaaaagcccagttttagtattaaaataatattacaaataataaatggagtcctatacttgagatttccatttttgtaatgtattaccatgttatagggttttttctcattaaagaaagttttattaat

SEQ ID NO: 20885 - DNA, 771 bp, Gossypium hirsutum
  Clone ID: GOSHI-09MAY01-C19_46
cccacgcgtccggctcatttagtctaagaaaacatttccttagagcatagataaaaataaaataaaaattaagaacatgggtgtcaatgctgaaattgtagtcccagtcattgagttcctgtcatcggatttagagcgaggaactgatgggtggcaccatttgtgcaagagggttcgagaggcttgtgaaacttacggttgtttcgaggtggtgtacgaaagggtatcaaagaaagtccgagaggagatgttcggattggtgaaagaattggtccaggtcccattggagaggaaacaaaagaacgctagtcccttgccttaccatggctgggttggaccatgcagtcaagtttctttgttgtatgaaggctttggacttggagatgcctctaattatgactcagttaaaagatttgctcaacttatgtggcctgatgatcacccacgcttttgtgacaccgtacacacattggcgacacaaatggaagagttgaataagttgatctggttaatgatatttgaaagttacggattaggagagaaattgagtcactgatgataaactataaaacattgtgccgatgatgaaatcatgggccctcaccagggagtatagagtggacttttgtatcagaaaacgttacacagtattgggaggaaatttaggctaaatgagcaggtggccagggtcagtgtaataatccttttcttgtttgggttgaacttaggatggtatggaattacctaacttaagtgatagggaaaactata

SEQ ID NO: 20886 - DNA, 1550 bp, Gossypium hirsutum
  Clone ID: GOSHI-09MAY01-C19_47
gaatgtagcctttgaattgtagtgcggcacaaagattgatccttggtttaattgcaaggctgaaacggtgacattgatgtccctgagttgccggaattcacgtgggcaagcctcgaagaagcggccgttttggttggagtagcgaggggtttggctcaataagttgaaggcgaatctctcgccacttttctcccttggtgaagtagcttcttggctcaatgcccttatttgttcctggctggctttacggaacattccctgtccccggacgcgtgggcggacgcgtgggcggacgcgtgggagaatgccgacagcaagaagaaaggcaacaaccacaatgccaacaaaggtgcttgaaacgattcgagcaagaacaacaacaatcccagaggcaattccaggagtgtcagcaacattgccaccagcaagaacaaaggccggaaaagaagcaacaatgtgtgagggaatgcagggaaaagtaccaggagaatccatggaggggagagagagaagaagaagcagaagaggaggaaactgaagaaggagagcaagaacaaagccataaccctttccacttccatcgcagatcattccaatctcgattcagggaagaacatggcaatttcagggtcctccaaaggtttgcttcaaggcatcctattcttaggggcatcaatgagttccgcttatctatcttagaagcaaaccccaacactttcgttctcccacaccattgtgacgctgagaaaatttaccttgtcaccaacggaagaggaacgcttacgttcttgacacatgaaaacaaagagtcttacaatgtattaccgggagttgtagtcagagtcccagcaggaagcactgtgtacttggctaaccaagacaacaaggaaaagctaatcatagcagtgcttcaccgccctgttaataaccctggacaattcgaggaattcttcccagctggaagccaacgccctcagtcatatctgcgagcctttagtcgtgaaattcttgagcctgccttcaatacacgaagtgagcagctagacgagctgtttggtgggaggcaaagccaccgaaggcagcagggacagggaatgttccgtaaagccagccaagaacaaataagggcattgagccaagaagccacttctccaagggagaaaagtggcgagagattcgccttcaacttattgtaccaaacccctcgctactccaaccaaaacggccgcttctatgaggcttgcccacgtgaattccggcaactcagggacatcaatgtcaccgtttcagccttgcaattaaaccaagtacttaaaaccaaatcaccctttgttttccctctaatttccatcattatactaaccaaaatcaaatcctttttttgtagggatcaatctttgtgccgcactacaattcaaaggctacattcgtggtccttgttaacgaaggaaatggatacgttgaaatggtttctcctcatcttcctaggcaaagctcatttgaagaataagaagaacaacaacatgaacaagaacaagaagatgaaagga

SEQ ID NO: 20887 - DNA, 1066 bp, Gossypium hirsutum
  Clone ID: GOSHI-09MAY01-C19_48
ctacatagtgttttctcagaatggaacaagggggagcttttgagcttcttgattgaaatcactgctgatatatttggaattaaggatgacaaggcagatggttatttagttgataaggttttggacaaaactggcatgaagggtactggtaaatggactgtacagcaagctgctgatttgtccattgcagctccaacaattgcagcttctctggattcaaggttccttagtgggttgaaagaggaaagagttgaagctgctaaagtcttcaaatcaggaggatttggtgatgtcttgaccgaccaagttgtggacaaggcaagattaattgatgatgtaaggcaagcactttatgcatccaagatttgcagttatgctcagggcatgaatctcattcgtgcaaaaagcatcgagaagggttgggacttgaagttgggggaactggctaggatatggaagggaggctgcattatccgcgctattttcctggacagaatcaagaaggcttatgatagaaattctgaccttgcaaaccttcttgtcgacccagaatttgcaaaggaaatcattgacaggcaatctgcttggagaagagttgtttgtcttgctatcaactccggtattagcactccaggcatgtcagccagtcttgcctatttcgacacttataggagggaacgagtaccggctaatttggttcaagctcaacgagattattttggtgcccatacttatgaaagggttgacatggacggatctttccacactgaatggttcaagatcgccaaaaaactaaaagattaatattattctagcagtactcttcagaacttccaataagtgtaataaaatctgctctggactctatgctacacagagctacaaccatgattatctttttgaaaatttatctcaacttcatttctcaaattgagctgcgaatttacaccctgttctaggattaacgtgcgtttatgttgtttccggatttgagttttcacccaatgtgggtctctgtggtttgtgaactataagagagtcaacttttttttcctttttgcttgat

SEQ ID NO: 20888 - DNA, 1862 bp, Gossypium hirsutum
  Clone ID: GOSHI-09MAY01-C19_49
cccacgcgtccgttttttttcccatcactcgcttttaaaggcaaactacttgaatatgaagtgttggtttgctaaattaagagaggccagaccactacccgccaccacaggagggcgtcgccggcgacggtggtgaagggtcgtaggaagtgtaaagcccgttttgttatcttaaaagatgggtcaagggctgagttgtggagcgagtcaagagaatgtattgtttagtgcagttcaagttggagaccttgaaactgtggaagcttatgtaaagagagaatccaatcttttacatcatacgactgtttatgatcgccactctgctcttcatatagctgctgcttatggccagatcgagattttggctatgcttttggagaaatccgtgaacccggacgtagtgaatcgtcaaaagcagactccccttatgttggctgcaatgcatgggaatatctcctgcgtgaagaagctgattgaagccggggcaaatatcttaatgtttgattcaattcatggaagaacttgcttgcactatgcagcctattatggtcactctgactgccttcaggctattctctctgctgctcgatctagccctgttgctgtttcatggggatatgcacgttttgtgaatataagagatgccaagggagctactcccttgcacttagcagctcgtcaaaggcggcctgattgcgtacatatcctgttagacaatggtgctcttgtttgtgcttcaactggtggatatggttgtccaggaagcacacctcttcatttagctgctagaggtggatctcttgattgcatccgcaagttgttggcatggggtgcggaccgtcttcaaagagatgcatccgggagaataccttatgtagttgctctaaagcacaaacatggggcatgtgcagctctgctaaatccttcatcagcagaacctattgtctggccggcacctttaaagtttattagtgagcttaatgaggaggcaaaaacactattagaacaagccttaatggatgcaaaccgggaaagagaaaagaacatcctgaagggaacagcttactcaattccatcaccttcacaatctgattctgggttagatgacaatatctctgaggctagtgatactgaactatgctgcatatgctttgagcaaatctgcacaattgaagttcaagactgtggtcaccagatgtgtgcacaatgcacactggcattatgctgccacaacaagccaaaccctacaactgcaagtctaacaccccccgcatgccccttttgccggagccccattgtccgattggtggtagccaagataaagaatcatgatgacgtggatcatgacattggggatgttagttcctcgaagctgagaaaaacaaggaagtcaaagaattttagtgaaggaagcagcagcttcaagagcttatctgcagttggttcattcagcaagatcagtggccgaggctccggaaggattgctgcagaaaatgaatggattgataagccttgaaaaaacatgggaagtttcaagttgtcagtcaaggacattctctttcacacaatgggagaaaaatggagcaatccggctcagtgctagccccattagttatatatgttagatggaagggaggcccatatgtagattttgggggaaaataagcgaaggaaatgagtctcagccttgccttggtaagtttgaaaatagctctcattgggtccctatatttgttgtaatcttttgtttgctttagattgaagtggggttccccttattgagggtgtattaatttaaacgcctgaattaatattgaaaaaatataccccaaaaataaaagaaactgttttttttttcctgc

SEQ ID NO: 20889 - DNA, 1213 bp, Gossypium hirsutum
  Clone ID: GOSHI-09MAY01-C19_50
cagaatcattgagttcaaggaaacatttccttagagtgtaaaaaaaagttaccaacatgagtgttgacgctaagattgagtttccagtcattgagttccgttcatcggatttggagcgaggaaccaatgggtggtaccgattgtgcaagaaagttcgagaggcttgtgagattttcggttgttttgaggtggtatatgacacgatttcaacgaaagttcgagaggagatgtttaggttgatgaaagaactagttgaggtcccagtggagaggaaacaaaagaacactagtcccctgccttaccatggctgggttggaccatgcactcaagtttctttgttgtatgaaggctttggacttggagatgtctccaactatgattctgttaaaaactttgctcaacttatgtggcccgaaggtcacccacgtttttgtgacactatacataccatgggaacacaattggaggtgctaaacaagttaatcttgttaatgataattgatagctatggattatcagaggactcactgaagataaactacacaacttcaatgcggatgatgaaatacacgacccctccaccgggggagtatgagacaggactctttgctcatactgataaaccggttagcacaataatttgtgaggatcaaattccaggattggaaattgaggtcaatgatggtcaatggatcaagctgactaatttatctccttcttcttttgtcttcatggttggagatcctctcaaggcatggagtaatgggagattgaaatcaacgaatcacagagtgatgatgagcggagacaaagatcgtttttctatagcagcttttatcatgccaaatgagggtaccataatcaagacacccaaagagcttatagatgaggaacatcctcaacttttcaaggactttgatttcatgaaattcttcttttttgccttctcaaacccagcaaggcacattgatagtggccagctgctctatgactttgctgctctctcaccaccagtttccaatggccatatggacaagtaaaatcccagttacaaataataaattgagtcctatactcaagatctgcattctcgtattgtattactatgttatggttacttgtgtgattgtataatggagttcactgatttgtcctttgaacttttaaataaataaataataattaaagagtccaaaaaactgttctttgtctg

SEQ ID NO: 20890 - DNA, 1073 bp, Gossypium hirsutum
  Clone ID: GOSHI-09MAY01-C19_51
aaaaaatgggtatattcgcatattcgacattcatacttgggggagaataacctaaaataaacaaattaaaaacactcatttattgggataggggggcaattccctgggttcttctaggctcttaagacctacaaacaacataagttggatcattcagaactttaaaaaggcatactacaaagacaaagaacatagttatggacttcaattatctatcaggttctgctctatcctcgggttatcaaaaccttttactgatcagagttttccgccattgcctgggttctcatcgtattcatcatcatcatcaccatcatcatcatcgtcatcaatggcctcttcatatatactgcctcgagagagtttgctaagctccaattccccatcatcttcattaaggaattccagcccatatttcgtgtcacgatgcttaactaaaagccaacgcaacagtctgtcttccttgttcaagtactgcagctccttgttgatattgggttgtgtccatcatgaagttggaacattttatcttatttcacattgctcacaactcataaaactacacagaggaaactgattctcctttaagttcttgacaacattactaacacccattagctgctataactatgtatttatatcatactatctcctgacttttcactctcaaaaatagcaccactgacttcacgtatggcagatcagtttgttttccgccggtcaagccaatagctatcgagagtagacaggtacttggacttggttgtctaagaaaacaggttactaagctttatccatagttgccttctgattatgctcagggtgtggcaacattttccctggcaagaggagcaatctcctctccttcaatgccaggttcactgccagccaccccgaggctcaacaacatcttctcccacaaccttgatggtcccttccatgaaaaatcttgtgccatacaattctggatcatttctttcagtgcttgagtcccatatgttgcaagagctctcttgacagtttttaccaccttaatcacatcacttggatccacttcatcacattcaacattg

SEQ ID NO: 20891 - DNA, 759 bp, Gossypium hirsutum
  Clone ID: GOSHI-09MAY01-C19_52
tcgcccacgcgttcgcccacgcgttcgcccacgcgtccgcggacgcgtgggaaaaatacagtacttatggtaatcatggtgaggaacaagtcagttttcgtagttttgctcttttctcttttcctttcctttggcttgctttgctctgccaaagacttccccggcagaagaagcgaggatgatcctcgacagaggtacgaggactgccagaggcgatgccagtcggagacacgtggacaaacggagcaagacaagtgtgaagacaggtgtgaaaggcagtttaaggaggagcagcagcgtgacggagacgatcctcagaggagataccaggattgccgacaacactgccaacaggaagaaagaaggctgcgtccacagtgcgaacaaagctgccaggaacaatacgagagacaacagcagcagcagcctgacaagcgattcaaggagtgtcaacaccgttgccaacggcaagagcaagggccccgaccggaagcaacaatgtgtgaaggaatgcagggaacagtaccaagaggatcccatggaagggagagagagaaaacaagtggagagaagaagaagaggaggaaagtgacgaatgagagcaacaacaaaggacaaccctactacttcatcgagatcgtccaagacgatcagggaagacatgcaattaagtctcagagttgtgcaacatatactaggctacagtcgatgcattaacaaccaattgttcaacatgccggaatactgatacgaagaatc

SEQ ID NO: 20892 - DNA, 1236 bp, Gossypium hirsutum
  Clone ID: GOSHI-09MAY01-C19_53
ttcacgcgtccggctgatttagtttaagaaaacatttccttagagcataaaagaaaatttacgaacatgccgggtgtcaatcctgaaattgagttcccagccattgagttccgttcatcggatttgaagcgaggaaccgaagggtggaaccgtttgtgcaagagggttcaacgggcttgtgagactttcggttgtttcgaggtggtatacgaaaaggtatccacgaaacttcgagaggatgcgtttgggttgatgaaagaaatggttgagctcccagtggagacgaagcagaagaataatagtcccatgccttaccatggttgggttggaccttgcaagcaggtttctgtgttgtatgaaggctttggagttggagatgcctccaactatgactctgttaaaagttttgctcaacttatgtggcctaatggtcacccacacttttctgacactattcataccctagcgacgcaaatggaggatttgaacaagttaatttggttaatgttaattgatagttatggattaggggatgactcattgaagatgaactacacaacgttagtgcggatgatgaaatatatggcccctccgccaggggagtatgagagaggactctttgctcatactgataaaccagtaagcacactcatttgtgaggatcaaatttcagggctggaaattgaggtcaatgatggtcaatggatcaagctgactaatttatctccttcttcctttgtatttgtggttggagatcctctcaaggcttggagtaatgggagattgaaatcagtgaatcacagagtgatgatgagcggagacaaagatcgatactctatagcagcttttgtcattccaaatgagggtactataatcaagacacccaaagagtttatagatgaccaacatcctcggcttttcaaggacttagatttcatggagttcttcctttttgccttttccgacccagcaaggcacatcgacaacggggagttgctccatgtctttgctggcctctcaccatcagtttccaattaaaattatgctcatatagacaagtaaaagtttggttttggttttaaattaatattacaaataataaattgagtcctatactcgagatctacgttctcgaactgtattaccatgttatattttgttataattgtgtactacaaaatctactgtgttgagtaatgttggtgtattgaatcaataagattgcagttcatggac

SEQ ID NO: 20893 - DNA, 1327 bp, Gossypium hirsutum
  Clone ID: GOSHI-09MAY01-C19_54
tcacgcgtccggctaatttagttcaaggttaaacctttccttgagagtataaaaaaaaattaagaacatgggtgtcactatcaatgctgagattgagtttccagccattgagtttcgttcatcagatttgaagcgaggaaccgatggatggcgccatttgtgcaaaaaggttcaagaggcttgtgagaaattcggttgttttgaggtggtgtatgatacgatatcgacgaaagttcgagaagagacttttgggttgatgaaagaattggttgaggtcccggtggaacggaaacaaaagaacactagtcccatgccttaccatggctgggttggaccatgcgagcaagtttctttgttgtatgaaggcttcggaattggaaatgcctccaactatgattgtgttaaaagttttactcaacttatgtggcctgaaggtcacccacacttttgcgacactatatataccatgggaacacaaatggaggagctaaacaagttaatctggttaatgctaattgatagctatggattaggagatgactcactgaagttgaactacacaacattggtgcggatgatgaaatacatggctcctccaccaggggagtatgagagaggactttttgctcatactgataaaccagtcagtacacttatttgtgaggatcaagtttcaggattggaaattgaggtcaacgacggccaatggatcaagttgaccaatctatctccttcttcttttgtttttgtagttggagatcctctcaaggcatggagtaatgggaggttgaaatcagtaaatcacagagtgatgatgagcggagacaaagatcgatactctatagcagcctttgtcattcccaaatgagggtacctataatcagggacacccgaagagcttatagatgaccaacatcctcggcttttcaaggacttcgatttcatggatttcttcctttttgccttttccgacccagcaaagcacatcgacaacggggagttgctccatgtctttgctggcctctcaccaccagtttccaattaaaatcatgcccatatcgacaagtaaaatccctgttatggcttaaaatcaatgttacaaataataaactgagttctatactcgagatttgcgttcttgtattgtactactatgttatggttagtaataattttataattgtattgtaccaaaggttactaaatattgcacagtggcgtttatacatatgaacttttcgatgaagcaattatatcgagctctttctgatatatggagtttcagaaacagaaaggtggagctattggtgaaaaaatatgaacctat

SEQ ID NO: 20894 - DNA, 1226 bp, Gossypium hirsutum
  Clone ID: GOSHI-09MAY01-C19_55
aaacatttccttagagcatagataaaaaaaaataagaacatgggtgtcaatgctaaaattgaggtcccagtcattgagttctgttcatcggatttagagcgaggaactgatgggtggcgccatttgtgcaagagggttcgagaggcttgtgaaacttatggttgttttgaggtggtgtaccaaagggtatcaaaaaaagtccgagaggagatgttcgggttggtgaaagaattggtccaggtcccattggagaggaaacaaaagaacgctagtccgttgccttaccatggctgggttggaccatgcagtcaagtttctttgttgtatgaaggctttggacttggagatgcctctaattatgactctgttaaaagatttgctcaacttatgtggcctgatggtcacccacgcttttgtgacactgtacacacattggcgacacaaatggaagagttgaacaagttaatttggttaatgatatttgaaagttacggattaggagagaaatttgagtcactaatgataaactataaaacattggtgcggatgatgaaatacatggcaccttcaccagggagtatgagagtggactctttgctcatacggaaaagccagttagcacagtcatttgtgaggatcaggtttcagggctagaaattgaggtcaaggacggccaatggatcaagttatctaatttatctccttcttcttttgtcttcgttgttggagatcctctcaaggcatggagtaatgggagattgaaagcggtgaatcatagagtgatgatgagcggagataaagatcgatattcaatagccgccttcgccattccaggtgagggtaccataattaaggcacccaaagagcttatagatgagcaacatcctcagctttacaaggactttaatttcatggacttctttcgttttgccttttccgaccgcgcaaagaacatcgaatccggccaacaactccacgcctttgcttctctctcaccaccaatttccgattaaaaacatgcccgctttgacaagttaaagcccggttttcgctcaaaattgaagttacatataataaattgagtcctttaccatattactataatcatgattttcgttcttgtactgtattactatgttataatttgcaataatcgcgcaattgtatcgtgttaaatctatcatgtattgttgtttaaaaattataataatgcgcgtcgattcttg

SEQ ID NO: 20895 - DNA, 1852 bp, Gossypium hirsutum
  Clone ID: GOSHI-09MAY01-C19_56
caccacacaccaccaactgccaccaccggagggcctcgccgacgaccggtggtgaaaggtagaagcaaatcaagaaagccttttgtttcccttgaaaaagatgggtcaggggctgagttgtggggcgagtcaagagaatggattgtttagtgcagttaaagttggagactttgaaaccgtggaagctttgttaaagagagaacccagtcttttacatcataccactgtttatgatcgccattctgctcttcatatagctgctgctaatggccagatcgagattttggccatgcttttggataaatccatgaacccagatgcggtgaatcgtaacaagcagactccacttatgttggctgcaatgcatgggaagatctcctgtgtgaagaagctcattgaagcgggggccaatatcttaatgtttgattccctccatggaagaacttgcttgcactatgcagcctattatggccactttgactgccttcaagccatcctctctgctgctcaatctagccctgttgctgtttcatggggatatgcacggtttgtgaatataagagacgctaggggagccactcctttgcacttagcagctcgtcaaagacggcccgaatgcgttcatatcctgttagataacggtgctcttgtttgtgcttcaaccggtggatacggttgtccaggaagcacccctcttcatttggctgctagaggtggatctctcgattgtatacgtaagttgttggcgtggggtgcggatcgtcttcaaagagatgcaacagggagaataccgtatattgttgctcttaagtacaaacatggagcatgtgccgctctgttaaatccgtcatctgccgaacctcttgtctggccagcacctttaaagttcattagtgagctcaatgacgaggcaaaggtactattagaacaggccttaatggatgcaaacagggaaagggaaaagaacatcttgaaaggaacagcttactcacttctatcaccgtcaccttcccgctctgattctgggttagacgacagtatttctgaggttagtgatgctgaactatgctgcatatgcttcgagcagatctgcacgatcgaagtccaagactgtggtcaccagatgtgcgcacaatgcacattggccctttgctgccataacaagccgaaccccacaactgcaagcgtaacacccccagtctgccccttttgccgcagcaccattgtccgattggcagtagccaagataaaagattgcgacggcgatgttggagaggacggtagttccccgaaggtgagaagacggaggaagtcgaggaatttcagcgaggggagcagcagtttcaagagcttatctgcagttggatcatttaacaagatggggaggattgcagcagaaaatgaatggattgataagccttgaaaaaatgggggggcatttttggcagctcagtttgaaacattcaaattgttgaatgtaggatataattaaatcccttatcccaatggaaaaatgcaatgaagaaatgatgagtgaggagtggacccatatggtatatacgatagaaaagttgggtccatttggtaattgcagatttttttaggtgaaaataagcaaaagaaattgcaggtttggggttggtgagtggggtcaatattgttgtaatatttgttttacttgaggttgaagttgtagcattgggtctttagattaaatatttaagacatttctaaacatctctttaatggctgctttatgaaaattcgttgaagcattccacctttgaaagggtctttgatttgggtcaaatcaagaattaagtcccacctatatatatatacctatatttta

SEQ ID NO: 20896 - DNA, 1181 bp, Gossypium hirsutum
  Clone ID: GOSHI-09MAY01-C19_57
atcccatgggtataaagcactcgcatccctttccaatttacccgagcaccttctctccactcagccaactgctcgctcgctcacctccctccttggcaccatgaccacctgcagccgccagttcacctcctccagctccatgaagggctcctgcggcatcgggggcggcatcgggggcggcatcgggggcggctccagccgcatctcctccgtcttggccggagggtcctgccgcgcccccagcacctacggcgggggcctgtctgtctcctcctcccgcttctcctctgggggagcctatgggctggggggcggctatggcggtggcttcagcagcagcagcagctttggtagtggcttcgggggaggatatggtggtggcttgggtagtggcttgggtggtggctttggtggtggctttgctggtggtgatgggcttctggtgggcagtgagaaggtgaccatgcagaacctcaacgaccgcctggcctcctacctggacaaggtgcgtgctctggaggaggccaacgccgacctggaggtgaagatccgtgactggtaccagaggcagcggcccgctgagatcaaagactacagtccctacttcaagaccattgaggacctgaggaacaagattctcacggccacagtggacaatgccaacgtccttctgcagattgacaatgcccgtctggccgcggatgacttccgcaccaagtatgagacagagctgaacctgcgcatgagtgtggaggccgacatcaatggcctgcgcagggtgctggatgaactgaccctggccagagctgacctggagatgcagattgagagcctgaaggaggagctggcctacctgaaaaagaaccacgaggaggagatgaatgccctgagaggccaggtgggtggagatgtcaacgtggagatggacgctgcacctggcgtggacctgagccgcattctgaacgagatgcgtgaccagtatgagaagatggcagagaagaaccgcaaggatgccgaggaatggttcttcaccaagacagaggagctgaaccgcgaggtggccaccaacagcgagctggtgcagagtggcaaaagcgagatctcggagctccggcgcaccatgcagaacctggagattgagctgcagtcccagctcagcatgaaagcatctctggagaaca

SEQ ID NO: 20897 - DNA, 1390 bp, Gossypium hirsutum
  Clone ID: GOSHI-09MAY01-C19_58
ccccccctttttttttttttttttttttttttttttttttttttttttttttttttttttttttttttttttttttttttttttttttttttttttttttttttttttttttttttttttttttttttttttttttttttttttttttttttttttttttttttttttttttttttttaagctcaaatatgatgcaagcattcattcacgtaagaagacaccttaagtagaagttgaacattttatcttatttcacattgctcactactcataaaaccatgcagagaaactgattctctttttaagttcttgacaacattactaacacccattagctgctataactatggatatatatcatactatctcctgacttttcaccctcaaaaatagcactactgacttcacgtatggcaggtcagtttgttttccgccggtcaagccaatggctatcgagagtagacaggtacttggacttggttgtctaagaaaacaggttactaagctttatccatagttgccttctgattatgctcagggtgtggcaacattttccttggcaagaggagcaacctcctctccttcaatgccaggttcactgccagccaccccgaggctcaacaacatcttctcccacaaccttgatggtcccttccatgaaaaatcttgtgccatacaattctggatcatttctttcagtgcttgagtcccatatgttgcaagagctctcttgacagtttttaccaccttaatcacatcacttggatccacttcatcacattcaacattgaaagctcccatttggaaccctgtgaatccttccttgaccgtgtcaacaagtccaccagtagaggcaactatcgaaacagttccatatcgcacagcatgcagctgaatgagaccgcatggttcgaatctactagggaccaaaatgtaatcagcaccagcaataatcatatgggccaatgggacattgaatttggctactgctctaacgttgtcagggtattggatctccagctgctcaatctgcttctccatggcctttttgcctgtgccaaggactacaatctggcaattttcagcaactaatttcggaatagcttctgccaaaatatctgaacccttctgctcttctagcctaccaatgaatccgatcaaaggaacatctccgtcgcaaggcaatcccacctcagcttgaagagcttcctttaacaatggctttgccttcattacctgcattgacagttactaaaaaacgcgtctcctaataccacaaccaacggggaaactggatgctatagaaagcacttacagttgttgcatcatatttgacactgatgtatttgtcagaggcaggatccattcttgaacaccagcggacgcgggg

SEQ ID NO: 20898 - DNA, 1108 bp, Gossypium hirsutum
  Clone ID: GOSHI-09MAY01-C19_59
atctcagccttcctgagcaccttcctttctttcagccaactgctcgctcgctcacctccctcctcggcaccatgaccacctgcagtcgccagttcacctcctccagctccatgaagggctcctgcggcatcgggggcggcatcgggggcggctccagccgcatctcctccgtcctggccggagggtcctgccgcgcccccagcacctacggcgggggcctgtctgtctcctcctcccgcttctcctctgggggagcctgcgggctggggggcggctatggcggtggcttcagcagcagcagcagctttggtagtggcttcgggggaggatatggtggtggcttcggtggtggcttcggtgctgggggtggtggcttgggtggtggcttgggtggtggcttgggtggtggctttggtggtggctttgctggtggtgatgggcttctggtgggcagtgagaaggtgaccatgcagaacctcaacgaccgcctggcctcctacctggacaaggtgcgtgctctggaggaggccaacgccgacctggaggtgaagatccgcgactggtaccagaggcagcggcccagtgagatcaaagactacagtccctacttcaagaccatcgaggacctgaggaacaagatcattgcagccaccattgagaatgcgcagcccattttgcagattgacaatgccaggctggcagccgatgacttcaggacaaagtacgagcacgaactggccctgcggcagaccgtggaggccgatgtcaatggcctgcgccgggtgttggatgagctgaccctggccaggactgacctggagatgcagatcgaaggcctgaaggaggagctggcctacctgaggaagaaccatgaggaggagatgcttgctcttcgaggtcagagcggtggagatgtgaacgtggagatggatgctgcacctggcgtggacctgagccgcatcctgaatgagatgcgtgaccagtatgagcagatggcagagaaaaaccgcagagatgctgaggcctggttcctgagcaagaccgaggagctaaacaaagaagtggcctccaacagcgaactggtacagagcagccgcactgaggtgac

SEQ ID NO: 20899 - DNA, 1369 bp, Gossypium hirsutum
  Clone ID: GOSHI-09MAY01-C19_60
cccacgcgtccgcccacgcgtccggctgatttagtttaagaaaacatttccttagagcataaaagaaaagttacgaacatgccgggtgtcaatcctgaaattgagttcccagccattgagtttcgtttatcggatttgaagcgaggaactgaaggatggaaccgtttgtgcaagagggttcaagaggcttgtgagactttcggttgtttcgaggtggtatatgaaaaggtatcgactaaactccgagaggatgcgtttgggttgatgaaagaaatggttgagcctcccagtggagacgaaacagaagaataatagtcccatgccttaccatggttgggttggaccatgcaagcaggtttctgtgttgtatgaaggctttggagttggagatgcctccaactatgactctgttaaaagttttgctcaacttatgtggcctaatggtcacccacacttttctgacactattcataccctagggacgcaaatggaggagttgaacaagttaatttggttaatgttaattgatagttatggattaggggatgactcattgaagatgaactacacaacgttggtgcggatgatgaaatatatggcccctccaccaggagagtatgaaagaggactctttgctcatactgataaaccagtaagcacactcatttgtgaggatcaaatttcaggactggaaattgaggtcaatgatggtcaatggatcaagctaactaatttatctccttcttcctttgtatttgtggttggagatcccctcaaggcttggagcaatgggagattgaaatcagtgaatcacagagtgatgatgagcggagacaaagatcgatactctatagcagctttcgtcattccaaatgagggtactataatcaagacacccaaagagtttatagatgaccaacatcctcggcttttcaaggacttagatttcatggagttcttcctttatgccttttccgatcctgcaaggcacatcgacaacggggagttgctccatgtctttgctggcctctcaccaccagtttccaattaaaatcatgctcatatagacaagtaaaagtttggttttggttttaaattaatgttacaaataataaattgagtcctatactcgagatctacgttctcgaactgtattaccatgttatattttgttataattgtgtactactaaatctactatgttgagtaatgttggttttatgaaatcaataagattgcagttcatggactgaacaagacgcctactcattgaacttcaagatttgaagccatgcatgcattgatgtttgaatttgagagctaattacacaactttattattataaaataattgattgagttacgagtc

SEQ ID NO: 20900 - DNA, 951 bp, Gossypium hirsutum
  Clone ID: GOSHI-09MAY01-C19_61
atgcccaggccaagcaagcttctgtctgcacctgctctcaatcctgctctcactatgagcctccgcctgcagagctcctccgccagctatggaggtggttttgggggtggctcttgccagctgggaggaggccgcggtgtctctagctgttcaactcggtttgtctctgggggatcagctggaggctacggaggcggcgtgacctgtggctttggtggaggggctggtagtggctttggaggtggctaccgaggtggccttggaggtggctttggtggggggttatgctggtgggctttgttgattttggtgcttgtgatggtggcctcctcactggcaatgagaagatcaccatgcagaacctcaacgaccgcctggcttcctacctggagaaggtgcgcgccctggaggaggccaacgccgacctggaggtgaagatccgtgactggcacctgaagcagagcccagctagccctgagcgggactacagcccctaccacaagaccattgaagagctgcgggacaagatcctgaccgccactattgaaaacaaccgggtcatcctggagattgacaatgccaggctggctgcggatgacttcaggctcaagtatgagaacgagctggccctgcgccagagcgtggaggctgacatcaacggcctgcgccgggtgctggatgagctcaccctgtctaagactgacctggagatgcagatcgagagcctgaatgaggagctggcctacatgaagaagaaccacgaggaggagatgaaggaattcagcaaccaggtggtcggccaggtcaacgtggagatggacgccaccccgggcattgacctgacccgcgtgctggcggagatgcgggagcagtacgaggccatggcagagaggaaccgccgggatgctgaggaatggttccacgccaagagtgcagagctgaacaaggagg

SEQ ID NO: 20901 - DNA, 1670 bp, Gossypium hirsutum
  Clone ID: GOSHI-09MAY01-C19_62
ggagagctagatcttagccatttccctttccacttccatcgcagatcattcctatctcgattctgaggaagatcatggctttttctgggtcctcctaagagttagcttctagagcttcctattctttggggcatctatgtgttccgcttatctatctttgatgctttccccttctctttcgttctccctctcctttgagacgctgagtttattttccttgtctccttcggttgaagttcgctttcgttcttgactcatgtttactttgagtccttctatattgttccgggagttgttgtctaagtccctgctagttgctctgagttctaggctatccttgtcttctaggtttagctaatcattgcagtgcttcaccgccctgttaatatccctggactattcgaggtattcttcccagctggtagcctacgccctcagtcatatctccgacctttatcgtgaaatctgacctgccttcaatacacgaagtgagcagctagacgagctgttggtgggaggcaaagcctcgaagcagcaggacagggaatgttccgtaagccagccaggaacaaataagggcattgagccaaaactacttaccaaggagaaagtggcgagagattcgccttcaacttattgagccaaacccctcgctactccaaccaaaacggccgcttcttcgaggcttgcccacgtgaattccggcaactcagggacatcaatgtcaccgtttcagccttgcaattaaaccaaggatcaatctttgtgccgcactacaattcaaaggctacattcgtgatccttgttaccgaaggaaatggatacgctgaaatggtttctcctcatcttcctaggcaaagctcatatgaagaagaagaagaagaagacgaagaagaagaacaagaacaagaagaggaaaggagaagtggacaatacaggaaaataaggtcccggttgtcgcgtggagacatatttgtagtcccagcaaactttccagttacattcgttgcatcccaaaaccagaacctgaggatgactgggttcggtctttacaaccagaacattaacccagaccataaccagaggatcttcgtggctgggaaaatcaaccatgtgagacaatgggatagccaagccaaggagttggcctttggggtgtcatcgaggttggtggatgagatattcaacagcaacccacaagagtcttacttcgtgtctcgacagaggcagcgtgcatctgaataaagagttaaaggcaataataatcacatagtctcgtgtttatggactaatgtgaaattttctagttttaagcaggcatgtaatgaaataaaaatggtgacctatgtaaaggaggagacccttgttttgtagtgcaataacttgtatgaacttttgagtgcgtttttttgtctttctatgttaagggaataaaatgttaagtacttaagtcaaaaaaaaaaaaaaaaaaaaaaaaaaaaaaaaaaaaaaaaaaaaaaaaaaaagaaaaacaatataaaaaataaaagataacgtccccgtgcatgcaacgaaataattattcattattgcaacctaaattaaatttactggccggaggtataaaacgtggggggtgggaaaactaaaggcgtatacttaatttaaatcgtttgcagtatattaccttt

SEQ ID NO: 20902 - DNA, 1906 bp, Gossypium hirsutum
  Clone ID: GOSHI-09MAY01-C19_63
cccacgcgtccgcccacgcgtccgcccacgcgtccgcccacgcgtccgaaaaaatacagagcttatagtaatcatggtgaggaacaagtcagttttcgtagttttgctcttttctcttttcctttcctttggcttgctttgctctgccaagagacttccccggcagcaagcaagcgaggcatgatcctcaacagaggtacgaggactgcgcggaagcgatgccaattggagacacgtggacaaacggagcaagacaagtgtgaagacaggtgtgaaacgcagttgaaggaggagcagcagcgtgacggcagaagatcctcagaggagataccaggattgccgacaacacttgccaacaggaagaaagaaggctgcgtcctacattgcgaacaaagctgcagggaacaatacgagaaacagcagcagcagcagcctgacaagcaattcaaggagtgtcaacagcgttgccaatggcaagagcaaaggccccgaacgggaagcaacaatgtgtgaaggaatgcagggcaacagtaccaagaggatcccatgggaggggagagagaggaaaacaagtggtgagaagaagaagaagagggaaagtgacgaaggagagcaaccaacaaaggaacaacccttactacttccatcgcagatcgttccaagaacgattcaggggaagaacatggcaatttcagagtcctccagaggtttgctgacaaacatcatttacttaggggcatcaacgagttccgcattgccattttagaagcaaaccccaacactttcgttctcccacaccattgtgacgcggagaaaatttacgttgtcactaacggaagaggaacagttactgttcgtgacacatgaaaacaaagagtcatacaatgtagttcctggagttgtagtaagaattccagcaaggaagcactgtgtacttggccaaccaagacaacagggaaaagctaaccatagcagtgctccaccgacctgtcaataacccctggacaattccagaaattcttccctgctggacagggaaaatcctcagtcatacttacgaatcttcagccgtgaaattcttgaggctgtcttcaatacacgaagtgagcagctagacgagctgtttggtgggaggcaaagccatcgaaggccagcagggacaggggaatgttccgtaaagccagccaagaacaaataagggcattgagccaaggagctacttcaccaagggggaaaggtagcgagggatacgccttcaacttattgagccaaacccctcgctactccaaccaaaacggccgcttttacgaggcttgccctcgtaatttccagcagcaactccgagaagtggattcctccgttgttgccttcgaaataaacaaagtacttaagagccaaacaaccctttctttccctccttaattccattacaatacatctcttcacactaatcaaaatcatcccttttttttacagggatcgatcttcgtaccgcactacaattcaaaggctacattcgtggtcctcgtcaccgaaggaaacggccacgtcgaaatggtctgccctcacctttctaggcagagctcacactggtcctcccgagaacaagaagaacaagaagaacaagaagaacaagaagatgaaaggagaagtggacaatacaagagagtgagagcccagttatcaaccggtgacatatttgtagtcccagcaggccatccagtcacattcgttgcctaccaaaacaagaacctaagattgctcggattctgactctacaacgggccaagacaacaagaagatcttcgtggctgggaaaaccaacattgtgagacaatgggatcgccagtccaaaaaactatcttttggggtggagtcaacgtttgaggatgatgtattcaacaac

SEQ ID NO: 20903 - DNA, 2782 bp, Gossypium hirsutum
  Clone ID: GOSHI-09MAY01-C19_64
ccacgcgtccgcccacgcgtccgcccacgcgtccgcccacgcgtccggagctatcgtaatcatggtgagggaataagtcagcttgcgtagttttgctcttttctcttttcctttcctttggcttgctttgttctgccaaagcactttcccggcagaagaggcgacgatgatccttcgaagaggtacgaggcactgccggaggcgatgcgcaatgggatacacgtggacaaaaggagcaacagcagtgtgaaaaaagttgtaaaagtcagtatggggaggaaagatcaacagcagcgccaccgccctgaagatctcccagaggagatacgaggagtgtcagcaagaatgccgacaacaagaagaaaggcaacgaccacaatgccaacaaaggtgctttgaaacgattcgagcaagaacaacaacaatcccagaggcaattccaggagtgtcagcaacattgccaccagcaagaaccaaaggcccggaaagcgaagcaacaattgtgtgagggaatgcagggaaaggtaccaggagaatccatggaggggagagagagaagaagaagcagaagaggaggaaactgaagaaggagagcaagaacaaagccataacccctttccacttgcatcgccagatcattccaatctcgattcaagggaagaacatggcaatttcaggggtcctccaaaggtttgcttcaaggcatcctattcttaggggcatcaatgagttccgcttatctatcttagaagcaaacccccaacactttcgttctcccacaccattgtgacgctgagaaaatttaccttgtcaccaacgggaagagggaacgcttacgttcttgacacatgaaaacaaagagtcttacaatgtaggtacccgggagttgtagtcagagtcccagcagggaagcactgtgtaccttggctaaccaagacaacaagggaaaagctaatcatagcagtgcttcaccgccctgttaataaccctggacaattcgaggaattcttcccagctgggaagccaacgccctcagtcatatctccgagcctttagtcgtgaaattcttgagcctgccttcaatacacgaagtgagcagctagacgagctgtttggtgggaggcaaagccaccgaaggcagcagggacagggaatgttccgtaaagccagccaagaacaaataagggcattgagccaagaagccacttctccaaggggagaaaagtggcgagagattcgccttcaacttattgagccaaacccctcgctactccaaccaaaacgggcgcttctatgaggcttgcccacgtgaattccggcaactcagggacatcaatgtcaccgtttcagccttgcaattaaaccaagggatcaatctttgtgccgcactacaattcaaaggctacattcgtggtccttgttaacgaaggaaatggatacgttgaaatggtttctcctcatcttcctaggcaaagctcatatgaagaagaagaagaagaagacgaagaagaagaacaagaacaagaagaggaaaggagaagtggacaatacaggaaaataaggtcccggttgtcgcgtggagacatatttgtagtcccagcaaactttccagttacattcgttgcatcccaaaaccagaacctgaggatgactggggttcggtctttacaaccagaacattaacccagaccataaccagaggatcttcgtggctgggaaaatcaaccatgtgagacaatgggatagccaagccaaggagttggcctttggggtgtcatcgaggttggtggatgagatattcaacaacaacccacaagagtcttacttcgtgtctcgacagaggcagcgtgcatctgaataaagagttagaggcaataataaccacatagtctcgtgtttacggactaatgtgaaattttctagttttaagcaggcatgtaatgaaataaaaatggtgacctatgtaaaggaggagaccgttatgctggcagactatgtgatgctggtgcttgtgatggtggcctcctcactggcaatgagaagatcaccatgcagaacctcaacgaccgcctggcttcctacctggagaaggtgcgcgccctggaggaggccaacgccgacctggaggtgaagatccgtgattggtaccagaggcaggccccggggcccgcccgtgactacagccagtaccacaggacgatcgaggagctgcagaacaagatcctcacagccaccgtagacaatgccaacatcctgttgcagatcgacaatgcccgtctggctgctgatgacttccgcaccaagtttgagacagagcaggccctgcgcctgagcgtggaggccgacatcaatggcctgcgcagggtgctggatgagctgaccctggccagagccgacctggagatgcagattgagaacctcaaggaggagctggcctacctgaagaagaaccacgaggaggagatgaatgccctgcgaggccaggtgggcggtgagatcaatgtggagatggacgctgccccaggtgtggacctgagccgcatcctgaacgagatgcgtgaccagtatgagaagatggcagagaagaaccgcaaggatgccgaggattggttcttcagcaagacagaggagctgaaccgcgaggtggccaccaacagcgagctagtgcagagcggcaagagcgagatctcggagctccggcgcaccatgcaggccttggagatcgagctgcagtcccagctcagcatgaaagcatccctggagggcagcctggcagagacag

SEQ ID NO: 20904 - DNA, 2959 bp, Gossypium hirsutum
  Clone ID: GOSHI-09MAY01-C19_65
tgtagcctttgaattgtagtgcggtactaagatcgatcgtttgtttattccgaaggcaacaccgtagtaatccacttctcgaagttgctgctgttaattacgaggtcaagcctcgtaaaagcgcccgttttggttgcagtatgtaagtgtttggctcaataagttgaaggagtatccctcgctacctttcccccttggtgaagtagctccttggctcaatgcccttatttgttcttggctggctttacggaacattcactgtccatactgcgttcgatggctttgcctcccaccaaccagctcgtctagctgctcacgtcgtgtattgaagtcagcctcaagtatttcacgactgaagattcgtaagtatgactgaggattttcctgtccagcagggaagaatttctggaattgtccagggttattgacaggtcggtggagcactgctatggttagcttttccctgttgtcttggttggccaagtacacagtgcttcctgctggaattcttactacaactccaggaactacattgtatgactctttgttttcatgtgtcacgaacgtaactgttcctcttccgttagtgacaacgtaaattttctccgcgtcacaatggtgtgggagaacgaaagtgttggggtttgcttctccaatggcaatgcggaactcgcccacgcgtccgcccacgcgtccgcccacgcgtccgcccacgcgtccgcccacgcgtccgcccacgcgtccgacttatggtaatcatggtgaggaacaagtcagttttcgtagttttgctcttttctcttttcctttcctttggcttgctttgctctgccaaagacttccccggcagaagaagcgaggatgatcctcgacagaggtacgaggactgccagaggcgatgccagtcggagacacgtggacaaacggagcaagacaagtgtgaagacaggtgtgaaaggcagtttaaggaggagcagcagcgtgacggagacgatcctcagaggagataccaggattgccgacaacactgccaacaggaagaaagaaggctgcgtccacagtgcgaacaaagctgccaggaaccaatacgagagacaacagcagcagcagcctgacaagcgattcaaggagtgtcaacaccgttgccaacggcaagagcaagggcccgaacggaagcaacaatgtgtgaaggaatgcagggaacagtaccaagaggatccatggaagggagagagagaaaacaagtggagagaagaagaagaaggaggaaagtgacgaaggagagcaacaacaaaggaacaaacctttactacttccatcgcagatcgttccaagaacgattcaggggaagaacatggcaatttcagagtcctccagaggtttgctgccaaacatcatttacttaggggcatcaacgagttccgcattgccattttagaagcaaaccccaacactttcgttctcccacaccattgtgacgcggagaaaatttaccgttgtcactaacggaagaggaacaattacgttcgtgacacattgaaaacaaagagtcatacaatgtagctcctggagttgtagtaagaattccagcagggaagcactgtgtacttggccaaccaagacaacaggggaaaagctaaccatagcagtgctccaccgccctgtcaataaccctggacaattccaggaaattcttcccttctgggacaggaaaatcctcagtcatatttacgaatcttcagccgtgaaattcttgaggctgtcttcaatacacgaagtgagcagctagacgagctgtttggtgggaggcaaagccatcgaaggcagcagggacagggaatgttccgtaaagccagccaagaacaaataagggcattgaggccaagaagctacttcaccaagggggaaaaggtagcgagggatacgccttcaacttattgagccaaacccctcgctactccaaccaaaacggccgcttttacgaggcttgccctcgtaatttccagcagcaactccgagaagtggattcctccgttggtggccttcgaaataaacaaaggatcgatcttcgtaccgcactacaattcaaaggctacatttcgtggtccttgtcaccgaaggaaacgggcacgtcgaaatggtctggcctcacctttctaggcagagctcacactggtcctcccgagaggaagaagacaagaagaacaagaagaacaagaagaacaagaagatgaaaggagaagtggacaatacaagagagtgagagcccagttatcaaccggtgacatatttgtagtcccagcaggccatccagtcacattcgttgcctcccaaaacaagaacctaggattgctcgggttcggactctacaacggccaagacaacaagaggatcttcgtggctgggaaaaccaacaatgtgagacaatgggatcgccaggccaaggagctggcgtttggggtggagtcaaggttggtggatgaggtattcaacaacaacccgcaagaatcttacttcgtgtctggacagaatcggcgtggatttgatgagaggaggggaagtaataaccccttatcgtcgttcctggactttgcacgcttgttctaagtagtagttttgttagtaaggcatgtaatggtggaataaaataagggtggcctatgtaaagaggaagagccttgttttgttgtgtgttttggagtcctttggttttaaggaataaaataagagggaaatctttacttttttcagagaaaggaagaagaggaggccagaaggagagaggaagaggaagaagctaagagaagagaagaaaaagaggccaggaggagagaggaggaagaagaagctaggaggagagaggaggaagaagaagctaggaggagagaggaggaagaagaagcttggagggaagaggaagaggaggccagaaggagagaggaagaggatgctcggagga

SEQ ID NO: 20905 - DNA, 517 bp, Gossypium hirsutum
  Clone ID: GOSHI-09MAY01-C9_6
gttcaacacataatgatggataaagctgcagatatatggaaccgaatttctaagggtggatatctttatgtttgcggtgatgccaagggtatggcaagagatgttcatcgcactttgcacactattattcaggagcgggaggatgtggattcatctttggcggagtctaccgcgaagaaactccagatggacggacgatacctcagagacgtgtggtgatgggtataatttcttgtagcgttctttcaccagttcatctcagagaaaaaacgggtgggtttgatagtgatggcagaaagctaaactggtttttcatattgggagaagatctgctagatgttagatctttttttttttttctatttaaattctctaaatcttgaaataatactctaaatagaaggatcaattgttattggactttgccccgccattggaagttgtaataaggaacagtgtgatatagctagtttacatgcatgtgcaaacaatattaaaaaacttctcgtaggttatt

SEQ ID NO: 20906 - DNA, 757 bp, Gossypium hirsutum
  Clone ID: GOSHI-09MAY01-C9_4
gggaattgttcaacacaaaagatggataaagctgcattatatggaacctaatttctaagggtggatatctttacgtttgccgtgatgccaagggtatggcaagagatgttcatcgcactttgcacactattattcaggagcaggaaactgtggattcatcaaaggcggagtctatggtagtaagaaacatccagatgtgtaccggaacgcattatcctccattaggatagatgtgcgctgactgggctatatattctctgtgtagacgtctctgttcagccagtctcattctcagtagaaaaaacggctgggtttgatagtgatggcagaaagctaaactggtttttcatattgggagaagatctgctagatgttagatcttttggtggttctatttaaattttctaacatcttgaaataatactctaaatagaacgatcaattgtttttggactttgccccgccattggaagtggtaataaggaacagtgtgatgtagctagcttacaggcctgtgaaaaacatatttaaaaaactcctcgtaggttataatattctggattgtcagcatcattccactctttgtactgacataaataaataaatttgcacaataaaactggatttctgtcgcgatggtgaaagtggaactataatattcgatgaaagagttcgttctcttctgagacaagggcttattcttcagcttggcgcctgaccctgttacggggtattaccggccggagaactgtggggc

SEQ ID NO: 20907 - DNA, 699 bp, Gossypium hirsutum
  Clone ID: GOSHI-09MAY01-C9_3
gcgttttggaaacagaaagcagagccgggtggggggggggctggctaagctactgtgggagttattgttcttcagaacagcttctgcagtagctaataataacgttatatattatataaattttatacatcctttttaccctacgactccatatataagcaagtaaaaataaatatggctcgctgtggggggggctttaagttccttggtgcttctgtttttgatgctctttatgtctccatatcaaggagaggttactcaggtgcaccgccggcggcagtgacggctagctttggtaggcctggagcgatggggaaagtggaacgcccacgcgcccggaaagagtcgtcgtcgtcgtgacacatgggcgttattcttcagcttgggcgcctgaccctgttacggggtattaccggccggagaactgtggggctgagatcgatgcggcggatctccgggagatgatgttgcatcacagggttagatcacagtagaaacttgccaccgcatgtgatcaccgtagcagacccgagccagaatgttttgcagatgtttgggtcccttcgctttttgtttcggttttgggttcaaattcttttatcttaataatcggtagtatttcttatttaaaaaaaaaaataaaaaaagcggagttggaaaaaaaaaaattttttttggggtaccaaaaattaatttatt

SEQ ID NO: 20908 - DNA, 823 bp, Gossypium hirsutum
  Clone ID: GOSHI-09MAY01-C9_1
tcccacgcgtccgcccaacaaagagcaggaaaacaagaaaagcagagccgcatcactttttgctagctaagctactgtgggagttattgttcttcagaacagcttctgcagtagctaataataacgttatatattatataaattttatacatcctttttaccctacgactccatatataagcaagtaaaaataaatatggctcgctctgtttcttcctttaagttccttggtgcttctgtttttgatgctctttatgtctccatatcaaggagaggttactcaggtgcaccgccggcggcagtgacggctagctttggtaggcctggagcgatggggaaagtggaacgaagatatgcgatgaaagagtcgtcgtcgtcggagacaagggcttattcttcagcttgggcgcctgaccctgttacggggtattaccggccggagaactgtggggctgagatcgatgcggcggatctccgggagatgatgttgaatcacagggttagatcacagtagaaacttgccaccgcatgtgatcaccgtagcagagcagagccagaatgttttgcagatgtttgggtgcctttgtattttgttttggttttgagttcaaaatcttttatcttaataatcggtagtttttcttataaagagtgtagtgtgctgaactttaagctaaagcagaaaattcactaaattaccacttttacttcttctaagttagtttatatataaattatattattataacattaagattgaataattatgaaattagtaattaaatattttaagaataaatattaaaattatacatgttgatat

SEQ ID NO: 20909 - DNA, 644 bp, Gossypium hirsutum
  unsure (1)..(644): unsure at all n locations
  Clone ID: AI054479.1
ggaaaacaagaaaagcagagccgcatcactttttgctagctaagctactgtgggagttattgttcttcagaacagcttctgcagtagctaataataacgttatatattatataaattttatacatcctttttaccctacgactccatatataagcaagtaaaaataaatatggctcgctctgtttcttcctttaagttccttggtgcttctgtttttgatgctctttatgtctccatatcaaggagaggttactcaggtgcaccgccggcggcagtgacggctagctttggtaggcctggagcgatggggaaagtggaacgaagatatgcgataaagaagtcgtcgtcgtcggagacaagggcttattcttcagcttgggcgcctgaccctgtacnggngtattaccggccggagaactgtgggcttgagatcgagcggcggatctcggagatgatgttgaatcacagttagatcacagtagaaacttgcacngatgtgatcaccgtagcnaacagaccagatgtntgcgatgtngggtgcctttgatnntgntgggttgagttcaaatctttatctaataatcggagattcttataagatgatgtgctaacttagctaagcaganatcctaanaaaaaaaaag

SEQ ID NO: 20910 - DNA, 460 bp, Gossypium hirsutum
  Clone ID: LIB3135-002-Q1-K1-A10
cccacgcgtccgcaaagagcaggaaaacaagaaaagcagagccgcatcactttttgctagctaataataacgttatatattatataaatattatacatcctttttaccctacgactccatatataagcaagtaaaaataaatatggctcgctctgtttcttcctttaagatccttggtgcttctgtttttgatgctctttatgtctccatatcaaggagaggttactcaggtgcaccgccggcggcagtgacggctagctttggtaggcctggagcgatggggaaagtggaacgaagatatgcgatgaaagagtcgtcgtcgtcggagacaagggcttattcttcagcttgggcgcctgaccctgttacggggtattaccggccggagaactgtggggctgagatcgatgcggcggatctcacggagatgatgttgaatcacaggggtagatcacagtag

SEQ ID NO: 20911 - DNA, 470 bp, Gossypium hirsutum
  Clone ID: GOSHI-09MAY01-C99_11
cttacgcgtccgcttcacagatccaaaccctttaaaccaacagatccgttgttgaatttcaaagttgtttgttacaggaaatggctggtggaacagctccccctagaggaagtgcagcagcagccgcaagcatgcgtaggcggagaaccacaagtggtgcagcctcaggaggggctgctgggaccatgcttcaattttacacggatgatgcaccaggtctcaagatctcgccgaatgttgtgcttgtcatgagcatcggtttcattgcttttgttgccgttctacatgttatgggcaagctgtattttgttcgtagagaggctcgaaaggaatttgtcggccagaaaaagaaaatatcaacaggatttatttaggagtcttgagttgccaagcaaaactgtttctttttattattaaaaacaagtctattgtcaaaagtgcaattttgtttacattgttctacttgtttg

SEQ ID NO: 20912 - DNA, 737 bp, Gossypium hirsutum
  Clone ID: GOSHI-09MAY01-C99_10
cccacgcgtccgatttttctcattgatgagcatcaactggataaaaccctacgctctgccgaaccatgccatggtggggatgacatttccagcaattgtgggaaatagaccggcccggaatcgtcccagctttcgatcagctgcaaggagcatgggcaagaagctgggaaaggaagatgttacaggtttgagattaaccgatgatccaatgagtcttgacttaattctgcggagactaggatgtatatgatatattaattgtatcccgtatggtatgaataaaatatgtcttcttactgctaaaaaaaaaaaaaaaaaaaaaaaaatagaaaaaaaaaaaaaaaaaaaaaaaaaaaaaaaaaaaaaaaaaaaaaaaaaaaaaaaaaaaaaaaaaaaaaaaaaaaaaaaaaaaaaaaaaaaaaaaaaaaaaaagggggggcccctttttaagaagaaccaaattttcttcccccgggcttgcaaagaaaaaattttttttttggggcccccaaattaaattccaggggccggggtttaaaaaccgggggactgggaaaaacccgggggttcccaaatttaatcccttgggaaaaaacccccttttccccaggtggggtaaaaagaaaaaggccccccccgaatcccccttccaaaaatttccccacccttatgggcaatgggaaccccccctttaacgggccctttaaacccggggggggggggggttacccccaagg

SEQ ID NO: 20913 - DNA, 359 bp, Gossypium hirsutum
  Clone ID: GOSHI-09MAY01-C99_9
cccacgcgtccgctttttctattgctattatgttatttacagtagaaactctttgatggacttttattcttgtggttatttcaaagtagatttttacataatcatccatttatgttatgttatgaatgtcgcattgttacgatgtaacctttttcatgttatttctaacatttaataaggatggtaacgaaacgagatagttatatggatattggcttgtcttatccaattctgttttttgtttgcattgatgttgaaaatattcacgttcatacatgttggatatatatgtgtaactccacatgttttatactgttccaccttattttatttttattaatgagatttcgatttaatat

SEQ ID NO: 20914 - DNA, 625 bp, Gossypium hirsutum
  Clone ID: GOSHI-09MAY01-C99_8
ccacgcgttcggccacgcgttcgcccgccccgccgggaaatttcaagaaactgctctctctgtcttaacgctataatcattgaagaaaaatgggtttgaaggaggaattcgaggagtatgcggagaaagctaagacccttccccagaacactaccaacgacgacaagctcattctctatggactctacaagcaagctactgttggaccagtgaacaccagccgtcctggaatgttcaacatgaaggaaaagtacaagtgggatgcatggaaggctgttgaagggaaatcgaaggaggaagcaatgaacgattatatcactaatgtaaaacagctgcaagaggctgctgctgcatcttcttgacgtgtgtgtgagaatagaaaatggtgtaattttcaagccctttgatacctatgggtttgaaaaggtctaaaactatgaataagcaatgtactatgttttattgctattaagttatattaatgaattatggtttatttaaagtcagagtgtaaagtttttattgtacttatagtatgaatgtgttcaaactaatcgatgattatgggttttgtgctaatacaaaactacctaaatacctaaatttaggataagacaatgcaatg

SEQ ID NO: 20915 - DNA, 450 bp, Gossypium hirsutum
  Clone ID: GOSHI-09MAY01-C99_7
atgttgggaaaattttgtgggagatctcaatgaatcatcaccttgtgtgatcacctactgcttaccttcggggatttcttttatggttcatccctaccatttcgactgcgctgaaacctccatcatcagtggcaatggttgattgggactcgagtcccgacccggcttgtatttccttgaacttcgccatgacttgaatcattgtgggtcgtctccatggtcggtcatccaagcaagcacaggctacatttaagtgttgtaaaagttctatctctagactcggttcctctttcatgagctccagatcgaagatgtcacttattttaagttttgcatgttgtttcacccaccccgcaaggttgttatcaccgaaatcaacagaatctgtaggccttctacctgttagcaactcgagtaagactacaccgtaactataaacatcacctttcg

SEQ ID NO: 20916 - DNA, 926 bp, Gossypium hirsutum
  Clone ID: GOSHI-09MAY01-C99_6
gaaaaatcatgtgttgctggagggatccgtggaggcggttgatgaggaggatgaactgaagaggacaaagagcttgaccggtgatgatctagacgaactaaaggggtgtttagatctggggtttggcttcagctacgaggagattcctgagctttgcaacaccttgcctgcacttgagctatgttactctatgtctcagaagtacttggatgaccaccagcaccatgcatctcagacaccaccgctacccccgaacccgtcgccaattggaagccctcgcgtcctgcccacgcgtccgagaagatgttaaagcaaggcttaaattctgggcacaagcttgtggcctgcactgtcaaactgtgcaactaaaagattcatgaacaatcattggaaaaatgagaatgaatatttttctcattgatgaccatcaactggataaaaccctacgctctgccgaaccatgccatggtggggatgacatttccagcaattgtgggaaatataccaggccaaaattttaaaaatggatcagctgcaaggagcccgcgcgagccgctggaaaggaagatgttacagtggtgagagtctccagttgagcttcaccgactagttccggacctctgcgtttgctgagggttttctttctcacggaacggaaggctgcaaattacacgcattccactgagatggctcatctttgcgtatgttaatgtggtgttgaaggttacgttttggtatcagtttcattttgtggttgagaattgagataggaagaaaactcaaaacttatctgataatcacagcctagtttgaaacagtaagagaagggacgaaatttgactcggattggatttccgttattaggaaaagaggcattgagttgaaatatcaaagattattgatttggggtgatgtcaaagtttact

SEQ ID NO: 20917 - DNA, 466 bp, Gossypium hirsutum
  Clone ID: GOSHI-09MAY01-C99_5
tgaatcccgcgcgtccgcctttgttcggcccttcttctcctattctatctatccctaatgccttgaattttgaggtaaactgattcttgtaaccaatatgaatcttggtgggagttgttagggttttctttctcacggaacggaaggctgcaaattacacgcattccactgagatggctcatctttgcgtatgttaatgtggtgttgaaggttacgttttggtatcagtttcattttgtggttgagaattgagataggaagaaaactcaaaacttatctgataatcacagcctagtttgaaacagtaagagaagggacgaaatttgactcggattggatttccgttattaggaaaagaggctttgagttgaaatatcaaaatttattgattgggggtgatgtcaaagtttactcttctccagaaaatcacatcagcaaatagcagtttatgtttacgttttcattt

SEQ ID NO: 20918 - DNA, 653 bp, Gossypium hirsutum
  Clone ID: GOSHI-09MAY01-C99_4
cacacatcttggccgcggacagcacagctttataagcctgccttgatcgtgtatcgaagtacaagtctttatctcgcgtccggggaaaagcaggaaagcagaactagaacgagatggtaggattttcttcccaaacagaatcttgggttgccaccagaaactcaatctacgaatcccagaaagaggcagatagcttcgaattggatctaaaacgtctagatctgataaagatagatcaagaagacgagaataataatattaacagccaagataagattagcaccaccaagaagaacaagaagaaaaatcaggtgttgctggaggggtacgtggaggcggttgatgaggaggatgaactgaagaggacaaagagcttgaccggtgatgatctagacgaactaaaggggtgtttagatctggggtttggcttcagctacgaggagattcctgagctttgcaacaccttgcctgcacttgagctatgttactctatggtctcagaagtacttggatgaccaccagcaccatgcatctccagacaccaccgctgcccccgaacccgtcgccaattggaagatctctagtcctgttgaccatgtcagtcttttctcttttttaccatctttctttggtttatttttctatttgccatc

SEQ ID NO: 20919 - DNA, 754 bp, Gossypium hirsutum
  Clone ID: GOSHI-09MAY01-C99_3
gaactgctctctctgtcttaacgctataatcattgaagaaaaatgggtttgaaggaggaattcgaggagtatgcggagaaagctaagacccttcccgagaacactaccaacgacgacaaactcattctctatggactcttcaagcaagctactgttggaccagtgaacaccagccgtcctggaatgttcaacatgaaggaaaagtacaagtgggatgcatggaaggctgttgaagggaaaccgaaggaggaagcaatgaacgattatatcactaaggtaaaacagcagccgcaagcatgcgtaggcggagaaccacaagtggtgcagcctcaggaggggctgctgggaccatgcttcaattttacacggatgatgcaccaggtctgaagatctcgccgaatgttgtgcttgtcatgagtattggtttcattgcttttgttgccgttctacatgttatgggcaagctctattttgttcatagagagggttgaaaggaatttgttggccagaaaaaaaaatcaacagaatttatttaggagtctgagttgcaaagcaaaactgtttttttttttttgattaaaaacaagtctagtgtcaaaggtgcaattttgtttcaatggttaaaattggtttacattgttctacttgtttgaggaagatggtgcaaactcaatttcatataatgttatttagacaatgttatttctactcttcatttattttgaattatttgtaatcagcatttattttgact

SEQ ID NO: 20920 - DNA, 657 bp, Gossypium hirsutum
  Clone ID: GOSHI-09MAY01-C99_2
cccacgcgtccgaagaagctgctgttctctctctctctctttcccatagtttcacccgtcttttaatccatcgctcacaaaattatgggtttgaaggaggaattcgaggagcatgccgagaaagttaagaccctcccggccgccccttcgaacgatgacatgctcattctctatggactgtacaagcaagccactgttggaccagtgaataccggccgtcctggaatgttcaacatgagggaaaggtacaagtgggatgcatggaaggctgttgaagggaaatcaaaggaggaagcaatgggggattatatcaccaaagtaaaacaactgtttgaggctgctggaagttcttgatgtgtgtgtgtatgaccaatgaaactggtgtaatttcaagcccttgtcggttacttggggttttcattactatgaataaattatgtactctttttctattgctatatgttatttatagtagaaactccttgatttacttttattcttgtggttattacaaaggagatttttacacaaggatggtaatggaacggagcgagagcaattgcatgaattgtctcatccatttatttctgtcatgttatgaatgtcacattgttaccatgtactctttttcatgttatttccaatggtgatgaaccg

SEQ ID NO: 20921 - DNA, 836 bp, Gossypium hirsutum
  Clone ID: GOSHI-09MAY01-C99_1
acccggcccgacccaccgtcccccccgcgtccggtttctataaacaaagagaaactaggtgtgaaacaatggcgtcctcggatcttattggcaagctcgagactgatgtcgagatcgatatttctcccgaaaagttccaccatatgtggtgccacaggccgcaccatgtccaccacactagctctgaaaaagtacaaggatgcgatttacatgaaggtgaatttggaactcccggcgtcgttatctgctggagatatgtgcatgatggaaaggctaaaactgcaaagcaggtagttgaagttatggaccatgagaaaaagtcaataactttcaaaatgcttgaaggagatctgatggaggaatacaaaagcttcgtgattacaatccaaacttcccccaagagcgacggtaaaggcagtatagtgcactggactctggattatgaaaagctgcacgagggtattggacatcccgagtctctgctccagttctttatcgaactcacagcggacatggctgctcatctccgcaaggaaacttaattaatggatagaccatggcaagaaaatcccatgtcgaatcgtctgctattactattactatcagtactgatctaagaataaaactggcagctttgtactgtgttttcatttgaatatttgtatgctaggtttgattatgctgttatgagtgggggagcgcagcgttctgtttttatgtaatgaattaaatctactatgtgcttttatttgagtgctattatttaaatatggtttcctcaaaacccaaaccaaaaaaaaaaaaaaaaaaaaaaaaaaaataaaaaacccaaaccc

SEQ ID NO: 20922 - DNA, 435 bp, Gossypium hirsutum
  Clone ID: LIB3147-034-Q1-K1-E10
cggacgcgtgggctataaacaaagagaaatttggtgttaaacaatggcgtcctcggatctggttgggttgctcgagactgatgtcgagatcgatatttctcccgaaaagttccaccatatgtggtgccacaggccgcaccatgtccaccacactagctctgaaaaagttcacacaggtgattcacctggtcgtaaaatctcgacgaatggtgtgcttgtcatgagcatcggtttcattgcttttgatgccgatctacatgttatgggcaagctgtattttgttcgtagagaggcttgaaaagaatttgtcggccagaaaaagaaaatatcaacaggatttatttatgagtctgagttgcaaagcaaaactgtttctttttattattaaaaacaagtctattgtcaaaggtgcaattttgttacattgttctactt

SEQ ID NO: 20923 - DNA, 388 bp, Gossypium hirsutum
  Clone ID: uC-gsflnu33B055f12b1
ttgcctacgcgtccgcaagaaaatcccatgtcgaatcgtctgctattactattactatcagtactgatctaagaataaaactggcagctttgtactgtgttttcatttgaatatttgtatgctaggtttgattatgctgttatgagtgggggagcgcagcgttctgtttttatgtaatgaattaaatctactatgtgcttttatttgagtgaaaaaaaaaaaaaaaaaaaaaaaaaaaaaaaaaaaaaaaaaaaaaaagggaaaaaaaaaaaaaaaaaaaaaaaaaaaaaaaaaaaaaaaaaaaaaaaaataaaaaattaaaaaaaaagggggggccgttttaaaggaccaaagtttacttccccgggcttgcaagttaaaagttttt

SEQ ID NO: 20924 - DNA, 669 bp, Gossypium hirsutum
  unsure (1)..(669): unsure at all n locations
  Clone ID: LIB3543-053-Q1-K6-F10
gngnaactaggtgtgaaacatggcgtgctcgggtcttattggcaagctcgagactgatgtcgagatcgatatttcnntcccgaaaagttccaccatatgtggtgccacaggccgcaccatgtccaccacacnntagctctgaaaaagtacaaggatgcgatttacatgaaggtgaatttggaactcccggcgtcgttatctgctggagatatgtgcatgatggaaaggctaaaactgcaaagcaggtagttgaagttatggaccatgagaaaaagtcaataactttcaaaatgcttgaaggagatctgatggaggaatacaaaagcttcgtgattacaatccaaacttcccccaagagcgacggtaaaggcagtatagtgcactggactctggattatgaaaagctgcactgtcaaactgtgcaactaaaagattcatgaacaatcattggaaaaatgagaatgaatatttttctcattgatgaccatcaactggataaaaccctacgctctgccgaaccatgccatggtggggatgacatttccagcaattgtgggaaatataccaggccaaaattttaaaaatggatcagctgcaaggagcatgggaagaagctgnaaaggaagatgttacagtggtgagagtctncagttgagcttcaccaactag

SEQ ID NO: 20925 - DNA, 387 bp, Gossypium hirsutum
  Clone ID: uC-gsflnu33B126a01b1
tttcttgcgtccggccacgcgtccgaccacgcgtgcggccacgcgtccgtccacgcgtgcgtccacgcgttcgtccacgcgttcggccacgcgtccgaacttaattaatggatagaccatggcaagaaaatcccatgtcgaatcgtctgctattactattactatcagtactgatctaagaataaaactggcagctttgtactgagtttgcatttgaatatttgtatgctaggtttgattatgctgttatgagtgggggagcgcattgttttgtttttatgtaatgaattaaatctactatgtgcttttatttgagtgatattatttatatatgggttcataagatcattgagaccatcaaagaagttgtaaaaagggaatgtcctg

SEQ ID NO: 20926 - DNA, 540 bp, Gossypium hirsutum
  unsure (1)..(540): unsure at all n locations
  Clone ID: LIB3828-030-Q6-N6-A11
aaataaaccataattcattaatataacttaatagcaataaaacatagtacattgcttattcatagttttagaccttttcaaacccataggtatcaaagggcttgaaaattacaccattttctattctcacacacacgtcaagaagatgcagcagcagcctcttgcagctgttttacattagtgatataatcgttcattgcttcctccttcgatttcccttcaacagccttccatgcatcccacttgtacttttccttcatgttgaacattccaggacggctggtgttcactggtccaacagtagcttgcttggatgaccgaccatggagacgacccacaatgattcaagtcatggncgaagttcaaggaaatacaagcagggtcgggactcgagtcccaatcaaccattgccactgatgatnggaggtttcagcgcagtcgaaatggtagggatgaccataaaagaaatccccgaaggtaagcagtaaggtgatcacacaaggtgatgattcattgagatctcccacaaaattttcccaa

SEQ ID NO: 20927 - DNA, 391 bp, Gossypium hirsutum
  Clone ID: uC-gsronu33B156b02b1
gctgtttgtgaccctagaaaagatggaaagcaagctactgttggaccagtgaataccagccgtcctggaatgttcaacatgagggaaaagtacaagtgggatgcatggaaggctgttgaagggaaatcaaaggaggaagcaatgggggattatatcaccaaagtaaaacaactgtttgaggctgctggaagttcttgatgtgtgtgtgtatgaccaatgaaactggtgtaatttcaagcccttgtcggttacttggggttttcattactatgaataaattatgtactctttttctattgctattatgttatttacagtagaaactctttgatttacttttaaaataaaataatttttttttatatatatttattttaattttatatattat

SEQ ID NO: 20928 - DNA, 523 bp, Gossypium hirsutum
  Clone ID: LIB3828-008-Q1-K6-D11
gttgaattcaaagaaaggctggtggaaccgctccccctagaggaagtgcagcagcagccgcaagcatgcgtaggcggagaaccacaagtggtgcagcctcaggaggggctgctgggaccatgcttcaattttacacggatgatgcaccaggtctgaagatctcgccgaatgttgtgcttgtcatgagtattggtttcattgcttttgttgccgttctacatgttatgggcaagctctattttgttcatagagagggttgaaaggaatttgttggccagaaaaaaaaatcaacagaatttatttaggagtctgagttgcaaagcaaaactgtttttttttttttgattaaaaacaagtctagtgtcaaaggtgcaattttgtttcaatggttaaaattggtttacattgttctacttgtttgaggaagatggtgcaaactcaatttcatataatgttatttagacaatgttatttctactcttcatttattttgaattatttgtaatcagcatttattttgact

SEQ ID NO: 20929 - DNA, 353 bp, Gossypium hirsutum
  Clone ID: LIB3147-013-Q1-K1-C8
gagaaagttaagaccctcccggccgtcccttcgaacgatgacatgctcattctctatggagtgtacaagcaagccactgttggaccaatgaataccggccgggctggaatggtcaacatgagggaaaggtgcaagtgggattcatggaaagctgttgaaaggaaatcaaaggaggaagcaatggggggttttatttcccaaaggaaacaaatgtttttggcgtttcgagaaactttatgtgtgtgtgtattggccacaaaaatagtgttatattaaacccttgtgtgttgctagtggggttcattactatgaataaaaaatgtgctctttttctattgcggtatgtgatttat

SEQ ID NO: 20930 - DNA, 838 bp, Gossypium hirsutum
  Clone ID: GOSHI-09MAY01-C89_2
catttctttcatctttctttttctctctcccttcccccttcccccctcctcccgctctctctctctctctctctctctccaaaaggctacagaaaattgtttttatttatttatatttgtatgaaaaaaaccccaaaatttcccctcatttcttgcccagtttataaagagaaatctttgttttaacaggcaaaaggaagaaaataaaggataacataaacacaaaataaatttattcctttttttattacaatttttaatcttttgagtatgaatggtcttttacatcttgaagaaccagattgttctgagtttgttgaagttgatccaactggaagatatggccggtacaatgaaatccttggaaaaggggcttcattgacagtttatagagcattcgatgagtatgaagggattgaagttgcttggaaccaagtcaaactttatgattttcttcaaagccctgaagatcttgaaagactgtatttgtgagattcatccccttaagacattgaagcacaagaatattatgaagttctatacttcttgggttgacaccgcccgtttttgggctgcttatcttgacgacaagtggttcccttccttgagagctattggtatggctgaaggagaggatgcaaggaaagcagccatagggcaagtggaggaagggctgatgctgttagaggaggcatttgacaagtgcagccaagggcaggcattctttgggaaggatcaaattggatatctcgacataacatttgggtgctttttggggtggctaaaagtgacagaaaagatgagccggatcaagctgcttaatgaaatcaacactcct

SEQ ID NO: 20931 - DNA, 1046 bp, Gossypium hirsutum
  Clone ID: GOSHI-09MAY01-C89_1
cccacgcgtccgcccacgcgtccgaggttggaccgctagatgcaactagaaacttattggatgctgcagatgaaagcggtgacgagtgttagaaagtgtgaagtttcatctcttgggttctccttcaatttatatataaacacctgtagagtgaagacattcgtgactcttaaaagaaattgaccatggcaacgagtgatgccgaagtgaaagttttgggcacatgggcgagtccattcgtgatgagggtaaggattgccatgaacatcaagtctgtggcctatgaatttcatcaagagaggttatgggaaggcaaaagcgagcttctcctcaaatcaaacccagttcacagaaaggtccctgtcctcattcatggtgatgacaccatctgtgagtctctcattattgtccaatacatcgatgaggtttggccttctgctcccattcttccttctgatccccatgaacgtgccaccgcccgtttttgggctgcttatcttgacgacaagtggttcccttccttgagagctattggtatggctgaaggagaggatgcaaggaaagcagccatagggcaagtggaggaagggctgatgctgttagaggaggcatttggcaagtgcagccaagggcaggcattctttgggaaggatcaaattggatatcttgacataacatttgggtgctttttggggtggctaaaagtgacagagaagatgagtgggatcaagctgcttaatgaaatcaacactcctgctctgcttaaatgggctaacagattctgcaatgatgccgccgtgaaagatgtcatgcctgagaccgaaaagcttgcggagtttgctaagatgcttaggggcagagtgagagccactcccacatcttgaattgccaaagggagccatatttcttggctcttgaccatattttacatgcaattgtctcctttccggtttttctaaataaaagtatggcatttttaccccagtaatacaaaataataataacaataactcaagtgatatgcccatgagattagttatcaaaat

SEQ ID NO: 20932 - DNA, 463 bp, Gossypium hirsutum
  Clone ID: LIB3189-023-P1-K1-H5
cccgcgggtacggattcgcgattcgcgccacgcgtccgacttgcgactcttaaaagaaattaaccatggcaacgagtgatgccgaagtgaaagttttgggcacatgggcgagtccattcgtgatgagggtaaggattgccatgaacatcaagtctgtggcctatgaatttcatcaagagaggttatgggaaggcaaaagcgagcttctcctcaaatcaaacccagttcacagaaaggtccctgtcctcattcatggtgatgacaccatctgtgagtctctcattattgtccaatacatcgatgaggtttggccttctgctcccattcttccttctgatccccatgaacgtgccaccgcccgtttttgggctgcttatcttgacgacaagtggttcccttccttgagagctattggtatggctgaaggagaggatgcaaggaaagcagccatagggcaagtgga

SEQ ID NO: 20933 - DNA, 447 bp, Gossypium hirsutum
  Clone ID: LIB3197-020-Q1-M1-F10
cccacgcgtccggcaaagagtgatgccgaagtgaaagttttgggcacatgggcgagtccattcgtgatgagggtaaggattgccctgaacatcaagtctgtggcctatgaatttcttcaggagaggttatgggaaggcaaaagcgagcttctcctcaaatcaaacccagttcacagaaaggtccctgtcctcattcatggtgatgacaccatctgtgagtctctcattattgtccaatacatcgatgaggtttggccttctgctcccattcttccttctgatccccatgaacgtgccaccgctcgtttttgggctgcttatcttgacgacaagtggttcccttccttgagagctattggtatggctgaaggagaggatgcaattgtctcctttccggtttttctaaataaaagtatggcatttttaccccaaaaaaaaaaacaaaaa

SEQ ID NO: 20934 - DNA, 381 bp, Gossypium hirsutum
  Clone ID: LIB3197-020-Q1-M1-G9
ggcaaagagtgatgccgaagtgaaagttttgggcacatgggcgagtccattcgtgatgagggtaaggattgccctgaacatcaagtctgtggcctatgaatttcttcaggagaggttatgggaaggcaaaagcgagcttctcctcaaatcaaacccagttcacagaaaggtccctgtcctcattcatggtgatgacaccatctgtgagtctctcattattgtccaatacatcgatgaggtttggccttctgctcccattcttccttctgatccccatgaacgtgccaccgctcgtttttgggctgcttatcttgacgacaaggtatatgcatttgtgctttattcatataaaaagaagttattttttatgtgataattttt

SEQ ID NO: 20935 - DNA, 343 bp, Gossypium hirsutum
  Clone ID: LIB3197-059-Q1-M1-G9
tcctgctctgcttaaatgggctaacagattctgcaatgatgccgccgtgaaagatgtcatgcctgagaccgaaaagcttgcggagtttgctaagatgcttacgggcagagtgagagccactcccacatcttgaattgccaaagggagccatatttcttggctcttgaccatattttacatgcaagtgtctcctttccggcttttctaaataaaagtatggcatttttaccccagtccctacttttggagcgtttgactgtagattatggcaaagaaatccaagttggatttcactgaattaaagggcggccgatttatagaaatcaggtttacagaccctacc

SEQ ID NO: 20936 - DNA, 913 bp, Gossypium hirsutum
  Clone ID: GOSHI-09MAY01-C59_1
cccacgcgtcaatccccacggccagatttatcaagtgtgtcacggtcggtgatggagctgtggggaaaacttgtatgctcatttcatataccagcaatactttcccaacggattatgttccaacagtatttgataactttagtgccaatgtggtggtggatggcagcacagtgaaccttggcctatgggacactgccgggcaagaagattataataggctaaggccactgagttatagaggagctgatgtgtttttgttggccttttctcttataagcaaggccagttatgaaaacatctacaaaaagtggatcccagagctaagacattatgctcataatgtaccagttgtgcttgttggaaccaaactagatttgcgagatgacaagcagttcctcattgatcaccctggagcaacaccaatatcaacatctcagggagaagaactaaagaagatgataggagcagttacttatatagaatgcagctccaaaacccaacagaatgtgaaggctgttttcgatgctgcaataaaagtagctttgaggccaccaaaaccaaagagaaagccttgcaaaaggagaacatgtgctttcctttgaatattggatcattattacagtcaaaaacagttaacaaaagctgttgcagataaacactgaatctgctatagtttgtttttggtttacatatgttccacgtgaaactatgaagcatctctaagaaaacccaaactatcatatcaacccatcgatcaatgaatcgatttcaattttcgcagtataagttccttttaatcctttctttttacttcattttataacgaattctatggataatgttccctacaaacatgtcattacaatgtttaattataaattccattcttctattttactaaaaaaaaaaaaaa

SEQ ID NO: 20937 - DNA, 548 bp, Gossypium hirsutum
  Clone ID: LIB3584-056-P1-K2-A7
ctcttccctcagaatttttttctcttttgctagatcttaactataccagcgatacttaccgaacggattatggtccagacagtatttgataactttagtgccaatgtggtggtggatggcagcacagtgaaccttggcctatgggacactgccgggcaagaagattataataggctaaggccactgagttatagaggagctgatgtgtttttgttggccttttctcttataagcaaggccagttatgaaaacatctacaaaaagtggatcccagagctaagacattatgctcataatgtaccagttgtgcttgttggaaccaaactagatttgcgagatgacaagcagttcctcattgatcaccctggagcaacaccaatatcaacatctcagggagaagaactaaagaagatgataggagcagttacttatatagaatgcagctccaaaacccaacagaatgtgaaggctgttttcgatgctgcaataaaagtagctttgaggccaccaaaaccaaagagaaagccttgcaaaaggagaacatgtgc

SEQ ID NO: 20938 - DNA, 497 bp, Gossypium hirsutum
  unsure (1)..(497): unsure at all n locations
  Clone ID: LIB3543-030-Q1-K6-E12
aaaaanagataggaaacacctcctggggggggggaggagctccaaaacccaacannaatgtgaaagctgttttncgatgctgcaataaaagtagctttgaggccaccaaaaccaaanagaaagccttgcaaaaggagaacatgtgctttcctttgaatattggatcattattacagtggagggggggggggcttttttttttncacataaacactgtatctggtatatagtttgttttttgtttacatatgttccatgtgaaactatgaaggatctctaagaaaacccaaactgtcatatcaacctatcgatcaatgaatcgatttcaattttcgcagtttaaaaaaaaaaaaaaaaaaaaaaaaaaaaaaaaaaaaaaaaaaaaaaaaaaaaaaaaaaaaaaaaaaaaaaaaaaaaaaaaaaaaaaaaaaggggcggccctttttaaaagaatccaattttacttcccgcttccttccaaacntaatagttttttt

SEQ ID NO: 20939 - DNA, 688 bp, Gossypium hirsutum
  Clone ID: GOSHI-09MAY01-C49_6
cccacgcgtccgattaattttaattacaatttccaaaaccacgacaacaaggaatacgagcaccagaaaaccagaccctgattcgcttggctaaattgtcatttgacagaagcaaaccattggcttgtgcttgggattggattccactataaatagtatccagttagccttctacattcttcatcaagcacgaaaagagaaatacacaagaaaaaaaaaaaaaaacaagtgagcagataaattgaagacctttatttctgttaacatccattatgagtactgctggtcaagtcatccgttgcagagctgcggtagcatgggagtcggggaagccactgtcaatagaggaagtggaagtggcaccaccgcagaaggatgaagtccgtattaagatactcttcacttctttatgtcacaccgatgtctacttctgggatgctaagggacaaaaccctctgtttcctcgcatactagtcatgaagctggaaggattgtggagagtgtaggtgagggggtgactgatctaaaggccagtgatcatgttcttccatctttacgggagaatcaatgagtgtaccattggtgctcttagaaaatgcatgtggaaacaatttgttagaaagcagtgccagacttgaaatgattaatgccggaaaatccaggttttcctttaatgggaagccttttt

SEQ ID NO: 20940 - DNA, 675 bp, Gossypium hirsutum
  Clone ID: GOSHI-09MAY01-C49_5
cccacgcgtccgcccacgcgtccgcccacgcgtccgcggacgcatgggtggacccacgcatacatggacgcgtgggtcaagaggacattgctgagatgactggtggaggagtctaccgcaaggttgaatgtaccgggagcatccatgccatgatttatgcatttgaatgtgtacacgatggttggtgagttgcagagcttgtggaggttcctaacaaagacgatgcattcaaaacacatacagtgaatctacttaatgaaaggacttttaagggtactttatttggcaactacaaacactaaactgatattcctgctgtcggtgagagatacatgaacaaggatcttgaacttgacaagctcatgtctcactctgttcccttctctgagattaacggcgcgtgcgagttcatgcttgctggcgagggcctgaggtgcatgattcgcatggatgcataaggattggctggccatggatgaagggctttttgtcaagtatatgtgcattttaagggaataaataatgtaatgtaatgctacatcgttttgctgtatttaatggcaaatttttatcttatcaaaaaaaaaataaaaaaatataataaaaaaatatattaataataataataaaattaaaaaaatagtggtttggtttggaaattatattttaataatt

SEQ ID NO: 20941 - DNA, 1120 bp, Gossypium hirsutum
  Clone ID: GOSHI-09MAY01-C49_2
gtggaaagccgataacgtcaacgtcgtcaagaacagaagaaggaacgaagcaaaggcagctcttattctaatacaacacgcttaaggaaaaatcgccaaataaaataccactaccctcaaggaatctacagatctctgtccctctttctctacgtctcaaaccctaattccttaatttttacagaagatcgggggtttaatcgcggagaatcaaccatgtttaacaggcttttcgggaaacccaagcaggaagcaaatgctctaaccacgttagacaaattaaatgagacccttgaaatgcttgagaagaaggagaaagtacttgcgaaaaaggctgctgctgaggttgaaaaggccaaggaatttgccaaagggagaaacaagagagcggctatacagtgcttgaagaggaagagactatatgaacagcaaatagagcagcttggaaacttccagcttcgtattcatgatcaaatgataatgttagaaggtgctaaagccacaactgaaactgtagatgcattgagaactggagcagctgcaatgaaggcaatgcagaaagcaacgaatatagatgatgttgacaaaacaatggacgagatcaatgaacaaactgaaaacatgaaacagatccaagaagcactgtcaactcctattggagctgcagctgattttgacgaggatgaattggaggcagaactcgaagagcttgaaggtgctgagttagaagaacagcttctccagcctgcaacaacagctcctgcagcaccaattcatgtgcctgctggaaggcaaccggctcgtcctattcctcaaaagcacacagccgaggaagatgaactcgccgcattgcaggctgagatggctctttaaggcttacagtagagaactgatttttttttttgcgtggcctacggaaaagagacgccatatttgtattactgaatgtgtgcatttaaggtttgacagacaatgtacaaaaattatctgtactttgcttccttcaaaagaaaaccattgattctaagtccttgtacctatattgacttgccttcgtaatggcaacaaacttgggtgacaaaatcctattggaaaatgccttttggtgttttttacctct

SEQ ID NO: 20942 - DNA, 1662 bp, Gossypium hirsutum
  Clone ID: GOSHI-09MAY01-C49_1
accactccgtaaaccattgcgttgtggctttgcatattggactgcgctgatatagggatccgctataaatagtgtcagttagcgttctaccccccccctcccgcccgccgagagaaatacacaagacaaaagaaaaaaaaacaagtgatctgataaattgaagactttatttctgttaacatccattatgagtactgctggtcaagtcatccgttgcaaagctgcggtagcatgggagtcggggaagccactgtcaatagaggaagtggaagtggcaccaccgcagaaggatgaagtccgtattaagatactcttcacttctttatgtcacaccgatgtctacttctgggatgctaagggacaaaaccctctgtttcctcgcatactaggtcatgaagctggagggattgtggagagtgtaggtgagggggtgactgatctaaagccaggtgatcatgttctccccatcttcacgggggaatgcaaggagtgtccccattgcttgtcagaagaaagtaacatgtgtgatctcctccgaatcaacactgataggggtgaaatgattaatgacggaaaatccaggttttccattaatgggaagcctatctaccacttcctaggcacctctactttcagtgaatacactgttgtccatgtcggccaggttgccaagatcaatcctgaggctccgcttgataaagtttgtgttctaagctgcggaatgtccacagggtttggtgccactgtgaatgtagctaaacccaaaaagggtcaatccgttgcaatatttggactaggtgctgtcggtcttgctgctgctgaaggagcaagagtttctggggcttccaggatcattggtgtcgatttgaaccctagcagattcgaactagccaagaacttcggtgttacggagtttgtgaatccgaaagatcacaacaaacctgttcaagaggtcattgctgagatgacgggtggaggagtcgaccgcagtgttgaatgtaccgggagcatccaggccatgatttctgcatttgaatgtgtccacgatggttggggagttgcagtgcttgtgggggttcccaacaaagacgatgcattcaaaactcatccagtgaatctactgaatgaaaggactctcaagggtactttctttggcaactacaaacctcgaactgatattcctgctgtcgttgagagatacatgaacaaggaacttgaacttgataagttcatcactcactctgttcccttctctgagattaacaaggcatttgagtacatgcttgctggcgagggcctgaggtgcgtgattcgcatggatgcataaggattggctggccatggatgaagggctttttgttaagtatatgtgcattttaagggaataaataatgtaatataatgctacatcgttgtgctgtttttaatggtaaatttttatcttatcatgcatttctatgatcctctctagttgctttgctctgcatggttcttgttggagatagaattttcaaaaaatcattttaatttgttttagaaaatggaacatattgctgagcaaggtttgatgggataatccctaataacatgaaaatgtcatatgtgtaagatgtctaaacgaaacaaatggatgacatgttggaattaaaatgaaagattata

SEQ ID NO: 20943 - DNA, 398 bp, Gossypium hirsutum
  Clone ID: LIB3147-040-Q1-K1-C8
catctacggtttagggtgtggctttagcactttctaacattatcatttgatcatgaacacgaagctggaagttgccaagctgctctatttgttgttcatatagtctcttcctcttcaagcactgtatagccgctctcttgtatctcgctttggcgaattacttggccttttcaacctctgcagcagcctttttgagaagtactgtcaactcctattggagctgcagctgattttgacgaggatgaattggaggcagaactcgaagagcttgaaggtgctgagatagaagaacagcttctccatcctgcaacaacagctcctgcaacaccaattcatgtgcctgctggaaggcaaccggctcgtgctattactgaaaagcacacaggcgaggaagatga

SEQ ID NO: 20944 - DNA, 356 bp, Gossypium hirsutum
  Clone ID: LIB3166-017-P1-K1-G9
cccacgcgtacgaccacgcgtgcgtccatgtgtttgtccacacgtccgatacattcaagggatgtacagatctctgtgcctctttctctaccactcaaaccctaattccttaatttttacagaagatcgggggtttaattggagagaatcaaccatgtgtaacaggctgctactgaaactcaagcaggaagcaaatgctctaaccacgttagacaaattaaatgagacccttgaaatgcttgagaagaaagagaaagtacttgcgaaaaatgctgctgctgaagttgaaaaggccaaggaatttgccaaagggagacacaagagagcggctatacagtgcttgaagaggaagagac

SEQ ID NO: 20945 - DNA, 392 bp, Gossypium hirsutum
  unsure (1)..(392): unsure at all n locations
  Clone ID: LIB3582-022-P1-K1-B10
acggagaaatacacaagaaaaaaaaaacaagtgatcttgattttcgttagctgcattttagaggatgatgggtttagtactgctggtcaagtcatccnttgcaaagctgcggtagcatgggagtcggggaagccactgtcaatagaggaagtggaagtggcaccaccgcagaaggatagattaaatttttttaaactttacattgctttatgtcacaccaatgtctacttgtgggatgctaagggacaaaaccctttgtttcctcttatactaggtcatgaagctggaggcattgtggatagttgtagttgagggggtgactgatctaaacccaggtgaacattttctccctatcttcacgggagaatgcaaggagtgtcccaattgtcttg

SEQ ID NO: 20946 - DNA, 374 bp, Gossypium hirsutum
  Clone ID: LIB3135-050-Q1-K1-D4
attccttaatttttacagaagatcggcggtttaatcgcagagaatcaaccatgtttaacaggcttttcgggaaacccaagcaggaagcaaatgctctaaccacgttagacaaattaaacgagattaacaaggcatttgagtacatgcttgctggcgagggcctgaggtgcgtgattcgcatggatgcataaggattggctggccatggatgaagggctttttgttaagtatatgtgcattttaagggaataaataatgtaatataatctacatcgctgtgctagctgtaatggtaaacatttatcttatcatgcaaaaaaaagaagtataaacttgtgttcttaatggatatgcattggcgatccataaaaata

SEQ ID NO: 20947 - DNA, 1249 bp, Gossypium hirsutum
  Clone ID: GOSHI-09MAY01-C69_7
acctataaaattaaaacctaggcctggggtgcttcagttagagagaatttgaagaacaagaatggattctgccatagctcagaaaacatgggaattagaaaacaatatacttaccgtcgagacacctgacccttcatcggattctatattctactacgacgaggcggctcaagccaagttccagcaagagaagccttgggccaatgatcctcactacttcaagcgcgttaagatctctgcgctcgctcttcttaagatggttgtccacgcccgatctggtggtaccatagaggtgatggggctgatgcaaggcaagactgacggcgatgctatcattgtcatggacgcctttgctttgcctgttgaaggcactgagactagggttaacgctcaggcggatgcctatgagtatatggtcgattattcccagaccaacaagcaggctgggcgattggaaaatgttgttggatggtaccattcacatcccgggtatggatgctggctgtccggtattgatgtttcaacccaaatgctttaccagcagttccaggagcccttcctgccggttgttttttgacccaacaaggactgtttccgctggaaaagttgagattggagctttcaggacataccctgaaggatataagcctcctgatgatcctatctctgaatatcagaccattcctctgaataagattgaagactttggtgtgcactgtaaacagtattatgcattggacatcacttatttcaagtcctcacttgattgtcacctcctggatctgttatggaataagtactgggtaaacaccctttcttcttcacctctcttgggtaatggagattatgttgcaggacaaatttcagatttagctgaaaagctggagcaagcagagaaccaactggctcactctcgcattggcccactaggaccccctcgaaagaagttgcaggaagaatctcagcttgctaagattactagagatagtgcaaagataactgtggagcaagtccatggtttaatgtcacaggtcatcaaagacattcttttcaactctgtacgacagtcgagtaggtcccagaacgatcagtctggtcctgagcctatgatggaaacctaattctaacatcctgccggatgaaatggttaccttgagcgtgagacaccagttttttacaagaatggaaatatatattggattccaggctgcatagttttgtacccttccctgcactactgatgatagcc

SEQ ID NO: 20948 - DNA, 1232 bp, Gossypium hirsutum
  Clone ID: GOSHI-09MAY01-C69_6
tgtgtgaagaaaatccagtgggctgagcctgggacagaatttggtcggcggaggagtgcaaggcaagagagctgtgatgtcttctctggcaagtgggtttttgataaccaatcgtatccgctttacaaagagtctgattgcccctacatgtcggaccagttggcatgccataggccataagcatggaaggtctgatctgcaatatcaatattggagatggcagccccataactgcaatttgaagagatggaatgtgactgaaatgtgggagaagttgagagggaagaggctaatgtttgtgggggattctctaaacagaggtcaatggatatcaatggtgtgcttgttacagtcagtgatcccggcagataagaaatccatgactccgaatgcgcagcttaccattttcagagcagaggaatataatgccacagtggaatttctctgggctccacttctggttgaatctaattctgatgatccagtgaatcacagattgtctgaacggattatccgtcccgattcagtacttaagcattcgtcacagtgggagcatgcagatatactaattttcaactcatatttgtggtggagacaaggcccagtaaagcttttatggagttctgaagaaaatggaaactgtgagcgtcccgacgggctaggagccatggagttggccatgggggcttgggcagactgggtagcatcgaaagtcgttccccagaagaaacgtgtcttttttgttacaacgtcaccaacacatttctggagtcaagagtgggaacctggaagtgaaggaaattgctataaccaaatgaggcctatcactttggagggctactggggaagtggttcggacttgcctactatgcgcatggtggataaagtgctttctggtttgggttcgaaggtatctgtcatcaacattactcagctctcagaatatcgaaaagatggccacccgtctatctatagaaaattttgggagacacttggcccccagcaattggctaaccctgcaagctactctgattgcatacattggtgcttaccgggtgtgcctgatgtgtggaatgaattgatattcccctttttgtaaaaagtgtgtgaacaattggaattcttttagtggctttacatatagcaatatgaaaaagaaaggggggtttaattgtgatttttctgcctttctggaactggagcctgaatgaaaactgtgttggcccttggat

SEQ ID NO: 20949 - DNA, 971 bp, Gossypium hirsutum
  Clone ID: GOSHI-09MAY01-C69_4
cccagcgtccggcttcttcccttctgtttgtctactccttggactatgcgcgaacccgtcttgccaatgatgcaaaggctgcaaagaagggaggagagaggcaattcaatggccttgttgatgtctacaggaagactttaaaatctgatggtattgctgggctttaccgtggtttcaatatctcatgtgttggaatcattgtttaccgtggtctatactttggaatgtacgactccctgaagccagtggttttgactggaaagatgcaggatagtttctttgctagctttgcccttggttggctcatcacgaatggtgctggccttgcatcctacccgattgacaccgttcgtagaagaatgatgatgacctctggtgaagcagtgaagtacaagagctcacttgatgcattctctcagatcttgaaaaatgagggtgccaagtctctatttaagggtgctggagctaacattcttcgtgctattgccggtgctggtgtgcttgctggatatgacaagttgcagctcattgtgttcggaaagaaatatggatcgggtggtgcttaaacttttgggtatatttccctttttggttccgtttataggtttagatggtgatgaaaaactcttggtccggagaccctcgcgtccgcaaagatttcgttaaaaattattcagatttagtggggagttgctctccagacaattgttctattttaccatgaaagttttgctttagaaaaaagctgataaaaagagcagtgacaaatgccattgccgcctctctgatttgttggtttttatgaattgaggggtactttatatttgaagttctaatttcaataattgcttctgtttcaagttgttaaaaaaaaaaccaaaaaaaacaaaattgaaagaaaacatacaaccggtttaagaaatattgctaggaaacgatggacacgagaaaaagaaagataaaaaatacaa

SEQ ID NO: 20950 - DNA, 1614 bp, Gossypium hirsutum
  Clone ID: GOSHI-09MAY01-C69_2
ctttcttgtccgcccccggcctcctgcctctcctctccacaaaacacttgaaaatatctctctcttcactttcttctcttttcaacgcagggtgaaaggcggggaggccgtagacaatctctcttgcgctcttctcgtagaatggatcagattcaacatccaactgtcatgcagaaggtagctggccagctcctttcttctagcatttcccgagattttcaagggtatgatgggtctttcaggaggcctgccctataccaaggacattttgcatatgggaattattccaatgctggaatgcactatcctattgttccatcaacagctaccgccatttgtgttcaagcccctgcagagaaaggatttaccagctttgccattgatttcctcatgggtggagtttctgctgctgtgtcaaaaacagctgctgctccgattgagcgtgttaagcttttgatacagaaccaggatgaaatgatcaaaactggtaggctctctgagccctacaagggtatcgctgattgtttcaagcgaacaatgaaagatgaaggagtggtttctttgtggaggggaaacactgctaatgttattcgttatttccccactcaggccttgaactttgctttcaaggactactttaagaggcttttcaactttaaaataaacagggatggtgactggaaatggtttgctggaaacttaacatctgcaggtgcagctggtgcttcttcccttctttttgtctactccttggattatgctcaaccccttggggggggggcgggggctgctctgtttggaggagagaggcaattcaatggccttgttgatgtctacaggaagacctcaaaatctgatggtattgccggtctttaccgtggtttcaatatttcatgtgttggaatcatcgtttaccgtggtctatactttggaatgtatgactccctgaagccagtgcttctcactggagatctgcaggatagtttctttgctagctttgctcttggttggctcatcacaaatggtgctggtcttgcatcgtacccaattgacactgtgcgtagaagaatgatgatgacctctggtgaagcagtgaagtacaagagctcactcgatgcattctctcagatcttgaaaaatgagggagccaagtctttattcaagggtgctggagctaacatccttcgtgccattgctggcgctggtgtgcttgccggatatgacaagttgcagctcattgtgttcggaaagaagtacggatccggtggtgcttaatatctctttttcattttttacttgtttatgtttagatggtgatgaaaagctcgactacccagaaatttatttcggccaaaaacttcattaaataattctagtttagtcagagagatgagagagggggttttaaaccctaaactatttatattctcagatggaaattttgattaagaaatactggtggctaatgcccccagcccctgtcggatttttatttgttttgatatttggaggttctagtcctgtttttatgtgggacgccatcctcattagtgattatattatcctgatatcatcaatgataattgtttaatggccggcaattagcgcgtgttt

SEQ ID NO: 20951 - DNA, 1543 bp, Gossypium hirsutum
  Clone ID: GOSHI-09MAY01-C69_1
cggcgcgtgggcggacgcgtgggttttccaaagcctctcgtctcctctccataaatctctctctcaacgcagagcgaataggcggagacttccaagaatctatcgcatcagctaatcacgctctaaagaatggatcaggttcaacacccatctatcatgcagaaggtagcaggccagctccttcgttctagccattctcaagattttcaaggttataatgggtctttcaggagtcctgctctataccaaaggcgtgctgcatatggcaattactccaatgctgcactgcagcatcctgtccgggcttgtggagacctgtctatggttccatcaacagcttctgctatttgcgttcaagcccctgctgagaaaggatttaccagctttgccattgatttcctcatgggtggagtttctgctgctgtatcaaaaacagctgctgcaccaattgagcgtgttaagcttttgattcagaaccaagatgaaatgatcaaaagtggaaggctctctgaaccttacaagggtattggtgattgtttcaagcgaacaatcaaggatgaaggatttggttctttgtggagaggaaacactgccaatgttattcgttatttccccactcaggccttgaactttgccttcaaggattacttcaagaggcttttcaacttcaagaaagacagagatggttactggaaatggtttgctgggaacttggcatctggtggtgcagctggtgcttcttcccttctctttgtctactccttggattatgctcgaactcgtcttgcaaatgatgcaaaggctgcaaagaagggaggagagagacaattcaacgggcttgttgatgtctacaggaaaaccctaaaatctgatggtattgccgggctttaccgtggtttcaacatttcatgtgttggaatcattgtttaccgtggtctatattttggaatgtacgactctctgaagccagtgcttttgactggaagcatgcaggatagtttcttcgctagctttgctcttggttggctcatcacaaatggtgctggccttgcatcttacccaattgacactgttcgtagaagaatgatgatgacttctggtgaagctgtcaaatacaagagctcgctcgatgccttctctcagatcttgaaaaacgaaggtgccaagtctctattcaagggtgctggagctaacatccttcgtgccattgccggtgctggtgtgctcgctggatacgacaagttgcagctcattgttttcggaaagaagtacggatccggtggtgcttaaatttagggtggtactatctcccttcttttgttatgttttaggttttaaagatggcgatgaaaagctcgacacattgagaaatttatttcggcaaaaaaattcattaataattcagatttagggggggaagttactccctaaacgatttttacatttgggatgtgaaattttgatttacccatctcggatttttggtttggttttaagaaatgaagtgatggatgttttatttaaaaaataaaaaaaaaaaaaa

SEQ ID NO: 20952 - DNA, 498 bp, Gossypium hirsutum
  unsure (1)..(498): unsure at all n locations
  Clone ID: uC-gsronu33B137b05b1
cttacgcgtccgctcgacgggctaggagccatggagttggccatgggggcttgggcagactgggtagcatcgaaagtcattccccagaagaaacgtgtcttttttgttacaatgtcaccaacacatttctggtgagagtctatacccctaacctcaattgttctatgtttctctcagttggataatttcacctggtgaaagcttgccaacttatctagttgccataaatcataatatagaggtatattagacagagatgacgaatagatgagactaataaatgcaccatggagttactaaaaggagtgatctgaaaatattagcatgctgtatatactttctggggcttgggatcctagctgatgatctggaaatgttgaagcattgaggacctggttacaaactgaatgagctgcagatttcatttttgatattctatttagactttacatgcatggaaatcattgntggccatgaatccattgaacaatcttagtg

SEQ ID NO: 20953 - DNA, 637 bp, Gossypium hirsutum
  unsure (1)..(637): unsure at all n locations
  Clone ID: AI054449.1
gcctctcgtctcctctccataaatctctcactcaacgcagagcgaataggcggagacttccaagaatctatcgcatcagctaatcacgctctaaagaatggatcaggttcaacacccatctatcatgcagaaggtagcaggccagctccttcgttctagccattctcaagattttcaaggttataatgggtctttcaggagtcctgctctataccaaaggcgtgctgcatatggcaattactccaatgctgctctgcagcatcctgtccgggcttttggagacctgtctatggttccatcaacagcttctgctatttgcgttcaggctcctgctgagaaaggatttagcagctttgctattgatttcctatgggtgggagtttctgctgctgtatcaaaaacagctgctgcaccaatggagcgtggtaagctnttgattcagaaccaagatganatgatcaanagtggaaggctctctgaaccttcaaggtattggtgattggttcagcgaaaatcaggatgaagatttggttcttgtggaaaggaacactgccatggtatcgtatttcctactaagccttgactttgctttaagatactcaagagctttcactcaggaagacgagatgtactgaag

SEQ ID NO: 20954 - DNA, 379 bp, Gossypium hirsutum
  Clone ID: LIB3493-049-P1-M1-F2
gaaataattttgctcacgtttgatctgatctgaaaagcacattgctttttcttttcagatctatcgaatggatcagattcaacatccaactgtcatgcagaaggtagctggccagctcctttcttctagcatttcccgagattttcaagggtatgatgggtctttcaggaggcctgccctataccaaggacattttgcatatgggaattattccaatgctggaatgcactatcctattgttccatcaacagctaccgccatttgtgttcaagcccctgcagagaaaggatttaccagctttgccattgatttcctcatgggtggagtttctgctgctgtgtcaaaaacagctgctgctcccattgagcgtgttaagctt

SEQ ID NO: 20955 - DNA, 452 bp, Gossypium hirsutum
  Clone ID: LIB3272-056-P1-N1-C10
ctatgaccgcgcatgccccccttcctaaacttggatcctttaaaaccgcccgcctttttttttttttttttccgagatgggtaaatcaaaatttcacatcccaaatgtaaaaatcgtttagggagtaacttccccccctaaatctgaattattaatgattttttttttgccgaaataaatttctcaatgtgtcgagcttttcatcgccatctttagaacctaaaacataacaaaagaagggagatagtcccaccctatatttaagcaccaccggatccgtactttttttcgaaaacaatgagctgcaacttgtcgtatccagcgagcacaccagcaccggcaatggcacgaaggatgttagctccagcacccttgaatagagacttgccaccttcgtttttcaagatctgagagaaggcatcaagcgagctcttgtatttgacagcttcacc

SEQ ID NO: 20956 - DNA, 336 bp, Gossypium hirsutum
  Clone ID: LIB3145-053-Q1-K1-G12
cggacgcgtgggctgcaagatagtttttttgctagctttgctcttggttggctcatcacaaatggtgctggtcttgcatcgtacccaattgaacacttggcgtagaaaaatgataaaaacctttggtgaaacaggaaagtccaagactcactcgatgcattctctcagatcttgaaaaatgagggagccaagtttttattcaagggtgctggagctaacatccttcgtgccattgctggcgctggtgtgcttgccggatatgacaagttttaacctataagctgtcgctgctgggatggggatatgaaccaccaaataaggactttttaacattct

SEQ ID NO: 20957 - DNA, 309 bp, Gossypium hirsutum
  Clone ID: LIB3165-014-P1-K1-H12
accacacgcgttcgtccgacgcgtacgtccacgcgtccggtttagatggtgatgaaaaactctgtagtccggataaatttattttggcaaagatttcgttaaaataattcagatttagtggggactggggagttgctctccaaacaatttttctattttaccatgaaagttttgctttagaaaaaagctgataaaaagagcagtgactaatgccattgccgcctctctgatttgttggtttttatgaattcagggatactttatatttaaagttctaattttaataattggttctggttcaaggtggtt

SEQ ID NO: 20958 - DNA, 488 bp, Gossypium hirsutum
  unsure (1)..(488): unsure at all n locations
  Clone ID: uC-gsflmaxxa038a03b1
ccctcgcgtccgtgaagaacaagaatggattctgccatagctcagaaaacatgggaattagaaaacaatatacttaccgtcgagacacctgacccttcatcggattctatattctactacgacgaggcggctcaagccaagttccagcaagagaagccttgggccaatgatcctcactacttcaagcgcgttaagatctctgcgctcgctcttcttaagatggttgaatctaattctgatgatccagtgaatcacagattgtctgaacggattatccgtccggattcagtacttaagcattcgtcacagtgggagcatgcagatatactaattttcaactcatatttgtggtggagacaaggcccagtaaagcttttatggagttctgaagaaaatggaaactgtgaggaactcgatgggctaggagccatggcatgttttcattacagctaaagctnctgcacgtctctctttcagcggaaactata

SEQ ID NO: 20959 - DNA, 451 bp, Gossypium hirsutum
  Clone ID: uC-gsflmaxxa046f02b1
aaacagttgaaaatatctctctcttcactttcttctcttttcaacgcagggtgaaaggcggggaggccgtagacaatctctcttgcgctcttctcgtagaatggatcagattcaacatccaactgtcatgcagaaggtagctggccagctcctttcttctagcatttcccgagattttcaagggtatgatgaccctatctctgaatatcagaccattcctctgaataagattgaagactttggtgtgcattgtaaacagtattatgcattggacatcacttatttcaaatcctcacttgattgtcacctcctggatctgttatggaataagtactgggtaaacaccctttcttcttcacctctcttgggtaatggagattatgttgcaggacaaatttcagatttagctgaaaagctggagcaagcagagaaccaattggctcactctcgc

SEQ ID NO: 20960 - DNA, 521 bp, Gossypium hirsutum
  Clone ID: GOSHI-09MAY01-C39_1
cttttctctctgcccttcgcgtgaccattctaaagaggtcatcgtaaattcgagtacaaagcgctaaccgagatgagagccaagtggaagaagaagcgtatgaggaggctgaagaggaagcgccgaaagatgagacagagatccaagtagatgcgccttggactgaattagttttgccctgacaatcccttgtcttcataattatcctgcatatgttgcatgaagttgtgaagattgaagggtattttcaggcaaccttatctgttttgtcttctatatctcggttaaagttttaagactgtttgagatgtttgtctagtactattagatattatgttggggatttgtggtttgatctgtgtaagcagttatcttaacatcctaaatgtttgaaattgaaacttttgttcttcttatatggtctataatatgcgagatagattgtttccttaaaaaaaaaaaaaaaaaaaaaaaaaaaaaaaaagaatttttaaaaaaaaaaaaaaaaaaaaaaaaaaaaa

SEQ ID NO: 20961 - DNA, 465 bp, Gossypium hirsutum
  Clone ID: uC-gsronu33B090c12b1
gctttttagcattctaaagaggtcatcgtaaattgtggtacaaagcgctaaccgaggggggagccaagtggaagaagaagcgtatgatgaggctgaagaggaagctcctaaagatgagacagagatccaagtagatgcgccttggactgaattagttttgccctgcaatcccttggcttcataattatcctgcatatgtgtgatgaagttgtgaagattgaatggtgttttcaggcaaccttatctgatttggcttgtatatctaggttaaagacttaagactgtgtgagatgtttgcatagttctattagagtttgtgcttgggatgcctggtatgctctgtgaaacactgtctcttaacgttctgagattttgtggttgacggttaattcttattatatggctataataacctagatagagtgtttccttttccatttaaaaaaatattcatgatgaatgggg

SEQ ID NO: 20962 - DNA, 386 bp, Gossypium hirsutum
  Clone ID: uC-gsronu33B007e01b1
cttaatttaaagcctagagcttgtgacatgcctgggggactctcgctaaagaggggatatacaatccaccaatattcacatgtactgcataagttgtgccctgacaaagccttggcttcataattatcctgcatatgttgcatgaagttgtgaacattgaagggtattttcaggcaaccttatctgttttgtcttctatatctcggttaaagttttaagactgtttgagatgtttgtctagtactattagatattatgttggggatttgtggtttgatctgtgtaagcagttatcttaacatcctaaatgtttgaaattgaaacttttgttcttcttatatggtctataatatgcgagatagattgtttccttcccaaaaaaaaca

SEQ ID NO: 20963 - DNA, 321 bp, Gossypium hirsutum
  Clone ID: LIB3148-042-Q1-K1-A7
cccacgcgtccgtttgaaactaaatgctcaactatcttatgcttttcagtggaagaagaagcgtatgaggaggctgaaaaggaagcgccgaaagatgagacagagatccaagtagatgcgccttggactgaaatagttttgccctgacaatcccttgtcttcataattatcctgcatatgttgcttgaagttgtgaagattgaagggtatttttaggaaaccttatctgttgtcttctaaatctaggttaaagttttaagactatttgagctgtttgtctagtactattagatattatgttgggggttttggggttgatct

SEQ ID NO: 20964 - DNA, 1166 bp, Gossypium hirsutum
  Clone ID: GOSHI-09MAY01-C29_1
gcgttcgctggtcaagaattagtgaaatatgggtccaacattttctgggtttttaatctcagcaatggtgtttttaactcaactcctctctctaacagatggccgtgatattggtgtttgctatggtttgaacggcaacaatcttccatctccaggagatgttattaatctttacaaaactaggggcgtaaacaatatcaggctctaccagccttaccctgaagtgctcgaagcagcaaggggatcgggaatatccctctcgatgggtccgagaaacgaggacatacaaagcctcgcaaaagatcaaagtgcagccgatgcatgggttaacaccaacatcgtcccttataaggacgatgttcagttcaagttgatcactattgggaatgaagccatttcaggacaatcaagctcttacattcctgatgccatgaacaacataatgaactcgctcgccttatttgggttaggcacgacgaaggttacgaccgtggtcccgatgaatgccctaagtacctcgtaccctccttcagacggcgcttttggaagcgatataacatcgatcatgactagtatcatggccattctggctcgacaggattcgcccctcctgatcaatgtgtacccttattttgcctatgcctcagaccccactcatatttccctcaactacgccttgttcacctcgaccgcaccggtggtggtcgaccaaggcttggaatactacaacctctttgacggcatggtcgatgctttcaatgccgccctagataagatcggcttcggccaaattactctcattgtagccgaaactggatggccgaccgccggtaacgagccttacacgagtgtcgcgaacgctcaaacttataacaagaacttgttgaatcatgtgacgcagaaagggactccgaaaagacctgaatatataatgccgacgtttttcttcgagatgttcaaccagaacttgaagcaacccacagttgagcagaatttcggattcttcttccccaatatgaaccctgtttatccattttggtgaacttgaaatgttattgttggctatttaaatcttttgccagagacgcttcatatagtttctgcatattttgaaagtggaaaatcaatctaaatataaataagttttatttgttgttttttaagtt

SEQ ID NO: 20965 - DNA, 570 bp, Gossypium hirsutum
  Clone ID: GOSHI-09MAY01-C989_1
cggacgcgtgggcggacgcgtgggcggacgcgtgggctgctgtgagggcattaaggagtaatggtgggatattgcatgtccacgggaatgtgaaggacaccgaggtggaattgtgggctaaccatgtctcaaaatcgatatctgaaattgcaagatccgagggccatcgttgggaagttacgatcgatcatgtggagaaagtgaaatggtatgccccacacatccgccatcttgttgctgatgttaaatgcagacggatctaggatgaaattgtttcatgacggttagtgtctgcatctcttgggaaataattcgagggggcaaacatgcgagtgcggatccatacgggtgggttatatggtaacccatttatccattaatgccctatttaagttgtctgtgactgcccaacctgctcgttactcttttattcacccaaagcccgaataactctttgatgagaggaagcttgtgacccatagaactcggcccatcatacagcaatttagtgaaattagaagatcttctacatacttcttttaaattcatataaaaagactccgttagtcc

SEQ ID NO: 20966 - DNA, 683 bp, Gossypium hirsutum
  Clone ID: GOSHI-09MAY01-C969_1
taacgatgtgagggatgctttggggagcttatctaggcgtgggttggaggtgagattgcctggtcatcataagggaaaatctaatggttcagtgcttgagttgaatgatgagcccatggttatccagaatagccgctgggcgagccttccgccagagctgttgcgtgatgtgatcaagagattggaagcgagtgagagcaactggcctgctcgcaagcatgttgttgcttgtgctgcagtatgcaggtcatggagggaaatgtgcaaagaaattgttagatgtcccgagttctccgggaaaatcacctttccagtttctctgaagcagcctgggtcaagggatggaaccattcaatgcttcattaagagagacaaatctaatttaacttatcaccttttcctttgccttagtcctgctttgcttgttgaaaatgggaagtttcttctttctgcaaaacggacccgtagaactacttgcacagagtatgtaatctctatggatgcagataacatatccagatctagcagcacatacattggaaaactcaggtccaactttcttggtaccaaattcataatttatgacacgcaacctccatacaccaatgctcagctttcaccacctggccgaagccgaaggttctattcgaaaaaagtctccccaaagggtccctacccggagc

SEQ ID NO: 20967 - DNA, 333 bp, Gossypium hirsutum
  Clone ID: LIB3196-013-P1-M1-B12
accaacccctaatacacactcactatcgggaaagctggctcgcccccatgtcccgttcccgaattgccgcctccacccacgcgttcagaaaatttttgcgttctgcaaaacggacccgtacaactacttgcacagagtatgtaatctctatggatgcagataacatatccagatctagcagcacattcatcggaaaactaatgtgcaacttttttgttaccaaatccataatttatgacactctccctctatacaacattgcttagcttttaccactctggcctgatccaacttgttgctatttctaaaaacgtctatcttataagtacccac

SEQ ID NO: 20968 - DNA, 634 bp, Gossypium hirsutum
  Clone ID: GOSHI-09MAY01-C919_1
ctttctctcacgcccgtgctctcatcacctgaaatggaggaaaaagaagcagaagtagtagaagcaccaaaaccagctgactggttcaataccttattatctcttcaagctgatctcctttacaactgtttcaccactctttcttcccctttcttcaccctcttatcggcggcctttgagtcataccgccgtgccgaagagacgacagccaacgtcgaaacggcggttcaaaatctaccttccagcatcacccacggtagcactgtcttgctcaagagagtcgggttaggactttttggtgctgctcaaatgtgcatggtgttggtctttctgatggttttggctgcttttgtgggaattgggttggtgcaactttgggcggaggagcctgttttcgttagagaaaaattgttctttgattacacagaggtgaatcctacggcggtgttttgtgctggtggaggtggatttgatggcagctgttataggaagaagcagatgggtgttcccgttggtcatacctttcatgtttatttgcttcttttgatgcctgaatctgatttcaacagagaaattggaatgtttcagttgaatgcagaactgctatcaatcaatggtcatgtaattggtgagt

SEQ ID NO: 20969 - DNA, 1368 bp, Gossypium hirsutum
  Clone ID: GOSHI-09MAY01-C939_1
cggacgcgtgggcggacgcgtgggcggacgcgtgggcggacgcgtggggttggcaagcacaatattaccatttttgcccctcgcaatgaagccttggagcgtcaactcgaccccgagttcaagcgcttcttgcttgaacctgggaacctcaagtccctccaaagccttcttatgtttcacattatccccaaaagggttggatcccatcaatggcctgatccgaaaactggtcctgtcaagcacaacaccctttgtaacgatcatatacgcttaacttcccaatccaccggcaaaaagacagttgactcagccgagtgggcccgacctgccgacgggatccgacccgttggagtcttccccgggatccagcaacttctcattccccgctctgtcatagaagacttcaataggaggcgtaatctacggtcaatcacggccgtattacctgagggtgcgccggaagtggatcctcccacccacaggttgaagaagccagcgccggttccagttggagctccaccggtactcccaatctacgacgctatggctccaggtccttctctggccccggccccggctcctggtcccggcggacctcgccatcacttcgatggtgaaagccaagtcaaggatttcatccaaactctattacattacggcgggtacaacgaaatggctgatattctagtaaacttgacatctttagcaacggaaatggggagacttgtttcagaaggatatgttataacagtcttggctcccaacgacgaagccatggcaaagcttactacggatcagttaagcgagccaggggcgccggagcagattatttattatcatatcatccccgagtaccagacggaggagagtatgtacaatgcggttcggaggttcggtaaagtgaaatatgacacactgcggttgccgcataaggtagtggctcacgaggctgatggttcggtgaaatttgggcatggtgagggttcagcttatttgtttgacccggatatttatacggatgggaggatatcggttcagggaatcgatggggttttgttcccggaagaagagacccaaactgttaagaaaccggctgctgttaaggttgcctccaagcccaggagaggtaagttgttggaagtgggatgttggatgcttggcagtcttggagggggctcaggattccgatggtgtcaatgaatataaaaagaaattggtagtgtggaggtgaacaatactttttccgggtaaaaacatgcattctcatctcatctgcggttttagggttaagattgtgtcataatacagtggaagggaagggcctaacctggtgaatgctcgtttcatatcctcaaaaaagcagacgag

SEQ ID NO: 20970 - DNA, 581 bp, Gossypium hirsutum
  Clone ID: uC-gsflmaxxa061a11b1
tctgtttctttattttctaagccaaagcaaagcaaagcaatagtcagtccttcaccaacctcctcacttcactcctcctcctccttcaccaccctatcttcaaatatctctatcttatttgagtttgtttgtttttcagttcccttttgagcaccatgggttcttccatctatggtgtctcttcctcccacatctcccttttccttttcttctcctttctttcgctctccacggctgcattgcctcaaaacccgtctgggaaatcctcaccttctggtcagatcaactccaactccgtccttgttgctcttcttgactcgcattatactgagttagctgaactcgtcgagaaagctttacttctccagacgcttgaagaagcggttggcaagcacaatattaccatttttgcccctcgcaatgaagccgtggagcgtcaactcgaccccgagttcaagcgcttcttgcttgaacctgggaacctcaagtccctccaaacccttcttatgtttcacattatccccaaaggggtggatcccatcaatggcctgatcccataaccggtcctgtcatgcacaaca

SEQ ID NO: 20971 - DNA, 397 bp, Gossypium hirsutum
  unsure (1)..(397): unsure at all n locations
  Clone ID: LIB3146-049-Q1-K1-F4
cccacgcgtccgcccacgcgtccgggaatttggtggttgctaaggaataccattgaattattcaatttatgccacttaattgcctgatttaatgtgatgtanatgcttaattacgagttagacattaactgtgtttggtaattgataaagcaggtaagttgttggaagtgggatgttggatgcttggcagtcttggagggggctcaggattccgatggtgtcaatgaatataaaaagaaattggtagtgtggaggtgaacaatactttttccgggtaaaaacatgcattctcatctcatctgcggttttagggttaagattgtgtcataatacaatgggaggggaagggcctaagcctggtgaatgctcgtttcatatcctcaaaaaagccgacgag

SEQ ID NO: 20972 - DNA, 1071 bp, Gossypium hirsutum
  Clone ID: GOSHI-09MAY01-C849_1
cccccgcgccccctccaaaccacagaaccaaaaccgaagaactaaaagaaaaatggcgtctttggctcaacagttcacaggtctaagatgtccaccactctcctcatctcggttttctgtgaaaccaaagcaaacccagaaagtgggcgcttttgcttctcctatagtttcagccgtcgctgtctcaaatgcacagaccaaagataggcttgaactcaagaagatgttcgaggatgcttacgaacgctgtcgaactgctcctatggaaggcgtggcttttactgttgaggattttcaaaatgctcttgagaaatatgactttgattctgagcttggaaccaaggttaaaggaacagttttctgcacagatggcaatggggcattggttgatattactgccaaatcttctgcatatctaccggtccaagaggccagcattcacaaaattaaacatgtagaagaagttggtatagttcctggtttaagggaggaatttatgattatcggtgaaaacgaggctgatgatagcttaattttgagcttaaggtccatccaatatgaacttgcctgggaaagatgcaggcaacttcaagctgaggatgttgtcgtgaagggcaaggttgttggtgcaaacaagggtggagtagtggcattggtgcagggtcttcgagggtttgttcctttctcacagatatcatcgaaatccactgcagaagagcttttagataaggagctccctttgaagtttgtagaggttgacgaggaacagtccaggcttgtcttcagtaaccgcaaggccatggctgatagccaagcacagctcggaattggatcggttgtcctcggaactgttcagagcctgaaaccatatggtgctttcatcgacattggtggaattaacggccttcttcatgtcagtcaaatcagtcatgatcgtgtttcagatattgctacggttcttcaacctggtgacactctgaaggtcatgatattgagccatgaccgtgaaagaagccgagtaagtcttttcacaaagaaactagagcctacccttggagacatgattcgcaa

SEQ ID NO: 20973 - DNA, 505 bp, Gossypium hirsutum
  Clone ID: uC-gsflnu33B062a07b1
cggtccgcaattccggaattgcccgatgcacctacgcgttcgaccacgcgtccgcccacgcggccgtggagagctacggttgatattactgccaaatattctgcatatctaccggtccaagaggccatacattcacataatctaacatgtataagaagttggtatagttcctgggttaagggaggaatttatgattatcggtgaaaacgaggctgatgatagcttaattttgagcttaaggtccatccaatatgaacttgcctgggaaagatgcacgcaacttcaagctgaggatgctgtctcgaaaggcaaggatgaggggtgcaaacaacggcggagctagtggcattggaggagggccttcgagggtatgttcctttctcacagatatcatcgatagccactgcagaagagctttaaaatgaagagctccctttgaaggttgtataagttgacgaggaacagtctcagctagtcttcagtaacccgaaagccatggctgata

SEQ ID NO: 20974 - DNA, 555 bp, Gossypium hirsutum
  Clone ID: GOSHI-09MAY01-C869_1
cccacgcgtccggaaacttatttattgctttggaatttcattccaaggttttaaaaacttagccctttgttcttcaaatctttgccttagttcttcaaatcctttctaggcttgagatatagagagagaagcataagacctctacctaataaccatagccaagagagggtgtatcggcaaagcaaagggagcatgctctcgcgagattgagactctcatatctagacgatgacttggggaacttagtcattaacttatcaggtataactctatgtaaatatattattttagtaaataattttcattctatattatttagggaattaaattggttttcatattatttcaataaaaaaagtttagaaaattttaggaatttctttaaaaatttggtagactcttattttagttattttaatattttgtcagaaatcttggtgagcacttagtagaggtgctcatgggccgcccgacccaacggttcgcctgaaaatgggagggtttgggtaaaaaataggcccgaatgggggggggggggaaaaaaaggtttaaaaa

SEQ ID NO: 20975 - DNA, 750 bp, Gossypium hirsutum
  Clone ID: GOSHI-09MAY01-C809_3
cccacgcgtccgcccacgcgtccgcggacgcgtgggctttaattgttagttgtaattattttggaccacagacatgatgcactgaaaaaatcttatctgattaagaattatttattaaaagcatgagtttactgttctgttttaacccctaataggaacacagtggacggtgatccccattggtgctgtacttatctcctcaatccttctgatccgttatttgttgagattggagaggcttttatcaaaatgccttccatggaatatggtgacgtgactgacatctacaactgtgacaccttcaatgaaaattccccgcctacaaatgatacaacatatatctcatcacttggtgctgctgtgtacaaagcaatgtccaatggtgacaaggatgctgtgtggttgatgcaaggttggcttttctactcggactcaactttctggaagccaccccaaatgaaggcacttttacattctgttccagtggggaaaatgatagttcttgatttattcgctgatggcaaaccaatatgggccactttcttctcaattttatggcactccttatgtctggtgtctactgcataattttggaggaaatattgaaatgtatggaacattggatgcaatttcttcaggtccagtggatgctcgcatcagtaaaaattcaaccatggtcggtgttggcatgtgcatggaaggaatagagcaaaatccggttgtatatgagttcatgtctgaaatggcatt

SEQ ID NO: 20976 - DNA, 1294 bp, Gossypium hirsutum
  Clone ID: GOSHI-09MAY01-C809_2
ctgcatttaacatggataagaatatataaaagaaaatcttaatagaatcaagaaaacctgaactaaaataagtcgaacattagttatataccagatgaaattttggtatatgacctttactgagaatttatatgtgtttgtgcacaatgctcatatatgagagtgagcacacgagaatgtagatattggcatcatttgtgcaaagtagtaaagaaatggtactggcaagaaaacgtaagccacttattactgaattggtaatacattttatgttcctgctaccgtgatatatactttaaaagctctgaggttaaatatgagcattacacaatttcttctcttcttaatgtgttgattatttcttgtgggttcatactctcttcatctacttcatcagaatatggtgacgtgactgacatctacaactggtaatttacctcaatctatttaattactgtatttttccatcatatttattttctccccttgctttaacctattagaagtagatcttctcattcttcctttggttttgaattttacactgtcttagtgacattgaagaaatatatgtttctgtaatatgcagtgacaccttcaatgaaaattccccgcctacaaatgatacaatatatatctcatcacttggtgctgctgtgtacaaagcaatgtccaatggtgacaaggatgctgtgtggttgatgcaaggttggcttttctactcggactcaactttctggaagccaccccaaatgaaggcacttttacattctgttccagtggggaaaatgatagttcttgatttattcgctgatgtcaaaccaatatgggcaacttcttctcaattttatggcactccttatgtctggtgtctactgcataattttggaggaaatattgaaatgtatggaacattggatgcaatttcttcaggtccagtggatgctcgcatcagtaaaaattcaaccatggtcggtgttggcatgtgcatggaaggaatagagcaaaatccggttgtatatgagttaatgtctgaaatggcatttcgaaaggaaaaagttcaagttctggaatggctgaagacctacacccacagacgttatggtaaatcagttcaacaaattaaagaagcatgggcaattttgtatcacacagtttacaattgtacagatggaatcgccgatcataacattgatttcatagtcaagtttccagattgggacccatcaataaattttggatctcgaccatcaaagctaaacagtatgcatacattccgcttaagaacccagag

SEQ ID NO: 20977 - DNA, 767 bp, Gossypium hirsutum
  Clone ID: LIB3582-049-P1-K1-E12
ccattatatttctagttgctagtgactgacacagagacacatgttgggcgtgttaattctgatgttgtgaaccatcactgacaatgaggatcatgagaatattgggatgcatgcagtgatagtgctcgtttttatttctttttaagcgtggaggttgtttggcaatagctaacttcttgttttgtaggaatggctgaagacctacacccacagacgttatggtaaatcagttcaacaaattaaagaagcatgggcaattttgtatcacacagtttacaattgtacagatggaatcgccgtatgtttcaatgcaccgatgaactgcaaattcctatttcatattacttccctctataagaataccttaaaggaaatagatctaattgtggaactccattatggaattatttgatatgtttcagcaatatatccacatggaattaatattccagctgctaattttaacttctgagttctgtaatttaggacccatcaataaatttatatagccatttatataggacctgatgttggattttcctttgttgcaggatcataacattgatttcatagtcaagtttccagattgggacccatcaataaattttggatctcgaccatcaaagctaaacagtatgcatacattccggttaagaccagaacagaagatctcatttaggacgtacttgatctgctagccattgggatctatatgagtgaggttagcctctgcgtgatatactgactaattgtcatgcatacctagg

SEQ ID NO: 20978 - DNA, 486 bp, Gossypium hirsutum
  Clone ID: GOSHI-09MAY01-C839_1
cccacgcgtccgcccacgccaaagaaaataattgaaagatggtttgtatagcttgcctgttgccgctcttcctcgtcccgatcgtcaacattttgcctcttcttttcgatttcgtcatgggtaaaatttacaggcttcttggatgggaataccgtaaaccagagagagcaccgccggcgtgtccgtataaaccggctgccaaactggaaaacaatagtaaagtgaccccagaaacagaaccaggtgcaccagagtctagttcgaaacccgttggtatgaccaatggcaagcaagattgatactgaaagcttttccatggtactaaaatcagacataaacctttttgaagatgtacttcttaaggttgttaatgggtaggggggaaagatcactctgtatgtttttattatacaatatgaacacagttaagcattaaagctgaaaatttgacgtggttcagataataatatttccatttattggaaa

SEQ ID NO: 20979 - DNA, 395 bp, Gossypium hirsutum
  Clone ID: GOSHI-09MAY01-C829_5
tttggtggtaagttcaagcttggaagaaagattggcagtggctcttttggagagctttatttaggtatggtatccccaaagccctgtgatggctttcttcccttttcttattaatggaaaatatgtattgtttctttaattctttgtcagccttgtgcttttcttttccctaatctttttgggggtttctgttgaaggggtaaatgtgcaaactaaagaggaagttgctgtcaaactggaatctgcaaagaccaagcatccacagcttcattacgagtcaaagttgtatatgcttcttcaaggaggaagtaagtctatgtttgtgcttcactctcctaacttgactatggtcttctcctggtagccttgtccactgcagttccattaatgccatt

SEQ ID NO: 20980 - DNA, 636 bp, Gossypium hirsutum
  Clone ID: GOSHI-09MAY01-C829_2
attttatattcgttggaaaaactccccttgttcttttcttcttgatttatagcagtttctaacccccactcaatttcttttttacccctaaacctcttcagcctgaaaggaaggttgcttctgtatttcctgagaggaagccttccctggcaggggctaatatgatgataagattagcgaaaagaaagtgtcgacttctatagaggtgctctgtaagtcccctcccgctcggtttttctctcgtatactgtcgttctttgcggtttgaagataaacccgattattcctatttgaagaggcttttccgagacttgtttttaagagaagcgccccccccccctttttgttgatctgttggaggcttggagttgtcaatttagtaaatcccttagctttgaagatagtgttttgtttttgtttggcttgagaatggataatgtgattggtggtaagttcaagcttggaagaaagattggcagtggctcttttggagagctttatttacgggtaaatgtgcaaactaaagaggaagttgctgtcaaactggaatctgcaaagaccaagcatccacagcttcattacgagtcaaagttgtatatgcttcttcaaagaggaacgggtattccacaccttaag

SEQ ID NO: 20981 - DNA, 1638 bp, Gossypium hirsutum
  Clone ID: GOSHI-09MAY01-C829_1
atccttgctaattattgaagaagattaagaaattctgtcttcgtttgatctattggagtaatcaatttggtaaatcccccaagctttaagggagttgttttgggggcaataaatattgaatttgaaaaaaatcgagtgaaaacagcttagattaagctcttttgggggcatttggtattgttgaagagatagagagtagcttttgttttcttggcttgagatggatcgtgtaattggtggtaagttcaagcttggaagaaagattgggagtggatcttttggagagctttatttaggggtaaatgtgcaaactggagaggaagttgctgtcaaactggaatctgtgaagaccaagcatccacagcttcattatgagtcaaaattgtatatgcttcttcaaggaggaactggtattcctcaccttaagtggtttggagttgaggcggattacaatgtcatggtaattgaccttcttggacctagtttggaagatctgttcaactactgcagtaggaaactctcattaaaaactgtgttgatgcttgctgatcaattgattaatagagtagaatatatgcattcgagaggttttcttcaccgtgacataaagcctgacaacttcttgatgggcctaggacgcaaggcaaatcaggtgtatgtcattgactatggtcttgcgaagaagtatagggatcttcaaactcataagcatatcccatacagagaaaacaaaaacctcacaggcacagctcgttatgcaagtgttaacactcaccttggaattgagcaaagccgcagagatgatttggaatcccttggttatgtgcttatgtatttcctgagaggaagccttccctggcaggggctaaaagctggcacgaaaaagcaaaaatatgataagattagtgaaaagaaggtatcgactcctatagaggtgctctgtaagtcatatccatctgagtttgtctcttattttcactactgtcgatctttgcggtttgaagataaacccgattattcatatttgaagaggcttttccgagacttgtttataagagaaggttatcagtttgactacgtctttgactggactgtattgaagtacccacagattggtggcagctccagagggcggcattccagtggaagggcaggtttagctgctggaccagccattgaaaaacccgaaagaatctcagtgggaagagagattcgggatagattctccggtgcggttgaagcattttccaagagaaatggttcaagtcccagtccccgtcgtgatcattctagacacaagactgctgagggtggggccttgtcaaagcatacgcacccagattcagataaaagatacagttcttctcgatatggtagcacttcaaggaaagctgtagtaacaagcaggcctggttcatccagtgaactcaatgacattccgcaaaaccgacaggtttcaagtagcagtcgcatgtctaccacacagagactccttgccttcgagtcgaaaacatccaaccgttcggccactgtaaaggtagccgtgacaatcaccctcttcgagttttgggctcctctcgttaggaaatgatggagaagatatcagttgcaagctgatctttaataactgacatctca

SEQ ID NO: 20982 - DNA, 548 bp, Gossypium hirsutum
  unsure (1)..(548): unsure at all n locations
  Clone ID: uC-gsronu33B047b01b1
catttctaataattataaaaaaattgcttttaccatttttcttcatgggcttagattgaaatctccaggttttttttttaatatccgtttcaaattttggggatttgctatcaattttatgtagtagaaggaaattggagcctttctaatacttaaaataatagatatcccttccatcggcttagattgaaaatctccaatttttcctttgatttttagctttatttatttttcaacaaaactaggtnttcggtttcaaattttgggggattttgctatcaatttatgcagtagaggaagctagggcctttctgaaaaaaatataattttacctttcttgggtttagattgaaatcttttttttttttcctttgatttttagctccacgcttttttccccttttaaataattgatctattggaggtgggagggtttcaatttggtaaatccattgaattttgagggcctgggctataaatactgaatttgactctattcccagggaagagtagcttaaataagccccttgtgggatgggtattattga

SEQ ID NO: 20983 - DNA, 531 bp, Gossypium hirsutum
  Clone ID: LIB3583-007-P1-K1-B3
cggacgcgtgggtttatgcagtagaggaagctagggcctttctgaaaaaatataattttacctttcttgggtttagactgaaatctctattttttttcctttgatttttagctccacgcttttatccctgctgattattgaagaattccccttttaaataattgatctattggaggctaggaggtttcaatttggtaaatccattgaattttgagggcctgggctataaatactgaatttgactctattctcagtgaagagtagcttaaattaagccgctttgtggtattgggtattattgaagacagtagtttgttcttattattactcagaatggatcatttgattggtggtaagtttaagcttgcaagaaagattggcagtggctcttttggagaactctatttaggggttaatgtgcaaactggagaagatgttgctgtcaaactggaacctgtgaaaaccaagcatccacagcttcattatgagtcaaaattgtacatgcttcttcaaggaggaactggtattccc

SEQ ID NO: 20984 - DNA, 571 bp, Gossypium hirsutum
  unsure (1)..(571): unsure at all n locations
  Clone ID: LIB3829-024-Q6-K6-F10
tttcggnaggttgcttctgtatttcctgggggggggggggggccatttctttgcttcagccttccctggaggggctaatatgataagattagcgaaaagaagtgtcgacttctatagaggtgctctgtaagtcatatccatctgagtttttctctcgtatactgtcgttctctgcgggggggggataaacccgattattcctatttgaagaggcttttccgagacttgtttttaagagaagattaatagagtagaatatatgcattcaagaggttttcttcgccgtgacataaagcctgacaacttcttgatgggcctaggacgcaaggcaaatcagagaaatcaaaaacctcacaggcactgctcgttatgcaagtgttaacactcaccttggaattgagcaaagtcgcagagatgatttggaatcccttggttatgtgctcatgtatttcctgagaggaaggatgtgtatatgatcaccccatgctcatttcattcatggttctatattatttcttgttgctgagtctttgttctttgttttccttcgcattgattttgaatttggttc

SEQ ID NO: 20985 - DNA, 452 bp, Gossypium hirsutum
  Clone ID: LIB3147-013-Q1-K1-E12
agcattttccaaaagaaatatttcaagtactagtcctcatcttgatcattctagacacaagactgttgatgatggggctttgtcaaagcatgcgctccctgattcagataaaagatgcagttcttctcgatatggtagcacttcaagaagagctgtagtagcaagcaggcctagttcatccgttgaagccaacgacgcatcgcaaaaccgactaacatcaagtggtggccgcatgtctaccacacaaagaattcaacttgcctttgaatctaagacatctagccgagccacccctgttagaggaagccgtgatgatcatcctcttagaaagtttgagttcctctcgattaggaaataatggcattgaatgtcaatcctgactcaatgtttccaagaacttatattctcactctgtatatgggatatctcaccagaatcactggccctacagc

SEQ ID NO: 20986 - DNA, 1112 bp, Gossypium hirsutum
  Clone ID: GOSHI-09MAY01-C589_2
ttttcgcggacgcgtgggttcaagtttcaatttttaaaccttattgacccttttttcacttaccttttttacttcttgtttctagatatatcaaaaaagtccaacaaaagagtaattgtgacccggcaccaaggggaaaaaaagcaatagaaaagagcaagcaagcttcaaatcccagatctctctttgttttctctttgaaacccaaattttcccatataagaaaagattctgagaaaatggtgcccaaatcattgatctatgcatttgtatctcgtggaggagttatattagctgagtatactgaatacagtgggaatttcaattccatagctcttcaatgcctccaaaagcttccttcttcaaacaacaagttcacttacaactgtgatggccataccttcaattatcttgttgacaatggatacacttattgcgttgttgcagatgaatcagctggaaggcaagtgccgattgcttttttggagcgtatcaaggatgatttcgtgtcgaaatatgataacgggaaggctgctacagctcctgccaacagcctgaacaaggaatttgggccaaaactgaaagaacatatgcagtactgtgtggagcatcctgaagaaataagcaagcttgctaagatcaaatctcaggtttctgaagtcaaaggtgttatgatggagaacatagagaaggtgttggatagaggggaaaagatagagctgctagtggataaaacagagaatcttcatcagcaggctcaagacttccggaatactgggacgaaaatccgtagaaaaatgtggctacaaaacatgaagatcaagctgattgttctaggaatactgattgcattgatcctcatcattgtcctctctgtttgccatggtttcaactgtggtggaaaatgagtgccatctttattaggcttattattagagttttcaccagagctattatgataatattgtgatgaaaagatcaaaaaatatttaatatgatttcatatgctatatataagattagcaatcaccagatgtttggtgcaagatatttttggatgtgagcaaaccctgtaagtgcttattgcaattcatgaatttgttttctgcaac

SEQ ID NO: 20987 - DNA, 933 bp, Gossypium hirsutum
  Clone ID: GOSHI-09MAY01-C589_1
ccgaattaaactcctttttcactttttcttatttcttttaagaaaagccaacgaagggagttattcttgagagaagaaagtggaaagcagtagtacgagaaacagagagcctctgaaatcccagatctctctttggaacccatatttctaaggaaaatggtgcacaaatcattgatctatgcatttgtatctcgtggggaagttatcttagcagagtatactgaattcagtgggaatttcaattccatagcttttcaatgcctccaaaagcttccttcttccaacaacaagttcacttacaactgtgatggccacaccttcaattaccttgttgacaatggctacacatattgtgttgttgcagatgaatcagctggaaggcaagtaccgattgcttttttggagcgtgtcaaggaggactttgtgtcaaaatatggtagtggaaaggctgctactgctcctgccaacagcctgaacaaggaatttgggccaaaactgaaagaacatatgcaatactgtatggagcatcctgaagaaataagcaagcttgctaaggtcaaagctcaggtttctgaagtcaaaggtgttatgatggagaacatagagaaggtgttggatagaggggaaaagatagagctgctagtggataagactgagaatcttcatcagcaggctcaagactttcgaagtacagggacaaaaatccgaagaaaaatgtggctacaaaacatgaagatcaagctgattgttctaggaatacttattgccttgatccttatcattgtcctctctgtttgccatggtttcaactgtggcaaaaaaataaatgctattcttagaaggctgtattagctttccccccagcttttgtgatataatcttgtgagggaaagtttaaaatacatacatatatatataatacttatatgtcat

SEQ ID NO: 20988 - DNA, 512 bp, Gossypium hirsutum
  Clone ID: LIB3584-019-P1-K1-G4
attagcctttcatatcatactatcacactaatatcttttgatgaccgatacaatgagcgcggcggggtgattattgctgcaatgaagacacgctaaagactggatcaagagagcacaatctcttgtccgaatagcaatctgtgtattatacatatattggtaatggaaatttacaccatatcattgatctatgcactgctatcttgtgtgtaagatatacatcctacacatactcaattcattgggaataatatttccataacatgttaatgcctccaaatgcattatcattttttatacaacatgttcacttacaactgttattgccacaccttcaattaccttgttgacaatggctacacatattgtgttgttgcagatgaattggctggaaggcaagtaccgattgcttttttggagcgtgtcaaggaggactttgttgtcaaaatatggtagtggaaaggctgctactgctcctgccaacattctgaacaaggaattttggccaaaac

SEQ ID NO: 20989 - DNA, 440 bp, Gossypium hirsutum
  Clone ID: LIB3146-024-Q1-K1-B4
cccacgcgtccgcccacgcgtccggactagttctagcggacgcgtgggtggccataccttcaattatcttgttgacaatggatacacttattgcgttgttgcagatgaatcagctggaaggcaagtgccgattgcttttttggagcgtatcaaggatgatttcgtgtcgaaatatgataacgggaaggctgctacagctcctgccaacagcctgaacaaggaatttggaccaaaactgaaagaacatatgcaatactgtatggagcatcctgaagaaataagcaagctggctaaggtcaaagctcaggtttctgaagttaaaggtgttatgatggagaatatcgaaaaggtgttagatagaggggaaaagatagagctgctagtggataagaccgagaatcttcataatcaggctcaagactttcgaagtacagggacaa

SEQ ID NO: 20990 - DNA, 688 bp, Gossypium hirsutum
  Clone ID: GOSHI-09MAY01-C509_7
attgcgggtcatccaatgtgttgggtgggcctgttcctgttgaaggaaatgctggcaactacagtgtcaatggaagtaactcgggtagtaaccactcaagcaatgggccacatggaagtagcaccatagctgatactgtagggacaaacatagaaagcgataatggaatagctggaaaaagtggaagcggtggaagtggtgatgcaagtggggcagggagtgggagtggtagtggaagcaacgtagaccaaagcaaatctgcacgtcgggaagctgcattgaccaaatttcgacagaagcgaaaagatcgatgcttccggaaggaggtccgatatccgggcgcgtgggcggtcgcgcggccgcgccctcgggtccgagggcaattcgtacgacaaactgtgaacaccaatgaccccttatctgaagccaattcatccgacaaatagcaaagaggaaaacactagaagagtccagctgataaggtaacaagatttgatccactcctctgataagataccttgttgtaatattatttgggaatgttaaaaagatttgatgaactccatttttattggtatatttagtgttataagctttaaagaacgtgccttaaaggggaactgaaagaaggtagaaaaacttctataataattatccattttgtgtcctaaaaaaacataatgaaaaa

SEQ ID NO: 20991 - DNA, 1222 bp, Gossypium hirsutum
  Clone ID: GOSHI-09MAY01-C509_6
gtagtagaaacatcatcagccttgtcaaatacaactttctgagtagcacttaaaaggtcattttgcattggcgggagaatggaggatgggtgcaaagatctgacaggtggatgatgcagctgacttattcttatcaactgctgctttggcaaaagcattgttagttgtggagcccatatcaatgttattgctaccgacatttgagctttgattgggaagttcattaaccaaatgagattcgttattgcatactgatccttttcttgtcaattctaaattactatcaagtgcagacgagcttccaatgttgacaacgggaaccttatttgcatttgatgcagtattataccttgagaaggctgaagagtctgatcgtctcaaaacattccgctcatcccctaactacagtcccagcatctttaacacctctaagtctcttcaacccaagttcaacagatggtgcttctttagaatcattgatggttttatcattgccatctgggatcttggaaagcctgtttgaatcctcattctctgcaatttccttcttaagatcagtagtcttagatgtagttccagtttgattagcagcctcagagttttgtttgtttgatgggctttcactattgaggtccagctgccttttcccaatctgttcactgaatttactggagctcatatcaagcaggttaatctgtttagctccaactgttctcattgggacctcaactggacactctagttgtaaatctaaatttctaggcatgcctatatccaggtccttacccactgcaacattgtcaagctgttcatcttgttcttggcacccctttgctgcagcaactggcacccacttcttcccagataattctgcatttgaatggacaacttgggcacatgtactatcagggcactcagcaacttgatctgggggtgaaaccagacgagggctgtcaacttctattgcttgttttgtccaagaattctgcaaaaaaaaaaaaaaaaagcacaggtattagttttccactacatatatccccccgtccccccacaactttgtgaccttttcatccaagtttcgagagtgatgaagttcaactgttaaggatgaggaatcagaggttgtagcccaaataccacaaagtgattaggaggatgtagcatttgtagatagttagcctaaattccccaagcaataccctaattggtgcagactaccaag

SEQ ID NO: 20992 - DNA, 1128 bp, Gossypium hirsutum
  Clone ID: GOSHI-09MAY01-C509_3
ggaagctcgtctgcacttgatagtaatttagaattgacaagaaaaggatcagtatgcgataaccaatctcatttggttaattaccttcccaatcaaagctcaaatgtcggtagcaataacattgatatgggctccacaactaacaatgcttttgccaaagcagcagttgataagaataagtcagctgcatcatccactgtcagatctttgcacccatcatctattttccagccaatgaaaaatgatcttttaagtgctactcaaaaagttgtatttgacaaggctgatgatgtaactactacagcagaactggctcaagctagaggcattcaccacgaactgcaaatgctacatccctcaaaccattatgatcaacatcaccatcttactcatggtatgcaaaagcagcagcagcggcagccaccagaacatgatgatttatctttgaaaaaattggctgcagatgctcctctttgtggatcatcaaatgtgttgggtgggcttgggttgaaggaaatgctgccaactacagtgtcaatggaagtgcctcaggtagtaaccatggaagcaatgggccaaatggaagtagcaatgcagtcaatactgtagggacaaacatggaaagtgataatggaatagctgggaaaagtggaagtggtgatgcgagcgggagtgggagtgggagtggaagcggcagtggtagtgggagcaaagcagaccagagcaagtctgctcatagggaagctgctttgaccaaatttcgccagaaaaggaaagagagatgcttccaaaaaaaaggttaggtaccaaagcaggaggcgactagcagaacaacgacctcgcatcagaggtcaatttgtgcggcaaacagtgaacaacaatgacccagcatccaatgtcaattcatgcgacaaatagtgaacaagaaaaaaagcagaacaagagatgaagtaaaccttcttgctggtactgcaaagagaccggtctagactatttgacaatgttagtcttgatgaactgtgttttatagctatagaccctcctcttttccctttttttttttcttttaatttcataatttgttgttatgaacataaattgtgcattaggggaactggaaaggtacag

SEQ ID NO: 20993 - DNA, 1065 bp, Gossypium hirsutum
  Clone ID: GOSHI-09MAY01-C509_2
ctcttcggccttctcaagtataatacggcatccgatgcaaataaggtttccgttgtcaacaccgggagctcatctgcacgtgatagtaagttagaactgacaagaaaaggatcagtatgcgatgttcaatctcctttggttaatgaccttcccaatcagtgctcaaatgttggtagcaataacatcgatatggcctctacaactgataatgcttttgccaagccagctgttttgaagaataagtcagcttcatcatccgcattcagatcgggacatccatcgtctgccttccagcctatgaaaaatgaccttttaaatgctgctcggaaacccgtattagacaaagctgatggtgtaactactaaagctggactcaaacagcctagactgactcaccaagaacttgatatgcaagaccgcctacagcatcagcagccaactgatcatgacacattatctttgaaaaaaatggctgcagacgctccccattgtgggtcatccaatgtgttgggtgggcctgttcctgttgaaggaaatgctggcaactacagtgtcaatggaagtaactcgggtagtaaccacgcaagcaatgggccacatggaagtagcaccctagccgatactgtagggacaaacatagaaagcgataatggaatagctgggaaaagtgggaagcgtggaagcggtgatgcaagtgaagtggtgatgcaagtgggacagggagccccccccggccggctacccgggcggtccaattcaaatctgcacgtcgggaagctgcattggccaaatttcgacagatgcgatatgatcgatgcttccggaaggaggtccgttatcaatgcacgatatggttagcacaacatcgacctcgtatccgagggcaattcgtgcgacaaacggtgaacaccaatgacccctcatctgaagccaattccctcgacaaatagcaaagatgaaaacacttgaagagtccagctgataaggtaacaagatttcatccactactctgataagatacctcgactgaatattatttggaaatgataaaaagatttgatgaac

SEQ ID NO: 20994 - DNA, 710 bp, Gossypium hirsutum
  Clone ID: GOSHI-09MAY01-C509_1
tcaactgagcctagttcttcatgcgaatataggcagttcaggataacacttattatcatggtttgcaacatgtatgtgagcatcatgtatgcacaattaccttgatgagtcaaaccatagttcgtatgcatctactttctgtcattctaattcatcagtcagcagcttcaatgtgacaccggaccttatttgcatttgatgcagtattataccttgagaaggctgaagagtctgatcgtctcaaaacattccgctcatccctaactacagtcccagcatctttaacacctctaagtctcttcaacccaagttcaacagatggtagttctttagaatcattgatggttttatcattgacatcagggatcttggaaagcctgtttgaaacctcattctctgcaatttccttcttaagatcagtagtcttagatgtagttccagtttgattagcagcctcagacttttgtttgtttgatgggctttcactattgaggtccagctgccttttctcaatctgttcactgaatttactggagctcatatcaagcaggttaatctgtttagctccaactgttctgattgggacctcaactggacactctagttgtaaatctaaatttctaggcatgcctatatccaggtccttacccaccgcctcctcgtcttgctcttcgcccccttcgtgccgcccctttgctgcagcaactggc

SEQ ID NO: 20995 - DNA, 657 bp, Gossypium hirsutum
  Clone ID: AI054482.1
cttaaggtaaaccggttaatacagctcagatttattcccaataagctttggaatgagtcccacgcctttatcaatggttcatcaatttataaagctcattcaagtaggtaaagtgttcgctccaatatttgaatgggacataactggtgctctcgatgtaaataacacttccagcatgcgtaatccaggcctttacccattgcgacattatcaagctgttcatctaattcttggcaccctaaagctgcagttttatggcaacccccatatctccagatgcttctgcatttgaatggataacttgagcacatgtactatcagggcactcagcaactcgatcctgaggtgagactggacgggggctttcgatttctgctgcttgtttcgtccaagaactctgagtgccactcccatcatcactaccatccccaacatttagaccgatattctcattatcttcctcgtcgttgctgccactgttgtcagaattctcaacactttctgatttctctgatttttgagttcgcgttccactctcacttccactaccactaccactagaactatggcatctcctccaaacatgctgccaaaggttcttaagctcattctttcgaataggcttcactaaaaagtcaactgcaccttttgacaaac

SEQ ID NO: 20996 - DNA, 564 bp, Gossypium hirsutum
  Clone ID: LIB3583-011-P1-K1-F10
ggaatgccttccttatctggccttgttcttttgagcaagattatgagccacaaaacacgaaaaaatgttcctgtgatcatgatgtcatctcaggattctatgaatctagtctttaagtgtttgtcaaaaggtgccgttgactttttagtgaagcctattcgaaagaatgagcttaagaacctttggcagcatgtttggaggagatgccatagttctagtggtagtggaagtgagagtggaacacagactcaaaaatctgtgagatcaaaaagtgttgagaagtctgacaacaacagtggaagcaatgatgaggaaaataacgggagcattggtctaaatattggagatggtagtgatgatgggagtggcactcagaattcttggacaaaacaagcaatagaagttgacagccctcgtctggtttcacccccagatcaagttgctgagtgccctgatagtacatgtgcccaagttgtccattcaaatgcagaattatctgggaagaagtgggtgccagttgctgcagcaaaggggtgccaagaacaagatgaacagcttgacaat

SEQ ID NO: 20997 - DNA, 426 bp, Gossypium hirsutum
  Clone ID: LIB3148-004-Q1-K1-H8
gaaaagcggatgctgtgaggcttagtgagttgccgttgtaccatctgcttgttcggtagtgggagcaaagcaaaaccagagcaagtctgctcatagggaagctgctttgaccaaatttcgccagaaaaggaaagagagatgcttccaaaaaaaggttaggtaccaaagcaggaaacgactagcagaacaacgacctcgcatcagaggtcaatttgtgcggcaaacagtgaacaacaatgacccagcatccaatgtcaattcatgcgacaaatagtgaacaagaaaaaaagcagaacaagagatgaagtaaaccttcttgctggtactgcaaagagaccggtctagactatttgacaatgttagtcttgatgaactgtgttttatagctatagaccttcctcttttcccttttttttttcttttaat

SEQ ID NO: 20998 - DNA, 422 bp, Gossypium hirsutum
  Clone ID: LIB3148-014-Q1-K1-H11
cggacgcgtgggcggacgcgtgggcagcagccaccagaacatgatgatttatctttgaaaaaattggctgcagatgctcctcattgtggatcatcgaatgtgtggggtgggctggttgaaggaaatgctgccaactacagtgtcaatggaagtgcctcaggtagtaaccatggaagcaatgggccaaatggaagtagcaatgcagtcaatactgtagggacaaatatggaaagtgataatggaatagctgggaaaagtggaagtggtgatgtgagcgggagcgggagcgggagcgggagtgggagcaaagcagaccagagcaagtctgctcatagggaagctgctttgaccaaatttcgccagaaaaagaaagagagatgctccaaaaaaaggttaggtaccaaagcaggaaacgactagca

SEQ ID NO: 20999 - DNA, 427 bp, Gossypium hirsutum
  Clone ID: LIB3197-058-Q1-M1-C2
cttttaagtgctactcaaaagatcatttttcattggctggaaaatagatgatgggtgcaaagatctgacagtggatgatgcagctgacttattcttatcaactgctgctttggcaaaagcattgatagttgcggagcccatcatctattttccagccaatgaaaaatgatcttttaagtgctactcaaaaagtagcacttgacaaggctgatgatgtaactactacagcagaactggctcaagctagaggcattcaccacgaactgcaaatgctacattactcaaaccatggtgatgcacatcaccatcttactcatggtatgcaaaagcagcagcagcggcagccaccagaacatgatgattcatctttgaaaaaattggctgcagatgctgctctgagtggatcatcaaattgcatgggtgggct

SEQ ID NO: 21000 - DNA, 590 bp, Gossypium hirsutum
  Clone ID: GOSHI-09MAY01-C499_4
caagattacgatcacaaacgacaagggtcggttgtctaaggaagaaatcgagaagatggttcaagaagcggagaagtacaactcccgcgtccgggagcacaagaagaaggttgaagccaagaacgcattggagaattatgcctacaacatgaggaacactgtcaaggatgagaagattggttcaaagcttgacccggccgacaagaagaagattgaagatgccattgatggagcaatccaatggttggatggcaaccagctagccgaggccgatgaattcgaggataagatgaaggagctcgagagcatctgcaatcctatcattgccaagatgtaccaaggtgcaggggctgacatgggtggtggcatggatgaggatgccccacctaccggtggcagcagtgccggacctaagatcgaggaagtcgactaaattaacagcttctgctggtgctatattttattttttctgcaacctatgttttgatgtctcgaaaaatctggtttatttttgggaacattaccattttaggtaatgaatgctccccgtcttaagaatatatcaacttctttatattaatgttagtttt

SEQ ID NO: 21001 - DNA, 746 bp, Gossypium hirsutum
  Clone ID: GOSHI-09MAY01-C499_2
ggatagagaaggatcaggatccatcgctttggggtggcattctattaagaccttggtcgggaaaacaacgacggagctatgactgatatgattccgagaaacactaccattcccaccaagaaggagcaggcgctttcaactgaccctgataaccaacccgggggctggatccaagcctatgagggtgagagagctcgaacccgggacaacaatttggtgggtaaatgcgagctctcatggcattccaccagcacccagaggcgttccccaaattacagtttgcttcgacattgatgctaatggtatcttgaatgcctctgctgaggacatgactactggccagaagaacaagattacgatcacaaacgacaagggtcggttgtctaaggaagaaatcgagaagatggttcaagaagcggagaagtacaagtccgaggatgaggagcacaagaatttaagaggaagaataagaaggatattagtgggaaccccagagcattgaggaggttgaggactgcttgtgagagagcatagaggactctttcatcgacagctcaactaccatcgagatcgattcattgtacgagggtattgacttttacaccacgataactcgtgcaaggtttgaggagctcaacatggatcttttaagaagtgtatggagccagttgagaagtgtttgagggatgctaagatggttaaaagcagtgtccatgaagttgttcttgatggtggttcactcgttg

SEQ ID NO: 21002 - DNA, 1635 bp, Gossypium hirsutum
  Clone ID: GOSHI-09MAY01-C499_1
gccgccgccattgcttacggtcttgacaagaaagccaccagcagtgttggtgagaaggacgtgttgattttcgatttgggtggtggtacttttgatgtttcattgcttactatccctgaaggtatctttgaagttaaggccactgctggtgatacacatttgggtggtgaggatttcgataataggatggttaaccatttcgttcaagaatttaagaggaagaataagaaggatattagtgggaaccccagagcattgaggaggttgaggactgcttgtgagagagcaaagaggactctttcatcgacagctcaaactaccatcgagatcgattcattgtacgagggtattgacttttacaccacgataactcgtgcaaggtttgaggagctcaacatggatctttttaggaagtgtatggagccagttgagaagtgtttgagggatgctaagatggataagagcagtgtccatgatgttgttcttgttggtggttccactcgtattcctaaagtgcagcagttgttgcaagacttcttcaacgggaaggagctctgcaagagcattaatcctgatgaggccgttgcttatggtgctgcggttcaggctgctatcttgagtggtgaaggaaatgagaaggttcaggatctattgcttttggatgtcactcctttgtcccttggactcgaaactgctggcggtgttatgactgttttgattccgagaaacactaccattcccaccaagaaggagcaggtgttttcaacttactctgataaccaacccggtgtcttgatccaagtttatgagggtgagagagctcgaacccgggacaacaatttgttgggtaaattcgagctctctggcattccaccagcacccagaggcgttccccaaattacagtttgcttcgacattgatgctaatggcatcttgaatgtctctgccgaggacaagactactggccagaagaacaagattacgatcacaaacgacaagggtcggttgtctaaggaagaaatcgagaagatggttcaagaagccgagaagtacaagtccgaggatgaggagcacaagaagaaggttgaagccaagaattcattggagaactatgcctacaacatgaggaatactatcaaggatgagaagattggttcaaagcttgacccggctgacaagaagaagattgaagatgccattgatggagcaatccaatggttggatggcaaccagctagccgaggctgatgaattcgaggataagatgaaggagctcgagagcatctgcaatcctatcattgccaagatgtaccaaggtgcaggggctgacatgggtggtggcatggacgaggatgccccacctaccggtggcagcggtgctggacctaagatagaagaagtcgactaaatcaaatattaagatagtattttgccgatgtttaacagcttctgctggtgctatattttatgttttcagcaacctatgttttgatgtattgaaaaaatctggtttatttttgggaacattaccatcttaggtaactaatgttccccgttttaagaattatatcaacttctctatattaatgtttagttttatcttcaaacggggaacattagttacctaagatggtaa

SEQ ID NO: 21003 - DNA, 575 bp, Gossypium hirsutum
  unsure (1)..(575): unsure at all n locations
  Clone ID: AI054924.1
agtttatgagggtgagagagctcgaacccgggacaataatttgttgggtaaattcgagctctctggcattccaccagcacccagaggcgttccccaaattacagtttgcttcgacattgatgctaatggcatcttgaatgtnctctgccgaggacaagactactggccagaagaacaagattactataacaaacgacaaggtcgggttgtcgaaggaagaaatcgagaagatggttcaagaagcgangaagtacaagtccgaagatgaggagcacagaagaaggttgaagccagaattattggagactatgcctcacatgaggaatctataagatgagagaattggtcaaacttgacccgctgacagaagaaattgaagatgccttgatgaagcaatcaatgctggatggaaccagttaccaggccatgaattcagttaaattagggactcggagctttgaatctattattgcagaagtccagtgcgggcttacatgtgnggctgccagatgcccactacggggacgggtggacctaaataaaaggctcaataattagaagtttttcgtgtaaag

SEQ ID NO: 21004 - DNA, 282 bp, Gossypium hirsutum
  Clone ID: LIB3543-058-Q6-K6-H2
cccacgcgtgcggctagagtacatctgcaatcctatcattgctcaacatgtaccaaggtgcagggcgctgacatgggtggtggcatggatgaggatgccccacctaccggtggcagcagtgccggacctaagatcgacgaagtcgactacaataacagcttctgctggcgctatattttattttttctgaaacctatgttatgatgtgctcgaaaaatctggtttatttttgggaacattaccattttaggtaatgaatgctacccgtcttaagaattatat

SEQ ID NO: 21005 - DNA, 1071 bp, Gossypium hirsutum
  Clone ID: GOSHI-09MAY01-C489_1
taagagctttgcggtgagagaaagggaggaagagggcggaagagcagcggtggccggctgtggcaaaggtaaatggccacccctctgtcctcccatttccctctttctttcttcccttctcaatcaccttccttgggaaagccttttctcttttcttcctctatttctttccccgctcttcgctttctctcttacaccaacctcacgaagctccctagaacctctctcctcgctttctcttccaacaattccggttcttctcctttcaacgatgcctccggtcccaatcctaccccatctaagaaatctgtccttaccaatctgatacaggagattgaaccactggatgttagccttattcaaaaagatgtaccccccacaactgtgggtgccatgaaaaggactatctcgggaatgttgggtttacttccatctgataggtttcaagtctttatcgaggcactatgggaacctctctccaaattgttggtttcttctatgatgactggttatacattgagaaatgctgaatataggctttgccttgaacggaaccttggttgtgaaggagatttggaaaatcaaacttcagaaaaggcaaacttcgatttacaagagatgttattggacagtacaaaaataaatgaattttcagagaaaaatgatttgtcctctgaatctgaaaaaaccattgaagaccaatttgaagatattgactttcaaggcctgggtgaaatgcccctggaaaatcgtaaatacattcttcatttgaaggctcgactaacttcagtgaaaaaggaacttcatgaaataaagaggaaaaatgctgctctacaaatgccacagtttgttggggaagaaaagaatgatttactttgactacttaagatcacttcaaccagaaaaggtagctgaacttccggcaccaacatctcctggactgaaggaaacaatccactctgtagtccatggtctacttgccactctttctccgaggatgcattccaaggttcctcctttgtcagagaacaccacaactggaactgtaaacattggagtgaagactgtgca

SEQ ID NO: 21006 - DNA, 626 bp, Gossypium hirsutum
  unsure (1)..(626): unsure at all n locations
  Clone ID: LIB3583-053-P1-K6-E9
cccagcgtccgcccacgcgtccgcgggcgcgtggggaaaaaaaaaaccgtaattggcggagaaagacgacggagaggaagagccgcggtggcangaaattaaaactatatggccgcccctctttcctctcatttccgtcccctttgcttctcttcccaatcatgttcgattccaaagcccaatctctttccttcctctctctccttccctcctcttcgctccctctccccttcgaacgctaaaaaattctccaaatcccctctcctcgctttctcttcctctgattttgatgcctctcatttcaatgatggcttcggtcccaatcctaccccatctaagaaatctgtccttaccaatctgatacaggagattgaaccactggatgttagccttattcaaaaagatgtcccccccacaactgtggatgccatgaaaaggactatctcgggaatgttgggtttacttccatctgataggtttcaagtctttatcgaggcactatgggaacctctctccaaattgttggtttcttctatgatgactggttatacattgagaaatgctgaatataggctttgccttgaacggaaccttggttgtgaaggagatttggaaaatcaaacttc

SEQ ID NO: 21007 - DNA, 313 bp, Gossypium hirsutum
  unsure (1)..(313): unsure at all n locations
  Clone ID: LIB3120-026-Q1-K1-A3
gccacgcgtncgcccacgcgtgcggccacgcgtccgctctcatttcaatgatggcttcggtcggaatcctaccccatctaagaaagctgtccttaccaatctgatacaggagattgaaccactggatgttagccttattcaaaaagatgtcccccccacaactgtggatgccatgaaaaggactatctcgggaatgttgggtttacttccatctgataggtttcaagtctttatcgaggcactatgggaacctctctccaaattgttggtttcttctatgatgactggttatacattgagaaatgctgaatat

SEQ ID NO: 21008 - DNA, 608 bp, Gossypium hirsutum
  Clone ID: GOSHI-09MAY01-C459_3
ctagtatactgttcgaagaaaaaaaacagccaaataagcttctttttttccttcacagatctcagatccaaaatccaaatctaagagtgtaagcaattacataaaatatattattataagagtaaaaagcaaagcaaaaatgtcaaggaggcaagtaagttccacacgccgctttgttgacagcggaaacttcccgttctctggtgctttacattctaaagcccgatcttctcctattttatctatcgctcttgtcgttgtgggagctatccttctcattggctatgcctatagtggttcaggtaaattccgaggtgaagcggttagtcggatcgaaggtgactatacatgcagtctagaagttcagagggcaataccatttttgaagaaggcatatggggacagcatgcacaaggttttgcatgtaggacccgatacctgttcagttgtctctaaacttttgaaagaagaggatactgaagctctgggtgtggaaccatatgatatagaggatgttgaagaaagttgcaagagtcttgtgggcaaagggattgtacgtgtggcagatatcaagtaccctcttccctataaaccaaagtcttttctct

SEQ ID NO: 21009 - DNA, 1410 bp, Gossypium hirsutum
  Clone ID: GOSHI-09MAY01-C459_1
gtggatcttagctttaagcaaaaacaactttaaataaataaataaaaataaaaacagtgggatatagaataaaactactgcgtatccaattcaatccaaagtccctttcaaactcagtataccgttcgaagaaaaaaaccagcaaaaacaagtgttttttttccttcacagatctgagatccaaaagcctctcattcttcctctaagtgtaaagaattatttcaaagatatttattataagagagtaaaagcaagcaaacatgtcaagaaggcaagtaagttccacgcgccgctttgttgacagcggaaacttcccattctctggtgctttacattctaaatcccgatcttctcctattttatctatcgctcttgtcgctgtgggagctatccttctcattggctatgcctatagtggttcaggtaaattccgaggtgaagcggttagtcggatcgaaggtgactatacatgcagtctagaagttcagagggcaataccatttttgaagaaggcatatggggaccgcatgcacaaggttttgcatgtaggccctgatacctgttcagttgtctccaaacttttgaaagaagaggatactgaagcctggggtgtggaaccatatgatatagaggatgttgaagaaagttgcaagagtcttgtgggcaaagggattgtacgtgtggcagatatcaagtaccctcttccctataggccaaagtctttttctcttgttattgtgtcggatgcccttgattacttgtcttcaaaatacctgaacaagactctgcctgagttggccagggttgcctcggatggtctcattatttttgcaggtacccctggtcatcagaaggctaaagtggcagaactgtcgaaattcggccgtccagctaaaatgcggagttcctcttggtggattcgttttttcgaccaaagtagtttaaaagaaaacgaaactgccgtgaagaagtttgagcaggctacgtcaaagagttcatacctgccagcatgtcaagtattccacctaaatccataccactgatacaaagagaaaagtcatcaagatcaaatttccattatttttgttgtcatatgcattgaaggtgaagtaaaaatatcttcagctctcatacaacatgtactctgttggggaactaaatttggtaaaagagatgttggtatcaatggtttaatgcccttaacattacaggtttgatatttattaattcaatcgatggggaaaattacatctatttgttgtagacatgcatttatttagttatattgttttctgaatgtggaagtaaatctagcttcccattatgagattacccatatttctatttatggcatgccttttttaatctgctcttggaaaaaaaaaaaaaaaaaaaaaaaaaaaaactcga

SEQ ID NO: 21010 - DNA, 369 bp, Gossypium hirsutum
  unsure (1)..(369): unsure at all n locations
  Clone ID: LIB3583-042-Q6-K7-C6
ccccgcgtccgggtttgcatcttctgtgataaatggaagnactgaagtttatgattataatggatttgccatgctctgttaagggtgtgttttcattgagtgtaatgttcntgaaaatcaattatttcttgttatctttgtaggtgactatacatgcagtctagaagttcagagggcaataccatttttngaagaaggcatatggggacagcatgcacaaggttttgcatgtaggacccgatacctgttcagttgtctctaaacttttgaaagaagaggatactgaagcctggggtgtggaaccatatgatatagaggatgttgaagaaagttgtaagagtnttgtgggcaaagggattgtanngtgtg

SEQ ID NO: 21011 - DNA, 353 bp, Gossypium hirsutum
  unsure (1)..(353): unsure at all n locations
  Clone ID: LIB3148-006-Q1-K1-A12
acgcccacgcgtccgcccacgcgtccgcaaatttccattatttttattgtcatatgcattgacggtgaagtaaaaatatcttcagctctcatacaacatgtaactctgttggggaactaaatttggtaaaagagatgttggtatcaatgggttaatgcccttaacattacaggtttgatatttattaattcaatcgatggggaaaattacacctatttgttgtggacatggatttatttagttatattgttttctgaatgtggaagtaaatctagcttcctattatgagattacccatnnnaaaaaaaaaaaaaaaaaaaaaaaaaaaaaaaaaaaaaaaaaaagaagggggg

SEQ ID NO: 21012 - DNA, 319 bp, Gossypium hirsutum
  unsure (1)..(319): unsure at all n locations
  Clone ID: LIB3145-025-Q1-K1-B2
cccacgcgtccgcccacgcgtccgcccacgcgtccgcccacgcgtccgatcaagatcaaatttccattatttttgttgtcatatgcattgaaggtgaagtaaaaatatcttcagctctcatacaacatgtactctgttggggaactaaatttggtaaaagtgatgttggtatcaatgggttaatgcccttaacattacaggtttgatatttattaattcaatcgatggggaaaattacaccntnnnaaaaaaaataaaaaaaaaaaaaaaaaaaaaaaaaaaaaaaaaaaaaaataaaataaaaatattaaaataaaat

SEQ ID NO: 21013 - DNA, 1116 bp, Gossypium hirsutum
  Clone ID: GOSHI-09MAY01-C469_1
cgaaagggcagagggcaggaaggagttgtctggttcttgcaactgctgcccctgtgagcaaagaagtttcagcaaatcccaggtctggttctgatcagtccccaaatgattcttcaaagcctcagcgggtcatggttattggcggggatggctactgtggttgggctacagcccttcacctgtccaataaaggttacaaggttgctattgtggatagccttgttcgacggctctttgaccaccagcttggtcttgactccttaacacccatttcctccatccataaccgactccgttgttggaaagctataactgggaagacaattgaactttacattggtgatatttgtgactttgagttcttatctgaaaccttcaactcgttcgaacctgatgctgttgtccattttggagagcagcggtctgctccatattcaatgattgatcgatcacgagctgtgtttactcagaaaaataatgtgattggaacgcttaatgttctttttgcaatgaaggaattcagagaagagtgccatcttgtaaagcttggaacaatgggagagtatggaactcccaacatagatatcgaagagggttatataacaattagtcacaatggaaggactgatactttaccttatccaaagcaagctagctccttttatcatctcagtaaggttcatgattcaaataatatagccttcacttgcaaggcttgggggatcagagccactgatctgaatcaaggagtggtttatggggttaagaccgatgagacttcaatgcatgaacagctgtataacaggttagattatgatggagtatttggaacagcattgaatcgggtctgtgttcaggctgctggcggtcatcctcttacagtctatgggaaaggaggccagactaggggttaccttgacatcagagacacggctcaatgcgtggaacttgccattgcaaatccagcaaagcctggggaatttcgggtgttcaatcaattcaccgagcagtttttccgtcaatgaactggccgcccttgtaacaaaagcaggacagaagcttggacttgacgtgcataccatatttgtggccaacccaagaattgaggcagaggaa

SEQ ID NO: 21014 - DNA, 872 bp, Gossypium hirsutum
  Clone ID: GOSHI-09MAY01-C439_2
caccagcaagcattggcacaggttacggctcaagctgctctagtgcaatctcatgtgcatgcgcaaccggaatatcaaactttgtctgctgcaggttctttggaaccatcgatccctccttcatctggcaatcctgaagaaacttcgcagcagatgctttcttcagaccctcaaagttctgcaatggaatacttggaagcttctcaattcgataaaaaaagtcagccttgtgttgctgtcgataaaccgaccgaggatggttacaactggcgtaagtatggacagaagcaaattaaaggttgtgagtatccgcggagctactataaatgtacacatccgagttgccctgtcaaaaagatagtcgagcgttctgccgagggcctaataaccgaaattatatacaaaagcacacataatcatgaaaagcctccaccaaataaacaaccgaagggtggaagtgatggaaacacaaattcacagggtaatccggaactaggttctctggctgtagctggaaattcgaacaacttaagtgaagggaaaaatcatgaatcaactcaagcggtggaattacctggatttagtgattgtgaggaaggatgtgatgaagagagtcgagaagaaagagatgatgatgaaccaaatccaaaaagaaggaatagcacaggggaagctgcagtagtgttgtcacacaaggctgtcgcggatgcaaaaattatcgtgcaaacaagaagtgaagttgaccttttagatgatggctatcggtggcgcaaatacgggcagaaagttgtcaaagggaaccctcatccaaggagctattacaaatgcacgagtgcaggatgcaatgttcggaagcatgtggaaagagcttc

SEQ ID NO: 21015 - DNA, 1417 bp, Gossypium hirsutum
  Clone ID: GOSHI-09MAY01-C439_1
ctcagagtcctttcggaatatcccatcgtcaagcattggcacaggttacagctcaagctgccctagcacaatctcaagttcatccacaaaccgaatatcaagcgttgacggtatcagctccgtcggagtcattgatccgtcatccatccttcactcctgaagaaacttcacagttgatgcctcctttggcctcagaacctcagggttctgcaatagaatactcgggagcttcccaatctgataggaaaaaccagcttcctattgctgtggataaacctgctgaagatggctacaactggcgtaagtatggacagaagcctattaaaggctgtgagtatccacgaagctactacaagtgtacctatcttaattgccctgtgaaatagatggtggaacgatctgcttatggccaaataaccgaaattatatacaaaggcgctcacaatcatgtaatgcctcagcaaaataaaccaagcaaaggggtggtagtgatgggaaatgcaaattcacaggcatatcctgaatttggttctcaggttgcagctttaaattcgaacaagttaagtgaaaccatgtcgtctcattcgatactgggggaaaacttctgaatctactcaagctgcagaattacctggatcaagtgacagtgagggaggatgtgatgaacagagtcgagaagaaagagatgatgatgaaccaaatttgaaaagaaggaatactgcgccggaagctgcagtagtgttgtcgcacaagacggtcacagaaccaaaaattatcgtgcaaacaagaagtgaagttgaccttttggatgatggctatagatggcgcaaatatggacagaaagtggtgaaagggaaccctcatccaaggagctattacaaatgcacgagtgctggatgcaatgttaggaagcatgtggaaagagcatcaactgacccaaaagcagtcataacaacatacgaggggaagcataaccacgacgttccagcagctagaaacagcagccacaacatggtgaacaacagtttgtcgcagacaaaaccgcacaaggttgtggctgagaaccagaaccattctttacttaaagcgatggattttggaaacaatggtcagggaccagcagttttaaggctaaaggaggagcagataagagtgtaatcccccacctcttaaaagcagccagggtctggccattcattggtatggggatgcacaagggtggaataaataacgcaggtgaaattgaaggataaatccatggtgaagcataatataattacccagttttgaacgttttggaatttataagtaatgttgtaaagcatgttagggcttgtttgctgctgctgccactaatttatactttgtaagattcagttaaaatgacaataagcaattactgattatgtttatgtcc

SEQ ID NO: 21016 - DNA, 524 bp, Gossypium hirsutum
  Clone ID: LIB3584-030-P1-K1-D5
ccggaacgaagcccgactcaccgacgcgtgcaatattaagtagctctgaattcgagaaaaacatcttctttgggttacttgcagataaactggcggaggtggctgacaagtgtttctagattgactagaatcaaattaaaggttgtgagtgtctgcggagttactgtaactgaacacatacccgttgccctgtcaaaaagattggcatccgttttgccgatggcctaatatccgaaattatatacaaaatcgcacataatcatgaaaagccttcatcaaataaacaactgaagggtggaagtgatggaaacacaaattaacagggtaatccggaactaggatctctggctgtatctggaaattccaacaacttaggtgaatggaaaaatattgattcaacttaagtggaggaatcacctggatttattgattgtgaggaaagatttcatgaatagagtcggggaacaaagatatgatgatgaaccaaatccaaacaggaggaatagcacatgggaagctgcagt

SEQ ID NO: 21017 - DNA, 520 bp, Gossypium hirsutum
  Clone ID: GOSHI-09MAY01-C429_18
ggagacgcgtccgcggacgcgtccgcccacgcgtcctcccactcgtgcgctcggttacgtacatgaagactcggtatcaactgactctgttggggacagcaggggaagcatctttgatgccaaggctgttattgcattaaatgacaattttgttaagcttgtcgcgtggtacgataacgaatggggttacagttctcgtgtgatcgacttgatccggcacatggcttctgcctaagtgagtgattttggtgaaccaaactcatttcataatggactttttaataatagcctcgttcttcagctttagcaaaatatggaagagatgctatgggaataataatagaaattgctcgggattctgcgaggctctaattgtacactgtaattgtgttctgtctgaaacacttgtaatatatataattacgaggaaacaaacaaacaaggcaaggctaaggtaaccttgggaacaaaaaaaaaaaaaaaaaagggcggcgccgcgatctagaaccggacgcgtggg

SEQ ID NO: 21018 - DNA, 546 bp, Gossypium hirsutum
  Clone ID: GOSHI-09MAY01-C429_14
aataaaactgaaacaacccttcttcacacaaaaatatgctccgtacaattcgtttattctctcataacatctcttctaaattaaaattgctaaagcttggatacaccaagcacaatcactcactcaattaaggctgctatcaaggcggaatctgaaggcaacttgaagggaattcttggttatgtagacgaagatttagtctcaactgacttcatcggagactccaggtctaccattttcgatgccaaggctggaattgctttgagcgacaactttgtgaagcttgttgacttggtatgactaacgagtggggttacagttcccgtgtgatcgacttgatcagacacatggcttctgttaactgagtgattttggtgtaccagtcattacatcatgtaatttttagcctctttcttgaagcttttgggaaactgaagagattttcttggaaataatagaattgcacgggacataaatcagtgaacccgtatgcatcttttgaaacagtttttattttgtttaaattggatttttattttgattgtt

SEQ ID NO: 21019 - DNA, 439 bp, Gossypium hirsutum
  Clone ID: GOSHI-09MAY01-C429_12
cccacgcgtccgcccacgcccctccccccccgccgcgcgaatttgcttccggttgatctttgttacgagatgagcgggtgtaggtggttcatgatgtggaaagatcaacgatcggaatcaatggatttggaaggatcgggcgtttggttgcgagagttgctctccaaagcgatgatattgagctcgttgctgttaacgatcctttcatcaccactgaatacatgacctacatgtttaagtacgacagtgttcacggtcaatggaagcatcatgagcttaaggtggaggactcaaagacccttctctttggcgaaaagcctgtcacaggtttcggtctcagataccctgggggaatcccatgggctgaggctggagccgagtgggttgctgtgtatggctaacgctggacccggaacgaacgggtctcagttcatcattt

SEQ ID NO: 21020 - DNA, 719 bp, Gossypium hirsutum
  Clone ID: GOSHI-09MAY01-C429_9
aattactgtttcgtcccacgcggccgcctgattggaattctcggatatggagacgaaggtggagttttaactgactttatcgtggacaacaggtcaagcatttttgatgccaaggctggaattgctatgaatgacaactttgctaagcttgtgacttggtatgacaacgaatggggttacagttcccgtgttatcgacttgatccgacacatgtctaaggcttaagtgagtgagtgattgtgcttggtgtatccaagctttagcaattttaatttagaagagatgttatgagagaatataacgaattgtacggagcatatttttgtgtgaagaagggttgtttcagttttattacccaagtacttgaatgtttcaagtttccttgcaaaggaatggtatttctactttaatgcttacgtggtgcactctggtttctctacttaaaaaaaaaaaaaaaaaaaaaaaaaaaaaaaaaaaaaaaaaaaaaaaaaaaaaaaaaaaaaaaaaaaaaaaaaaaaaaaaaaaaaaaaaaaaaaaaaaaaaaaaaaaaaaaaaaaaaaaaaaaaaaaaaaaaaaaaaaaaaaaaaaaaaaaaaaaaaaaggggggggcggtttaaaaaaaaaaaattttaagggggggggggggggggaaaatttttttttttggggaaaaaaaaaaaatttgggggggggtgttttaaaaggggggggtgggaaaa

SEQ ID NO: 21021 - DNA, 622 bp, Gossypium hirsutum
  Clone ID: GOSHI-09MAY01-C429_8
gttatcactcactgagcccttcactctccgatctctctactccttttatcgtcttcattaaggtttgatttcgtttctccgtcatggcaaagatcaagatcggaatcaatggattcggaaggattggacgtttggttgcgagagttgctctccaaagcaatgatattgagctcgttgctgttaacgatcctttcatcaccactgattacatgacctacatgtttaagtacgacagtgttcacggtcaatggaagcaccatgaacttaaggtgaaggactcaaagaccttgctctttggcgaaaggcctgtcactgtttttggcatcagaaaccctgaggaaatcccatggggtgaaaccggcgctgattatgttgttgagtctaccggtgttttcactgacaaggacaaagctgctgctcacttgaagggtggtgcaaagaaggtggtcatctctgctcccaggaaggatgcccccacgtttgttgtgggtgtcaatgaaaaggaatacaagtctgacctcaacattgtctccaatgctagttgcactaccaattgccttgctccattggctaaggtcatccacaacaattttggcattgttgaaggtcttatgacaacttt

SEQ ID NO: 21022 - DNA, 648 bp, Gossypium hirsutum
  Clone ID: GOSHI-09MAY01-C429_6
ggactggagaggtggtagagctgcttacttcaatatcattcccagcagcactggagctgccaaggctgttggcaaagttttgccagcgttgaatggtaagctgactggaatggctctccgtgttcccaccggtgatgtctccgtcggtgaccttactgtgagactcgagaagaaggcttcttacgaagatatcaaggctgctatcagggaggcttctcagaccaccatgaagggaattctgggttacgtagatgaagatttggtctcaaccgactttgtcggagacagcaggtcaagcatttttgatgctaaggccggaatcgcattgaatgacaactttactaagcttgttgcgtggtatgataatgagtggggttatagttctcgagtgatcgacttggttcgacacatggcttcttgctaagtgagtgaagttttagcttctaacttcagctttggcaagcaatttagaaactagaagagatattcctgtcttttgggtgttggtcatgcagataatagaaattgtatgcaacatttttttttcgtgtgaacactcttcttttgagtggattggaagggtttctattttgactcccttcatccattttatgacaataataattgcaagatcaactgaaaaaatat

SEQ ID NO: 21023 - DNA, 1165 bp, Gossypium hirsutum
  Clone ID: GOSHI-09MAY01-C429_5
atcgctcacgcgtccccccacgcgtccgatcagtgcattaccactttgatctaatcctcaatttcccaatttcttctgaaaccctaatcctaaattgattccccaacttcggtgttccaatggccactgaggaaccaactgtcgccgtggaatctgcgcctgagccggcggaagagaaccccgctgaggctacagccaatcccaaatctggcaaagcaaagaaagctaaagagcccaaagccaagaaggctgcagctcctaggaagccacgagcttctcctgctcatcctccttacgaagagatggtcaaagatgcaatcgttactttgaaggagaagactggatcaagtcagtatgctatcactaaattcattgaagagaaacagaagaatcttcctggaaattttaagaagcttctgcttttccatttgaagaagcttgtggctgctgggaagttggtcaaggttaagaattcgtataaacttccttcggctaaggcttcgaagccggctacaactgcttctgctccggctaagaagaagccggctgctaagtccaaacctgcttcgaaggccaaggaagggaaacgtgctaaaacaacttctaaatccccttctaagacaaaggctaaagcggcggctaaaccaaaggctgctcctaaggctaaatccaccgcaacgaagacgaaggctgtggctgctgtgaagccgaaggcgagtgcatctgctaagccaaaaaccgtagctaaatcgaaggcgaagccaaaggaaaagccggctaaggcttcgaggacttcaacaaggacttctcctgggaagaaggcggctgtccctaaagctactccgaagaaggctgccgcgcctaaaaaggctccttcgaagagtgctaagccgaaaagtgtcaaatcaccggcgaagaaagctacgacgaggaggggaaagaaatgagaagggaggctagtcgaaataggggtagtattgtaaattggagtgatgtatagtgggtgtatatggatccacgtatacccacgagatataacattcagatctcttttttaatatttttatttgagttggttcttttttttttggtgagtttaaaagttgaaacagttgttagatgtaactttcagttgaatgtattatgagataaacttagagctttg

SEQ ID NO: 21024 - DNA, 1230 bp, Gossypium hirsutum
  Clone ID: GOSHI-09MAY01-C429_4
ggactcaaaaacccttctctttggtgaaaagcctgtcactgttttcggcatcagaaaccctgaagaaatcccttggggtgagactggagctgattatgtccccgcgtctactggttttcactgacagggacaaagctgctgcccatttgaagggtggtgcaaagaaggtaatcatctctgctcccagtaaggatgctcccatgtttgttgtgggtgtcaatgagaaggaatacaagcctgaccttcacattgtatccaatgctagctgcactaccaactgccttgctccattggctaaggtcatccatgacaaatttggcattgttgagggtcttatgaccactgtccattcgattactgctactcaaaagaccgttgatggtccatcaatgaaggactggagaggtggtagagctgcttcgttcaatatcattcctagcagcactggagctgccaaggctgttggcaaagtgttgccatcattgaatggcaagctgactggaatggcattccgtgttcccacagttgatgtctctgtagttgacctcacggttaggcttgagaagaaggcttcttatgaagatatcaaggccactatcaaggcggaatctgaaactaatttaaaaggaattcttggctacgtagatgaagacttggtatcaactgactttgttggggacagcaggtcaagcatctttgatgccaaggctggcattgcattaaatgacaattttgttaagcttgtcgcgtggtacgataacgaatggggttacagttctcgtgtgatcgacttgatccggcacatggcttctgcctaagtgagtgattttggtgaaccaaactcatttcataatggactttttaataatagcctcgttcttcagctttagcaaaatatggaagagatgctatgggaataataatagaaattgctcgggattctgggagtttctaattttacactgtaattgtgttctgtctgaaacacttgtaatatatataattacaaggaaccaaacaaacaaggcaaggctaaggtaaacttgggaacaagagctaaacattctatttagcatcaaaacttaaagaatttaatttacttgtttaaatctaaaaaaaaaaaaaaaaaaaaaaaagaaaaaaaaaaaaaaaaaaaataaaaaaagaaaaaaaaaaaaataaaaaaaaaaaaaaaaaagaaaaaagaaaaaaaaaaaaaaaagggggggc

SEQ ID NO: 21025 - DNA, 1186 bp, Gossypium hirsutum
  Clone ID: GOSHI-09MAY01-C429_3
cccacgcgtcccactctttttattttcactcacttcacctgagattttgttttcttttgtttttcagtaatggggaagattaagatcggaattaacggatttggaaggatcgggcgtttggttgcgagagttgctctccaaagcgaagatgttgagcttgttgctgttaatgatcctttcatcaccactgattacatgacctatatgtttaagtacgacagtgttcacggtcaatggaagcaccatgagcttaaagtgaaggactcaaagactcttctctttggtgaaaagcctgtcactgtttttggcatcaaaaaccctgaggaaattccatggggtgaggctggtgctgaatatgttgttgagtctaccggtgtcttcactgacaaggacaaagctgctgctcacttgaagggtggtgcaaagaaagtgattatttctgctcccagtaaggacgcccccatgtttgttgttggtgtaaatgagaaggaatacaagcctgatcttgacattgtctccaatgctagctgcacaaccaactgccttgctccgttggctaaggtcatccacgacaaattcggtattgttgagggtcttatgaccactgtccattcaattactgctacccaaaagaccgttgatggtccatcaatgaaggattggagaggtggtagagctgcctccttcaatatcattcccagcagcactggagctgccaaggctgttggcaaagttttgccagcattgaatggcaagctcactggaatggctttccgtgttcccactgttgatgtctctgtagttgacttaacagtgagacttgaaaaggctgctagttatgaagatattaaggctgccatcaagaaagaatctgaaaccaacttgaagggaattcttggttacgtggatgaagatttggtctcaacagactttgtcggagattcagcaggtctagcattttcgatgctaaggccggaatcgctttgagcgacaactttactaagcttgttgcgtggtatgataatgagtggggttacagttcccgagtgatcgacttggtcagacaccatggcttcttgctaactgagtgatgttcgtgtaacagtcgttacatcatggacttcagctttggcaagcaatttaggaactagaagagatatgcctgccttttgggtgttggtcatgc

SEQ ID NO: 21026 - DNA, 912 bp, Gossypium hirsutum
  Clone ID: GOSHI-09MAY01-C429_2
gcgctgtcaccaatacttcctctcatatataatcttaccccctttttactcattttttcctctcaattctcacttcctttccttccgttcttttgccgtcgtattttttttccagagatttgttcttttcgcttctttcgatatggggaagatcaagatcggaatcaacggatttggaaggatcgggcgtttggttgccagagttgctctccaaagtgaagatgttgagctcgttgctgttaacgatcctttcatcaccaccgattacatgacctacatgtttaagtatgacagtgttcacggtcaatggaagcaccatgagcttaaggtgaaggactcaaaaacccttctctttggtgaaaagcctgtcactgttttcggcatcagaaaccctgaagaaatcccttggggtgagactggagctgattatgtcgttgagtctactggtgttttcactgacaaggacaaagctgctgcccatttgaagggtggtgcaaagaaggtaatcatctctgctcccagtaaggatgctcccatgtttgttgtgggtgtcaatgagaaggaatacaagcctgaccttcacattgtatccaatgctagctgcactaccaactgccttgctccattggctaaggtcatccatgacaaatttggcattgttgagggtcttatgaccactgtccattcgattactgctactcaaaagaccgttgatggtccatcaatgaaggactggagaggtggtagagctgcttcgattcaatatcattccctagcagcactggtgactgcactagtattgtcaaatgtttatcatgaatgtaactgtactggatgctatctattccatattaaattttaattgacttcgtttgcataaaaagctatttaaatacactccttctagtgaag

SEQ ID NO: 21027 - DNA, 1431 bp, Gossypium hirsutum
  Clone ID: GOSHI-09MAY01-C429_1
cccacgcgtccgcccacgcgtccgcccacgcgtccgcccacgcgtccgcctcactccgccatcttcaataatttcttccgttgatctttgttagagattagctttttaatttttcattatgggaaagatcaagatcggaatcaatggatttggaaggatcgggcgtttggttgcgagagttgctctccaaagcgatgatattgagctcgttgctgttaacgatcctttcatcaccactgaatacatgacgtacatgtttaagtacgacagtgttcacggtcaatggaagcatcatgagcttaaggtgaaggactcaaagacccttctctttggtgaaaagcctgtcacagttttcggtatcagaaaccctgaggaaatcccatgggctgaggctggagctgagtatgttgttgagtctactggtgtttttactgacaaggacaaggctgctgctcacttgaagggtggcgcgaagaaggttatcatttctgctcccagtaaggatgctcccatgtttgttgtgggtgtcaatgagaaggaatataagcctgaccttaacattgtctccaatgctagctgcaccaccaactgtcttgctccattggctaaggtgatcaacgataaatttggcattgttgagggtcttatgaccactgttcattctattactgctacacaaaagactgttgatggtccttccatgaaggactggagaggtggtagagctgcttccttcaatatcattcctagcagcactggagctgccaaggccgtcggcaaagttttgccagcactgaatggcaagctgactggaatggctttccgtgttcccactgttgatgtctctgtggttgacctcactgtgagacttgagaagaaggctacatatgatgaaattaaggctgctatcaaggcggaatctgaaggcaacttgaagggaattcttggttatgtggacgaagatttagtctcaactgacttcatcggagacaacaggtcaagcatttttgatgccaaggctggaattgctttgaatgacaactttgttaagcttgtgacttggtatgacaacgaatggggttacagttcccgtgttatcgacttgatccgacacatgtctaaggcttaagtgagtgagtgattgtgctttgtgtatccaagctttagcaattttaatttagaagagatgttatgagagaataaacgaattgtacggagcatatttttgtgtgaagaagggttgtttcagttttattacccaagtacttgaatgtttcaagtttcattgcagttgtttctctactttaatgcatatgttgtgattatggtttctctacttaaattgatatcttgtgattatgttaaaaaaaaaaaaaaaaaataataataaatattttaataatttttttttttttttattttttttttaat

SEQ ID NO: 21028 - DNA, 846 bp, Gossypium hirsutum
  Clone ID: uC-gsronu33B004d05b1
cccacgcgttcgcccacgcgtccgcccacgcgtcggatttcttccgttgatctttggtagagattagctttttaatttttcattatgggaaagatcaagatcggaatcaatggatttggaaggatcgggcgtttggttgcgagagttgctctccaaagcgatgatattgagctcgttgctgttaacgatcctttcatcaccactgaatacatgacgtacatgtttaagtacgacagtgttcacggtcaatggaagcatcatgagcttaaggtgaaggactcaaagacccttctctttggtgaaaagcctgtcacagtttttggtattagaaaccctgaggaaatcccatgggctgaggctggagctttgtattttgatgagtctattggtcgttttactgttcttggctctggtttctactccattgattgttttcgctagtgagctttttttattctttcattgctattttattattttgctccgtttgacctgctttgatttttgttctttttttattattaactctttttatatatatgccttttttcttctccacttctttgattcttacattgattttttattatctttcccatgtctcttttatattattattttgttgtttctcacttatttctatttatttgccttacagcattctgtcttttatttactttttctttttctttttccttatttggttattctttctattattcttattttctacttggttttttttcttctttatcttttttttgtcttaatcttcatatattacttttttttttttatatattatttttatattttttatttgtttttatatttaatttatatttt

SEQ ID NO: 21029 - DNA, 419 bp, Gossypium hirsutum
  Clone ID: LIB3135-002-Q1-K1-B12
gaaattaaggctgctatcaaggcggaatctgaaggcaacttgaagggaattcttggttatgtggacgaagatttagtctcaactgacttcatcggagacaacaggtcaagcatttttgatgccaaggctggaattgctttgaatgacaactttgttaagcttgtgacttggtatgacaacgaatggggttacagttcccgtgttatcgacttgatccgacacatgtctaaggcttaagtgagtgagtgattgtgctttgtgtatccaagctttagcaattttaatttagaagagatgttatgagagaataaacgaattgtacggagcatatttttgtgtgaagaagggttgtttcagttttattaaaaaaaaaaaaactttaaaaaacatatattaaaaaataaaaattcaaaatagat

SEQ ID NO: 21030 - DNA, 698 bp, Gossypium hirsutum
  unsure (1)..(698): unsure at all n locations
  Clone ID: LIB3583-050-P1-K6-E2
ccgggtcgncccagcgtccgcttcctttacttccgttcttttgccgtcgtattttttttcagaaattgttttttttcgcttctttcgaatatggggaagatcaanatcggnaatcaacggatttggaaggatcgggcgtttggttgccagagttgctctccaaagtgaagatgttgagctcgttgctgttaacgatcctttcatcaccaccgattacatgacctacatgtttaagtatgacagtgttcacggtcaatggaagcaccatgagcttaaggtgaaggactcaaaaacccttctctttggtgaaaagcctgtcactgttttcggcatcaggtgatatcatgtgtttctttttcaaaatgggttgttgtaattgacttgaggaacatggtgagttttccatttaggagctattttttttattggcttttgatttatgccagaaaccctgaagaaatcccttggggtgagactggagctgattatgtcgttgagtctactggtgttttcactgacaaggacaaagctgctgcccatttgaagggtggtgcaaagaaggtaatcatctctgctcccagtaaggatgctcccatgtttgttgngggtgtcaatgagaaggaatacaagcctgaccttcacattgtatccaatgctagctgcactaccaactgccttgctccattggctaaggtcat

SEQ ID NO: 21031 - DNA, 509 bp, Gossypium hirsutum
  Clone ID: uC-gsflmaxxa042e12b1
cacgcgtccgctttgatcaatccttaatttcccaatttcttctgaaaccctaatcctaaattgataccccaacttcggtgttccaatggccactgaggaaccaactgtcgccgtggaatctgcgcctgagccggcggaagagaaccccgctgaggctacagccaatcccaaatctggcaaagcaaagaaagctaaactgccttgctccattggctaaggtcatccatgacaaatttggcattgttgagggtcttatgaccactgtccattcgattactgctactcaaaagactgttgatggtccatcaatgaaggactggagaggtggtatagctgcttcgttcaatatcattcctagcagcactggagctgccaaggctgttggcaaagtgttgccatcattgaatggcaagctgactggaatggcattccgtgttcccacagttgatgtctctgtggttgacctcacggttaggcttgagaagaaggcttcttatgaagatatcaag

SEQ ID NO: 21032 - DNA, 377 bp, Gossypium hirsutum
  Clone ID: LIB3197-026-Q1-M1-G1
gcctcttttattcctacccatacacctttgcgacggggcggttctcactatggcttatgggaaactacaacatccctatcaaagcactcgaaaagatccggccgttggtttccagaattgcttttccaaaccataatattgaactcgctcgtgataacgatcctttcatcaccactgaatacatgacgtacatgtttaagtacgacagtgttcacgcgcaatggaagcatcatgagcttaaggtgaaggactcaaagacccttctctttggtgaaaagcctgtcacagttttcggtatcagaaaccctaaggaaatcccatggcctgaggctggaacctaaatttttgttgagcttactgtgttttactgacaagga

SEQ ID NO: 21033 - DNA, 423 bp, Gossypium hirsutum
  Clone ID: LIB3584-045-P1-K2-E8
accacgcgggcgtggttatatctgacagatacatggtgcaatctctgcagtagacctcactgtgagacttgagaagaaggctacatatgatgaaattaaggctgctatcaaggcggaatctgaaggcggcttgaagggaattctcgcttatgtggaccaagatttagcctcaactgacttcatcggagacaacaggtcaagcatttttgatgccaaggctggaattgctttgaatgacaacaacgttgagcttgccactctgaatgacatcgaatggcgttacagtttccgcggtatcgacttgatccaacagatgtctaccgattaacttagcgaacgattgcgcattctgtatgcaaactggaacactccttatttcgacgaaataatctcagagaatgaacgaattacacgcagcatatc

SEQ ID NO: 21034 - DNA, 355 bp, Gossypium hirsutum
  Clone ID: uC-gsflnu33B110a10b1
tttttgctttagcaattttaatttagaagagatgttatgagagaataaacgaattgtacggagcatatttttgtgtgaagaagggttgtttgagttttattacccaagtacttgaatgtttcaagtttcattgcagttgttcttctactttaatgcatatgttgagattatggtttctctacttaaatgaaataatggtgggacctaccaaagttattaacaaaaaggttgctgacaagttgcttgaaccatacaagaattgcacacggtggaagtgcccgggggccacatttttaatgggtccgaacttattgcgagaaggtgcggacagatgatttttatatagggagcccta

SEQ ID NO: 21035 - DNA, 281 bp, Gossypium hirsutum
  Clone ID: uC-gsronu33B124b05b1
cgttctcatgtctaaggcttaagtgagtgagtgattgtgcttggtgtatccaagctttagcaattttaatttagaagagatgttatgagagaataaacgaattgtacggagcatatttttgtgtgaagaagggttgtttcagttttattacccaagtacttgaatgtttcaagtttcattgcagttgtttttctactttaatgcatacgtggtgattatggtttcaaaaaaaaaaaacatatataaaataaaaaaaaaaacaaatataaaaaaaaaataat

SEQ ID NO: 21036 - DNA, 292 bp, Gossypium hirsutum
  Clone ID: LIB3149-057-Q1-K1-D9
aactttgttaagcttgtgacttgttatgataacgaatggggttacagttcccgtgttatggacttgatccgacacatgtctaaggcttaagtgagtgagtgattgtgctttgtgtatccaagctttagcaatttttaatttagaagagatgttatgagagaataaacgaattgtacggagcatatttttgtgtgaagaagggttgtttcagttttattacccaagtacttgaatgtttcaagtttcattgcaaaaaaaaaaaatacaaaaaaaaaaaaaaaaaaaaaataat

SEQ ID NO: 21037 - DNA, 268 bp, Gossypium hirsutum
  unsure (1)..(268): unsure at all n locations
  Clone ID: LIB3584-025-P1-K1-A7
ccggaccgnnaccccggtgggaggcgcgtacgactgctgcccatttgaagggtggtgcaaagaagtaatcatctctgctcccagcaagtaggctcctaataaagtgtgggcgccacacacaacgaatacaagcctgaccttcacattgaatccaatgctagctgcactaccaactgccttgctccattggctaaggtcatccatgacaaatttggcattgttgagggtcttatgaccactgtccattcgattactgctactcaaaaga

SEQ ID NO: 21038 - DNA, 215 bp, Gossypium hirsutum
  Clone ID: LIB3147-046-Q1-K1-A8
atatttttgtgtgaagaagggttgtttcagttttattacccaagtacttgaatggtggaggttcattgcaattggttttctactttaatgcatacgtggtgattatggtttctctacttaaattgatatcttgtgattatgttaaaaaaaaaaaaaaaaaaaaaaaaacaaaaaaaacacatacaaaaacaaaaaaacaaaaaaaaaataaaaat

SEQ ID NO: 21039 - DNA, 625 bp, Gossypium hirsutum
  unsure (1)..(625): unsure at all n locations
  Clone ID: LIB3825-022-Q1-K6-B5
tccgcgactgtggnaaaaggcagnaaaaataaaactaatttttttttactgtaaatagttaatagttcttgaaagcaagagcagcagcagcagcagaagaagccgtagctgctgattcttcaagctttcgaactgtactttgtgagcaaattttaattgcatggattcttctttagttttctcctcgaaactgaaactccaccatcactctttgcctctccaaacccatttccaaagacgcccgcttctcacttcatcccacttccgcttagcggcggccaagaaaccacccaggaaagttctctgtgaattcgaacctaaagttaatggtgctctctcaccggaccctgattcccgtttcctcgaccggcaaaaagcattggaggctgcaatgaatgatataaatagttcatttggaaaaggaagtgttacaagattggggagtgctggtggagcattggtacggaaaaaagttgtccctgctatgggttgaaacttttccgagtggttgtttgacgctagatttagccttaggtggtggccttcccaaagaagaatgtggaggtatatggaccagaaagtagtggaaaaactaccctagcactccatgccattgctgaagtgc

SEQ ID NO: 21040 - DNA, 619 bp, Gossypium hirsutum
  Clone ID: LIB3582-049-P1-K1-C12
agcagcagcagcagcagaagaagccgtagctgctgattcttcaagctttcgaactgtactttgtgagcaaattttaattgcatggattcttctttagttttctcctcgaaactgaaactccaccatcactctttgcctctccaaacccatttccaaagacgcccgcttctcacttcatcccacttccgcttagcggcggccaagaaaccacccaggaaagttctctgtgaattcgaacctaaagttaatggtgctctctcaccggaccctgattcccgtttcctcgaccggcaaaaagcattggaggctgcaatgaatgatataaatagttcatttggaaaaggaagtgttacaagattggggagtgctggtggagcattggttgaaacttttccgagtggttgtttgacgctagatttagccttaggtggtggccttcccaaaggaagaattgtggaggtatatggaccagaaagtagtggaaaaactaccctagcactccatgccattgctgaagtgcagaagcttggtggcaacgcaatgcttgttgatgcagagcatgcttttgatccagcatattcaaaagcattgggagtagatgtcgagaatttggatgtgt

SEQ ID NO: 21041 - DNA, 705 bp, Gossypium hirsutum
  Clone ID: GOSHI-09MAY01-C759_1
ccaacaaaagctggactgaagcgtctcccatctgatcgtctagaagaaattgctgcaaagaggttgaaaaaacttagtcagttgaaatcattagctgcagagaagaagggcaatctgagggcttcggaagctccaaaagttgaagttaaagaacagccaactacagggcccccagcaagaccgactaaaaaaccagattctttaaggaaagtggagtctctacctagggctgttgagcctacaatgctggttatgaagtttcctcctcaggtatcacttccatcagttgcagaattgaaggcaagatttggacgcttcggctcattagatcagtcagctatccgtgtgttttggaagtcctcaacatgccgtgttgtgttcagacacaagattgatgctcaggctgcatatagatatgctaatggaaccaactccctttttggcaatgtgaacgtgagataccatcttcgaagtgtggaagctcctacagctgaagcactagattctgacaaggcacgaggagacgagactggcagtgaaaccatacgagttaaggatcctgtggttgaaagaccagcagcaccggtggttgcacaccagccacttcacaaacgacggtccagctgaagtcctgcttgaagaaaccaacaagtgaaaaggcaaggcaggcaagtgggggtaattgaggtagaggtacagcgcgtg

SEQ ID NO: 21042 - DNA, 795 bp, Gossypium hirsutum
  Clone ID: GOSHI-09MAY01-C779_1
cccacgcgtccgcaaaaaaaaaaaaaaaaaaagagagaaaaataaaaaaaaagggggggggagaaccatggcctccatcggacttaacatagagacctgcctccacgtctgaggcatggactatgtttactgctagggtttgccttactcatttcactagtgacccatctttgggtgatgaaaagcctgcctttttcagcattaaagcctttgtcagcttgatcaggcctgagcaagcaatgtggtaccgtgcttgcataacatgcaacaagaaagttactgaagctgctggatctggctattggtgtgagggatgccagaataatgatgaagagtgtaatttaagatacataatggtctcaaagatctctgatacaagaggtgaagcctgggtttcagcctttaatgaacaagcagagaaaattgttggatgctcagctgatgaacttgataaactcaagtcggagcaaggggatattgatggataccaaaaaaagttgaaggaagcaacttgggttcctcatcttttcaaagtcagtgttactcaaaatgagtataacaatgagaagcggcaaaggataacagtaagggctgttgctccaatcaactttgctgaagaatccaggtttctgcttgaagagatcaagaagatgagaaatcctcagtagattgttttagttttgggttgtaaatgatgggattcagtagattttataattgaacttactatgtagtttagatctatgtttatggctttatgattcaggaaaaccagttataagttttcctttttgt

SEQ ID NO: 21043 - DNA, 617 bp, Gossypium hirsutum
  Clone ID: GOSHI-09MAY01-C769_1
aaaaaaaaaacaaaaatttaattaaaaaaaaaattctcactttaaaacactctctgctctctggcgagcttttgaatgattataaacagtccgtaactcgctatttggagggcaagataaacaagcgttgctgtttgaagcatttaatttgaattggtttgattatgggtgaacaagaaacaaagaccaaagtccctgacccagtggctaacgggacttctcttccggaaaaatccagtgaagttgtagcagagaaaaaagaggaagaagataatggggtaaaggaaatggaagaagataagaaaaatgatgagaaagttgagactgagaagatggatgaagaccaaccggtcaaggatgacacagaaagcaaagagacggaaaaagaagaaaaggaggaacctaaaactgaggcgatggaagaagaaaccaatgcaaaagaagatgttaggaaagttgcggacgatgaaaacaaagatgaggaggagaaggtggatgagttgaaagaagaagatgaagaagagcaggaagagaaagctgaagaagagccgaaagaagaagaagatgaagaggaacatgaagaaaaagatggagatgatgaagagaaaggatgggga

SEQ ID NO: 21044 - DNA, 668 bp, Gossypium hirsutum
  Clone ID: GOSHI-09MAY01-C719_3
gctatctcccctccttatagaatcctcttcttggttttcttttcccttctacgtctgagcttctgctgttcccctgtttttattatcttttctgttcttttcataccatttggtgggcttttgcccttctatggtgtgttttggttgttaagcctttgacttctagagtctatacaaaatacccatatcctcaaaactctcgaaaaaaaactccatttgtgaatcttcttttctttctttttgggttgtcttgtgaatctccatgccgcataagttattgttggtgatgtttgagattcatgtctccagttgtgagtgaaatcctccgatcggggtttattataaattcctccctcagacgtagaacccatcttgttcagtctttctcagccgtcttcctttattgcgtctacgctttctcagaaataaaaaatgcgtaatgctttatacattagctaaacatatacatcactagtgatccgggagtaaatataataattaatatggcttcgtgcagtggaaattcgaattccaattcctcaggttgcacacactatcagttgatggatcaaaggaaacgtaaaaggatggaatcgaactcgagaatcaacgagacggtcaaggatgagaacacagacgcgctgatttgggacagtgcgactaagaag

SEQ ID NO: 21045 - DNA, 1078 bp, Gossypium hirsutum
  Clone ID: GOSHI-09MAY01-C719_2
cggccgcgtcggccgccgcgtctcttccccccttatagagtttagtcaatttctgctctcttcctgtttttcattttcccttgtagagctaacgttctgctggtttcggttcactaattttttcagctgtgtttctttcaaatcgttttgatatgtttttcaaatcgttttgagattcatgtctccagttgtgagtgaaatcctccgatcggggtttatgataaattcctcactcagacgcaggacccatcttgttcaatctttctcagttgtcttcctccactggttctatgtttttcataaataaattctctgtaattgcttgactttcatttcctttacataataaacccaatatataagaaaacgttgcattagctacacgtagttagtatctgggtcctgtcgtcgtctttctatcagtgattttagtgtacatacatcaacatggcatcgtccagtgggaattccaattcttcaggttcgactctgcttcagatttcaggctccgaagaggatctgcatcagttgatggaagaaaggaaaagaaagaggatggaatcaaacagggaatcagcaagaagatccaggatgagaaaacagaagtatctggatgatttaatggctcaactcacactcctaaggaaagataataatcaaatcttaacaagcatcaatttcatcacccatcattacttcaacattgaagctgagaactctgttttgagggcccagtttatggaactaagccaaagattggattctctaaatcatatcctcaattatcttaatgatcccacactaaacaatgggatttgggtttatgaaactgaaccctttgaaacaagtgctgatagtttcaccaattttactcttaaccaaccaattgtggcctctgcagatatctttcagtactgatccacccattactgaagggctgaaaccaaaaagagtcaaaatctatggaatttggaactagaaagtatgaactgcttgctaaagataaaattatctctttttttgtaaatggtattcttctggtctgatatatgatatggtgtgaagtgtttattagcat

SEQ ID NO: 21046 - DNA, 1279 bp, Gossypium hirsutum
  Clone ID: GOSHI-09MAY01-C719_1
tgcttttatatcggggatttttggttgttgaactccagtctaggttctggaatctataccaaaaatccattaagtcaaaactcttatcttccagcaagaagagaaagacatatcttggtttttttttttgctgtaaatcttgatgctgcgtaaattgttgtggttgatccttgagactcatgtctccagttgtcagtgaaatcctccgatccggttttatgataaattcctccctcagacgcaggacccatctcgttcaatctttctcagttgtcttcctctactggttctatgttttttcataaatgacatgcttattttttttactatatatatatatataattatctgttgctagtataggtgtccagtcgcctttgaggttagattatcctgaaatattagtaatttatatttgaagttttagcagtgagtttggtgtaaaaatattaacatggcctgggggagtggaaactccaattcctcaagctcctcgcagcttcagaactctgggtctgaagaggacctgcaccagcagaatatgatggaccaaagaaaaagaaagagaaaggaatctaacagggaatcggcaagaagatccaggatgaggaaacagcagcacttggatgaattagtggcccaagtggctcagctcagcaaagaaaacaaccaaatcctgaacagcatcaacttcaccacccaccactatctcaacattcaggctgagaactcggttctgagggctcagatgatggaactgagtcaaagactcgactatctgaatcaaatcctcagttatctcaacaccatgagcgccagtgagttggtgtacgaaactgatcagtgctttgaaacaagtacttgtgaccacggtttcaccaagcctttccatctaccttaccttaaccaacccatcatggcctctccagacatgttccagtactactgatccataataatcctcaccaccatcatccctcattttctgataaaacgagggtattaatataatattattgttatggttaattaatttaatgaaatattagtgttattggcagctataggtctaggaagatgatgtaagggatgatgattgtgagagaattggcaagtagcaagtgaaagctgcttggcaggggatgcaattttttattttcaattttcttcttgtaaatggggatttgagatataaaatagggtttgatgtttgacgggttttctggatgtatgtagtatggtctcctacgtttttatataagaatttccttcacctgtt

SEQ ID NO: 21047 - DNA, 622 bp, Gossypium hirsutum
  unsure (1)..(622): unsure at all n locations
  Clone ID: LIB3582-060-P1-K1-G4
ccccgcgtccgccccgcgtccgccccgcgtccgggggtcgagattccgacttagagacaccgttctgggttcgaccgtgaacccagccctaagagtctaggagagacgggaaacctcagactgaaaggcaggtctccagcgctgacgtcggagacaggcccgaccaggaggagaaacagcgccgtcggttgcaagatgctgtaccccttgaggcggctccgacacctcctgattcttctaagattgaaactgtgattgttggtaaggattccgataggaaaaacaatggacaacatgaaggaaccaagcattcttctgatccaactgaagtgccccgctcccgatcctattttcagcacgatgaacgtggtattgccgcacaagctggtcgaagttatggtcggagagtggcttctgagcgtggagagcgtggatggtggagggatgcaaaggatcatcatagtgaaagggaaactagaacatatgacacgaggcaaagagacgagaaaccacaagccagaggtgatagcaaagatgattggcgccatgatagattctttgaaatggaggctgatccaccggcacagccaccaccctncaggaaacgacctgcatttagtga

SEQ ID NO: 21048 - DNA, 647 bp, Gossypium hirsutum
  Clone ID: LIB3582-047-P1-K1-B6
accacccgtgcctccacacattcggccacgcatgcaactggtcaagacatccactctagactacaccgtggtggtttagaccatcctcccacacctactaggtttacgcatgacagacactctataactgaatggcaagcattcagcccttacatctgagacacatccactcaatatgacaaacatctccgtcaagtgcaatatgcttctcctattgaggctgatcatacaccttctgattcttctaagattgaaactgagactgatggatatgattccgataggagaaacaatgcacaacatgaaagaaccaaacattcttctgatccaactaaattgcccctctcactatcctatgctcgagcccatgaacgatttattgacgtacactctgatccaaaacatggtcggagagtggctattgagcgagtaaagcgtggatggatgatgtatgcatatgatcatcatactgaaagggcatccagaacatattacacgaggcacagagactagtaactcacatccatgggtgatagcaaagatgattggcgccatgatagattctttgaaatggaggctgatccaccggcacaggcaccacccttcaagaaacgacctgcatttaatgagaagaagatccctgcagc

SEQ ID NO: 21049 - DNA, 396 bp, Gossypium hirsutum
  Clone ID: LIB3585-001-P2-M1-G6
aagttggaagagaagcgcgtgggtcttgattccgactctagacgacaccgttctgggttcgaccgtgaacccagccctaagaggtctaggagagacgggaaacctcagactgaaaggcaggtctccagcgctgacgtcggagacaggcccgaccaggaggagaaacagcgccgtcggttgcaagatgctgtaccccttgaggcggttccgacacctcctgattcttctaagattgaaactgtgattgttggtaaggattccgataggaaaaacaatggacaacatgaaggaaccaagcattcttctgatccaactgaagtgccccgttcccgatcctattttcagcacgatgaacgtggttttgccgcacaagctggtcgaagttatggtcggaga

SEQ ID NO: 21050 - DNA, 435 bp, Gossypium hirsutum
  Clone ID: uC-gsflnu33B115f09b1
ttcaatgtctcgtcgagagggtcgtgattccgactctagacgacaccgttctgggttcgaccgtgaacccaggtactccctttcgtttcccaatccttgatttcaaacccaaatgatgccttcaattctaacattacccccatgtatttcaaatgggttttcaatcttgtttaattttgtctaaagatttaattttgtttatgttgtttagccctaagaggtctaggagagatgggaaacctcagactgaaagacaggtctccagcgctgacgtcggagacaggcccgaccaggaggagaaacagcgccgtcggttgcaagatgctgtaccccttgaggcggccccgacacctcctgattcttctaagattgaaactgtgattgttggtaaggattctgataggaaaaacaatggacaacatgaaggaagccagc

SEQ ID NO: 21051 - DNA, 351 bp, Gossypium hirsutum
  Clone ID: LIB3197-035-Q1-M1-G9
cccacgcgtccggcgaaacaaggcaaagcggagcagccctagaaaatgacggtattccaaaacatagcaatgtctcgtcgagagggtcgtgattccgactctagacgacaccgttctgggttcgaccgtgaacccagccctaagaggtctaggagagatgggaaacctcatactgaaagacaggcatcactcgttgatcgttaaagactggcttcacgaaatacgacagacttggacgacgagcatgatgaccggttcaaggtttttgcgggcgaacttgatactagcggcgcgtcattagaaacttgaccctgtcgggactgacggtgtgactcaattcttcgatttgac

SEQ ID NO: 21052 - DNA, 617 bp, Gossypium hirsutum
  Clone ID: GOSHI-09MAY01-C699_1
gttattcctcttctcctttgttctaatttgggttcccacttcaacccaccatttctaaaaagcttcattgattgagcttggatcaaattccctaaggaaaccatgcaagacaccattggcattcctgcttgtttttcatcgggtgagaagcctgctgatgatcccacagccgtaaccaggtccggccagagtgttttcatgtctgttttccgaacaaagattgccgaccagtgtcgtttagtaactatcacttggtgcaaggacctattgctccatggtctctcggtatcagttgaaggcccccggggagagagtcagtatgggtgtaaagtcgagcttaagccatggtgtttttggagaaagcaaggatccaaacgttttgtgatcgatggtaaacctgttgacgtgttttgggacctcaaggctgctaaattcaatggcgaaaccgatcccatctccgagtactatgttgctgttgtttgcgataaagaagttgttttactcgttggggatctaaagaaagaagcttataggaaaactggttgcaggcctgcacttattgatcccattttggtttcaagaaaaaagcatatatttggcaagaaaaagttctcaac

SEQ ID NO: 21053 - DNA, 852 bp, Gossypium hirsutum
  Clone ID: GOSHI-09MAY01-C689_1
cctaaacaataatcaaaatacctaacaaaccctaaaaatcaacagccagtcttcattcatttgacgaatccatttcttttttcacattttctgcatttcatttctagagagattcgtttaacaaaccaagaaaacaatgactcagatatcccttcagagagagaatttattcccaaaatagttactctggtgtgtgagcaaattaagtcagataccgttattgtcaaaacatttcttttccccaatcttcaaatgactcaatatgggcgttcccgttttaccattttcttgtcatatcgtcgatggttcctcatccccaactggaactcgtcgattatgttctccttccatcgcatttatcttcctcgacagcctgggtaacagatctggggaggccgtttctcagataagtatcttcttccatattgattccttcctctgctaatagatgtgccactttgttcatttgtctcattgcatgtctaaatctacaggagatgaagtaattttttaatcttttagcatcaataatgtaagccctaatttctaatctgtcttcttcttcagttttaatcttctttatgacggacaaagcatcgcctttaatgtcacttcttaagaagcctaattcaacctcgaactgtatcgcttgaacacaacgtcaaggttgattttaacataattctcctcaagaggtcgccagttttcctttatcaggttgttaacagtttcttcactttgcgagcatcttggacagattatggagcttaccagctttcgtcgaaaaagattagtttgagtaggaaggaaattatttagattttttcatactaatatttaatttttgatgat

SEQ ID NO: 21054 - DNA, 1422 bp, Gossypium hirsutum
  Clone ID: GOSHI-09MAY01-C649_1
ctcttttggtaaacaactcttagccaccccctccccccattcacctaagctcaccatcttccatcattacttatatatatacatatagaaagaaaagggttcttatttatgttgccaaattagccatttttatatacttagtggggagaagaaaaaaaaatgaagaggtcaccgagttgttcttcttcttctaattcatgctttgcattgccatcaccatcatcatcatcatcatcaccgtcaccgtcttcgtcatcatcatcatcttcatgtgagaaccctcatgatctatcagagaaacccaaggctaaaaggggtagaaagcatcaaaacactgataataatgcttgtttgaacaatgctaacaacaatggcggtagaaggagctctatttacagaggagtcaccaggcatagatggactgggagatttgaggctcacctttgggacaagagttcttggaataatattcagaacaagaaaggaagacaagtttatttaggggcttatgatagtgaggaggcagcggctcgaacctatgatcttgcggctctcaaatattggggggcggaaacgatactgaacttcccgaaagaaagatatgaaaaggagatggaagaaatgaagaaagtgacaaaggaagagtacttggcgactctacgacgtcgcagcagtgggttttctagaggagtttctaagtatcgtggggtagctaggcatcaccacaatgggaggtgggaagcccgaattggtcgagtttttgggaacaaatatctctatttagggacctataatacacaagaggaagcagcagcagcatatgatatggcagctttggagtataggggggccaatgccgtgaccaatttcgatattagccattacattgaaacgcttgaagccgaaagggaattttgttatgtggatcgaaccggagtaacaaattcccaaccctgatgaagctcgacgagtagaatccgaagaaaatggaccacagccgctgcaggagcagcaagaacggcaggaaaaacaggaacaagaattgaaccaagaagaggccgaaaaatctcaacattttcaatacatgcaaatgcagcttcctctatgcattgatagtccgatgacaacaatggccggtattgagcctactgatagtaatgaactagcatggagtttctgcatggattccgggttgacatcgtttttggtcccggacatccctctcgatggcaccgctgaattgccaaacttgtttgatcatgatgcgggatttgaggataacttcgacttgatattcgacgtagggccgcctaacaaagaagaggctaatcggaaatgcatgatggatgaagatgtgattggagtcggtgtttccatgaacgtggaagacgataataagaaggagagattgtcatcactgtc

SEQ ID NO: 21055 - DNA, 397 bp, Gossypium hirsutum
  unsure (1)..(397): unsure at all n locations
  Clone ID: LIB3582-042-P1-K1-G6
acgccacgcgtacgngacgcgtggcttagcactccctcctcatcacctaactaccgtgttcatgatactatatatatcatatngaagaaagggtcttattatgtagcccttttaatatactagtgggggggagaaaaaaaatgaaaggcaccgagttgtcttcttctttaattcatgcttgcattgcatcaccatcatcatatcatcatcaccgtcaccgtctgcgtcatcatcatcatcttcatgtgagaaccctcatgatctatcagagaaacccaaggctaaaaggggtagaaagcatcacaacactgataataatgcttggttgaacaatgctaacaacaatagcggtagaaggagctctatatacagaggagtcaccaggcatagatggact

SEQ ID NO: 21056 - DNA, 1030 bp, Gossypium hirsutum
  Clone ID: GOSHI-09MAY01-C669_3
aaaaaagatacgagtatgggcatctgtaacgttcaaattattttttatgaaccctgtcaaaaattttgctagagtattatcagtcacttaggatactccaatgtagtcatagacagacgcagaatgacaaagatgtacgtaggttatctagacaggccttgaacagcttattcatttttttactttcttccaaagtagaaccgtgccttatcagacaacccttataggggtatgagtttatgtgataactgtaggtgcggatcggccggtgaactccagcattttagaaagttttagagcaaccaccacaagaggagcaagcgcttcttgggaatctcttccagtttttgatgagtccttttcgtattgttcaatgtagaggcggatagttgcaccttctgaaccagttccagagagacggaaaaccaatcgcgatccatcctcgaacaaaaaccgaataccctggtgctttgaaacagagccatcaacaggatccttgtattcaaattcatcagcattgacaacatttgacacatctgaacgagcccccttcacactactattgatttcatcaagagatgattgcaatttgaccagataggccattaaatcctttgctgcaccagcatccacattctcatagtcatatcgagtgtaatagtgtcgaccatagatagcccaatgctgacgaactatatcctcaacagtcacgagcttatccccattgagattttccttatttttaaaagcaagtattgaaagccaagccaaaacagcccaaattcaatctttctcacgtatatggtcagagccagttccaaaactttcttctccgcaaatcgaacataatccagcatccattaagttgccaaaaaatttccagccggtgggtacctcaaaaaattttaagttcaagttcttggcaacaacatcaagggcagctgaagtaggcatactcctacaagcagcaaatcgagaaaattaatcttaaatttcaatttcagaagagatgattataatttaaaacaag

SEQ ID NO: 21057 - DNA, 1257 bp, Gossypium hirsutum
  Clone ID: GOSHI-09MAY01-C669_2
ctacaaaacattgccatctcattctaaaattccccacaggctctcaaatttggttcaatctggccagcaaaggcaattaagtgggaatctgggaacccttgaaccaaggaaattaggattgcccaaagcatttcagcaatatggtattgatcgaatgagtgcaaagacctttacccaagttcatgtacgtcagcatcacatcagcagcagcacaaactctgtgttcaacacacaagttgattttcccatccatgcggtcaaccaataccctgcgtaagtcagattgggatccgatgtcctccaccaaatctcttcctggtgtcagttcaaaagtgagctttgttgtgccccaagctcttccccacaaaaatcatttgcataagctccagcaaccccaataatgcatcatagcagaatgtaaactttggaataaagcagcttgcggataagctcgaagtcaaagattgacttcctcaatttcacatagtcacttgctgaatcaaaaaccctcgacatcaaacggtccatcaggccccgaaaagttggtgacaccaattgtactaatgtctacttctcgtagctcatcagcaatcaagtactcttttattgtttttgtgttctcaaagatcttatcagtgagggcctctggagcaggtcccccattttccatgttgtatttaattccaaaatcctcattagggccaccgggattgtgactggctgtcaaaataaaggcaccagttgctttggatccatctgcaccaaccctttcgcgtattacagctgatacagctggagtagaaagtaatccgttttgaccaacccatacacgccttactccatttgcagctgacatcttgattattatctgaacagcatcctttgagaaataacgaccatcaccagaaacgacaagtgtggcacccttaactttctcgggtgtaagggcattgaatgttgcttgaacgaaattctgcaaataatgaggctgaacaaaaactttcaccttcttacgaagaccagaagtgcctggcttctggccttcaaacgtcgtcgttggaactttcatcacctcgaacaccatttttattacttaaatttcgttggagagatcaaagtaatatgcgattcttcgaagctggctaatgagaaagcgacagtgtttatttatttatttatttttgtggattatggcaatggagagaactggaaggttgccattggatcgagtggaatttaaaaacccggacgcgtggg

SEQ ID NO: 21058 - DNA, 2029 bp, Gossypium hirsutum
  Clone ID: GOSHI-09MAY01-C669_1
acaacccacccgtccgccctcgcgtccgcgttttttttgttattcaaataaatcctcaaataatattgtcaaaaattttgatgagtaagcattattgccttttgccattctcaagtactcatggcaaggatgcacactgacatagatatatatatagcgtatcttatgaggactttatttatgttttcttttgctcaaaattaaatcaaacacaccttaacgtgtagcagaatgaatctatgtgataacagttggtgcggatcggccggtgaactcctgcatcttcgaaagtttcagagcaacttccacaagaggggcaagagcttcttgggaatctcttcctatttttgatggatccttttcgtattgctcgatgtacagacggatagttgcaccttctgaaccagttccagagagacggaagaccaatcgtgatccgtcctcgaacaaaaaccgaataccttgatgctttgaaactgaaccatcaacgggatccttgtattcaaactcatcagcgttgacaacttttgacacatctgatcgggcccccttcacgatggtattaacttcatcaagggatgacatccttttaaccatatttgccattaaatcctttgctccaccagcatccacattctcatagtcatatcgagtataatagtgtcgaccataggtagcccaatgctgacgaactatatcctcaacagtcacaagcttatccccattgagattatccttgtttttatacgcaaggattgaaagccaggctaaaacagcccagattccatctttctcacgtatatggtcagagccagttccaaaactttcttccccgcaaatagaacattgtccagcatccattaaattcccaaaaaatttccagccagtaggtacctcgaaaaatttcaggttcaagctcttggccacgacgtcaagggcagctgatgtgggcatactcctggcaactcccttcaaaccagaagaaaagtaaggaattgcaccaacagcatttgcagcaatgatggctactgaatctgatggagtgacaaagaaccttttacccaagatcatgttacgatcagcatcaccatcagcagcagcaccaaactctggtggttcaacaccagagttcgattttcccaatcccatgcgctcaaccaactccttggcataagtcagattgggatccggatgtcctccgccaaagtcctccttgggtgtgcagttcaaaagtgagctttgttgtgccccaagctcttccacaaagatgcgatttgcataagctccagcaacaccatgaagtgcatcatagcagaatgtaaacttcggagataaaagcagcttgcggataagctcgaagtcaaaaattgacttcatcagtttcacatagtcacttgctgaatcaaaaacctcaacatcaaactgtccctcaggccccgagaagtttgcaacaccaattgtactaatgtctatatttggtagatcttcagcaatcaagtattctgttattgtttttgtgttctcaaagatcttatcagtgatagcctctggagcaggtccaccattttccatgttgtatttaattccaaaatcctcatgaggaccgccagggttatgactagctgtcaaaataaaggcaccagttgctttggatccatcgacaccaactctttcacgtattacagctgatacagcaggagttgaaagcaatccattttgaccaacccatacgcgtcttactccatttgcagctgacatcttaattattatctgaatagcatcctttgaaaaataacgaccgtcaccagaaacaacaagtgtagcacctctaactttttctggtgtaagggcattgaatgttgactgaacgaaattttgcaaataatgaggctgaatgaaaactttcaccttcttacggaggccagaagttccaggcttctggccgtcgatcggcgtcgtcgagactttggaaaccttgaacaccattctttgcttcctacgatcgttcgggagatcaaattgaaatgcg

SEQ ID NO: 21059 - DNA, 624 bp, Gossypium hirsutum
  unsure (1)..(624): unsure at all n locations
  Clone ID: LIB3543-031-Q1-K6-F11
cgtccgcccacgcgtcgggccgacggcggggcggagtaaataaacactgntcgctgttctgcattagcccagcttcgnagaatgtcgcnagtattacttnntgatcnnnctccaacgaaatnnttaagtaaccaaaaatggggtgttcgagggtggatgaaagtgtccannacgacgccgtnnttgatggccaggagagggggggcggggncgntggacttcgtaaggaagggtgaaagttttntgttcagccctcacttattnnggcagaatttcgtacaangcaacanttcaatgggcccttacccacccgagaaagttaagggggtgccacacttgtcgtttctggtgatggggtcgttatttctcaaagggagtgctgttcagataataantcaagaatgtcagctgcaaatggagtaaggcgtgtatgggttggtcaaaacggattactttctactccagctgtatcagctctaatacgcgaaagggttggtgcagatggatccaaagcaactggtgcttttattttgacagccagtcacaatcccggtggccctaatgaggattttggaattaaatacaacatggaaaatgggggacctgctccagaggccctcactg

SEQ ID NO: 21060 - DNA, 528 bp, Gossypium hirsutum
  Clone ID: LIB3543-052-Q1-K1-D1
atcgcatttttgtggaagagcttggggcacaagaaagctcactgttgaactgtgtacccaaggaggactttggaggagggcatcctgatcccaatctgacttatgcaaaggagttagttgctcgaatgggattaggaaaatcggactctgcagttgaccccccagagtttggtgctgctgctgatggtgatgctgatcgtaacatgatactgggaaaaaggagtatgcctacttcagctgcccttgatgttgttgccaagaacttgaacttaaaattctttgaggtacccaccggctggaaattttttggcaacttaatggatgctggattatgttcgatttgtggagaagaaagttttggaactggctctgaccatatacgtgagaaagatggaatttgggctgttttggcttggctttcaatacttgcttttaaaaataaggaaaatctcaatggggataagcttgagactgctgaagatattgatcgacagcattgggctatctatggtcgacactattacactc

SEQ ID NO: 21061 - DNA, 324 bp, Gossypium hirsutum
  Clone ID: LIB3147-013-Q1-K1-B1
gtttgatggccagaagccaggcacttttggtcttcgtaagaaggtgaaagtttttggtcagcctcattattcgcagaatttcgcacaagcaacattcaatgccctaacacccgaaaaagttaagggtgccacacttgtcgtttctggtgatggtcgttatttctcaaaggatgctgttcagattataatcaagatgtcagctgtaaattgagtaaggcaagtttggtttgacaaaaccggattttttattacgccatttgaaccggtttaaaattttctttagggtggtgccacatgaatcaaagccaccgggttctttaattt

SEQ ID NO: 21062 - DNA, 259 bp, Gossypium hirsutum
  Clone ID: LIB3146-044-Q1-K1-H9
cccacgcgtccgcccacgcgtccgtccacgcgtccgcccacgcgtccgggatcgcaattggttttccgtctctctggaactggttcagaaggtgcaactatccgcctctacattgaacaatatgaaaaggactcattaaaaactggaagagattcccaaggagcgcttgctccttttggggaggttgctctaaaactttctaaaatgctggagttcactggccgatccgcacctacagttattacataaactcataccc

SEQ ID NO: 21063 - DNA, 464 bp, Gossypium hirsutum
  Clone ID: GOSHI-09MAY01-C619_6
ccatcatttcatgttttggcaagtctgcaaggccggggtcttagggattgaggatcgcagattggtgatttgtttattgtacctctttttaatacggcgaaggtacgtattgcccacaatgcgtgctctgtataggtattcagatatgtatttaatgtcaacctgctttgaaaatggtgcccggcgagagatccatacagggatatgccgattctttcctttggtttatgattattttcatctgctcttggtttgttgtctttagctgatcagtgttaaggtaaaatctaataaaaccaaaatttacaagtacaaaaattatatatatattttttcaaaaccagaggtggagagctgatatgaaattgtttatgttaactaatgatacggtaatttgtgtattcttgtgtttgttttaactatgatattttatgtacaaataatggacatgttataattatttt

SEQ ID NO: 21064 - DNA, 697 bp, Gossypium hirsutum
  Clone ID: GOSHI-09MAY01-C619_4
atcagattatgaaggcggtaactaaggtggcaaaatcagtgctgagatgttgagtgggggagctgcattgtatggttggtgatgggggtggatacgaggagttctggcttcagttttgtatattcacaaacagttataatcgtacagtggatgagcgttcattccatcatatcatgttttggcaagtcttcaaggtcagggtcttagggattgaggatcgcagattggtgatttgtttattgtacctctttttaatacggcgaaggtacgtattgcccacaatgcgtgctgtgtataggtattcagatatgtatttaatgtcaacctgcaaagaaaatggtgcccaacttgagatccatacagggatatgccgattctttcctttggtttatgattattttcatctgctcttggtttgtcgtctttagctgatcagtgttaaggtaaaatgctagtaaaaccaaaatttacaagtacaaaatttatatatctattttttcagaaccagaggtggaattgtgctgttcctttagagttgatatgaaattgtttttggtaactaatgatacatggtaatttgtgtattcttgtttatgttagggtttttttgttattatcatagttaaagactaatgatattatatgtacaaataatggacatgttataattattttatatgtatgtatgtatgtattc

SEQ ID NO: 21065 - DNA, 967 bp, Gossypium hirsutum
  Clone ID: GOSHI-09MAY01-C619_3
ttttgtcccaaagccaatggatagggttagattctctgggaagcagatccctcagagatattcgcttgcatctcgtaacagtttagataatgctgaaaggaacttaaaactaaggaagccaattgaacatttgaaaaggagttggtaatgacatcagatgaagcatcgatgaagaattcgcggttaccaaaaggatattgttacgtccccgttgattgtcttcctaaggagaagcagcacgcacaggatgcttgttctgatggacaattggagcacaatggataaggctgagtcaatacctggatgtttcgattgcctatgatgagtgatgacaatctatgccactttataactgctttccacgcaggtgacttgcttatcagattatgaaggcggtaactaaggcagcaaaatcagtgctgagatgttgagtgggggagctgcattgtgtggctggtgatgggggtggatatgtggagttctggcatcttcgaaaggccatagctaagcaagaaagacttaaggcttgtccaccacggttggggaaatacaaattccaggctgctcccccacaagtcctcttatccgaagaacttactggatctctccgtaagctaaagggttgtgctacacttgcaagagatagatttaaaagcttagagaaaagaggcctaattcccccatcagccaggagtggaaggaaatagagagaatttgtttccaaggatgactgttcaaatttttcggtgaggcaaatgagaaggcttttcaccagatgccattgatgggagaccaagctggatccatcttcaatctttaaatgctttccttttgtttttatgatagttaaattcacatatagttgctttcccctcctttttatgaccaaacctcggtcttatgtgatgtaacaaaaacctggaaaagataatttaatgctgtttttttaaattaatgctgttttttt

SEQ ID NO: 21066 - DNA, 1469 bp, Gossypium hirsutum
  Clone ID: GOSHI-09MAY01-C619_2
gtttcgtcggtctccttccttttaatccacaccgcgaaccccctcctaaccgggaaaaaatggggaagaaatcaaacacctcaagaaggggtaaaaaagcatggagagctaacataagcacagaagacatccatgatttcttcgagaaatccactaaagatgctctctctggtggttctcttacttcagctcctactgaatctctcttcttcatcgacaaatctcaagatctttctgtgaaaaaaaagattgagaagaaaagagaaaaggtattgcgtgtggatagtatgttgaagaagaacccttttgttgaagctgtaccatcttcgaagcaaaagagttctaagaagaaaaagaaggaagctttgaatgctaaagatgtagttcaagatgttcccaaggatgaaaccgtccctgactctggtatggttcctatatggggagatgaaggtcaacatagttgcaaagctagacaggtatctaaacaatcgattattccagcagttgaagttgagcctccgggatgttcatacaatcccacatttgatagtcatcaggattcgttggctcaagcggttgctgaagaaatgcaaaaggcctacaagatcgagttgggacctcagccggttccattaactgttatgggagaagtggttgatgaagatgataaatactttattgaagcagatgatggaaatgacgaccaaatggacgaggagaatttgagtgaggatgataaagcaactgagaaaaggcctcttaaaacaaagagggtgactcgagtcgagttaaataagagagctagaaggaaagaacagcaaaaaaaagaagctgaaactaaaaaggcagtggagttttccaaagacattgacaacttgccagatattttacaagaaatagccaaagaggatgaggagaagcaaaagaggcatcttcgaaaggccatagctaagcaagaaagacttaagtcttgtccaccacgcttagggaaatataaattccagcctgctcccccacaagtcctcttatccgaagaacttactggatctctccgtaagctaaagggttgtgctacacttgcaagagatagatttaaaagcttagagaaaagaggcctaattcccccatcagccaagagtggaaggaaatagagagaatttgtttccaaggatatcgactgttcaaatttttcggtgaggcaaatgagaaggcttttcacctgttgccattaatgggagaccaagctggatccatcttcaatctttaaatgctttccttttgtttttatgatagttaaattcacatatagttgctttcccttcctttttatgaccaaaccgaagtcttatgagatgtaacaaaaacctggaaaagatagtttaatgatgttttctaaaaggcaaattttgtcctaggaggccttatttctgttacttcttgtcgaatgagctataaatttcattacatgc

SEQ ID NO: 21067 - DNA, 1522 bp, Gossypium hirsutum
  Clone ID: GOSHI-09MAY01-C619_1
aggacattctaggtcgtgcgatatgggcaggggggctgagacagtactgaatcctattttagtctgttctggctgcaaggttgcagttcacttggattgctatcgcaacgttaaagaatctacaggtccttggcgctgtgaattatgtgaagaactgttctcatctagatcctgggggggtcatctctaaatgtttgggagaagccttatcctgctgcaaatgtggcttatgtggtggtactactggtgcttttaggaaatctttagatggccagtgggtacatgctttctgtgctgagtgggttcttgaatcaacattcagaaggggacaagttaatcctgttgagggaatgcatttggcttcaaggggggttgacgtttgttgtatatgtgggtgcaagcgtggtgcgtgcattaagtgtggttatggtcactgtcagatcactttccatccctcctgtgctagaagtgctggcttctggatgaatgggaaactttgtgggggcaaaatgcatcaaaaaacttattgggaacaacacagtgtggagcagagagcaaaggttgaaactcataaacatggaattgaggagttgaaaaacatgaagcaaattcgggttgaactggaaagattacgccttctttgtgaaagaataatcaaacgtgcccagcggccgcccgcgcggccgctttgctgcacatgaaatacttgcctgtaaaagagatcatgttactcgttcagtgcttgtgcatagtcccttgctccatccggatgttagctccgaatctgcaacaacttctctcaaaggccatacagatgataacaaatcatgcagtgaagcaatgcgatctgatgatgtaactgtggacagtacactttcagtgaagcaccaagcaaaggttcctgtgcctgtggacaattatcaaagaactgataacagctccacttcccaaagcctctgtgttctgaagccaaatgagagggtgccattttctgggaagcaaatcccacacagatattctcttgcatctcgtaatgctttggataatgcagaatggaactcaaaatccaggaagccaattgaaacatttgaaaaggagctggtaatgacatcggatgaagcatcaatgaagaattcacggttaccaaaaggatattgttatgttcctgtcgattgtcttcccaaggagaagcacttcacacgagataccacttctgatggacagttggagcacaatggttaggctttgtcaatacaccggttgtggattgccttatggaagggtgacggcccatctgtgcctaatgtaactgttttctgtgcggaactggaggtgtatgttgatgaaggcagttgagtggcagaagcagtggagagatgttgattagggccagtgtggcctcaatgccatatgaaccgcgtgatgtgactcgggatggggaagctttggcatatcatttgtggtatatctcacaagagtaactgtacagagggtgagaatttcattccatcaaagtttgcct

SEQ ID NO: 21068 - DNA, 530 bp, Gossypium hirsutum
  Clone ID: LIB3585-016-P1-K1-H7
gggttcttgaatcaacattcagaaggggacaagttaatcctgttgagggaatgcatttggcttcaagcggggttgacgtttgttgtatatgttgttgcaagcgtggtgcatgcattaagtgtggttatggtcactgtcagatcactttccatccctcttgtgctagaagtgctggcttctgtatgaatgtgaagcttggtggtggcaaattgcatcacaaagcttattgtgaacagcacagtgtggagcagagagcaaaggctgaaactcaaaaacatggaattgaggagttgaaaaacatgaagcaaattcgggttgaactggaaagattacgccttctttgtgaaagaataatcaaacgtgaaaaattgaagcgagagttggttctttgctcacatgaaatacttgcctgtaaaagagatcatgttactcgtgctgtgcttgttcatagtccctttttccatccggatgttagctccgaatctgcaacaacttctctcaagggccatacagatgataacaaatcatgc

SEQ ID NO: 21069 - DNA, 441 bp, Gossypium hirsutum
  Clone ID: LIB3585-024-P1-K1-E5
cccacgcgtccgcccacgcgtccgagccaccctccttaccaaaaaaaaaaaaaaaaaatggggaagaaatcaaacacctcaagaaaaggtaaaaaagcatggagagctaacataagcacagaagacatccatgatttcttcgagaaatccactaaagatgctctctctggtggttctcttacttcagctcctactgaatccctcttcttcatcgacaaatctcaagatctttctgtgaaaaaaaagattgagaagaaaagagaaaaggtattgcgtgtggatagtatgttgaagaagaacccttttgttgaagctgtaccatcttcgaagcaaaagagttctaagaagaaaaagaaggaagctttgaatgctaaagatgtagttcaagatgttcccaaagatgaaaccgtccctgactctggcatggttcctatatgggga

SEQ ID NO: 21070 - DNA, 1018 bp, Gossypium hirsutum
  Clone ID: GOSHI-09MAY01-C609_1
cccacgcgtccgtcgacgcgttcgctccattagaaaaagaaagaaggtgaagaatggctggttacagagcagaagatgactatgattaccttttcaaagtagtattaatcggtgattcaggtgtgggaaaatctaatttactctcaagattcacaaggaacgagttcagcttagaatccaaatccaccattggtgttgagttcgcaactcgaagcttaaatgttgatggcaaagtcatcaaagctcagatttgggatactgctggtcaagaaaggtaccgagccataacaagtgcttattaccgaggagccgttggtgcactcctcgtgtacgacgttacccgtcattccacattcgagaacgttgagaggtggttaagagagttaagggatcacacagatcccaacatcgtagtcatgctcatcggtaacaaatcagatcttcgtcacctcgtggccgtcccaactgaagacgggaagtctttcgctgagaaagagtctctctacttcatggaaacttccgctctcgaagctacaaatgtagagaacgcatttgccgaagttcttactcaaatctaccatatcgtaagcaaaaaagccatggagacagctgacgaagggactgcatcaaccgttccttccaaaggcgagaaaatcgatgttggtaaagacatctccgcaatgaagaaagggggttgttgctcaagctaagaaaatgacataaacccgaacatccaattgtttaacgacgcagctgggggttgttctgctgtgtcggttttgtagaatcttctcgaaaaggcgcctaacagtaggaatttcgggtgagatcgggtcggtttacatccaaattttttttccagggaattatattgttgaatttagataggtgaattgggctatcaatgatgtttgtagtgtttatgttagtttaggacatgcttttacctttttatgaatgttacaaaggacaattgtggtgtttaaaacttaaaatctttcaagcgtcgacgcggccg

SEQ ID NO: 21071 - DNA, 685 bp, Gossypium hirsutum
  Clone ID: GOSHI-09MAY01-C629_1
accggccgattcccggtcgcccacgcgtcaaaatttttggggtcaccttctataattaaaagtactgaaaggagataattttggagaagggcgcggaatcaaagctgtaatgggataaaatgtcgtctccttcagaattctacaaatctctgccaccgatcaccaaagcttatgggaccatatgtttaatgacgactgtagcttcgcatctgggactatatcgacttgaaaatattgcattaatccctgaattggtattttcagagtttcaggtgctgccttgccctaattgaaatctaacgaagcaagtttaccattttattatgaagaatctcgttcttttctggctcaattgattgactatttactgaacagaaaaatttgattgtgtctttgttatttattatgtgtcacatagctactttttgttattaaggaaacttaaactgttgccatttccctttagactttttttacgggtggtactgagtcttttcctttaggtgtggaggcttcttacaaatttctttttcttggggaacttctccatgaattttggaatccgtctccttatgattgctaggtatggggttcagctggagcaggggccgtttaaaggcggacagcagattttctctggatgatgatctttggagctatttcattgctggcattatcaattggt

SEQ ID NO: 21072 - DNA, 736 bp, Gossypium hirsutum
  Clone ID: GOSHI-09MAY01-C169_4
cccacgcgtccgcccacgcgtccgctgacaaggatttcagggtggaagttgaagccataggccacgtgcggcataagaacttagttcgacttcttggatactgcatcgagggaactcaaaggatgttggtctatgaatacgtcaataatgggaatttggagcaatggctccgaggtgatatgtgtcacaagggatatattacttgggatgctcgtatgcggattcttctcggtactgccaaggcgttggcttatttgcatgaggctattgaaccgaaagttgtacatagagacgtaaaatcaagtaatatattgattgatgagaactttgatgctaagatatctgattttggtctggccaaattgctaggcgatgggaaaagtcatattgcaactagagttatgggtaccttcggttatgttgccccagaatatgccaactctggtctcctaaacgagaagagtgatgtttatagctttggtgttgtgctcttagaagcaattaccggaaggtacccggtagattatggtcgcccttagccagaggtaaattttgaaaaaataaaaatgcgacgcctgcaaaactggtgatgatagcacttgcgcatgggttgtctcttgttgcagcttgggcatccagtgtaaacgtatctggtggccatgtgaattcagcagtcaccttcggtgccttgctctgtggaaggatctctctcgttcgggcgctgtactactggatt

SEQ ID NO: 21073 - DNA, 682 bp, Gossypium hirsutum
  Clone ID: GOSHI-09MAY01-C169_3
ttcatctcctgcactacttgcaaagtaacgagctgaagccgtgctacaataacactagtgttttcaacagtaaattaatcatagctgcagcttgtttcttttaaactctaaatataaaggaggccaaacatgccgcctcgtagataccaatttgggagggctgatgaggccactcatcccgactccatgagagccaccttggctgaattcctctccactatcattttcggctttgccggcgaaggctcaattcttgctcttggtaccactatttgttctaatcaatacataatagcttttattccatgtttacttaccgggaattagtttgttgcagacaagatgtacaaggatacgagtgcgacgcctgcaagactggtgatgatagcacttgcgcatgggttgtctctgtttgcagctgtggcatccagtgtaaacgtatctggtggccatgtgaatccagcagtcaccttcggtgccttgctcggtggaaggatctctctcgttcgggcgctgtactactggattgcccagctcttaggttccattgtggcttgtctcttgcttcgcctcaccgctggaatgcgaccgggagggttcgccctggcgtcaggagtaggggagttgcgtggtctgatattggagatagtgctgacatacggattggtgtacacagtttatg

SEQ ID NO: 21074 - DNA, 1171 bp, Gossypium hirsutum
  Clone ID: GOSHI-09MAY01-C169_1
tcgcgatccccatcccaaccccaaccccaaccccaatcctgtttctcttttgcatcctttgtttctctcttcatctcctgcactacttgcaaagtaacgagctgaagccgtgctacaataacactagtgttttcaacaataaattaatcatagccgcagcttgtttcttttaaactctaaatataaaggaggccaaacatgccgcctcgtagataccaatttgggagggctgatgaggccactcatcccgactccatgagagccaccttggctgaattcctctccactatcattttcgtctttgccggcgaaggctcaattcttgctcttgacaagatgtacaaggatacgagtgcgacgcctgcaagactggtgatgatagcacttgcgcatgggttgtctctgtttgcagctgtggcatctagtgtaaacgtatctggtggccatgtgaatccagcagtcactttcggtgccttgctctgtggaagaatctctctcgttcgggcgctgtactactggattgcccagctcttaggttccattgtggcttgtctcttgctccgcctcaccgctggaatgcgaccgggggggttcgccctggcgtcaggagtaggggagttgcgtggtctgatattggagatagtgctgacatacggattggtgtacacagtttatgcaacagggatcgatcccaaaagaggaagcgtggggacaatagcaccgctggctataggcttaatagtgagcgccaacatcttagtaggcggaccatttgatggagccgccatgaatccagccagggcatttggtccagccttggtaggatggaggtggaaccaccactggatctactgggtaggtccactgataggtggaggtttagcggctctgatatacgagtacatggtgatcccagcagcggagccagcacacccaacgcaccagcccttggctccagaagattactagtcagtgtttcttgtgttttgtacctgtacctgtacctgtacctagctacataatttggtccttcagggatccatcatgcttgtcgttgctttcttaactctttttttgctacttattgtatgttttcttgtatgtttgtaagcgatgtcatgaaaataataaaaaaggtgcagtaagtagaacatgtcccttttcttttgtt

SEQ ID NO: 21075 - DNA, 669 bp, Gossypium hirsutum
  unsure (1)..(669): unsure at all n locations
  Clone ID: LIB3583-036-P1-K1-D9
cccacgcgtccgcccacgcgtccgcccacgcgtccgcccacgcgtccgcttcatctcctgcactacttgcaaagtaacgagctgaagccgtgctacaataacactagtgttttcaacaataaattaatcatagctgcagcttgtttcttttaaactctaaatataaaggaggccaaacatgccgcctcgtagataccaatttgggagggctgatgaggccactcatcccgactccatgagagccaccttggctgaattcctctccactatcattttcgtctttgccggcgaaggctcaattcttgctcttgacaagatgtacaaggatacgagtgcgacgcctgcaagactggtgatgatagcacttgcgcatgggttgtctctgtttgcagctgtggcatctagtgtaaacgtatctggtggccatgtgaatccagcagtcactttcggtgccttgctcggtggaagaatctctctcgttcgggcgctgtactactggattgccagctcttaggttccattgtggctggtctcttgctccgcctcaccgctggaatgcgaccggnggggttcgccctggcgtcaggagtaggggagtngcgtggtctgatattggagatagtgctgacatacggattggtgtacacagtttatgcaacagggatcgat

SEQ ID NO: 21076 - DNA, 449 bp, Gossypium hirsutum
  Clone ID: LIB3583-009-P1-K1-H8
cccacgcgtccgcccacgcgtccgcccacgcgtccgtttcaacaataaattaatcatagctgcagcttgtttcttttaaactctaaatataaaggaggccaaacatgccgcctcgtagataccaatttgggagggctgatgaggccactcatcccgactccatgagagccaccttggctgaattcctctccactatcattttcgtctttgccggcgaaggctcaattcttgctcttgacaagatgtacaaggatacgagtgcgacgcctgcaagactggtgatgatagcacttgcgcatgggttgtctctgtttgcagctgtggcatctagtgtaaacgtatctggtggccatgtgaatccagcagtcactttcggtgccttgctcggtggaagaatctctctcgttcgggcgctgtactactggattgcccagctcttaggttccatt

SEQ ID NO: 21077 - DNA, 602 bp, Gossypium hirsutum
  Clone ID: GOSHI-09MAY01-C109_5
actttcgcataaaggcgacgagctctcaggctggacattaaatcatggcatccgctacattcgagcctggggaccgtgtaaatgctgcatgcgatgcgtaacacgcattccataggattaggacacatatatctggctacactgcgaaaccttgcattcgggaatggcttccaccaacatggcatctctcgcgtttcatggctgacgagacatgaggctaggaactatagctacagccttgaggtcggagcacacggccggaaacttatatgggaaggcgccccacgtagcatccgtgatagtcaccgcaaagtcacggacagccatgatggtctaattatccaacgtaacatggcacttttcttctccggtggcgataggaaggagctgaagctgagggttactgggacggatatggaaggaacaacaaaatccagatgccggcgtgtgcataccaaacttatgcagctgagacaattgatttcagtaacttgatttattttaaacagtttccgctatgtctgtttaactctgccaacacttcctattatgtcgtaacgcatggaagctttcagattcaatgaaatgtgtaataagcatat

SEQ ID NO: 21078 - DNA, 587 bp, Gossypium hirsutum
  Clone ID: GOSHI-09MAY01-C109_3
aaagagtgagacaaagaaaaataaagagaatatttcttagggaagaagaagagatcagcaaagtaatttctctcgcaatacatataggttttggggattttgggtctgtctcaaataaataaataaatgaaatctgagattttggttggtgttttctagttgtatgaaatggagttcgataacattcagtgtgtgtcaactacagatggaatgaatgaggatgagatccatcaccataacctgcaacatcctcaccctcatcatgctcaccatcaattttcatcgtccaagcctcacaatgccaccaacaccaccaacaatgggaataccaccaccaacaacattgtgggtcctacggctatcgctcctgctaccagcgtccatgaattgttagaatgtcctgtttgtaccaattctatgtacccaccaatccatcagtgccacaatggccatacaatttgttcttcctggaaaacaagagtacaacatcggtgccccacttgtagacaggaactcggtgatatcagatgtttagcattggagaaagtggcagaatcccttgagatgccttgcaaatactacaactt

SEQ ID NO: 21079 - DNA, 1405 bp, Gossypium hirsutum
  Clone ID: GOSHI-09MAY01-C109_1
taatccttcttcttcaaacttctatttctttttttaaaaagagaactttatagagaagaagaggatcaagaaaagaattttttttttatttttattttggggtgatagtggtgactggtgagggggattgttttgtcattttcattggagtttttgggtgtatttccaaaaaaaatttaaaagaaatctgagatttgggggtggcgctgtacaaaaatggagtcggatactatcgagtgcgtatcatctatagatgaaattgttgaagatcatgagatccctcaccataatctactccaccacccacaccctcgtcatgcccctcatcatcaattttcatcgtcaaagcctcatcacaacggcactaataatgttaatagtattagcaatatcgtgggtccaacggcgattgctccggctgctagtgtccatgaattgttagaatgtcctgtttgcaccaattctatgtatccaccaattcatcagtgccacaatggacatacactttgttctacctgtaaaatacgagtacacaaccggtgcccaacttgtcggcaggaactcggtgatattagatgtttagcattggagaaggttgccgagtcccttgagttaccttgcaaatactacaagttggggtgcccggaaacattcccctattacagcaaactcaaacacgaggggatttgcatctacagaccatacaattgtccatatgctggttcagagtgttccgttgttggggatatcccattccttgttgcccatttgagggatgatcataaggtcgacatgcacaccggctgcacatttaatcatcgatacgtgaaatccaaccctcgggaagttgaaaatgctacatggatgctaacagtattccattgttttggtcagtatttctgcctacactttgaagccttccagttgggaatggctccagtttacatggcatttatccgtttcatgggtgacgagacggaagctaggaactatagctacagccttgaagtcggagcaaacggacggaaacttatatgggaaagcgccccacgtagcatccgtgatagtcaccggaaagtcagggacagccatgatggtctaattatccaacgaaacatggcacttttcttctccggtggggatagaaaggagctgaaactgagggttactggacgaatatggaaggaacaacaaaatccagatgccaacatgtgcataccaaactaatgttgttgagtggattgattttgataaccttttttccttttcacctgttccgatctgtttctgcggtgtgttcaacctctacgaacccttttccggcatgttgtaatggatgaaagttttcagcttttatcaaatgtgcaaaataaggattatcttcttcaaaaaaaaaaaaaaaaaa

SEQ ID NO: 21080 - DNA, 651 bp, Gossypium hirsutum
  Clone ID: LIB3582-059-P1-K1-A6
ccccgcgtccgccccgcgtccgccccgcgtccgctaattctcacttcaagaagtaaaaaaatatttttaaaaatggtaaaataggaaggaaaagtaaaagaattttgaggagaagagaacaagggagagcttctttttctttttcttttttatataaagttttgggatggggctttatattgtaaattttctttgaatttttgtatctgattcaaacaaataattagaatctgagattgcgaaggtggtgtctgtctctgtgtatgaatggagtacgataatatagaatgtgtgtcatccatagatggattgaatgaggatgagatccatcaccataatctgcatcatccgaatcctcatcatggtcaccatccattctcatcttcaaagcctcacaatgccaccaacaacgccaacaatagtaatatggccaacaatagtaatatggccaacaatattgtgggtgctaccgggatcactcccgctaccagcgttcatgaattgttagaatgccctgtttgtaccaattctatgtacccaccaatccatcagtgccaaaatggacatacactttgttctacctgtaaagcaagagtacacaaccagtgccccacatgtagatcagaactgggtgatattagatgtttagcg

SEQ ID NO: 21081 - DNA, 487 bp, Gossypium hirsutum
  Clone ID: LIB3585-018-P1-K1-C5
caaatctccacacttttcttcatccctctcacttcaccccaaattcttcctcttcaaacttctatattttttttaagaaaaaagagaattttatagagaagaagaggatcaagaaaagaattttttttgggggtgatagtggtgacggggattgttttgtaattttcattggagtttttgggtgtatttcaaaaaaaaatttataagaaatctgagatttgggggtggcgctgtacaaaaatggagtcggatagtatcgagtgcgtgtcatctatagatgaaattgttgaagatcatgagatccttcaccataatatacagcaccacccacaccctcgtcatgccccccatcatcaattctcattgtcaaagcctcatcacaacggcactaataatgttaatagtattagcaatatcgtgggtccaacggcgattgcttcggctgctagtgtccatgaaatgttagaatgtcctgtttgtaccaatt

SEQ ID NO: 21082 - DNA, 708 bp, Gossypium hirsutum
  Clone ID: GOSHI-09MAY01-C139_3
aaaaataaaagcattttctcttcctttttgcagagagaaagataaagaaaaaagagcttttttcaaaaaagattttgggtgtagggggagatggaggagagaaagagaaagatgaagatcacggcgttattggtgttgaagtgcatgccggacggagccgatccgataatactagccaatgcttgcgatgtgagccatttcggtttcttccaaaggtcaagcgttcgggagtttatcgtctttgtttctcgaaccgtcgccaaacgaacccctcccggtcagcgccagtccgtccagcacgaagagtacacggtacattcttacaacagaaatggactttgtgtaactggatttatggatgatcactaccctgttcgaagtgctttttcgcttctcaaccaggtgatagatgaatatcagaaaaacttcggggaatcatggagaactgcacaagctgatagcactgaaccttggccctatttggataatgctttgaccaaatatcaggaccctgcagaggcagataaattattgaaaattcagagggagttggatgaaactaaaatcatccttcatcaaactattgatagtgtgcttgcacgaggtgagaagctggacagtttagttgagaagagttcagatctgagtgcggcatctcagatgttctacagtcaggctaagaaaaccatcaatgttgtagtatactgt

SEQ ID NO: 21083 - DNA, 578 bp, Gossypium hirsutum
  Clone ID: GOSHI-09MAY01-C139_2
ttattatacaagaatttatagcagatagagaagaagcgacgaccgaaattttattattaatattatcatttctttttgtgtggaaaattaagggagaaaggggaagatgaagatcacgtcgttattggtgttgaagtgcaacccagaaggatcggatccgatcatattagcgaacgcaactgatgtgagccatttcggttacttccaaaggtcaagcgtgagggagtttattgtctttgttgctcgaaccgtcgccaaacgtacacctcccggccagcgtcagtccgtccagcacgaagagtacaaggtacacgcttacaacagaaatggacttgttgccttgggatttatggatgaccactatcctgttcgaagtgctttttcgcttctcaaccaggtgctagatgaatacctgaaaaattttggggaatcatggagaactgtgcacgctgatagtgctcaatcttggccctacctggaagaagctctggtaaaatttcaggatcctgcagaggcagataaattattgaaaattcagagggagttggatgaaaccaaaatcatccttcataaaacta

SEQ ID NO: 21084 - DNA, 1068 bp, Gossypium hirsutum
  Clone ID: GOSHI-09MAY01-C139_1
ctcttacgaatcttttacttgagaaaccaaacagacacaaaaaaagcatttattttgttctcgcaagagcgaaaaagtgaagaaaataaaatttattattttattaaagttttgtttgggggaaattgagagaaaaatttgaaaaaaaaaaaaatccaagatgaagatcacatcgttagtagtactgaagtgcaacccggaaggatccgatccgataatactagcgaacactaccgatgtgagccattttggttactttcaaaggtcaagcgtcaaggagttcatcgtcttcgtttctcgaactgttgctaaacgtactccttctggtcagcgccagtccgttcagcacgaagagtacaaggtacatgcttacaacagaaatggactttgtgccttgggatttatggatgatcattatccagttcgaagtgctttttcgcttctcaaccagattctagatgaatatcagaaaaattttggggagtcttggagaaatgcacaagctgatagcactcaaccttggccgtatctgaatgatgctttgaccaaatttcaggaccctgcagaggcggataaattattgaaaattcagagggagttggatgaaactaaaatcatccttcataaaactattgatagtgtgcttgcacgaggtgagaggctggacagtttagttgagaagagttcagatctgagtgctgcgtctctgatgttctacaagcaggctaagaaaaccaatcaatgttgtaccatactgtaaacttgcaagagaaagcaacaatgttgtgatatgggattcgtttatgttggcctctaaagttgatgatgattgatgactgaaaacttgtgtttataatatggtttttcaagattgtttgctggtgagaattcctgatctttcccctttctgggcaatttgttgtttggatgaaaagtggaagggtaaacaactggtctcaccattggcggtgtattagatatttttttcttttctttgcactcgacttgacaaatagatcttatttcttgtttctgtggattagtaatataatataatataataatttg

SEQ ID NO: 21085 - DNA, 433 bp, Gossypium hirsutum
  Clone ID: LIB3083-011-Q1-L1-E11
cactaccgatttgagccattttggttactttcaaaggtcagtcctctatggaattcatcgtcttcgtttctcgaactgttgctaaacgtactccttctggtcagcgccagtcctttcagctcgaatagttcaaggttcatgcttactacagatattgacctttttccttggtatttaatgatgtttcatttttcattttttatttttaatttttctttttttttgttttttattctttttttatttttttttttttttttttttttcttttttttttttatttttttttttttttttgttctattttttttttttattttttttttttttttttttttttattttttttatttttttttttctttttttattatttttttttatcttttttttctttttttttttttttttttatttttattttttttttttt

SEQ ID NO: 21086 - DNA, 656 bp, Gossypium hirsutum
  Clone ID: GOSHI-09MAY01-C129_7
aaaccaccaaaaccaccagtttatgtacctcctaagaaagagaaaccaggacccgggcggccattttatgaacatccaaagaaaccaccgtatggtcactatccaggacaccctccattggggaagcctcaatagagacatcccatcggctagccatcccaagaactgagctactatggctatatagataaattagtatctatacaataagagtttctttcccctctcgtccggttctcttgtatgtctatgtagtaaatgttttcttttacctgcgagagtgccgatggcagtacctcattggaatgcctattttatgtcttcttgtttctcaatgagccaatatcctgatttcaacacaaaaaaagaaaaaaaaaaataaataaaaaaattaacgaagaaaggaaaaaaaataaaaaaacaaaaaaacaaaaacaataaaaaaaacacatcaaaagcaaaaaaaaaaaaaaaaaaaaatggggggggccgttttaggggtcccaattttcctcccctggcttcgcaagtaaaaatttttttattggggcccctaaattaaattccctgggccgggttttaacacccgcgtgaatgggaaaacccctggggtccccaatttaatagcctttgaaaaaaacccccttttccccagt

SEQ ID NO: 21087 - DNA, 478 bp, Gossypium hirsutum
  Clone ID: GOSHI-09MAY01-C129_5
gcgctgagcctacgcctccggtttatacaccaccaaagaaagagaagcctgagcccaaaccacgcggtataggaacccccaaagaaggaaaagcctgaacctaagccaccagtttatacaccaccaaagaaagagaagcctgagcccaaaccaccagtgtatggaccaccaaagaaggagaagccaccggcttataagcctccaaagaacccaccagtgtatgagcctaagccaccaaagccaccggtttacaccccaccaaagaaagagaagcccgtacctaaaccaccagttcatgagtctcccaagaaaccaccggatggtcactatccaggacaccctccattggggaagcctcaatagagagatcccatcggcttgcaatcccaagaaccgagctattatgactatgctaaatagataaattagtatccatgcaataagagctgcttaatactcatgttctgctttcttggat

SEQ ID NO: 21088 - DNA, 752 bp, Gossypium hirsutum
  Clone ID: GOSHI-09MAY01-C129_4
cccacgcgtcccgctcaatgatgtctaccacacacttgctaatatttctacttggagtggccgctctagccactccctcttttggtacctatgagtctcccaactatgggaagccccctactcctgtttataagcctcctaaggtgaaacccccaccttatgaacataagccacctgtctatgaacctccaaagaaggaaaaacctgaacctaaaccaccagtttatacaccaccaaagaaagagaagcctgaacccaagccaccgatgtatgaaccaccaaagaaggaaaagcccgaaccaaagccaccagtttatacacctccaaagaaagagaagcctgaaccaaaaccatcagtatatgaaccaccaaagaaggaaaagcctgagcctaagccaccagtttatacaccaccaaagaaagagaagcctgaacccaagccaccagtgtatgaaccaccaaagaaggaaaagcctgagcctaagccaccagtttatacaccaccaaagaaagagaagcttgaacctaagccaccagtgtatgaaccgccaaagaaggaaaagcccgagccaaagccaccagtttatgcacctccaaagaaagaaaaaccagaacccaaaccaccagtttatcagcctccgaagaagccaccggtttatgagcctaaaccaccaaagccaccggtttacacaccaccaaagaaagagaagctgaacccatattaataatattattattaataatgaacatta

SEQ ID NO: 21089 - DNA, 869 bp, Gossypium hirsutum
  Clone ID: GOSHI-09MAY01-C129_3
cacgcgtccgagaagcctgagcctaagccaccagtttatacgcctccaaagattgagaagcctgaacccaagccaccagtatatgaacctccaaagaaggaaaagcccgagcctaagcctaagccaccagtttatacgcctccaaagaaagagaagcctgagcccaaaccaccagtatatgaacctccaaagaaggaaaagcctgagcctaagccaccagtttataccccaccaaagaaagagaagcctgagcctaagccaccagtgtatgaaccaccaaagaaggagaaacctgaacctaagccaccagtttatgcacctccaaagaaagaaaaaccagaacccaaaccaccagtttataagcctccaaagaagccaccagtgtatgagcctaagccaccaaagccaccggtttacacaccaccaaagaaagagaagccagaacctaaaccaccggtacatgagtctcccaagaaaccaccatatggtcactatccaggacaccctccactggggaagcctcaatagagagatcccatcggctagccatcccaagaactgagctactatggctatatggataaattagtatctatacaataaaagttgcttcctactcatgttctatgttcttgtatgttcttgtatgttatgtaggaatgttttcttttactagcgagaatgcttatggcagtactcattggaatgtctattctatgtcttcttatttctcaatgagcaatatcctgatttcaatacaaatattccaactgtcgactgcaggattacttatcatagacattcttgtattcctgcaacccttgcaattgtaaatgattagagaccaaagccaaagctccctggaagca

SEQ ID NO: 21090 - DNA, 997 bp, Gossypium hirsutum
  Clone ID: GOSHI-09MAY01-C129_2
cccacgcgtacgcccacgcgttcgccctcccgctcgcccttcaataatgtctaccacacacttgctaatattgctacttggagtggtggctctcgccactccctcttttggtacctatgagtctcccaactatgggaagccccctactcctgtttataaacctcctaaggtgaaacccccaccttatgaacatcctgtttataaacctcctaaggtgaaacccccaccttatgaacataagccccctgtctatgaaccaccaaagaaggaaaagcctgagcctaagccaccagtttatacacctccaaagaaagagaagcctgaacccaaaccaccagtatatgaacctccaaagaaggaaaagcctgagcctaagccaccagtttatacaccaccaaagaaagagaagcctgagcccaaaccaccagtatatgaacccccaaagaaggaaaagcctgaacctaagccaccagtttatacaccaccaaagaaagagaagcctgagcccaaaccaccagtgtatggaccaccaaagaaggagaagccaccggcttataagcctccaaagaagccaccagtgtatgagcctaagccaccaaagccaccggtttacacgccaccaaagaaagagaagcccgaacctaaaccaccagtacatgagtctccaaaaaaaccgtggtgtgttcagtatacactccatctgtgaaggccaaatcctaaatacccattggcttggattccaaaaaaccgagctttttattttgtccagaggaaaataataatccatgctcatgagataggagttaccctaaactcatgtcttgttttttgtatggaataagagaatggtatacttgcaaagggctttgggaaggccaatggaatgggatgcaatgttttgtattttaattggaaagaccttttttgaaaaaatattttttcaacgccggtgtggattatataaaatgttttcataagagctgcctttcttaaaaaa

SEQ ID NO: 21091 - DNA, 941 bp, Gossypium hirsutum
  Clone ID: GOSHI-09MAY01-C129_1
cccacgcgtccgcccacgcgtccgcccacgcgtccgggctactacccatttgctaatattgctacttggagtggtggctctcgccactccctcttttggtacctacgagtctcccaactatgggaagccccctgctcctgttcataatcctcctaagctgaaaccgccaccatatgaacataaacctccggtctatgaaccaccaaagaaggagaagcctgaacctaagccaccagtttatacacctccaaagaaagagaagcctgaaccgaaaccaccagtatatgaacctccaaagaaggaaaaacctgagcctaaaccaccagtttatacaccaccaaagaaagaaaagcatgaacccaagccaccggtgtatgaaccaccaaagaaggaaaagcctgagcctaaaccaccagtttatgcacctccaaagaaagaaaaaccagaacccaaaccaccagtttataagcctccaaagaagccaccagtgtatgagcctaagccaccaaagccaccggtttatgcaccaccaaagaaagagaagccagaacctaaaccaccagtatatgagtctcccaagaaaccaccatatggtcactatccaggacaccctccattggggaagcctcaatagagagatcccatcggctagccatcccaagaactgagctactatggctacatagataaattagtatctatgcaataagagctgcttcctactcatgttctgttttcttgtatgtcatgtagtattgttttcttttactagcgagaatgctcatggcagtatcattggaatgcctattttatgtcttcttgtttctcaatgagcaatatcctgatttcaacacagatattaaaaattaatattccacatgcaaactgcaggattacttatcatagaaaaaaaaaaaaaaaagggcggcgctcgcgatcga

SEQ ID NO: 21092 - DNA, 364 bp, Gossypium hirsutum
  Clone ID: LIB3135-009-Q1-K1-G4
gcgtccgcccacgccttcatgtctaccacacacttgctaatattgctacttggagtggtggctctcggcacgccctcttttggtacctataaatctcccaactattggaagccccctactcctgtttataaacctcctaaggtgaagcccccaccttatgaacataagccccctgtttatgaaccaccaaagaaggagaagcctgagcctatggctgccgccttccttggtgctagggttctgccctgttttcaaaccttgggccacttgggttaattgtgtattgggccactacatttgggctatagggactgttttgggcttttaataggacattaaataaatggacttttcttggactgtt

SEQ ID NO: 21093 - DNA, 401 bp, Gossypium hirsutum
  Clone ID: LIB3048-015-Q1-L1-A10
ctaaggtgaagcccccaccttatgaacataagccccctgtttatgaaccaccaaagagggagaagcctgagcctaagccaccagtttatacgcctccaaagaaagagaagcctgaacccaaaccaccagtatatgaacctccaaagaaagaaaagcctgagcctaagcctaagccaccaatttatacgccaccaaagaaagagaagcctgaacccaaaccaacagtatatgaaccttcaaagaaaggaaaaccttaacctaaaccaccaatttatattccaccaaagaaaggaaatcctaaacctaaaccaacaatgtatgaaccaacaaagaaagagaaaccttaacctaatccaccaatttattcaccttcaaaggaagaaaaaccataacccaaacca

SEQ ID NO: 21094 - DNA, 358 bp, Gossypium hirsutum
  Clone ID: uC-gsflnu33B064b04b1
ttaccacacacttgctaatattgctacttggagtggtggttatcgccactccctgtcttgccacctatgagtctcccaactatgggaagccccctactcctgaccataaacctcctaaggtgaaacccccaccttatgaacatcctagggataaacctcctaaggtgaaacccccaccttatgaacataagccccctgactatgaaccaccaaagaaggaaaagcctgagcctaaggcaccaatttatacacctacaaagaaagagaagcctgaacccaaaccaccagtatatgaacctctaaagaactaagatgaaaaggtctgttaggatgcatgctgagaagactgggaaacgaa

SEQ ID NO: 21095 - DNA, 340 bp, Gossypium hirsutum
  Clone ID: uC-gsflnu33B075f10b1
tgattcttttactagcgagagtgcttatggcagtactcattggaatgcctattttatgtcttcttatttctcaatgagcaatatcctgatttcaacaaacaaaaaaaaaaaataaaaaaaaaaaaaaaaaaaaaaaaaaaaaaaaaaaaaaaaaaaaaaaaaacaaaaaaaaacaaaaaaataaaaaaaaaacaaaaaaaaaaacaaaaaaaaaaaaacaaaaacacataaacaaaagtaatggggcccctgcttgacaatacacattattcatctcaatctacttccactacaactgttttattggttaatgcaaaaataaactactgccccccgtttt

SEQ ID NO: 21096 - DNA, 320 bp, Gossypium hirsutum
  Clone ID: uC-gsronu33B028e01b1
caatattggcccttttaaagtctttgctccattctcattacaagacaatgagcaaagaagggcagctataatagcccaattttacctgggcccagttccataaccaaaacaaaaccaaaaataaaaattgagtctaaaatataaagagtccatttacaataaataagcccaaattacttaaaaaccactacccaaactttacaagcccaaacagcccataaccgaaactagaaacagaaaccctagcccccacactagcctccaaagaagccaccagtgtatgagcctaagccaccaaagccaccggtttacacgccacc

SEQ ID NO: 21097 - DNA, 549 bp, Gossypium hirsutum
  Clone ID: GOSHI-09MAY01-C399_1
cccacgcgtccgtttttaacgtcgttcttctctccaatgaccttttctgcgcaagcttcaactcaatcgggttctcttagccattcatcctccatctttcgcgcggcaaaactagggacagttccttccaagtaaatctgctctcctcttttcagactctcagttgctagaatgtgggctagttgatttgtcatcctttacgcatgtttgaatcttaaactccaaaaatgctctttattatgttgaatgtttctaatatatgctacgatctctgatttatctaatgtatttgactaaaatattattattattatcattatcattattaatgaatccccctctattgttgcctctgacaaacccatttccaccccgtttgcaccgcccatgagaacacaagggcctttgctgcaaacacaaacccatcatcatcatgcaaaaccaatcttgataccagaacctctcccgcagcattccttgcaaaaatccctgaacccgatctagaccggcctagttgagggcacccgtttcacagtcttgcggctcttg

SEQ ID NO: 21098 - DNA, 608 bp, Gossypium hirsutum
  Clone ID: GOSHI-09MAY01-C389_1
tcggtatctcagaaacagcctagaagggctcctccaaaacatgattctcgtgcagggtaccctttatctcagaatcttccattcgattttcccaatgcccagatttactatccctatcctatatgtgttcctggaagttacttgcattaccctccaaatcatcagaatggagcgaggctcataaccagtcctatggcacaaatttcaaccgtgcgtggaccatatccttctcatctaagtggtaaaaagcagaggtataatacaaggttccaggcaaatttaagtcgcagttatccgcagtgtggcggcataatggctcctcacggcagcctatatggctccgcaggtatccctcttcttcatcatccttatcctcatcctcatcttcttcatgagcaaagaaggacgcagccacacagggctaaccaacatgaaaggggtgatcaacaacagggagggaacccgttttctgtattagatatgaaggatgtaacccagcaacaccagtttgagttgagtggaaccaccggaagacctcttatttgatattgatgtttgaatttgctgtacaatgatcggtggttgcagcggccctatgggttttttta

SEQ ID NO: 21099 - DNA, 766 bp, Gossypium hirsutum
  Clone ID: GOSHI-09MAY01-C309_1
cccacgcgtccgcccacgcgtccgacttaatttccatttactagcaatttcttcaagttcttttctttgtttttttaatcaatggctgaccactacctccaaaacactcaaccaatgactcaccaaatggtgaaagccgctactgccgcaacagccggtggttccctcctcattctctccggtttaatcctagctggcaccgttattgcgctcaccatagccactccactcttcgttattttcagtccagttcttgtccctgctctcattgcaacagctctcctagcaacgggtttcgttgcctccggcggtttcggtgttgcagctgtcacggtcctgtcctggatttacaggtatgtgacggggaggcacccaccggctgcggatcagttggatagtgcagggatgaaattggctagcaaggcacgggagatgaaagatagggcggcacaactcaccggtgcggcggcttcttaaattagttctctactgcatgcttttgtaaaggagctgtgcaaaagttcaggatcaagtggccataaaccgatccttaatgatgttgttgttatgttgttgatgatgaaaagatgtttttttctaaatttaaaagcagcattagaaacttcggggggatgatgtggctgtctgtttatgttaaaaactcccatgtaattgactgtaataagcactacttgtttttgttgttttaaaagtttgtgtgtttgttggttccacttcaattacaataaagtaaaattgaatattt

SEQ ID NO: 21100 - DNA, 567 bp, Gossypium hirsutum
  unsure (1)..(567): unsure at all n locations
  Clone ID: LIB3582-016-P1-K1-A1
cttaatttccatttactagcaatttcttcaagttcttttctttgttttttttaatcaatggctgaccactacctccaaaacactcaaccaatgactcaccaaatggtgaaagccgctactgccgcaacagccggtggttccctcctcattctctccggtttaatcctagctggcaccgttattgcgctcaccatagccactccactcttcgttattttcagtccagttcttgtccctgctctcattgcaacagctctcctagcaacgggtttcgttgcctccggcggtttcggtgttgcagctgtcacggtcctgtcctggatttacaggtcctttatcttttcttcttttttaatgatctccaaaaataccatgaaatttcctgtactgtttttactatttttatttaaaaaatagtaaattagtcttcatatattatcaaagattaaagagagtaaattttatcaaagatcaaaaagaaatatattttcattaaaaatttcataaattagtatgagatacactttaatccattacatatngtaaagtaatgtcaatttttttagc

SEQ ID NO: 21101 - DNA, 383 bp, Gossypium hirsutum
  unsure (1)..(383): unsure at all n locations
  Clone ID: LIB3583-031-Q6-K7-G4
tccgccatcccggtcgccccgcgtccgctttctagcatttcttcagttcttttctttgtttttttagtcaatggctgaccaccacctccaaaacatcaaccaatgactcaccaaatggtgaaagccgctactgccgcaacagccgggggttccctcctnattctctccggtttaatnctagntggaacaaatattgggggggggggggggggttnannntttaggtatnntaaaaatnannagggggggggggtggatgntgnnttgaaaaganaatgaganntgggttnaagggataggggtaaaaagtgaagggaaatgaaggtgaaattggaaagaaggaggagggggagggatagnaggatggggatgggggaaaagag

SEQ ID NO: 21102 - DNA, 1654 bp, Gossypium hirsutum
  Clone ID: GOSHI-09MAY01-C329_1
ctatagccggtcgcctcggccgccccggcgcttcaaatccctctctaaccctttccttcccttcatccaaaccacacacacacacacacacactcacaactcagagaagagaaggggaagggaaacaacaatgatggggcaaaggcaacacgttgtccttctcattttctcagcttttcttctcttccaaacctcaaacgcccataatattacacgtctacttgcaaagcacccctctttgtccacattcaatcattacctcaccctcactcacttagctcccgagatcaaccgccgcaccaccatcactgtccttgccttagacaacgccgccatgtcttccctcttggataaaaacccttccatttacaccatcaagaacatcctttcccttcatgtcctccttgactactttggtgccaagaagcttcaccaaataaggaatggtactgcactagctgctactatgttccaagctactggtgtggctcctggggtttctgggtttgttaatataaccgattttaaaggtgggaaagttggttttggagctgaagacaatggtggaagtttgaattctttttttgttaaatctgtggaggaacttccttacaatatatctgtgattcagatcagcaaggctttgccttctgttgtagctgaggctcctactccagggccaagtgagctgaatatcactggcattatgtcagcacatgggtgtaaagtgtttgctgatacccttttggctaaccctgaagccatgggaacatatgaggataatgttaatggaggattgactgtgttctgccctatggatgatccattcaaagcctttttaccaaagtacaagaacttgacagcttctaagaaagcatctttcctcgaattctttggtgtgcctgtgtaccaatctttgtccatgttgaagtccaacaatggactcatgaacacattagctaccgacggagccagcaagttcgatttcaccgtgcaaaatgagggtgaagaggtgacactaaagaccagggttaacactgtcaaaataaccgggactctgatcgacgagcagccggtggcaatttatacaatcgataaagtgttgatgcctaaagaattgttcaaggcagctcttagtccagccccagcccctgccccagaggaggcagcagatgcaccaaagggatctaaatccaaaaccaagtccaagtctaagactaagtctaaggcagcaccaacaccggattcagactcaccagctgagtcaccagatgatgacccagctgatcaggtagctgatgatgataatgctgctatgtgttttggggctgaaaggcttgctgttgttggattgagcttcttgttagtgtttttcttgctgtaagtgatgcctgatatgaggctaacttattagtcgccatcagtgtggttactccttttttcttttggtactgtttgttttgtagtgtgtgatgagtatttttgtggtgttatattcgctgagtaaatgcaaattgtgatgttagttgatagcaattaagttttgttagtatgattttccttttgaactttaaaagtaacaaaatgttaaggaaaaattgtgttttaatgtaatcacgataccatttatggacggttcatcacattgatgatc

SEQ ID NO: 21103 - DNA, 640 bp, Gossypium hirsutum
  Clone ID: LIB3543-051-Q6-K6-D1
caatccccccccccattgagtaagcaaagccaacacacggcacagcagcacaatgcagcgaagacacccccttcttcttcttctcattttctcagtttttctcaacttccaaacatcaaatggccataacatcacacgtttactcgccaagcacccttctttatccaccttcaaccattacctcactctcacccatttggctcaagagatcaaccgccgcactaccatcactgttctcgccttagacaacgccgccatgtcctctctcttgaataaaaacccttccatttacaccatgaagaacatcctttccctccatgttcttcttgactacttcggtgccaagaagcttcaccagataaccaatggcaccgcactcgccgctactatgttccaagccactggggtcgcccctggggtttccggctttgttaacataaccgattttaaaggtggaaaagttggttttggagctgaagacaatggtggggatttagattctttctttgttaaatctgttgaggaactgccttataatatatctgtgattcagatcagcaaggctttgccttctgctatagctgaggctcccactccagggccgagtgagctgaatattactgggattatgtcagcacat

SEQ ID NO: 21104 - DNA, 735 bp, Gossypium hirsutum
  Clone ID: GOSHI-09MAY01-C249_1
ccttccccattttcggttcatttctccctttataggaacgatcccctaaattattttttgttaaaattaccctttgctgaaacgtagtttggagtctgcaatattggcttaaaatgtcttcccctagcaagaggagagaaatggatgtaatgaagttgatgatgagtgattacaatgtagaaacaataaatgatgggctcaacgaattcaatgtcaagtttcatggtcccaaagaaagtctctatgaaggtggggtttggaaaatccgggttgagcttccggatgcttacccattcaagtctccttctattggatttgtgaacaagatattccacccaaatgttgatgaactgtctggttctgtttgcttggatgttattaaccaatcatggagtccaatgttcgatcttttaaatatttttgaagtttttcttccacagctcttgctttatccaaatccttcagaccctctaaatggggatgcagcatcattaatgatgaaggatcgaaagcaatatgatcaaaaaggaaaagaatactgtgagcgatatgcaaagaaagaagacatcacgaaatccgcagctgacaaggaaactgatgatgaggatgacatcactgatgaagatactggatctagtgatgatgaaattgctggacatgcacatccataaccaccttggaagaatctatcttttaccaattatacacttgataaaagcgatgatgaaccccctt

SEQ ID NO: 21105 - DNA, 449 bp, Gossypium hirsutum
  Clone ID: GOSHI-09MAY01-C279_2
tcggttcagtcgaagcatttgttgtgcaaagttgaatcaactttcaacattggaaaccctcttctctaacctaaagctaaggccttatgctacacctctcattggtccattacagacttgtgaatccagaatttacagcagggagaaggctgaatatgcgaatgtgaattgggatgaacttggatttgctctaactaagactgattatatgtacgtcatgaatttcactgaagaggaacaaaagttcttcaatggaaccttaactcgctttggcaacattgagatgtgcccttcatctggaatattaaactatggccaggggttattcgagggactaaaggcgtataggaaggaagacgaggggattctgctcttccgaccccaagagaatgctctgaggatgaagatcggtgcggatcgaatgtgcatgccatcaccaaccgttgacc

SEQ ID NO: 21106 - DNA, 1319 bp, Gossypium hirsutum
  Clone ID: GOSHI-09MAY01-C279_1
cccacgcgtccgcccacgcgtccgcccgcccgcccgcgcccgcccccccccaatttggtttttccttcccattttcgtttccttgccttttcctcaacaaaattaacatttctaatgggttctttatctaaacaagagcaggtggaatgcagggagaaggcagaatatgcgaatgtgaattgggatgaacttggatttgctctaactaagactgattatttgtacgtcatgaatttcactgaagaggaacaaaagttcttcaatggaaccttaactcgctttggcaacattgagatgtgcccttcatctggaatattaaactatggccaggggttattcgagggactaaaggcgtataggaaggaagacgaggggattctgctcttccgacctcaagagaatgctctgaggatgaagatgggtgcggatcgaatgtgcatgccatcaccaaccgttgaccaattcatagatgctgtcaaaaagactgtgctggctaacaagagatgggtaccaccttatgggagaggatctttatacgttaggcctttgcttatggcaactggtcgaaatctgggagtgaaaccatcatcagattacacattcttagtgtatgcttccccagtgggcaattatcataagggtgatctgaacttgatggttgaagacaatgtccatagagctattcctggtggtaccggaggcattaaagctgtcacgaattactcgcccgtttacaagccattaactgaagcaaaagctaaagggttctcaaatctcttatttctggatgcattgactggaagcaacattgaggaaggttctgcttgcaatatcttcattctcaaggggaatgttatctcaactccgacaactcatgggacaattctcccaggaatcacaagaaaaagcatcatggaaattgcatctgattttggataccaggttgaggaacgagctattcagatcaaggaggtgtttgatgctgaagaagtcttttgcacaggaacagctatggttgtgaagtctgttgcaagtataacctaccagggcaaaaggatcggatacaaactgggagcagaaacactggctcagaaattgcatgcaacactaacagggattcaaactggtctgatcgaggacaagctgggatggaccacgctcatcgattgacctcctcttttatgatgcaatatctacatttcgcgttggaatttgccattttcgtttcggttttctttagtttcaatcaaaggaaatgtttactttcaggcgctctgtgaaagctaaagaataataatagcttaaatatttccattggt

SEQ ID NO: 21107 - DNA, 433 bp, Gossypium hirsutum
  Clone ID: LIB3583-015-P1-K1-D2
gcgccaattaggtttttccttcccattttcgtttcctagccttttcctcaacaaaattaacatttctaaagggttcggtatcttttctagagcaggtggtttgggtgtaggctgtttatgcgtaagtgtattgggatgaactaggatttgctctaactaagactgattatttgtacgtcaagaatttcactgaagaagaacaaaagttcttcaaaggaaccttaactcgctttggcaacattgtgatgagcccttcatctggaatattaaactatggccagaggttattcgagggtctataggcgtattggtaggttgtcgtggggattctgctcttccgacctcaagagaatgctctgaggatgtagatgggtgcggttcgtttgtgcatgccatcaccaaccgttgaccaattcatagatgctgtcaaaaa

SEQ ID NO: 21108 - DNA, 842 bp, Gossypium hirsutum
  Clone ID: GOSHI-09MAY01-C219_2
cccacgcgttcagaagcagcttaggcaaccagttcgcagccatggtgaagtattcgaaggagtcagataatcccaccaagtcctgcaaggcaaggggctctgatctcagggttcatttcaagaacacaagggagactgcgtttgctatcaggaagttgcctttgggtaaggctaagaggtatttggaggatgttatggctcacaaacaggccgtacccttcagacgcttctgtggtggtgttggacgtacagctcaggcaaagaacaggcattctaacggacaaggtcgctggcctgtaaaatctgccaaattcattctagatttgctgaagaatgctgagagcaatgccgaggtcaagggtttggatgtggatgcactctatatttctcacatccaagttaaccaggctcagaaacaaaggcgtcgtacataccgtgcccatggaagaatcaatccttacatgtcttctccttgccacatcgagttaattttgtcggagaaggaagagcccgtcaagaaagagcctgagactcagttggcagctagcaagtcgaagaagtcccaagtatctgtgtagacggtcagcaaaagataaagattgaaattttagtcgatgaaggaagttgtatctgggaattaatttctgtcttactctttgagtaagtagttttgatgtttattcaaagtagaaagagttgttatgccttttgaaaccttgtttagtcaaatgttattgatctgagattcatgttggagatttttgttttaatccatgattttatatgaagttattttgttgagggacagataaaaaaaaaaaacttgaggggatttaatataa

SEQ ID NO: 21109 - DNA, 930 bp, Gossypium hirsutum
  Clone ID: GOSHI-09MAY01-C219_1
cgccgccgcgttcttgctcggctgacccccaattgaagcactcttgagcagcaacagaggcttcattcagatcacatatcagcagccatggtgaagtattcgaaggaacccgataatcccaccaaatcctgcaaggcaaggggctctgatcttagggttcatttcaagaacacaagggagacagctttcgccattagaaagttgccattggttaaggctaaaaggtatttggaggatgttatggcccacaagcaagccataccgttccgacgcttttgtggtggtgttggacgtacggcacaagcaaagaacaggcattctaacggacaaggtcgctggcctgtaaaatcggcaaagttcattctagatttgctgaagaatgctgagagtaatgccgaggttaagggtttagacgtcgatgcactccatatttctcacatccaggttaaccaggcccaaaaacaaaggcgtcgtacttaccgagctcatggaagaatcaacccttacatgtcctctccttgccacattgagttgattttgtccgagaaggaagaacctgtcaaaaaagagcctgagactcaattggcagcaagcaagtccaagaagtcccaagcttcttcttgagtgaacaaagtttgaaactttatcaagtcagttaatgtagtgatgtctggtctttggatttcatacactatttttgaagtttttgacattaagatgtgttggatggttttttatttcaaagcatgttttagtcaaatgttgtcttgagttatgtttttcttggagattttgtctcaattacagtgttctatgttatgtttcatttatatgacttttaatataaaacaaggttcgttaattggtaggttggtttggttgtaagttaatttgggttttaaagtttttgaattattttgatttaagcaa

SEQ ID NO: 21110 - DNA, 644 bp, Gossypium hirsutum
  Clone ID: GOSHI-09MAY01-C209_1
tttttacgcgtccgcccacgcgtccgctttttctctacttatatacataaaaagggccctgcaattacaagctgcaaaaaattaaattaaaaaaggaaaaccctaatttcggcaatggccagaactgatcaagaagcaatcgagactttcatcaacatcaccggggcatcagaagctgttgccattgaaaagcttgaggagcatggtggtgatctcaatgcagctgtaaatgcacatttcagtgaaggagatagaaacaccacaaggtcaacgtcaactgtagttcctgtagatgacgccatggatatagatgatccaatagaagctgtaccaagcaggccagcctttccacttcttccaccatctagaacaatgaatgcattctcattgcttgatccaaactttcgtagaagcttctttgatggtgtttccgattttacaactcgtgaaccattggttacacatccaagagaggtgagggaggtaccaatagaggttaacgatagcagtgagccatcacgtcgttctggtcatgctcctttgattgaggatgtctctgaaactgcaccaggacatgaaccaattaccaatgagactattatagtggatgaagtggatgaggattctaccatgctgccaagtca

SEQ ID NO: 21111 - DNA, 780 bp, Gossypium hirsutum
  Clone ID: GOSHI-09MAY01-C229_2
ttctcccacgcgtccgcccacgcgtccgctcactgctcactctctttaactttcgttcatctccattattgtttcagatcgtaaaatcaaaaccaaattttcgtttaatttatacatataaacacccaaaaacaaaaagggcataaaaaaaggagattcaatggggatcttctccttcaatgccatagctttggccttcttattagccattatctctggcgccgtcaatgcttgcccttcttccgaccgagaagcattgctagctttaagttcatcgttaaaggagccttatttaggcatcttcgattcatggaaaggcaccgattgttgttccaactggtacggtattagctgtgaccccaccactcaccgagtcaccgacgtttccctacgcggtgagtccgaagaccccattcttcaaaaaaccggccactcatcttccggttacatgaccggtaccattaacccttctatttgtcagctcgaccgggtcactactttaatcattgctgattggaaaggtatcgccggtgagatcccatcatgcttggcgtcgttgcccaacttgagagtcttggatcttatcggaaattccttatcgggaaaaatcccagaccagatagggaaccttcaaaagctcaccgtcttgaacttagctgataataaaatcaacggcgaaatcccaagctccattgttcaactttccagtttaaaacacctcgatttgagcaacaacctcctcaccggcgaagtcccggccaactttggcaacctgaaaat

SEQ ID NO: 21112 - DNA, 1120 bp, Gossypium hirsutum
  Clone ID: GOSHI-09MAY01-C229_1
cgacccacttactataaagcaggccgcccgcacttcaccggcccggacttacactgctcgacccacgcgcccctttaatcattgctgttggaagggtatcgccggtgagatcccatcatgcttggcgtcgttgcccaacttgagagtcttggatctcatcggaaattccttatcgggaaaaatcccagaccagatagggaaccttcaaaagctcaccgtcttaaacttagctgataataaaatcaacggcgaaatcccaagctccattgttcaactttccagtttaaaacacctcgatttaagcaacaacctcctcaccggcgaagtcccggccaactttggcaacctgaaaatgctgagccgtgcattactgagtggaaaccaactcactggaacgatcccaatctccatcagcaacatgtaccggttagccgacttggatttatcgagaaacaaaatacagggtcaaataccagcacagttaggcaaaatgaaggtgctcgcaacgttggacttaggcagcaacatgctcaccggcgaagtaccgccggcggttctgggcagtaccggtttgggtatcttaaacttgagtcgaaactcccttgaaggcaacattccggacgttttcgggccgaaatcgtacttcatggcacttgatttatcgttcaataacttgaaaggtccggtccccggatctttatcgtcggcgaagttcgtcggacatttagatctcagccataaccatctttgcggtacgattccggtgggaacgccgttcgatcaccttgaagcttcatcatttgatagtaatgattgtctttgcggcaacccactcaagacttgctaataatatttgcttaatgaaattaataattgtgcatgggggattaaattgtaatagaatgttttattttgggttattattataaataatagaagtattgaaggttgtctttggttattacaccgatttcatttatgtgtaataacatgtagaaagtgtacgtattatgtaacgtaagcgtgtgtattaatttatttaatgagtgtttttctccgcaaaatatactaaaaactacagtcgatgtaactaaattattaataaatttacgtgtttgtt

SEQ ID NO: 21113 - DNA, 474 bp, Gossypium hirsutum
  Clone ID: LIB3493-045-P1-M1-H6
gattgttgttccaactggtacggtattagctgtgaccccaccactcaccgagtcaccgacgtttccctacgcggtgagtccgaagaccccattcttcaaaaaaccggccactcatcttcgttacatgaccggtaccattaacccttctatttgtcagctcgaccggtcactacttaatcattgtgattgaaaggtatcgcgtgagaccatctgcttgcgtcgtgccactgaagtttgatctatgaattctatcggaaaatcaaccaatagaacttaaactaccgctgactactgtataaaaacgcaatccagctcatgtaacttcagtaaacactcattgacacacctctaccgcgaagtccgcaacttgaacctgaatgtggccggcatactgatgaaacaactactggacgatcccaactccatagcaacatgtaccggttagccgacttggatttatcgagaaacaaaata

SEQ ID NO: 21114 - DNA, 430 bp, Gossypium hirsutum
  Clone ID: uC-gsflmaxxa012d03b1
gttagagctcactgctcactctctttcactttcattcatctccattattgtttcagatcgtaaaatcaaaaccaaattttcgtttaatttatacatataaacacccaaaaaacaaaaagggcataaaaaaggagattcaatggggatcttctccttcaatgccatagctttggccttcttattagccattatctccggcgccgtcaatgcttgccctccttccgaccgagaagcattgctagctttaagttcatcgttaaaggagccttatctaggcatcttcgattcatggaaaggcaccgattgttgttccaactggaacggaatttagctgtgaccctttctataattgagtctcagtcgttatcttctctcgttatgatcaatacatctcattctttttaattcacgttcatttattttctcgata

SEQ ID NO: 21115 - DNA, 234 bp, Gossypium hirsutum
  Clone ID: uC-gsronu33B031b08b1
tttgtagcttcatcatttgatagtaatgattgtctttgcggcaatccactcaagacttgctaataatatttgctcaatgaaattaataattgtgcatgggggattaaattgtaatagaatgttttattttgggttattattagaaataatagaagtattgaaggttgtctttggttattaaaaaaaaaaaaaaaaagaaaccataaaaaaagataaaaaaaaaaaacatagaac

SEQ ID NO: 21116 - DNA, 754 bp, Gossypium hirsutum
  Clone ID: GOSHI-09MAY01-C134762_1
cgtggatggattatcctaataacatagcttttaagctccatgaaacggtgagtcacaaagagtgcgaggatattgtatccgattttgaacgttgtgcgacagtgcttttaaattgcaaaattctgaccttgagaacttgctatgaattcgaacctgaggcactacgtgtgcttagtaagattcaccagaaaccaataattgttccacttggcttgttgccgccaccactaacgagcgtagatgataaaggagacgaaaattgggaagcgttgaagaaatggcttgatagtaagcaagagaagtcagttttttacgttgcactcggtagtgaggtgagtctaagtcaagagtccatgcacgagttggcatttgggatagagaagtctgggttaccatttatttgggttgtgaggaaaccccctttagttgaagaacagtttgcagaggacatgatccctcccgagtttgaagaacgagtttcaaacagggtatggttttacgaggctgggcacctcaacttaggatcttggctcactcatcagttggtggtttcttgactcactgcgggtggagttccgtaattgagtctcttggattaggtaaacctctgatattgtttccccgtggaagtgccaatcttgggttgattgctaggttgatgctttggaaaaaggtggattccaaataaaaaaaacgatgtggatggatcctttaagagcgacttggtgggcccgtgttttaagcgagttctggt

SEQ ID NO: 21117 - DNA, 678 bp, Gossypium hirsutum
  Clone ID: GOSHI-09MAY01-C134382_1
aatacctggtaatttcttccccacattgtcccttctctgttttctcttttccattttaaaccaaaatttctcatcaaacacggtgaatttgcagtggaacaactaacttaaaccaccacccatggatcgtctcaatggccctccccgcctcatgatagtttcagatcttgatttcacaatggtcgatcatgaagacccaaagaacctttctcttcttcgattcaacgctctttgggaagcctattatcgccacgattctttgctggtgtattccactggaaggtcgccgacgatttataaacagctgaggaatgagaagccccttttgaccccagatataaccataatgtccgtgggaaccgagattgcttatggtgaaccaatggtgcctgattatgattgggagcaacatttgaatctcaattgggacagagatattattactcaggaaactgctaagtttcctcagcttattcctcagtcaggcaccgagcaacgacctcacaaggttagctttttcttggagaagcctaattcattagaagtaatcaaggcactttcaaaaagtctagaaaaacacaagctagatgttaaaataatttatagccatgggacagcattggatgtattaccaaaaggtgctgataaaggccaacgcttgcatatttgcagagaacc

SEQ ID NO: 21118 - DNA, 907 bp, Gossypium hirsutum
  Clone ID: GOSHI-09MAY01-C135042_1
gtaggaatggagattcaagtaatcttagttgtgaacattcatctgatttgggggaagttgaaagggaaagggtaaggcaaatttttcgggagtggatgaacagtggtggcagggatcgtacatctaatgtttcttgtaaaaacaacagttcaagagcccagtggcttggtgaaactgagcaagaaagggtcagaattataagggagtggatgcaaatgaatggccagcagagaggtgcttgtgttgacagtagagaagaccaagctgctgatgttggtgctcaaattgatcgagttcttgatggattggtgattaatcagaatgaaggccgaactgagcttgtccgtaggggcattcgtaaattatgtggccggcaggctttgcttgatatgcttaaaaaggctgagagagaaaggcaaactgagctccaggcgttgttggagcatcgggctgtatcaaattttgcccatcgcaaccgtattcagtcattgctgagaggtacattcctgagaaatgacagaatgggtgagggtaacagatctacctctgttgcggccagcgaattaggcttattaagacaaaagcaaactgtatctggtctaagggaagggtttttctccagactggataattctggttctggtcctgctacagtaatcattccgatacatcatctaatgctgatactaatgctaacagaaatgagcaaaaccaagtaaataactctgaacatgagaatgagcaaacagataaccaaatgtttttgcatggtataactgatttgggggatgatgtcgaagatgtacgttggcaggaaacctctgctcgggtataaaaatggcgggaacgaatttgtgggagtgttgctagagagtggcagtggtctttcagtgatgagtctaatgat

SEQ ID NO: 21119 - DNA, 562 bp, Gossypium hirsutum
  Clone ID: GOSHI-09MAY01-C135242_1
ttaatatacctcacattttaggggtttctcttgaaaaatgactgaaaatcttgactgttcagcctcaaatcttctctgttctgagaacgcaagctcttgctttgatggtgatcttgattttaatgccttgaacgagtttggggcttcccctgcttgtcaccacctccttaaaaaccaaatctttaatccacatgaccctttcctcataaacaacagatcaacttctttgatgggttgtcctggttttgcattacaaagtgatgatcgaatcaaggcgatggttgaaaaggaggtggagcatttgcctggagatgattatctcaagagactgagaagtggggatttggacttgagcgccacgagagaggctcttgattggatttggaaggcttctgcttatttcggttttggacctgtgagtctttgcctatccattaactacttggatcggttcctttcagtgtatgacttacctagaggtaaaacatggaccgtccaactgctggccgttgcttgtttatctattgcagccaaaatggaggagacaaaagttccttcatcc

SEQ ID NO: 21120 - DNA, 989 bp, Gossypium hirsutum
  Clone ID: GOSHI-09MAY01-C136922_1
tttcgaaaattcacattggagcaactcaagaatgcaacatctggatttgcagttgagaatattgtttctgagcatggagagaaagctcccaatgttgtttatagagggaagttagagaatcacaggaggatcgccgttaaacgtttcaatcgaatggcttggcctgattcacgacaatttttggaggaagcaagatcagttggtcagctacgcaacaatagattggcaaatttacttggatgttgttgtgaaggtgatgaaaggttgcttgtggcagattacatgcccaacgagacactcgcaaaacatctttttcattgggaaacacaaccaatgaaatgggccatgcgattaagggttgtactctatctcgcacaagctttagaatactgcacaaacaaagggcgtgcattataccacgatctcaatgcttacagggttttatttgatgaggatggagatccgagactttcaacctttggcttgatgaaaaacagtagagatggaaaaagttacggtaccaatttggcatttactcctcctgaatatttgagaactggaagagtaaccccggagagtgttatattcagctttggcactcttctgcttgatcttctcgctggaaaacatatcccccctacccatgcacttggctttatgcgagacagaaaccttcagatgttgactgattcctgcttggaagggcagttttctgataatgatggaactgagctagttcgcttggcttctagatgtttgcaatatgaacctcgagagcgaccaaatcctaaatctttagttgctgctttgacaccccttcagaaggaaactgaggttccttcacatgtattaatgggtatcccacacagtgcttccttcactcctctatccccagttgggcaagcttgctcaagaagggacttgactgctatacatgagatattaaagaatcttggctacaagatgacgaaagagtggtaaatgagctc

SEQ ID NO: 21121 - DNA, 899 bp, Gossypium hirsutum
  Clone ID: GOSHI-09MAY01-C137912_1
agaggaaatcagaaaggaaaaaaaagaacccagctttcattgcacttccgtagttctattacaataactttcaacaattaaataatctgtgtctgtctcttatcaatagccagtaaccagttcttatcccaccattaatgctcccgcagctttttgttggtcctaagattggtgaaggtgctcatgctaaagtatatgagggaaaatacaaggatgagactgtcgctattaaagttgttcgaagaggggaaacccctgaagagattgcaaggagagaaggaaggtttgcaagggaagttgcaatgttatccaaagttcaacatacaaatctagtgaagtttattggagcttgcaaggagcctataatggtcatagtaactgagctcttacaaggtgggacattgcgtaagtaccttctgaatttgcggccgaagtgcttggacttgcgtgtatcgattgggtttgcacttgatatcgctcgtgcaatggaatgcttacactcccatggaatcattcatcgggacctgaaacctgagaacttgatcttgaccgaagaaccataagacagttaagctagcacattttggtttatccacgggaagaatccttaaaccgaaatgatgactgctgagaaccgggacctatccttgggatggctccctgacctttataacacgggcccactaaggcccgggagagaataaaaccttaccactccttacggtggaagcccacaccctttgcttatggttttgttgggaactccacccaaaacaatttgccctttgaaagggattttaaatttacaaaccgggtttatgccgctgccttttaaaaatttttaggcctaatggcaaaggaactcccggaataattggccgccatttggtaattcctta

SEQ ID NO: 21122 - DNA, 658 bp, Gossypium hirsutum
  Clone ID: GOSHI-09MAY01-C131422_1
tagaaatgaccgatttgctctttgatctattcataatacaaatccaatcatgaatagctatgattagttgtctctaatgcacacacgtgtccttaaacaggctgatgtagataatagcggcacaattgattatggggaattcgtagctgctacactgcacctaaacaaaatcgagagagaagatcatttatttgctgcattttcctactttgataaggagggtagtggttatatcactcccgatgaactccaacaagcatgtgaagagtttggcataggggatgttcgacttgaagaaatgatccatgaagtcgatcaagatatggtaagttcttcattttaaaacaatcattataccatatattggccaagaacaagaacaaagtcttaagttacctctctttgcataaccgaaggtgctcgaaagaattaataaacttatttagcactttgtcgcctgtatcggtttgtccacttatcgtatactgtaccaatcatatgcagatggacgcatagactacaacgagtttgtagccatgatgcatatagacatgtcccacaaatgctgccatgcggtgctggtaggaaggctacacatagttgggatggatttaagagcattaacttagctatgctctctcaggctgggtgatcaacc

SEQ ID NO: 21123 - DNA, 601 bp, Gossypium hirsutum
  unsure (1)..(601): unsure at all n locations
  Clone ID: AI054675.1
aaaatctatcatttcagaatctgtggaaatgagtcagttaaagcctttgaaagagctgcagaagcttattgatgaacagtctgagatgtaccctcttggcccttatattgcgattacttatttatctgttcttaaagattgtgaagtacactgcaccaaagaaggttctgaagtgaaaaggcttggggggcttcatgtgattggtacatctttgcatgaatcccgtagaatagataatcagcttcgtggtcgagcaggaaggcaaggggatcctggatctacacggtttatggtgagcttgcaagatgagatgtttcaaaagtttaattttgatcncgagtgggctgtgaagcttatttcgaaaattacaaatgatgaagatatacctattgaaggtgatgcaattgtaaagcagcttntggctcttcaatcaatgcgagaagtactttcttacataagaaagagcctgttgagttcgtgaagttctggaggttcaaaaagctgtctatgatctcagcattgatttgacggtgagatgaagtgttacagctatttcagtcatgcagcagtgtgaatgaatggtttgaatgctgacccgaac

SEQ ID NO: 21124 - DNA, 610 bp, Gossypium hirsutum
  unsure (1)..(610): unsure at all n locations
  Clone ID: AI054676.1
aaaatctatcatttcagaatctgtggaaatgagtcagttaaagcctttgaaagagctgcagaagcttattgatgaacagtctgagatgtaccctcttggccattatattgcgattacatatttgggaggggctttagagttaccctagtttctagacaatctcggcattttgctggacacggtatttgaaaagggagtgaatgatcgcgaagggttgcaatggatgttgaaacagaacaaattatccttgatgaagagggctggttcttgcagggagaaatgagttcttggtgggcagaattcgtggctcaattccctttttctggtcccagaacttcaagggtttagtcctaacctggtattatatacagagggttttgatcctacttaccagcaacccattggcattttgagggactgggcaagagatacgggcatcattnatgggacttaatttatcaggactgttgagaaaagactagagagagaatgtgaggcgtgaatttgctatgcagtgggattttgacgccattctctagagagaatcactganatttttcactggattttcacagtctgccagacagtnttgcatgttttgctggttggg

SEQ ID NO: 21125 - DNA, 617 bp, Gossypium hirsutum
  unsure (1)..(617): unsure at all n locations
  Clone ID: AI054677.1
gccatatgataacatatttgtttggaatgcctatctaacccaagccatacgctcaagatgcagtaacactatttggacaattgcattagttcatgggcattttaaacagattcggctatcaatctttgggagggactttagtgttaccctagtttctagacgatctcggcattttgctggacacggtatttgaaaaggggagtgaatgatcaagaaaggttgcaaatgatgttgaaacagaacaaattatccttgatgaaaagnctgggttcttgcagggaaaaatgaattcctggtgtgccaaatgcctgggttcaattcccctttttcttggcccaaagactttcaaagggtttaatcccttaccccgatattatattccagagggntatgaatccttcattaccaggcaacccaattgcattttgaaggacttggcaaaaaatacggcaatccataaattgacttaatttatcaagactggtgaagnaagacctaagagatgatgtgangccgtgaattgctatgcagtgggtatttgacgcattctctagagagatcactgaattatcactggatttacagtcgccaaacagtcttcatgtttggtggttggg

SEQ ID NO: 21126 - DNA, 656 bp, Gossypium hirsutum
  unsure (1)..(656): unsure at all n locations
  Clone ID: AI731003.1
ccgccttctgctttaggcgtctagctcatctctatcccctccccaaaacatgattagggtttcagaaatctcccaaatcctttaatcttctcttcaatttttagtattttgggtcaaatctacgactccttacatcaaaatattaaaaattcttcgatttcctgaattttttttctgtgaattgattggaatttgaattgtaaacagaaaaaagaacgagaaaaaaaaatagggaaagaaaaaatggagacgcaaaggataataaagtttcctcacaataatatggataaacgtcccaggaagaggcccagattaacatgggatatgccccctcctcttcctcctcctaaggttcttccaacaatacattgcagtcaggaattcgggaatggagggatctctaatttttcatatcctaataatatgtttcacagggggattcctcataatggatctcctccttggagacctgatgataaagatggccattatgtttttgccgttggagaaagtctaactcctcgatacaagattctcaataaaatgggtgaangaacatttggtcaagttttggagtgttttgacaatgaaaggcaaaaaattgtggccatcanaattgtccgctccatacacaagtatcgtgaagctgctatgac

SEQ ID NO: 21127 - DNA, 641 bp, Gossypium hirsutum
  unsure (1)..(641): unsure at all n locations
  Clone ID: AI055339.1
aaattatataatcaacaagctaaacaccttgattactattgtataatatcctcatgtatgtcatattcaaattcacttctttttttttcttcttgttcgcagacaagattctcaataaaatgggtgaaggttagtatttttgttatgaatcctagtttttgcagtcacggggagcagtatccattgcattaacattttaatgttctaatccatgtagatattttggatttttacttgacatggattttgttatatgaatggtatttttgcaggaacatttggtcaagtgttggagtgttttgacaatgaaaggcaagaagttgtggccatcaaaattgtccgctccattcacaagtatcgtgaagctgctatgattgaaattgatgtccttcgaagacttgctaggcatgatatgagtggtgctcggtaaggatatctcttcctttcccgtcctcttattcattgtagaaattgaagtgattggtataagtggtttcattccttgcagttgtgtgcaaatccggaatggtttgactatcgtatcatattgnatngtaagtattattgtattngctatttgataaattgaggggggcatgcagctcttcattctaatatcgtgaagtaaaactgcgatgatg

SEQ ID NO: 21128 - DNA, 1860 bp, Gossypium hirsutum
  Clone ID: GOSHI-09MAY01-C132502_1
cggccgcgtcgacccggaaaatcgtttccggttccgactagccgccggaggaaataacggcaacttaaaagaaaaccttttctttcctcattgttttactactaaaatcccataatgccggtcgtggattttgtctgtgtttttttagtttcagttgtgatgtttaatttgagagtaagcacagaaccagttgaagacaagcaagctctacttgctttcatttcgggaattagacatgccgaccgggttaaatggaattcatcgacctcagcctgtgattggttcggtgttcaatgcgacgccaaccggtctttcgtctacactttacggctccccggtgcggcccttatcggttcgattccgcccaatacaatcggtcggttgaaccgacttcgagttttaagtctacgagcaaaccgtttgtccggtgagatccctgccgatttctacaatttgactcagctgcgtagcctttatttgcaaggtaacgagttcaccggtccgttcccacctagtgtgactcgtttaactcgtttgactcgccttgatctttcttctaataatttcaccggtccaattcctttgggtgtcaacaatttgactcagttgaccagactcttcttgcaaaataacaagttttccggttctctcccgagcatcgactcggacggtttaaacgatttcaatgtgtctaacaacaaccttaaaggttcaatccccgactcgttatctaaattccccgaatcttcattcgccggaaacattgggctttgcggcggtccacttcggccatgtaacccatttcctccatctccatctccgactgagcccattccgcccaaaacttccggtcaaagctcgaaaagccttcccaccggcgccatcattgccattgccgtggggtcagcaattgttgcgttactgttattactattcctcattatctgcttccgtaaatggaaacggaagtcaccgaggcggcagaaagcgataccatcgacgacacatgcagttccggtggaggaggcggggacttcctcgtcgaaagatgatataaccggaggctcaacggaaatcgaaaggatgatgaataataagctcatgttcttcaaaggtggcgtttacagtttcgatttggaggatttgatgagggcgtcggctgaaatgttgggaaaaggcagcaccggaacgtcgtacagggtggttttagcggtggggacgacggtggcagttaaacggttgaaagacgtggcggttagtaaacgagagttcgtaatgaagatgggaatgttgggtaaaatcatgcatgaaaacgtggttcccttgagagcgttttattattccgacgaggagaaattgctggtttatgattacatgcatggtggtagcttgtttgcgctgcttcaaggtagcagaaactcggttcgtacaccgttagaatgggaccaccggataaaaatagccctaagcgtggctagaggcctcgcgcacctccacagttcacaaaacatgatccacggcaacattaaatcttccaacatccttctccgaccagaccacgaagcctgcatctcagagtttggtcttaactctcttttcaacaccaacactccacctagtcgcatcgggggtttaccaagcacctgaagtacttcaaacccataaagttacggtgaaatcagacgtttatagtttcggggtgttattattggaattattaaccggtagggcaccaatccaaccatcaataactgaagaaaggtttgatcttccgcgttgggtccaatccgtggttcgggaggaatgggccgccgaagtgtttgacgcaaagttaatggcataccacaacatcgaggatga

SEQ ID NO: 21129 - DNA, 1002 bp, Gossypium hirsutum
  Clone ID: GOSHI-09MAY01-C132772_1
gcttagctttctttctttatctctttaattttttcaattttcctaatcttcgtatgtactccacttaagacgttgaacattttatttctggaaaaatatagttttaaacccaagtttaatcgattgacaaatttaaagacaacaccacttcttgcattccaattgtaaaagatacccattggcttgttagatccaatttagttcaaaaatgatgggtttttggatcgtggatttgggtgtacatcttgggtggattttggtgtgagatggatattggtttgaaattttgggtacccatttcaagaaataattactgtgctttaaatttgcgcctgtttgatgggatttgattagtattgcaattgccttaaagttcagttgggtcattttttggactagatttttcttgttttttgtgtgcgagaagaaaagagaaaacaagaaggaaacatgttttggagggaacgtgagatggagaacaaagagcttaatggaggacctccttgtgggcagattaaagttcttgtcgttggtgattccggtgtggggaaaacttctcttgttcatctgattgttaaaggttcatccactgctcgccctcatcaaactattggatgtacagttggtgtgaagcatacaacatatggttgtcctggtagctcttcaagtagcttaaaaggggatgctgagagagatttcttcattgaactctgggatgtgtcaggacatgagagatacaaaggttgcagatctctattttattcacaacttaatggtgtaatatttgttcatgatctttctcaaaggagaacaaaaacaagccttcaaaaagtgggcagctgaaatttgcggcttctggcacattttcagtacctctaggttctggaggttccaagggacttcctgttccctatattgttattgggtaacaaagctgaatattgcttctaaagagggtacaaaaagtttccctggccatcctggtgatgcaactcgtcattc

SEQ ID NO: 21130 - DNA, 660 bp, Gossypium hirsutum
  Clone ID: GOSHI-09MAY01-C132732_1
ctttctcgtagtcgtagactcgaactgactgacactctcactagtcactgcaatctaccgaaaattccatttttgtattgctcaacctgttttctttcaccttctaatactataatttcaccttattttcacaaattttaaaacataaaatatcgtctctttcccccttcccatcattaaccctaatttgtttgtgaaaatgcctgaataagaacctgctttcatttgagaattaagatcctaaagctgtaactttttgtctcagtcttgattattggcgtcatgtttcttcgtcgacttgctgtgatagttcctcgctctacaaggttcttcagcagtaaaggtagccttgaccttggaagcaccatagctgaactcaataaggaaatggaatctgtctttggtgaacctcctccaaaaggactagccaattctggaaataaaagctgcatggctcaagatgcccaccataactctcatgttattttgggttctactaatgataagtttgcagctcaagaactgagctctatatctcatcatttaggtgaaaataagcctggtctgtcccatgttggcagcacagggaaagcccaaatggtagatgtctcacccaaagaaaatagtagcagaactgctattgcttgttgttaagtattg

SEQ ID NO: 21131 - DNA, 670 bp, Gossypium hirsutum
  Clone ID: GOSHI-09MAY01-C132332_1
aaaagaaggtgaaaggatcaacgaggaggaatatgtaaatgatgctgatccaagtatccttcgattcttgcttgcaagcagggaagaggtttcaagcttgcagttacgagatgaccttttatcaatgttagttgcaggtcacgagactactggttcggtattgacatggacattgtatcttctaagcaaggatccctcggcattggtaaaagcacaacaagaagtcgacagagtcttagagggacggaaccctacctatgaagacataaaggatctcaagttcctaactcgatgcataactgagtcattgcgtctatatccacatcctcctgtcttgataaggagagctcaagttgacgatgttcttcccggagactataaagttaaggctggtcaagacataatgatttcagtatataatatacatcattcttcacaggtctgggaaagagctgaaaagtttgtgcccgaaaggttcgacttggaaagctcagtccctaacgaatcaaacacagattacaggttcattccgttcagcggggggcctcctaaatgtgttggtgatcaatttgctttactagaagccattgttgcacttgcaattttccttcaacgcttgaattttgagctggttccggatcaaaacattagtatgaccaccggagctacc

SEQ ID NO: 21132 - DNA, 743 bp, Gossypium hirsutum
  Clone ID: GOSHI-09MAY01-C133192_1
ttttttttttttttgtggaaaaccaaacggcttgatatatatatattttttaatattatgaaatacttttgatattctcattgtaaaacaccacaacatgatagcttttgtggagttacatttttggttttgttcatactacatgattggagacctggcttttgattgttgctgtaagcgtcgcaacagcttcccctactgtcaagaacaagcaatctggtctcatgaaatcccctgcttcatctgatttttgcaatttttccatcacctctcccaaaggattcaccaacacaagctcagctcctttcttttccactgttttcttcagttctttaaagattgatacgccactcgtgtctatggcactcaccgctgacatcactaaaaccacaaattgaaggcttgactgcttcttatgatcttcggcttcatattcttcaatccatctcaagatcctctcattcagatatgtggagttagcgaagttgatatgagcttcaatgcttaggataatgaaacccgggatctccatcgattctttgtactggtgaagatcccggataatatctgtcccgggaatgttccccaacatcactgtctttggccgcctaatttgccgtgcaggaagatcttgaaataaacatcccaactgccatggcaagaccatcttggaacgagataaaaataaccccgaagatagcacacacatcacatgaaatcaaatttttttttttttttttttg

SEQ ID NO: 21133 - DNA, 683 bp, Gossypium hirsutum
  Clone ID: GOSHI-09MAY01-C129542_1
gttagtacgaaattgttcacggaattaataaaacaaaactcacattgcaaacaagttacaattatgcaattccttagagcagttcctaggtcaatgcattgtcaaagaaagggcattggtattacacgggagactagcaaatgccaagccttcatgcattagatgtgtgcaacttgttcgggttttttacccaaatatattaaaatttttttttttaaatacctatataggttgtcagctaaattaattatcgaaattgtatgtttttttaatcacgcctatctgacaggcgcaaatcaattttttatattaattttttttagtttaaataaaatattattggtttttttcccggattagtatataactcgggtatacgaaatacagggactaattgagcctatctgacaggcgcgactagttgtgcctaactcagatgcacgaatggtggaccccactgctgcttcatttttcccctatcttatatagtatgttgatagtcaatcaactatattcattacataaatatgaaattatttatatattttttagtttaaataaaatattattagtttttttcccggattagtatataactcgggtttacaaaatacagggactacttgagcctatctgacaggtgcgactagttgtgcctaactcaaaagcgcgaatggtggact

SEQ ID NO: 21134 - DNA, 652 bp, Gossypium hirsutum
  unsure (1)..(652): unsure at all n locations
  Clone ID: AW187169.1
gtagggttttgggcggatctagggctcggaattgttgaaagaaaggagaggaaattgaagaggggaaaaagaagatacaaataaggagggggaattgatggtactcgaaggggaaaatgcaaggctatgcatgggcggggaggangtganganangannnnngcncngcncntgtggacnntccctacgccttccgcggctgttctgagtggtgatggtggtgcttctctctcttcttcttcttcttcgtctgccgtttatttcttttcccaggatggacttcacatcactcttggtgactgtgctctcttcaaaccgcccgaagattctccacctttccttcgaataattcgttgtctaactgctggcagacaacgccatcgcagttcttgtgtgaattggctttatccacctgctgaagtacagcttggcccacgcctccctttggaagctgctccgggcgagatcgtttgttccttccgccgggatgacattcctccttcctctttgctccgtccgtgttcagtgtcattccttccctgagacgttgatcttccgtcatgaatttgctcatttttttggccggcaacttttgtgagttgtcgagcgattgtctatccgtggcggcccgatcgcgaatgcatccctcatt

SEQ ID NO: 21135 - DNA, 527 bp, Gossypium hirsutum
  unsure (1)..(527): unsure at all n locations
  Clone ID: AW187392.1
gtagggttttgggcggatctagggctcggaattgttgaaagaaacgagacgaaattgaagaggggaaaaagaacatacaaataaggagggggaattgatggtactccaaggggaaaatgcaaggctatccatgggcggggaggaggtganganangaannnngcncngcncatgtggacagtccctacacgttcaaccgctgttctcagtggtgatggtggtgcttctctctcttcttcttcttcttcatctaccgttaatttcttttccaaggatgcaccttacatccctcttcgtgactgtgctctcttcaaacccccctaagattctccacctttcatctcaataattccttgtctacctgctgcgaaacaaaaccagttccactcctctctaaatcgcctccaccgacctccctacgtacagcttgccacaggcctccttttgcatcctgcccccaacgacctcttttactccttccctacggatcacatccctcctgcacctttactccgtcccttttagcg

SEQ ID NO: 21136 - DNA, 336 bp, Gossypium hirsutum
  Clone ID: GOSHI-09MAY01-C125272_1
ttcacgcgtacgacatgatttccgcggacacggagggaggcgagataactactttcttagggcagtagccattgcaatatgctgaagaaatgacggctacaccgtatggagctgtacatgccttgggatgaacatgcttttgccaactttcaggatgtttcattggacagatgcttgtatatatcgtacaaggagagtccgctcatagagaccggagatgttcagccctgataagaaacggcctacataggatatacaggacgtgcaccttccttgctattctaaccagacgagcgatgatctatagggatgtagctgaagatgacttactcatga

SEQ ID NO: 21137 - DNA, 332 bp, Gossypium hirsutum
  Clone ID: GOSHI-09MAY01-C120322_1
cccttctctaggtccagagaccataaaacctttgggggcagcactcacctttcatcagttcttcgaaggcatgggacttggtggatgcatttctcaggcttcattcaagggtcgatcggctgccatcatgtcacctgtttttctcgctgacaacaccagtaggaatcgctttaggaattagcaataacaaatgcatacgatgagaacagcccaacggcactgattgtggaaggattattgaacgcggcttcatctgggatcttaatatacatggcgttggcggatccttcagcccctgctcttatgtaccccacgattccatatcattgtta

SEQ ID NO: 21138 - DNA, 693 bp, Gossypium hirsutum
  Clone ID: GOSHI-09MAY01-C121492_1
aaaccccatctcgtgtattttcccgtgctgttttcctctaaaacgttttcgaaaacagaaaaaaaaaaaaaagcattcacagcgaagcaacagctgaaagccgtttcagattcaaagcacctccgtctcacgctaatcaaaacaaacaaaaaccagccaaatttcatcaccgttatcaaagagagaatcaacagagcaaagggattccgattttctctttcctttttcttcttttttgtgctttcacagtctctacgttgtcgttcttttttggcttagcatttggaggaggagaggagaggagaggagaatatgagaaaattggcggatccttacgtgttggcgtggatctcggttttcgtaaccacgcttcttgctttgtgcggtgtcgttttgaagagacggacagtgatcgggatctcttccgcaaggactgtgtcggtgacgagcgtatcggctgttgacggagaatgtagatccgctgatggtggtgattctgagcgtcatcattgttggagctggggttgctggatccgcactcgctcccgctctgggcagggatggacgtcgagtgcctgtgtattgagagagatttgtctgagccgagggcctttgtgggggagatgcgtgtcccggggggggcatcccggttggtttgatttggggtttgaagaatgtggggaggaatcgcgg

SEQ ID NO: 21139 - DNA, 685 bp, Gossypium hirsutum
  Clone ID: GOSHI-09MAY01-C121662_1
taaaaagagaaaatctctcctctgcacacagggcatttcaaatgaaaagcaaagtgatttgagaaatttccaatctattcaaagcgatagggaaaaaaaaggttatgagtgaattggagggaaattgatttttacgtatgtaatgcatcagaagaaatcggaagttcagatcggaaaagaaagcagcggcgtctcctccggttttaatcccaaaccttccaccggtcaccaccaccaccaccaccaccaccaccagcatttcaattaccaccaccgtttacaacagctttccgatacaacagcgccggcgggtaccgggacgtctccggtttacgttttccctcagataattactcagacctcgtctggaaatgatgcgattgcacctcctccgtcttcatcttccacttctccgaccccttacaagagaccccttttgacccaaacgccgtctctcaccaaatcccctactttgtaccgtttcacccctcccccgcagttcaattcccggaatacggcgtcgttcttttccttctccgtcgctgctaaatcgtccttttatcgaatcctccaccgtttcaagcacctgcgtcgtcttcgagtttacctacgcttaatcctccttttatctctcccctttttgtacttcttactttcacctccaagccactcccttttacttgac

SEQ ID NO: 21140 - DNA, 513 bp, Gossypium hirsutum
  unsure (1)..(513): unsure at all n locations
  Clone ID: uC-gsronu33B037c05b1
cgcgagagaggtttttgagattttctgtctttttatttcaaaaatacaaaaaatatatattttttaaatgaactaaaactcccgcacaagtttcaaatcctcccaactcagttcaagcctagttcaataaagctacagtagggaagaagaggctttgaagtttctctaatggaaaagagagtgtgtgaagtttggaaaggaagtaataagtttatccttggtgggaggctgatattcgggccagatgctaagtctctgctcgttaccttattgctgatcactgttcctgttattatcttttgtgtatttgttgcaaggcatcttcggcatgcattttctccatataatgcgggatatgcaattctggctgtagcaattgtctttacatctatgtgttgattcttcttttcctcacatcagcccgggaccangaattataccacgcaattcacatccgagaaggaagttcgctatgatcttttgtttagctgaggtgggggtaggcaaacaccc

SEQ ID NO: 21141 - DNA, 394 bp, Gossypium hirsutum
  Clone ID: uC-gsronu33B101f01b1
cgcgagagaggtttttgagattttctgtctttttatttcaaaaatacaaaaaatatatattttttaaatgaactaaaactcccgcacaagtttcaaatcctcccaactcagttcaagcctagttcaataaagctacagtagggaagaagaggctttgaagtttctctaatggaaaagagagtgtgtgaagtttggaaaggaagtaataagtttatccttggtgggaggctgatattcgggccagatgcttagtctttgcttgttaccttattgctgatcactgttcctgttatcattttttgggtttttgctgcatggcatctttcgttcccctttttttcccatatttatgcttcgatttttcatttcttgtctgttcacatctccttttacc

SEQ ID NO: 21142 - DNA, 623 bp, Gossypium hirsutum
  Clone ID: GOSHI-09MAY01-C123432_1
tccatagtactaacaagggcagggaaactttttgcgttgcatactggagatggacgcattgtctggtctcacttgctacggtctctacacaaatcagaggcgtgtcaatctccaataggattaaacttgtatcagtggcaggttcctcatcatcatgctatggatgaaaatccatctgtgcttgtagttagcaggtgtggtccaagttcagatacaccaggtgtactttcttttgttgacacttacacgggaaaggagcttagttctttaagtctcgatcatgctgttgtacaagttattccacttccatatacagattcaacagaacagcgactgcatctgctgatcaatgctgataaacatgcacatctataccctaaaacttctgaggctcttacatcttcaaacgtgaatttttgaacatatactggtattcagtggaggatcaaaatggcatcatcaaggggcatgctttgaagtgcaagtgcactggcgaagtggctgatgaattctgctttgacacaagggatttatggtcagttgtattcccctcggaatcagaaaagattgttgcaactgtcactagaaaattgaatgaggtggtacatactcaagcgaaggtt

SEQ ID NO: 21143 - DNA, 635 bp, Gossypium hirsutum
  Clone ID: AI729027.1
gtttcccttttcttcttctcattcccgctatctgttttaccatttgtgatgctaattccaacctactttgcattccaagtgagagagaagctcttttgaaattcaagaatcatcttattgatccttcaaacaggttatcttcttgggttgaaggaggggattgctgtaaatggattggtgtcgtctgccataacttaacaggccacgtccaccaactgcacttggctgctcctctttcaccttacgagcagtcagccctaggaggcaaaataaatccttcactgctggagttgaaccatctcagtaccctggacttgagcaataacaattttagcagcatacatatcccgaaatttttcggtttgctggagagtttaacatatcttaacctctctcgagcacaatttcagggagcaattcctcataacctggggaatctttcaaagttgcagtatcttgatcttcgaggtaatgatctcaaatcaaaaagtcttcactgggtttctggactttcttccttgcagtaccttgatttgagctacgcgaatctttctaaagcaactgattggctacaggaaatataccagacaacattggcaacatggagttaatggaatctcttgatttgtcaatga

SEQ ID NO: 21144 - DNA, 469 bp, Gossypium hirsutum
  Clone ID: uC-gsflnu33B018e05b1
ctgatctacctattcgttaaatgcctgaggttcatgataacatcgctatctggattaccagttcgccatgctaataacaacctacattgcattgaaagagagagagaagctcttttgaaattcaagaatgatcttattgatccttcaaacaggttatcttcttgggatgaaggagggcatcgctgcaaaggcgagtgtaaggcaccattgattgacactctcaattatatggctggccctcgttttaatcattaccccatcttgaagtctgttggtatccaattgttaattgccttgctttacatccctctttcgccagttggtgtaatatcatcaagtcccttaatttttgatctttcttacaatctgcccattcttaatggttaatggtactccccctgtagcggtccattaagctctattttcttcttagtctactcttaccttgaacttttcccttttccattca

SEQ ID NO: 21145 - DNA, 499 bp, Gossypium hirsutum
  Clone ID: GOSHI-09MAY01-C58889_1
tcgggttcaaggattggagatcctaaacaaaaatggcgaatggataaatataaatccttcacccaattctttcgtagtcatgcttggagaatccttcagcgtatggttgaatggtcgattgccttctgcttatcaccgcgtgctgatggagggaaacgaggccaggtatagcatcggattgtttgcaaggccgagaggagggtacctagtaaaggttcccaaagagcttgttgatgacaaaaatccgatgctcttcaaaccctttgacctggaagaatttttgaaaacttttctccccccaggctgttcaaggtcctgctagatctgctccttaagcctttcgccgtgtctaagatttgggcataaataaatcgtggtctctctctatgtaatataatcaaggctatcccaactcaacattgaaaggtggccaaatcaactgtccttgaagggttgtaaaagaggtagtgaatgcaaagacaaattagatattccgaat

SEQ ID NO: 21146 - DNA, 296 bp, Gossypium hirsutum
  unsure (1)..(296): unsure at all n locations
  Clone ID: LIB3149-055-Q1-K1-G7
tccttcagcgtatggttgaatggtcgattgccttctgcttatcaccgcttgatgatgaagggaaacgagaccaggtatagcatcggatngtttgcaaggccgagaggagggtacctagtaaaggttcccaaagagcttgttgatgacaaaaatccgatgctcttaaacccttgatctgaaaattttgaaattactccccaactgtcagggctactaacacctaaactatcaggcaaattgcatataacgggcttttagaataacagttcactacatatgcatacgctaagtgaaag

SEQ ID NO: 21147 - DNA, 656 bp, Gossypium hirsutum
  Clone ID: GOSHI-09MAY01-C58479_1
cggcggtggagcagtgaaagtggtgtttccaaatgggaacattcagatgtatacgatatcagtcaaagcggcggatctaatggtggagaatccgggtcagttcgtgtgcgattccggcggtttaaaagtgggttttcgggttcatgggctgacggcagatgaagagttggaacggcggcgactttatttccttcttcccatggaattgctttactcggtgctgacggaagaggaaatgagttgcctcagttgtaaggcagataaggcgttgaaacatgcgagctttaatattgggaagattttacctgtttttaatgagttttgcattttcccgtttgaagctaagtccccgccgcaaaacgccgtgaacgacggtgcgaaagattccgtcgtggtgaggttttcgaagcagagatcgtggaaaccggcgttggagaccattgttgaaagttgaaaccccttgtaggcaatgttagaccaactaattttgtacatccatacatccaacggtggagtttttttttctttttcgaattaataagttaatatgtgtctttattttgatatttgaaaatataaaaaataaatacgattttaatctattttactcatagtgtatcaaataacaatgtctatatacatttatctttgtaatc

SEQ ID NO: 21148 - DNA, 618 bp, Gossypium hirsutum
  Clone ID: GOSHI-09MAY01-C58799_2
aatgaccacatttctgtttttttttttccattgaacaaagcttgaaatcttaaaaccttcccaaatccccaattccatgtcaagtaaaatcatcaaaacatagaaaactagaagaatcagagaaaaccaatgacggtagcggctgggatcgggtacgctttggtagcgttaggaccgtctctctcccttttcatcgcttttatctccaaaaagcccttcttgatcctcactctcctctccagtacattggtttggcttataagtttgataatattatctggaatttggagagctttccttcctttgaattcaacaacatggtggccttttgcaatacttatattctcatcaattgcttttcaagaaggtcttcgccttcttttctggaaagtttataagaggttagaagacatattggatgcttttgctgatagggtctcaaagccacgcttgtatctaactgataagatgcaaattgctcttgctggtgggttaggtcacgtgtggcacatgcagtattcttttgtcttagcctcttaacaccagcatttggtccagcaacttattttgttgataggtgttcacagataccatttttccttgtttctgcaatcatgc

SEQ ID NO: 21149 - DNA, 586 bp, Gossypium hirsutum
  Clone ID: LIB3829-010-Q6-K6-G2
atgcttttgctgatgggtctcaaagccacgcttgtatctaactgataagatgcaaattgctcttggtaagatcggaagaggctctcgtatatctttcacattgtctaaattactgtttttcacttgcttaggagttgactgtgccgagttgtaggacggagtaaaggttaacttttaccttattttgtaaaatatctcctcttagttattctatcagacctttagtgagctaactcatagtaagctttaattctagagaagcatcatgttgtacaaaagcatgttcaatggcaatatagatcagaagcgtaactctagtcatactatgatccctcttttcccttgttctcgttggcttttttggaaataatagattgtatttatgccctttttattttcttttcgtaacattatttcttgctaatttgatatatgcactgatatcaagtttccgttaactgcatcagctggtgggttaggtcacggtgtggcacatgcagtattcttttgtcttagcctcttaacaccagcatttggtccagcaacttattttgttgataggtgttcacagataccatttttcctt

SEQ ID NO: 21150 - DNA, 492 bp, Gossypium hirsutum
  Clone ID: GOSHI-09MAY01-C58649_1
gcgcgagatccggcaaattgtcgtcggatttcgtccatttgtcgtcggggttcgatagtactctctctctttctaagtttctaaccgccggagtagaaaggaattatcgaaaaatgaagggatctacacatgttgtcgcgactttgctcgctgcttccacggtggcgctctcatcatcttcctcccccggaatccacaatgtttcatttcctcctacctcttccgaccaggggacaagaaatggtgcgtcgaggaatttaacggcgacagagcgggagaatttcacgccacgatttgatgggttgagattcatagaaacattgatcacagctcacagataggacgagatgattaggcacacaaaataccgtcctttctctccgtgcactaattagatgctatttattgtgtcgggccaaactgtaattggtacatattgaagtaacgtttttcttggtattgtttaataattcctatcgttttttgtttttg

SEQ ID NO: 21151 - DNA, 399 bp, Gossypium hirsutum
  Clone ID: GOSHI-09MAY01-C58609_1
aaaagcccctcaaaacagatcatccaattagatggaggagcaggatcgatcctctcaaccccgtcctccacatgtcctcatctgccccctcccattacagggccatataaacaccatgattaagctggctgaactgctacctatcgccggcttcaagctcactttcctcaactcccaccacaaccataaacgctcggtcagggtcaacaatattgctgcccattttgaaagatacccagggttcgaattcaagaccataaccgatggtctccctcttgatcatcctaggtcagggagctggttccttgatatgtttgaagaaaccatggaacctaagatgaagcaaagtttgagagaggtacttgtgaatagcagcccaccagtagattgcgtaattgc

SEQ ID NO: 21152 - DNA, 560 bp, Gossypium hirsutum
  Clone ID: GOSHI-09MAY01-C58629_1
gagggaccaagttgaacctcataaaccctctgttgtcatacgcccaccagcagataaagataaggatcaacctcaaaaaaaaattataatcaagcgaccgaacgaagttattgatttggatcaacttagtcaagagggaggcacttatcccgagtacaggaagacaaaattaaatagttgaattgtcaagctttgagaagcatgggaagcaggaaagcttgcgattaatggagccaaaagcaagacggaaagctaaagaggagagaagatggtgggaagaggaagagaagaggagaaatgtggagagaataagagaagacagggcaaggaagctttatgaggaagaaatgagactgctggaagagcgagaaagatttgctgagatcacaagatacactgaagacattcgaagagagagggaggaagaggaacgccaaaaagcaaagaagaaaaagaagaaaaaggctgaaataaaagaggattatttagaagactacaggacaagaagaaatgacagaagagcaccggaaagagatcgaggtgcaaaaaggaaacctgtt

SEQ ID NO: 21153 - DNA, 390 bp, Gossypium hirsutum
  Clone ID: GOSHI-09MAY01-C58159_1
agcagattgaggtactgcaacgtcaacttcagctcttgcagatgcacaagtcaaaaactgaggaaagctcagacattggtctgacaacctcatcagatagtaaaggaaagggcgttgcatcttcttcttctgaagagtaaagagggtacatagttcttgctcaactctagcttatttgaattcatgtagtgatcttaacctaacacacagattattacatacttcagaatcttattcataacttttagcgccatgttacctatttcctttaaaaaaaaaatcttttgagcttaccacatcgtcttaaccttttctttgacatcacagagtcattttatgacagtcattatcacacattaaatattgtaaaggacaaaaactgtagatttt

SEQ ID NO: 21154 - DNA, 467 bp, Gossypium hirsutum
  Clone ID: GOSHI-09MAY01-C58399_2
ctttgaggggcttgaagttcatgcaaagggcagctcagagagaggagaaagtgaaaaaggaagaagaggttaaacctgaagggattagtactattactagaaagggtgtggtgattatagaaggggatcctcgtcctggagcaactgttgggcggatgtcatttcgaagtttcaatccttctattgataaactgaatgaagaagcatcaaatgtgtctcagccggatgcctctggtggaagaactttgtctagtgaaaatggatctgcatctgaagcaactcactcaaaagttggcactgataaacacgaaggtaatggagaccttaagagaaaacaatctgtcatggtttctgaaccagagtatccaaataaatcaccaaaaaatggttatggcattcaatctacccctagcagcggtaaagcctcatccaaaaagcagtcaaagcgcgagaaactggactggaat

SEQ ID NO: 21155 - DNA, 733 bp, Gossypium hirsutum
  Clone ID: GOSHI-09MAY01-C58399_1
cttctcctgccgtaaaaaaaaaatacgcgattcaggaaaatttaattccgaggtccttatttgacactgaaggaaatttcggatccttaatggcgaagcgagagctatccagtactttgaggggcttgaagttcatgcaaagggcagctcagagagaggagacagtgaaaaaggaagaagaggttaaccctgaagggattagtactattactagaaaatgtgtggtgattatagaaggggatcctcatcctggagcaactgttgggcggatgtcatttcgaagtttcaatccttctattgataaactgaatgaagaagcatcaaatgtgtctcggccggatgcctctggtggaagaactttgtctagtgaaaatggatctgcatctgaagcaactcactcaaaagttggcactgataaacatgaaggtaatggagaccttaagagaaaacaatctgacattcaatctacccctagcagcggtaaagcctcatccaaaaagcagtcaaagcgtgagaaactggactggaatgttctcaggccaccaaagccgaataggtgatcttaattaagaaattgtcttcaacatagtgtggcgattagtattactttcagggttctcatgaacgtgtaacgttatctcatattattatagctcagccttgttaactttcaaatttggtttattgaagatatttttttctacatccctactaaattaagcttatcaagttt

SEQ ID NO: 21156 - DNA, 435 bp, Gossypium hirsutum
  Clone ID: LIB3196-016-P1-M1-G6
caagaggacaaaaaagcacgctggtgcccggccggaatttccgggatgtgtcccaaaacctggggaccaacttgcctgagcttggacaaccttccctgactggcccccctaactctgaacatcctcagcctgctctggacccgaggtctaacgatttggcaagggctcctctgaagctcagcatgcccccatcagacggcttaccacccacaggaggctctgcagtgcacaggtggcctctgtccgggaggctgcctgccgagtactcctggccccctgaggatccttggctgatgatggctgctgcggctgcggaccgcctgggggaagcgctgcctgaagaactctcttacctctccagtgctgcggccctcgctccatgcagaggccctttgcctggagagtcttctcctgacgccacagacctctcacccg

SEQ ID NO: 21157 - DNA, 383 bp, Gossypium hirsutum
  Clone ID: LIB3196-003-P1-M1-G10
atgcaggatgcggggccgcgtggcagggagctgcgctcccctgggcctgcttctggtctgtcttcgtctcccaggcctctttgcccggagcattggtgctgtggaggagaaagtttcccaaaacctggggaccaacttgcctcagcttggacaaccttccctgactggcccccctaactctgaacatcctcagcccgctctggacccgaggtctaacgatttggcaagggctcctctgaagctcagcatgcccccatcagacggcttcccacccgcaggaggctctgcagtgcagaggtggcctccgtccgggaggctgcctgccatgtactcctggccccctgaggatccttggctgatgatggctgctgcggctgcggacc

SEQ ID NO: 21158 - DNA, 474 bp, Gossypium hirsutum
  Clone ID: GOSHI-09MAY01-C59489_1
attcgctcagttgttgctcaagtgcgctcgctggcggagcttgtctgccctgttttcctgcaaggcctttcccagcgtgcccacgcggaaagcaactgcctaagaggcgcggcgtcgcaccgcccagagctgaggaagtcggcgccagttcgtggggctccgggccgccagtcagagccatgagctacgggcgcccccctcccgatgtggagggtatgacctccctcaaggtggacaacctgacctaccccacctcgcccgacacgctgaggcgcgtcttcgagaagtacgggcgcgttggcgacgtgtacatcccgcgggaccgctacaccaaggagtcccgcggcttcgccttcgtccgcttccacgacaagcgggacgccgaggacgctatggatgccatggacggagccgtgctggacggccgcgagctgcgggtgcaaatggcgcgctacggccgccccccggactcac

SEQ ID NO: 21159 - DNA, 460 bp, Gossypium hirsutum
  Clone ID: GOSHI-09MAY01-C59729_3
tccacgcgtccgacgcgttcgcgttttcctcatcgttgctatatctctagttcttcaagccacggtgcctccaactgcgttagccgctcgtaacgaggttatgtcctctgccgctgtatcgaaagtggctaatgattccaacggtttggctgtggttttcgagaaggtaggccctggctgcaaacctaaaggttcgttttgcttgtttgacctaaccagttgctgtaggccttgcggatgccttgcagggtggtgctataactatgatcatgaatgcaatgagtacacataatggtcgctactgagtttaaaaaaaagaaagaaaaacagctctgagtcagaaaacgacatgggattcaattataaatgttctatatataacatatgtatttgaataaagaatctctcgtgttatgtccctgtcttggttgagctctgccattgttgtaagagttcatgt

SEQ ID NO: 21160 - DNA, 536 bp, Gossypium hirsutum
  Clone ID: GOSHI-09MAY01-C59729_2
caaaaaacataatcccacgcgtccatggagcggtgcaagaagttcgcttttctgatggttgcaatggctctgcttcttcaatccatggtgcctccgacagcattagctgctcgtaacaatgttatggaatacaatccattggcaagcgtattctcgagggaaggccctggctgcatcgcaaaaggcgggttttgcttgtttgacctaaccagttgctgtaggccatgcggatgccttgcagggtggtgctataacattgatcatgattgcaatgagtacacataatggtcgctactgagttaaaaaaaacagttctgagtcaaaaaatgacatgggattcgattataaatgttctatatataacatatgtttttgaataaagaatctcgtgttatgtccctgtttaattgagctgtgccattgttgtaagagttggtgttttccgtcttctcgttggtgtgttggtactgtgtgtacccttgttattggcatgtctaagaataaatatatatgtcaatcaactaagttttatgagt

SEQ ID NO: 21161 - DNA, 578 bp, Gossypium hirsutum
  unsure (1)..(578): unsure at all n locations
  Clone ID: LIB3543-032-Q1-K1-H11
cccagcgtccgntatatttattcttaggacatgccaataacaagggtacacacagtaccnaacacaccaacgagagacggaaaacaccaactcttacaacaatggcacagctcaattaaacagggacataacacgngnagnatgaaaaaacaataaacgagatccttgctgaagttgacactgataaggatggaagaataaactacgatgagttcgttgccatgatgagaaaaggcaatccggagttggttggaaaccggctacacacttaacctgcagtgccataaattcatgtctcgaccagtttggttttgttataaccaaaatcacaccttcattgcctgatcttggtttccgatccgagaccctgagctcttgttcggaaatcatgttcttggttggtctatttctgccctttgacatatatatgggccaagttttgccgtcaaactgcggaagagtattgactaatatgaacttttaacttaatagagggagtttcatgatttttagtttttgcttgtttggacattgtgctattgttaaaatatgattttcaattccgggttgaatgtaaa

SEQ ID NO: 21162 - DNA, 357 bp, Gossypium hirsutum
  unsure (1)..(357): unsure at all n locations
  Clone ID: LIB3582-052-P1-K1-H12
cggagcttttcaagaagttcgctttccggatgttggcatgaatctacttcttcaatccatggtgcctccgacagcattagctgctcgtaacaatgttatggaatacaatccattggcaagcgtattctcgagggaaggccctggctgcatcgcaaaaggcggttttttcttgggtgagggttcagntnctntnatccatncngatgcctaaaaaaatnntnctataacattgatcatnattgcaatgagtacacataatggtcgctactgagttaaaagaaaacagttctgagtaaaaaaatgacatgggattcgattataaatggnctatatataacatatggatgggaataaaga

SEQ ID NO: 21163 - DNA, 728 bp, Gossypium hirsutum
  Clone ID: GOSHI-09MAY01-C59059_1
cccagcgtccgggtttacagagacgggcggagagagaaaagcaagaccaacgccatggcttgcactattgacttccgccgccttgatgaaggcttcggcggcaaaacgtacaaacgaaagcgacaagaatctcagatcgttgccaatgacgacgaggctgcccccgccgccgcttccatggacgtggatgattcttgccccccacccgcaaagcgttcagccgtgccttcctcggacgaccccaataaacccaccttcggtcaacccacctacgacggcgtgattgcgggtaaggtgtctggtaggaactggaagcagccaagaaagcagcgtgcgtcagcgaagcacgtgagcataaggaggacgagcttggaggagagggagaggcaaaaggagatcaagagagcttatagagagaggattaacgagttgaaggaagagatacggcaaaataaggtggagaagagaaagaagagagaggagagagagaagaagaagaaagagaacatattgaggtctggaactaagtttcagaagattactaatcctaatactttgaaaaagattgctaagttcaagcacaagaagttgcttcaagttgtccctgatgaatttcttcacaagaacaagtgataatgataacaataatacctttgttttgtttttcttggtttttttttttcaatgtgtacttcattgctgtatctgggattagtgaaattaaaatc

SEQ ID NO: 21164 - DNA, 669 bp, Gossypium hirsutum
  Clone ID: GOSHI-09MAY01-C59079_1
agaaatcctcaacagtttgtattctacttaacttattgtacaacttgctaaactttgaaaattgaaaagtatttggtcctaatctgcaattttccattaagcacaacaactgcaacaaaaatacgtggtcaatttggctttgagaaaatagagattcagatccaggaagagaaacaaggaaagaaaaaaacgaaacagatgggaatcagattcatattaatggtgaacaagcaagggcagactcgtcttgcccaatactatgaatggctcaccctcgaagaacgacgtgccctcgaaggcgagatcgtccgcaagtgcttggcccgcaacgagcaacagtgttcatttgttgagcatcggaattacaaaattgtatacaggcgttacgcttcgctgtttttcttagttggagttgacaatgatgaaaatgagcttgcaatattggaatttatacatctcttggttgaaaccatggaccgccattttggcaatgtgtgtgagctagatatcatgttccacttagagaaggcacatttcatgctggaggaaatggttatgaacggttctatcgttgagacaagcaaggctaatattctaagtccgattcagctgatggacaaagcatcatgaggggtgtaaaaagggttagttaattttctagaatgaata

SEQ ID NO: 21165 - DNA, 792 bp, Gossypium hirsutum
  Clone ID: GOSHI-09MAY01-C59069_1
aaaacccgcgcccgccctgtcgtctccttttccaaacaatcaaaagattcagaacccactcttttcgaccatggcagtatcaacattctcttttgctttgagccttgccattttctcaatctgggccgttgatgcagctcaccaccatgcgacagcgccgtccccttcttcttcttcttcatcctcctcttcctccactgtggactgctcgactctgatactgaacatggcggattgtttgtcgttcgtgtcaagtgggagcgaggtgtcgaaaccggaaggaagttgctgttctggattgaaaaccgtgttgaaaacgggccctgagtgtttatgtgaggcatttaagagcagtgcttcaatgggtgtttcattgaatgtcactaaggcctccactttgcctgctgcttgtaaagtttctgctccttcttctactaactgcgctgcatctgtcactcctgctggtgccccagatgtggaaccatcagcaacagcaggtgcacccacaacattctctgcagcaaatgaggtagcaccaacaccagctccgggaatctcaggctctgcggtgctttcggtttcggccggatctattgtcgtaggcattataagtatgttggtgtcgggctacgtactacgttaaaaacgttacggattattggacatgagagtgagagagagattattgtttattgatgtgtggttgtaatagatttatgtttcattttgtgggttattggaaactctatgagctttggaccatcctctaaaatttagtgctatagtgttcta

SEQ ID NO: 21166 - DNA, 417 bp, Gossypium hirsutum
  Clone ID: uC-gsronu33B179e05b1
ggttttgcggtgctttcggtttcggccggatctatgggggtatgcaatataagtatgggggtctcgggctacgtactacgttaaaaacgttacggattattggacatgagagagagagagagagagagagagagagagagagagagattattgtttattgatgtgtggttgtaatagatttatgtttcattttgtggggttattggaaactctttgagctttggaccatcctctaaaatttagtgctatagtgttctatttggttcccatttatttctctactaaaatgaaccctgagaaggtattttcccccttaatttaatatccataattgattttttgtactagtgccacgggattattactctcttttgcaaagatttattcgaatagacctctttgagggatttcaatggt

SEQ ID NO: 21167 - DNA, 524 bp, Gossypium hirsutum
  Clone ID: GOSHI-09MAY01-C59349_1
cccagcgtccgaaaagatgaagcttcggaaaggagaatactttgggaatgcgtatagaggtgacccgggggtgccccatgcgggcccggaccggttcgtgaatatatggatagggtcggctgctttctctgtactcacttggttcaacccttacatgtggcagctcacaaatcaattcaattggcatgacaaagcaatgatatttgaacattaccattggaagaaagcgaaggctaagaaccaaccatacaaatttaagtggaatgagtacatggacaaggatcacagggactcgtattatttcaactggcctgtctacttcccatagtgtttctttcatgtaggcatgctctttgataagtagttcagacaaagaggactttacctgcctaaaaatttatgttatctttattgctttgtcccttcttcccgactcattatgctggtttaactctaccctatcggattatatggggaatggtatatgggtcaaggtataacaggatcttttgtcaatttttgtc

SEQ ID NO: 21168 - DNA, 423 bp, Gossypium hirsutum
  Clone ID: GOSHI-09MAY01-C59289_1
tccaagttgtttcaagatcaagaactaaagaaatcggatttggatcggggaaaaacgaaagttgtcgactagcagccccgtcccgttttacgacgttcgagattatggattcatgttacgagctcgggaatcgtcagaggagcttatcacactattgacagtcttcggtatcattgaagtgaactttcgaatttatggcatgtataggctggagtttacttttgaaatgtttaattttggttatatattaaaagccatgcgaaaatggcttaactactttgtttgaatttggttttagtttagttatgttttaaattgatgttgggtcatgatgtcgtatgctataaagagttatgagtggtgctatgtgattgtatatcaaggttggtttatgatttagtaagtgacagagtagtttcgatc

SEQ ID NO: 21169 - DNA, 436 bp, Gossypium hirsutum
  Clone ID: uC-gsronu33B116e11b1
gtcttgagaggtgctggtgtgacagatttggaaactgaagatgaagatggctttccagtttctgcttcacaaaaaagcgaagatgctattcagcagcctcaaccagaaaccaaggaacttagagaaaaattaaaaacactgatgaagaaggggggaaaaagaagaagaaaaagaagcaaaaaggaaatgatacagatgacatcaatggtttaccgggtgatgaagttttatgtagcagaggtcttgctagtactagaatatcttcacatgctcgggattatctatcgtgaccttaaacccgaaaatgttcttgtaagagaagatggtcatataatgctttctgatttcgatctttcccttcgttgtactgatagtccgactcttgtcaaaacgtcctctctcgaatcagagccgttaaggaagaaccctgtttatt

SEQ ID NO: 21170 - DNA, 403 bp, Gossypium hirsutum
  unsure (1)..(403): unsure at all n locations
  Clone ID: LIB3165-039-Q1-K1-E5
cttctacgcttacacgccatttgaaccggagaagttctcgtgtntggaatggagttctgtcccgtggagatttgacacnctaggcagaagcaaccaggaaacattttccggacaagcagtaaagttttatgtagcagaggtcttgctagtactagaatatcttcacatgctcgggattatctatcgtgaccttaaacccgaaaatgttcttgtaagagaagatggtcatataatgctttctgatttcgatctttccccttcgttgtactgttaagtccgactcttgtcaaaacgtcctctctcgaatcagagccgntaaggaaagaaccctgtttattgtgttcagcctgcttgcatcgaaccttcgtgcattcaaccagcttgtgttgtcccaacaacatgc

SEQ ID NO: 21171 - DNA, 1120 bp, Gossypium hirsutum
  Clone ID: GOSHI-09MAY01-C54749_1
gaatttgttcatgagtcagacaaaagaagtcaccttatggaccttcttcatgctcagagagcaaatggtgtccagggcaagcaagctcttacattccttctcgtccgcccacgcgtccgagctgattcactggaacattggctgcgcatgaatggttttcctgcaactaccattcatggtgatagaagccagcaggaaagggaacaagcattacggtcatttaacacccgcgctcccccaattctagtagcaactgatgtggcagctcgtggtcttgatattcctcacgttgcacacgtggtgaacttcgaccttcctaatgatatcgatgactatgttcatcgaattggacgtacagggcgtgcaggcaaaactggtttagccacagccttcttcaatgagaacaatactaatatggcaaaggcattagcagatctaatgcaagaagcgaatcaagaggtacctgcttggctcactcgatatgcagctcgttcattcggagcgaggaatcgtcgtcctggaggaggaggccgattcggtggacgtgactttcgaagggattcatcttacaacagaggtggttcagattactacagtggaggcaacaacaattcaggtggatacggtggaggctacggcgcaaacgttgccagtgcatgggattgagtacacactcatttatttctactagtttcagcgtctaatagtagcagagcttccctttctttcatagggacaatttttttctgtcttgggttttacttatattttgctagcaccttgtgtgattgtcgttttatacgttaggaaggtttttacaaggtgtcgaaggagtcgaagttgtgtgtattgtgttagtaggcattggtgaagaaattctaaccaaaaaataggggtcacttcttactcctttatgttttgttaggtaatgcaatggggctgtagaatatgttgtgggagagaggcaacatattgtctatcttaccttatacctcttcctccccctgccgctattggcggtagtggttggtgggggtttaaatcttgtttactatcagctgtactgtactgtactgtactgtaatggtataattgtgaaaacatgaaagctgggggctct

SEQ ID NO: 21172 - DNA, 411 bp, Gossypium hirsutum
  unsure (1)..(411): unsure at all n locations
  Clone ID: LIB3165-037-P1-K1-A7
gaaagattgtggaacaaatttatattcctccaccaggtgttagacaaacaatgctattcagtgccacctttccaagagagatacagagactggcctctgattttcttgcaaactatattttcttggctgtggggcgagttggatcaagtactgatttgattgtccagagagtagaatttgttcatgagtcagacaaaagaagtcaccttatggaccttcttcatgctcagagagcaaatggtgtccagggcaagcaagctcttacattagtttttgttgagacaaaaaagggagctgattcacttgaacattggctgtgcatgaatggttttcctgcaactaccattcatggtgatagaagccagcangaaagagaacaagcattacggtcatttaaaaccggtgctaccc

SEQ ID NO: 21173 - DNA, 372 bp, Gossypium hirsutum
  Clone ID: GOSHI-09MAY01-C54179_1
gattatcgtgcaaaacttagcataatactgtccctcataacattcttcgactcgcttcattgattagcccaaagattaacataaccaaaaagataaacggcttgtgcttccgctactgttctcaagactttacctatgatcgacacgaccgagtggatgaaggggcggaacctgcgccaccctccgggtcgctttgtacggtgacacgctacatcagacgcctttaccgtccgcgctagctcatatgccgatgagcttgccaagaccgcggaaactgccgcatctacaggtcgaggtatttgggccatggatgaatcaaatgctgcatgtggggcgcggcttgcctcgattggtctctagaataccgaggcg

SEQ ID NO: 21174 - DNA, 453 bp, Gossypium hirsutum
  Clone ID: GOSHI-09MAY01-C54249_1
ctttctttctcttttgtcaaaccctaaatccctcactccaactgcagattcacctccacaaacagcaaccaatacattcaagcttggagggatgactttttagccttgagatctcctttcggcttcaatttcaacgaagcaaaaagagatttatggcatattcgcaaggtaagactcctctttcttttttccttttattttcaaacgcaatgatggaagatttgaaggcaataaatcgcaaggaaatgcaaaaacttaaagaaatttaaacagaaatcaacttctaaaaattttgactgctttctttgtattcaatatgcgttcgtcctcttttacactgattttctcggccttttatagccgatttacaggataaatagaaaaaggaaaaaaaaactcttaatttttgctgtcatctgctggtttattttctgttattggggcttgtctcgc

SEQ ID NO: 21175 - DNA, 748 bp, Gossypium hirsutum
  Clone ID: GOSHI-09MAY01-C55409_1
gctaaaaggacttatatagtcacgtggacaagtccaacatgccagaaactttcactgatcatgccctctggtatgatacatctttaaaatctgtctcagactcagcatccgtgctttacagatatgaacacgtagtccatggctactcgacgatgctaacgactgaggaagctgcagcactaggagaacaacctggaattctctctgttttacctgaggtgatatatgaactgcacacaactagaacgccagagttcctcgggttaggaaagagcactactctcttccccacctctgattcaatgggtgaagtgattgttggcgtattggacaccggagtttggcccgagctgaaaagtttcgatgattccggacttggaccagtaccatcacgctggaaaggcgagtgccaggtggggaaaaacttcagtgcatcgagctgcaacaggaaactaattggagccaagttcttttcaaaagggtatgaagttgcgttcgggcctattgatgaaacgatggagtcaaggtccccgagagatgatgatggacatggaactcacacagcaactacagctgcagggtcagttgtgccctctgctaacttgctagggtatgcttctgggacagcgcgggggatggcttcacatgcccgagtggccgtctacaaggtgtgttggcttggtgggtgttttggctctgatattgtagcagccatggatgcagcttgtgcagatggagtggatgtttt

SEQ ID NO: 21176 - DNA, 466 bp, Gossypium hirsutum
  Clone ID: GOSHI-09MAY01-C55159_1
atcaacttttataagagcgctctccacctcccatcaaagtcccgaaggcagagataaacgaaatggcggaaacatgcgacttcctcgcgacaaagagatgtgcagtggtgagtggaggaaacaagggaattggattggaaatatgtaagcagttggcttccaaaggtgtcaccgtggtgttaactgccagagatgagaaaagggggcttcaagctcttgacaagctcaaggaatctggtctttctcataatctggttttccaccagctcgatgtcactaaccctcttagcgttgcttctcttgctgctttcatcaacacccaattcgggaaacttgatatcttagtcaataatgcagcaattgctggagccaatgtgaactatgagattttaactaccgctgttgaaaaagcgagtgattggccagtaggggaggaagtgtggaatgagattattacaagtgaaac

SEQ ID NO: 21177 - DNA, 404 bp, Gossypium hirsutum
  Clone ID: LIB3165-042-Q1-K1-F12
gtcccgaaggcagagataaaagaaatggcggaaacatgcgacttcctcgcaacaaagagatatgcagtggtgagtggaggaaacaagggaattggattggaaatatgtaagcagttggcttccaaaggagtcatggtggtgttaactgctagagatgagaaaagggggtttcaagctcttgacaagctcaaggaatctggcctttctcataatctggttttccaccagctcgatgtcgcaaaccctattagcgttgcttctcttgctattttcctcaacacccaattcgggaaacttgatatcttaccactaggggaagaagtgtggaatgagattattacaagtgaaacttatgatatggtccaagattgcctaaaaaccaattactatggtatgaaaagcat

SEQ ID NO: 21178 - DNA, 591 bp, Gossypium hirsutum
  Clone ID: GOSHI-09MAY01-C55079_2
aatttttgttgttttctcagagcttcaacagacaccaaccgatttattctttcaccagttctctccatcgaaggagatttttatagaaagaagaagaagaaagagtagaaaagtagttattttgaatccaggtaactcacagaatcaatctcctttccactttgaacgaaaaggcgaaaatggagagtttcagcgccgaagatctgtcaacaataggcggcatagccaccgtttcccttcttcattccttcattcccacccattggcttcctttctccatcgtcggacgggcccagaaatggaccctttctcgtacccttttcgtcaccgcatttggagcagttttgcatgtaatatctacttcgcttcttggtataactgccatcactatggcgaacacgattgctggagaagaaacagtgcataaacttgcttcacttttgctcatagttcttggtggtagctatatactgctgtttttgtctggaaaaggtgggcacagtcattctcataatcaacctatggagaaaatggctgtcgccggtcttgtccttgttccagcattgtctccttgcgctacactcttccggt

SEQ ID NO: 21179 - DNA, 698 bp, Gossypium hirsutum
  Clone ID: GOSHI-09MAY01-C55079_1
attggtgcgaatagactccatcaattttcatttcattgtcagatctcttcctcaaaagcttcagctgacaccaaaacaacccccatttcatttatttcttcaccatttctccacccccccccccccaaaaaacaaaaaatgtaaaacatatatcaatgatgtaatgtagtttaggtgctctttggatctaatctagtcacagagaatcctgaattcttaaatctccattcactctgaaacaaaagtgttcatggagggttttggcgccgaagatctgtccacaataggcggcatagccactgtttctcttcttcattctttcattcccacccattggcttccattctccatcgtcggccgtgcccaaaattggaccctttctcgtaccctttttgtcaccgcatttggagcagttttgcacgtaatatccacttctcttcttggtatagctgcaataactatggcgaacacaattgctggtgaagaaacagtgcataaacttgcttcacttttgctcatagttcttggtggtagctatatattgttgtccttgtctggtaagggtggacacagtcattctcataaccaacccatggagaaaatggccgtcgctggccttgtcctcgttccagcattgtctccttgtgcaaccactcttcctgtgttcctactgtcggaaattcgtcttccatgatggt

SEQ ID NO: 21180 - DNA, 620 bp, Gossypium hirsutum
  Clone ID: GOSHI-09MAY01-C56919_1
gaatattactggtcctgcaacttcagaaactgtaactccaaaaaagttacgcaggatccggcgaaaaagggcttctggatttggggattctgtcctttctccacaagctgtgctaaatgcatatggcccaaagcatggaaaaagaattggtcctgtttggttctcattggtggcctctgaagaccaggaaggaggtgctcccctccctcggattcctgcaatttacctaaggataaaggatggaaatatgcctgtttcttttattcaaaaatacctgatcaagaaattggaccttaccgatgaagctgaggttgaaatcaaatgcatgggacaacctgtgcttcccacactgcagttgtataatttagtggatttgtggctacaaacaacatcgacatcacaacgtgtagctgcatctgtaggttcttgtgcaaaggattttgtaatggtattggcatatgctcgaaaagtgtcagggcaacaataaagcgttgtttcattcttttcccaccacgtcaataatcttaaatgcaaacatagatgatatgtatcagtcattattggaatcttgatggggcaaatagagtaggacattttgatccggcatgtattctatcatc

SEQ ID NO: 21181 - DNA, 630 bp, Gossypium hirsutum
  Clone ID: GOSHI-09MAY01-C56899_1
ctcattctaaagaaaaagaacagaagcggaacagttttccacattccccaacttcctcttcttcttgcaaatttctaagctttaatgcgcccaatatacattcgttgctgctatctgtgtccttattctttcacattcgctcatatcagtagtgaaagccacaacctttacaatagtaaacgaatgcaattatgttgtatggccagggattctatcaaacgcacgtgttccaacgcttcccaccactggtttcgctctccaaagcggcgaaaccaaagccattactgcaccggcatcatggggtggtcggttctggggtagaacccattgctccgaggattccaccgggaaattttcctgccttaccggcgattgtggctccgggaaggtggaatgttctggaaacggggctgctccgcccgcgagtttagctgagttcacattggacggtgctggcggcctcgattttttcgacgtgaggttggccgacaggttacaacatccctatgttggttgttccacagggtggcacgggacaaaactgtaccaacaccggctgcgtggttgaccttaatggctcttgcccttccgaactaaaggtgatgagcaccgacggcacagatggcgtca

SEQ ID NO: 21182 - DNA, 589 bp, Gossypium hirsutum
  Clone ID: GOSHI-09MAY01-C56859_1
ttgttttgtgttattttcttgtcaatggagtcattaacttcttctccagtgtgcaatctagggattttgatcagtctcgacaacgactccgtccaagaaatcctccaaagctacgacggtttctgcaccgccgctaattctctcctcaaaatctccggcgatctctccctcgaacatgacttcgtttctcatgttcacactctctgcaaacacggcctccatattctctctcgggactacttccttagattactagaggaagcgtttgagaaaaatggggcgtcgagattttggcgctattttgaggattatagcatagatctaagtgatacagtctttgttgctcttcatggatagttatttgatgggtacttttttctgaaggatttaaagctgctgttttcattttcatggcttagggtttttgttcttgtatttttgttgaaccattttcatctacttgataaatgttatttgagtttttaaggattgaaatgatttgaattggtaaaaatatatgttatataatatattatataatataaactataaaattttataaatattttaattatatttaaaataatag

SEQ ID NO: 21183 - DNA, 295 bp, Gossypium hirsutum
  Clone ID: LIB3149-023-Q1-K1-B2
caaaccaaaggttaaccatgagagctaagtggaagaagaagcgtatgagaaggttgaagaggaagaggagaaagatgaggcaaagatctaagtagtacagtctttgttgttcttcatggatagttatttgatgggtacttttttttttgaaggatttaaagctgttgttttcattttcatggcttaaggttttcgttcttgtatttttgttgaaccattttcatctacttgataaatgttattggagttttaaaggatcgataatgattgaattggaaagagatagtttcttgct

SEQ ID NO: 21184 - DNA, 823 bp, Gossypium hirsutum
  Clone ID: GOSHI-09MAY01-C56879_1
ccatcattgaagaagctggagcatttggaagtgttgtcagtagcagggttggagtctgtaactgatagttttatcaaggaatttcttattgcaagaggtgatggtatcaaggaactgattttgatggattgttggaaattaactgattcttccttgaatatcattgcggaaacctgttcaaatttacgagctcttgacattggtaacatatccaaactgacagacacttctttcggctatctggccagtggttgtcggtcattgcagtcattgaaactctgccacaatgcattcagtgatgatgctatagctgcatttcttgaaatgtctggggaggttttgaaagagctagcactgaacaatgttgggaaggttggtcttaatacagccttatcacttgcgaggcgttcaagaaatttggttagtctggatctatcttggtgccgaaatctgactcatgaagctacgggcttgattgtagatagctggttatcgctgagggtgcttaatactttttggatgctctcagattacagacgtctttttgtatggccattctaatgccaaggtagaaatcattggtttgaagttgtctccatttctggaacatatcaaaacaccagctcagggtccatttcagtactcttcagtatgagttgggtgtcagtgaccagccatagccatgtgatgtatacaggaaacgtgtaggtggcaactaatttactagtgaagtgctaacagtttgatgtctaaagaaacaaagacatttgtttgtcgttctgtgatgctctcttttgttgaatacctgtcaatgagtcgcatc

SEQ ID NO: 21185 - DNA, 518 bp, Gossypium hirsutum
  Clone ID: GOSHI-09MAY01-C56569_1
tttgttcgttcataaaaattaaaagcctcttttttctctctgttcttcgccatttttttcaatcctaaaccaatcccagattttctgctgaaaaacaaaaacaccctctaagtaactttccgggaaaatgtcggggaaaggagcaaaaggattgattacggctggaaaatccaccaaggacaaagataaggacaagaagaaacccgtctctcgctcttctcgtgctggtctccagttccctgtgggtcgagtccaccgactgctgaagacaagggttagtgctaatggaagggttggagctacagctgcagtctacacagctgccatactggaatacctgaccgcagaagtcctagaactggcaggtaatgcaagcaaggatttgaaggttaagcgtattacacctaggcatttgcagctcgccatccgtggtgatgaagaacttgacaccttgatcaaaggaaccatcgcaggcggaggtgtcattccacacattcacaaatcacttatcaacaaat

SEQ ID NO: 21186 - DNA, 677 bp, Gossypium hirsutum
  Clone ID: GOSHI-09MAY01-C56669_1
gtttgttacccagatagatgctagtttttctcctcttcacagaaaatagcgacttcgaagatgatgagagcagtgatctatttgctccccttgactttcatcttcttcaccatagctgatggtaagcgcatccttccactgcttcagcctcagcctcttgaatccttcaaggtcaatgcaacccagaatgtggggagctgcacttacacagtatcaataaggacaagctgttcttcaactacctacacaagagatcagatcagtcttgcatttggcgatgcttatgggaatcaggtgtatgcaccaaggctggatgatccatgctcgagaacatttgaaagctgttcaactgatacatttcaaataaagggtccttgcacataccagatttgctatctttacctctacaggagtggatatgatggttggaagccagagagcgcgactgtgtacggatattataccaaagctgccacatttaattacaatgtctttattcctaatggggtttgggatggctttgatttctggtatggaagggggtccgcatctgcatgaaccatgtaccaaattggtggggggggggtcagtttgtgaatctttattcagggatttggagaaataagcttcttgttttaacattttgggtaataatgagtaatgacttgttttgtctg

SEQ ID NO: 21187 - DNA, 622 bp, Gossypium hirsutum
  unsure (1)..(622): unsure at all n locations
  Clone ID: LIB3543-047-Q6-K6-D1
nccgtccgtaaacaaataatgctatattagcatgaagtgcacatggactgcctaacaggttgtcctgccaacatattgaaaaggttaatgttttagtcgacattaagaaaacaatgacttttttttttttttgaaaagtgaagggtcaaattagctcaaaaaaagattagggtcaaattgacaaaagaatataaacgttgaggattaaattatgtttattattataccatttatttatttgtgacgaattggttgtgccatcattcagatcaaagtctcggaccctatcaaccggttatcattagaaaactcagtgagagacaaccttcaaacttgtgctgcccttcatggagagtcgtttaattctgccattgctaaaatacatccagcagcttttgcacagttgaagcaggcgctaaagatgccataagccagcattgatgttctcttttatcaactgaggtctttcttttccggctgattattttccatttttccaaagattgagaaaacatctaggtaagattttccaatcttctatatagtaggcgtgcccttaaataccatctttataaataccatctttaccattgcattgtttgattttggtctgctgctaatc

SEQ ID NO: 21188 - DNA, 385 bp, Gossypium hirsutum
  unsure (1)..(385): unsure at all n locations
  Clone ID: LIB3149-016-Q1-K1-B1
gtgtaattctcggagggactgatgacttaactgaggaagagtcaagtggtgataacatgagctatggcaggtcgcacgatgaggatttgcttcctagtaaggagttaaggagaagacagatcaaagtctctgaccctatcaaccggttatcattagaaaactcagtgagagacaaccttcaaacttgtgctgcccttcatggagagtcgtttaattctgccattgctaaaatacatccagcagcttttgcacagttgaagcaggcgctaaagatgccataagccagcattgatgttctcttttatcaactgaggtctttcttttccggctgattattttccatttttccaaagattgagaaaacatctangtgatattggaaggt

SEQ ID NO: 21189 - DNA, 837 bp, Gossypium hirsutum
  Clone ID: GOSHI-09MAY01-C56349_1
cggacgcgtgggcggacgcgtggggaagtttcgagccgattggaacgccattaaggctgttaaaaacgagcttagaatcccggttcttgccaatgggaacattaggcatatggatgatgttcgaaactgtctggaagaaacgggtgccgatggtgtgctttcggctgagacccttcttgagaaccctgctctttttgctggattccgaacttccaattgggttgcggataacgagaaagactctattgatggaaaactagatcaagccgatcttgtcgttcagtacttgaagctctgtgaaaaataccctgtcccatggaggatgatccggtctcacgttcacaaaatgctaggagactggtttagggttcaaccgcaggttagagaggaactaaacgcgcagtccaggctaacgttcgaatttctttacggtctggtggatcagttacgagaattgggtgtacgagttccacttcatcaaaaggatggtgcttcggcaaccggaaacttggccgaggtaatcggtatttgattacccggaccaatgtgaattgagtcgtaggtgcttagaataggggaaaatcagacgccaatgaatttttgagctaaaaagaaagaatacccttatgattttttttatgtgtaagattataaatttactcttcttacaatttcgtcccttcattcaatgggatataatccttgtttgtaaggcattgttgtttcctatataacattgaagaacagtttatatattgaaattgctattgtacactagaaattttgtttttatgatttatattaacactttgctcatcttatttatttggttggtcc

SEQ ID NO: 21190 - DNA, 529 bp, Gossypium hirsutum
  Clone ID: LIB3829-036-Q1-K6-E10
cccacgcgtccgcccacgcgtccgggatgacgttcgaaactgtctggaagaaacgggtgccgacggtgtgctttcggccgagactcttcttgagaaccctgctctttttgctggattccgaacttccaattgggttgtagataacgagaaagactctattgatggaaaactagatcaagccgatctcgtcgttcagtacttgaagctttgtgaaaaataccctgtcccatggaggatgatccggtctcacgttcacaaaatgctaggagactggtttagggttcaaccgcaggttagagaggaactaaacgcgcagtccaggctaacgttagaatttctttacggtctggtggatcagttacgagaattgggtgtacgagttctacttcatcaaaaggatgatgcttcggcaaccggaaacttggccgaggtaatcggtattgattacccggaccaatgtgaattgagtcgtaggtgcttagaataggggaaaatcagacgccaatgaatttttgagctaaaaagaaag

SEQ ID NO: 21191 - DNA, 506 bp, Gossypium hirsutum
  Clone ID: GOSHI-09MAY01-C56309_1
ttcccggtctacacgcgtccgtgggaccctaactatcttcctccaccgttgcacctcaactcttacaactgctttctgaagcgctccagccctggttgagtttagtttttaagtgaaggaacactctgtgaaatggcagattgggctcctgtacttgttggggtggtgctatttgtgttgctatcaccaggacttctgttttcatttccagggaacggcaagcagctggagtttgggagcatgaagactaatggcatggccattgctatccacactcttcttttctttgccatctatgctgtcttgatcatggctgttcacctccatatctacactggctgaccacttccctgccggtgagagtcttcgttattggtctctctattggagatctgtcttgggttttacttggtttatcaatctttgtattagcttgtttcaattttggaccaacgaaatttgtggcacagacctttgtttcccaaagtttacttttttacaattag

SEQ ID NO: 21192 - DNA, 1083 bp, Gossypium hirsutum
  Clone ID: GOSHI-09MAY01-C57539_2
aaatcagacactgttatatgtatatcataagagctactaagctgtttccataagctccaaattgatcaataaccatgtcttctctgtttctcctcctcttatccaccgccatcaccgccgccgtcgcttccattcccgcctacccttcagtgtcgacagactgcaccgtttccgccgaggatgataacccggttcccgttcgtcgtgaagtttacggcgacgggagaatcttcgacgttagccatagatacaccgtggatatgccttcgtgggggagcaaagatggtctgggtcagttcctttggcttccgtcaagcatgaagaacggttcaaggtccaataattccttgatgaagctgcagtcggtccattccggcacccacgtcgacgctccgggacatatggtcgacagctacttcgacgctgggttcgatgtcgacacccttgaccttgatgtccttaacgggccagctttattagtggatgtgccgagggatagtaatataaccgctaaagtgatggaatcattgaacattcccaaaggagtgcgtcgtgttcttttcagaacattgaataccgacaggcggcttatgtttaaaaaggagtttgattcgagctatgttggattcaccacagatggggcaagatggttggcaaagaacactgacatcaaccttgtaggaatcgatttcttatctgccgcatgctatgatcactccgttccagctcctcttgagttctttgaaggcagggaactcattctagtggagggcttgaaacttgatcacgttccagttggaatatataatgctcattgctcgcctttaaggttgcttggttctgaaggctcgcccattagacgcattctcatcaaatgatcccaactccttcactgttcttatgctagagatttcctcccccccccccctgtctcggatttttaaatttttgtctacccccctttttatgtttaaacttaggattataaatgaatcgaatttgaacgaatacactttgtctcatgtttgtttgtattcggtgggtgattttaaaatttcaattagtaaaaaccacccaccacac

SEQ ID NO: 21193 - DNA, 879 bp, Gossypium hirsutum
  unsure (1)..(879): unsure at all n locations
  Clone ID: AI726017.1
agattgtntatttgagaatcaaatcttatatacgctccaacaatgaccaaaaccatgtttcttccgcttctcctcctccacctatccaccgccgcagcttccacttcagtgtcaacggagtgcacagtttccacgatggacgattacccggttcccgttcggcgtgaagtttacggcgacgggagaatcttcgatattagccatagatacaccatggatatgccgtcatgggagagaaaggatggtctgggtcggttcctctggcttcncgccagcatgaaaaatgggtcgttggctaataactcactgatgaaactaccgactcatagcggcacacacgtcgacgcgccgggccatatgatcgaccgttacttcgacgccgggttcgatgtcgacacccttgacctagaaatccttaacgggccagctttgttagtggatgtgccganggacagtaatataactgccaaagttatggagtcgttgaaaattcccanaggagtgcgtcgtgttctgtttagaacactanatacagacaggaggcttatgtttaaaagtgagtacaattctanctatgttggattcacaacagaaagggcaagatggctggtgaagaacactgacatcnaacttgtaggagtcgatttcttatccgttgcatgtgaggaatctatngtntcggctcatcttgaattctttgaaagcaaggtaaagaaatttttaacaatttaattccctttcttttccttaaattatttgtgtcggtcgatttatattcccacctgaatattaaatttgaatctccgaatttttaaataaactttaatatactcgtattagaaccattacttatctccacacctcgctttcgaatttcgt

SEQ ID NO: 21194 - DNA, 571 bp, Gossypium hirsutum
  Clone ID: GOSHI-09MAY01-C57429_1
ggtgtttatcgttcgtggacgtataaaacgtatccaaagccttagcaaaggcgtggttgccacaagtttaatcgagccaggaggcttcctaggtgacgaattgttgtcatggtgtcttcgccgaccatttattgaccgtcttccagcctcgtccgcaacatttgtttgtgtagagccgattgaagcattcagtctcgactcaaaccatctcaaatacatcacagatcacttcaggttcaaatttgccaatgagagacttaaaagaacagcaagatactattcatcgaattggcggacatgggcagccgtgaatatacaacttggctggcggcgttacagaacgaggactcgaggtccgatgatttctgctgccgaaaacggcaacagcagtgaccgccggttgctgcaatacgctgccatgtttatgtcaataaggccacatgatcatctagaataaagaaaagccaattgccttctgcaattcatttgctcattatgtaatcctgactgtcatttaataaagtctttcattcaccatggaaaccattttgaacatagttgttttgctcat

SEQ ID NO: 21195 - DNA, 384 bp, Gossypium hirsutum
  Clone ID: LIB3149-035-Q1-K1-D8
attttctgaaaacatgagccatgttcttgttgttttcactgttcttgttcgagggttttagcaaacaactgaaagatccaagtagaaacatgctagcatggtcagcatgcatttgtctaagtggatcttcaattattggtttctttttgttgttatgtgatttgttgtttgtttaagctcatgcttttggatcgaattctgttgatttaaatttctttttttactgttggggaatatgttctaaataaacttcaaatgcaactgcttgtcagttgatttttatgaaaaaaaaaaaaaattattttaatattatatataatattttcatattttaaatttttaatattttttacttttttttaatatttgataattttttttata

SEQ ID NO: 21196 - DNA, 390 bp, Gossypium hirsutum
  unsure (1)..(390): unsure at all n locations
  Clone ID: LIB3149-053-Q1-K1-C2
agnnncngaaaacatgagccangnncttgggggttnncacnggnncttgttcgagggtgttagcaaacaactgaaagatccaagtagaaacatgctagcatggtcagcatgcatttgtctaagtggatcttcaattattggtttctttttgttgttatgtgatttgttgtttgtttaagctcatgcttttggatcgaattctgttgatttaaatttctttctttactgttggggaatatgttctaaataaactttaaatgcaactgcttgtcagttgatttttatgtcaaattaattttataatcggcatgtcattgtgttaaatgttataatctgttactgactgggtggcttgaaacaaaaatatcggaaaaattaaaaaaaaaaata

SEQ ID NO: 21197 - DNA, 538 bp, Gossypium hirsutum
  Clone ID: GOSHI-09MAY01-C57609_1
caaataagtcacctctccaatcgaccggatgatgaccatccattaaaacgcctcccaaattattgcaggtaagaaagtgaacattttcttaaacctcaaaagaaacccatgcaatacgaagaacacataatgtcgatcatctctgtgcacgactggtttggttcagttcggttcaggtcatagtcaagcttgaaacatttgttttacaagatcctggatgtaggttggttttggtgtgagttggacggggctgtggggcaactccataaacctgcccttgttttcactcttgcttacatttcccaatacaatgatctttggagtaataaatagggaacacattttatatctatctatctatctatttatctatatatattataatatttgtagagaaaagcgtgaatagaagttttttcatgcttgtaatttatgtacagtacccaatgattatggctgctcatctggagatgaaactgattgtttttgtatgtttattatttttattagaagattggattactctaaaaaaaaaata

SEQ ID NO: 21198 - DNA, 734 bp, Gossypium hirsutum
  Clone ID: GOSHI-09MAY01-C57199_1
cccacgcgtccgcacaaaggaacagttccatcgtcatcttatgttggaggcagaaagaagacaattgaggccaattattgagaataagtcgcgaataattcttgttcatacaagctccggatataagcatagtttgagagaagtcttggatgccccaaatgttatgagcatgataaaagacaccaaagcagcgcaagaggtccgagctctcaaggatttcttcaacatgctttcaaatgatccggcacgtgcatgctacggaccaaaacatgtggaggttgcccatgagcgaatggcagttcaaacacttcttattaccgacgatctcttcaggaattcggacgtaattacgaggcaaaagtatgtcagtttggtgaactccgttaagaattcggggggcactgctcacattttttcgtctatgcacgtatcaggggaacaactggcacagctgaccggcattgcggcaatccttcgtttccctcttccggatctggaagacatcgaaatgtagggtaccgttttctgcatatgttcggagtttccggcgtcgagattttatactgtactcgtatttctcccccttttcggtcatatatatataatgtgttaatcagtatttgaactgtatcatatccagatactagcgagtatttaatcaactctagaagtgtaacattatttcattcagtgtgttatggaaataaaatatttaattcttttgttttctgctt

SEQ ID NO: 21199 - DNA, 504 bp, Gossypium hirsutum
  Clone ID: LIB3825-032-Q6-N6-B1
agcatattacatcccatttttcttaaatgtatgtatctatacatatatttacatacttccccccttacatatttggtagaagataacatatatataaccgaaccgattgcttcgctaccgtatgttgccactgcccagctgagtttatcggcttccaacaataattcctatttacaatcggagtcggcaatggaacaactgtcacgtatatttcttcaagttcctttgagctcgaaactgacctaacttgtctctcaagtcggcggcatccttgtagcgttcctgattgatagccttgtttaaatcacaaacaatgttgaactcctctgtgtcgaggcaatgctgaccgcttggctgatcaagttcggtgaataataaaccgtctgaagctggggactgtgttgacaacttccctggttcgattacgcacataccgtcactgtatgccaaggacttgttaacttgtataggtaccttgcacctcacggcaatgttgatggcatc

SEQ ID NO: 21200 - DNA, 409 bp, Gossypium hirsutum
  Clone ID: LIB3149-025-Q1-K1-C1
gccaagcggtcagcattgtctcgacacagaggagtttaacattgtctgtgacttaaaccaggctatgaatcaggagcgctacaaggatgccgccgacttgagagacaagctaggtcagtttcgagctcaaaggaacttgaagaaatatacgtgacaggtggtgttaataaacccaatttaggttgaatcttttaaggtgtaattgtgtttcatatatcagtctccggctccagtcaatagaccattgacgagttcttattgatgtctcagtcgttccattggcgactccgattgtaaataggaattattggtggaagccgatagactcagcttggcagtggcaacatacggtagcgaagcaatcaagtcgggtatatatatggtatcttctaccatatatgtaaggggg

SEQ ID NO: 21201 - DNA, 802 bp, Gossypium hirsutum
  Clone ID: GOSHI-09MAY01-C50839_1
cggacgcgtgggcggacgcgtgggcgaattgattgcatgagacgatccaagtacataccatcaacgccacgaaggtcaccgctcctatttcttaagcgacacccttttcatggtcgacctccttttctttgatttttacctctgagcttccacccctgaagttgaagatcccattcctccttgaatctgtcagggaaacatctattaaagctatgagtgctgcattgaagaaatcctcttcaaatggctctgataagtctgtaacaactgaagagcagcatgcaaagattagtgagataagaaagttgataggtccattgcctgagaaattggccatgtagtgttctgatgcagcccttacaagatatttaagggcgcgaaactggaatgtcaagaaggcaactaaaatgcttaaagagaccttaaaatggagagcagaatacaaaccagaagagatccgctgggaagaggttgctcatgaagccgagacagggaagatctacagatcaaattatatagacaagcatggaagaacagttcttgtcatgagacctagttgccagaacacaaagtcaactaaaggacagataaggtatttggtttattgcatggagaatgcaattttaaatcttccaccagacaaggaacagatggtctggttgatcgattcaatggctacaacttgtcacatacatcagtgaaagtgacacgggaaacagcacatattttacaagaccattatccaaagcgtctgggcttggcaatactatacaacccacctaagttctttgaaccattcttg

SEQ ID NO: 21202 - DNA, 722 bp, Gossypium hirsutum
  Clone ID: GOSHI-09MAY01-C50559_2
ggttccgatcggtgttgctgtctctgccccttcttctgttctttctaatcggagaatatccgttagattttcggaatttcgtggtctcaagattaaacccaggttggcgtcgctgactcagtcgaccagatcggcgattcaggatcggcgtcgagtcggacgtgttgtttgtgaggctcagaacacagctgttgatgtgccagcaattaaggatgaaacatggcagtcactagttcttgaatgtgaattgcctgttctggttgaattttgggctccgtggtgcggaccttgccgtatgatccaccccataatcgacgagctgtcgaagcaatatgctgggaagctcaaatgttacaaagttaacaccgacgagagtcccaacatcgcaactcgatatggaattcgaagcattccgactgttatgatcttcaagagaggggagaagaaagatgcagtgatcggtgccgttccaaagtcgacattgacaacttgcatcgagagattgttgtagggttggtgacaatcggtgggtaagggttcaggtcggatttattttgggttaggaaaaagtttgggtttgctttgcagtaaatgtaagtatatacacataatttaaatatttacatcttcatataaattattaatttactattaggttgtaataggaatagttctaattattcatgataaaataaaatagaaataataataaatttaactcc

SEQ ID NO: 21203 - DNA, 632 bp, Gossypium hirsutum
  Clone ID: GOSHI-09MAY01-C50559_1
ctttttcctcctaaaacggtcttcctcccatggcttcctccacggttccgatcggtgttgctgtctctgccccttcttctgttctttctaatcggagaatatccgttagattttcggaatttcgtggtctcaagattaaacccaggttggcgtcgctgactcagtcgaccagatcggcgattcaggatcggcgtcgagtcggacgtgttgtttgtgaggctcagaacacagctgttgatgtgccagcaattaaggatgaaacatggcagtcactagttcttgaatgtgaattgcctgttctggttgaattttgggctccgtggtgcggaccttgccgtatgatccaccccataatcgacgagctgtctaagcaatatgctgggaagctcaaatgctacaaagttaacaccgacgagagtcccaacatcgcaactcgatgtggaattcgaagcattccgactgttatgatcttcaagagaggggagaagaaagatgcagtgatcggtgccgttccaaagtcgacattgacaacttgcatcgagagattgttgtagggttggtaagaaaaactttgttatattttttccctagagttaagctctttcaagcaaatcaatataacttgcagtggc

SEQ ID NO: 21204 - DNA, 540 bp, Gossypium hirsutum
  Clone ID: LIB3582-017-P1-K1-D7
cggacgcgtgggctccttcaatctggttccttaagccaagtttctgtcgaggcaaacgcatgaccttccagatcttctccccttagataagtatcttcttctttctcgagcgcggtctttggtaatctatgagcatgtgtattctccgatctgtgaatatactgaaaaataacttcttgaaaatctgttttcttcttctgaatatctctgattatggctccgataactgacttgtcatttgaagttgcttgacattttttataactgtttttgaatcccccataagacagactgattggatactaagtgaacttcctaattttgcaccttccgggcacgcataagcctctactgcgaaaggtgaggggacgtttctgtagataaccgtctttaacaccattaagtttcccctcaaatcccaccctaccaaacctgtcgctgaactgaaggttttactgtcgaatgctgcatcaaaatagattctcgttcttggtatgccctcctatgttttatgacttctggttatactatcgttctttt

SEQ ID NO: 21205 - DNA, 421 bp, Gossypium hirsutum
  Clone ID: LIB3146-021-Q1-K1-B11
ctgaaaaataacttcttgaaaatctgttttcttcttctgaatatctctgattatggctccgataactgacttgtcatttgaagttgcttgacattttttataactgtttttgaatcccccataagacagactgattggatactaagtgaacttcctaattttgcaccttccgggcacgcataagcctctactgcgaaaggtgaggggacgtttctgtagataaccgtctttaacaccattaagtttcccctcaaatcccaccctaccaaacctgtcgctgaactgaaggttttactgtcgaatgctgcatcaaaatagattctcgttcttgtaccacaacatccataaagcgtaccagaatagctgacactgaccattgttgcttctcttgaaaacccagtgcattcatggaagacatgga

SEQ ID NO: 21206 - DNA, 522 bp, Gossypium hirsutum
  Clone ID: GOSHI-09MAY01-C50199_1
gggacgcgtgggatttttagagtttaccgaatcagtttagctatcctttttttgacacagaaccgcaatttaaaacagtatatcgacggggaagggctagataatttttttcttttcttgcttggcgatgtataaccaggtatcatgcaatagaaaaattcctcaaaattcctggaggtattggcttgggcctagaaacggaagatcaggtaacccgtgaatccaacgagttggtttataataattcatgaaggaaattatcatatttccgcaagtcaattagatgcgaaatataaaaattgactttttttcgtagttgcacaagaggttttgttttttgttggaagccctcttttttttttatctatatctaacgactactcttacttgttactagacgactaagcaattcctttatattaaaataaaaaaagaagaggaaggaataataaaaatttcccctaaatttgtgaggcggcctttcttaaaacaaccccggggataaacagggttaaccaaact

SEQ ID NO: 21207 - DNA, 632 bp, Gossypium hirsutum
  Clone ID: GOSHI-09MAY01-C50099_1
cccacgcgttcgccatcctcaacaacaagaagaggaggaggaggaggaggaggaagaagaggaggaacgcgtccgcccacgcgtccggaaaatggaaaatggaggcaaccatggaaaggatatgcttttggaccatcttggagatgacattgttgctgcttctgcaactatggagcaacacgaagaagcaccttctgcagaagaaatgcaagaaaggatggatcaattcacctacatcatgcagcagaagtttctctctggtgaagattatgagtatttagattactctaaaatagatgacgatgagaccttggatgatcactggcttagggaagctaaccatgatgcagaggagaagtattttgctgaagattaataacggaaaattacatccattgatctcccaacatttgcagatatctcttcgttatagcagtggttagtgattacctttttctacttatgtacctaacttccttctcatataaagattatggaatggcatgttcatgttggtagccattcttcagatagaccagcattagaaccaagggtagtagttatcaaatcttctctgaaggcatatgtgaactatcctttttgtgcatataatgtgatgagcagtttgttct

SEQ ID NO: 21208 - DNA, 449 bp, Gossypium hirsutum
  Clone ID: GOSHI-09MAY01-C50329_1
gttaatgagagcatcgcgagagctgctcttggatacatgatgtcttatgtacagaaggtgctatattataaagaaagtgaaaaccaacgcacatcatgatattgatgagagataagaatttggttgtttgactcaaatcatgcaaaggcataaggtggtctacataatttgagattgtgattaaatatgggctagtttcgtatacgaggaaaacaagttgggccaggtttaaatatgggctagtttcgtatacgaggaaaacaagttgggccaggctggtcaaagttggggacggcttgctctatctgtgcacttcgaggatactttataatactcaattagagtcgttaagtgagcctaaatttttgaggcactccaaatattcaggaaaatcaagtttatgaggtattaattccttaaattgatttctgaatttcatagtcaagtgt

SEQ ID NO: 21209 - DNA, 745 bp, Gossypium hirsutum
  Clone ID: GOSHI-09MAY01-C50259_1
gggctctttactttgatgataagcttgttgatggacatgaccatcaaggtcccttagcaaccacctcatctgttgttagaggactaacagtatttgcagcagtaactgatgaaagacttaatattcccagcaacaaaatacttggattggctaacttcttccttggcattggagttcctggcgatgccaaagatttattcaaccaaatagactccttggcttgtttggaaagcaacagggtttccatcccactgatcctatcacttccatctacagtgctttcggtgactaaagaagactcacttcaggttaatgttaacactgtgcttggttcaaatgcacctcctctaacagtgaagcttgtgggggtttttacttctggttcaaaggctgcatctctagttgaaagccaagaactactgtttgatgatggaactggaatgtataacttgaataacttgcccaagagtatagatgttggaagttacacatttgtttttgagattgtgcttcatgaacctgagcatgaaaagatttacgtcacgggaggccacaaaaaggtacctatatttgtctcaggacttatcaaaatcgaaaatgctgaaattgcagtacttgacagtgatcttgggagcatagaaacacagaaaaagttagatttagctggacaaaaatgctgtgtcattatcagcaaaccatctacagaagctgcgtgtatcttttaagttgacaactcctcatggac

SEQ ID NO: 21210 - DNA, 629 bp, Gossypium hirsutum
  Clone ID: GOSHI-09MAY01-C50229_1
tcgcaccatttcagagattgccgacattttccaagggattccaaccttgaacctgttggaggatcaatagatttaactcgttattcaggttatgatgagctcaaacaagatttggctcgtaggtttggaattgaggggcagctggaagaccgagggagagtaggctggaaactagtctatgtggatcacgagaacgatgttctgctagtaggagatgacccatgggaggagtttatcaactgtgtccgatgcatcaaaatactctcccctcaggaagtccagcagatgagcgtggatggagagtttgggaactctgtcctgcctaatcaagcctgtagcagctctggcaatgggaatgcataaactagtatggttacaagctaaggtccatcagtagtccgggcctcgtcgttgagattcattgctttcatatgtatatatttcagcatatctctgcagaattgatgttactttcattggtgacttatgtcgaagagaatgacattctatagcagagagaaaatgtggctggaggggcgtgactttattagaatcacttacttagttgatatgtaagaatgaattcagtcttttcttgtttgatgatgccttattatctacttcttatt

SEQ ID NO: 21211 - DNA, 765 bp, Gossypium hirsutum
  Clone ID: GOSHI-09MAY01-C51999_1
ccccgcgtccgctttttcaaccctagtcctccttgaactgccgatttcccttcccttcgcagcagccaacagatttagggttggagagaacgcctttcagccttttagtctcctcctagcttcgattttaacaaagcaagaggagatccatggcatgcttttgaggtaactcttcctttcccccttttttacatttgaatgcaaataaagaaaaaaaaaagaaaaaaaaatgcagaaagaaaaagtcgagaagaagaaacccgaaaattttaatctcaaatcaccttttttttgctattgccttgtattcaatatgcgagtattgtggctgtattgtgtgttcgtattctctctcagcgtaaccttttacaaagactcaaactctggctttatagccgaaaggaaagaggaaaaattaacgaaaaacaaaaaatacaatgttttttctttttgtttttctttgctgttgttgcttgtttgtctccttgcaggtgcgggtgtgctggcgctcgggtacaagtggtgcgtgaaggctgtacggaggtgcgcagggggtcgtacggaggcgtgctggaggctagggctgcggtgttccttgctgctaggggtctgccctggttttcaaaccttgggccacttgggttaattgggtattgggccactagatttgggctagagggactgttttgggcttgtaataggacattaactaaatggactttttttggactggtaatgtatttttattcattttggttttgtgtt

SEQ ID NO: 21212 - DNA, 349 bp, Gossypium hirsutum
  Clone ID: LIB3146-037-P1-K1-H4
gcgtccacgcgttcggtattatgtgtcaacgtaaccttttacaaagacttaaactcttgctttaggggcgaaaggtaagaggaaaaagtaaccaaaaaacaaaaaatacaatgccgttctttgttggttttatttgctgacggtgcttggttgacttcttgtcagagcgggtgtgcttgcgctcgggtaccggtggggcgtgaaagcccaacggaggtgctcaaggggtcgtaccgaggctatggctgcagcgttccttgctgctagggttctgcccttgtattgaaccttgggccacttaagttaattaggtgttgggccactagatttgggctagagggactgtttt

SEQ ID NO: 21213 - DNA, 336 bp, Gossypium hirsutum
  Clone ID: GOSHI-09MAY01-C51929_1
cacgcgtcggcagccaccacaaggactgctccaccttctcctctgttttcaagccaaactccccccttccaacttcgatttggacgaagagaagcaaagatgtcgacggcccgcctcttttggtgaagaacgtgcatggtgggtgggggggtttgctgaacgtgggtggaaacgggtgccgcgacatgggcagttgctgcagcgccgaaaaaactgctgctagggttcagcttttttctgctgaaatagttcaatagcttgggcttgaatttggactaacagatgggcttgtaacttgggccacgttttattaaatttgtaattgtgtttggattt

SEQ ID NO: 21214 - DNA, 719 bp, Gossypium hirsutum
  Clone ID: GOSHI-09MAY01-C51809_1
gttttcagttgcgatcttgcatcgaccccagatcagaatcagcctcaaaaaagtcgtgaaagtgaagaaaaacttgaagagatagatagtttttgaagaataaatttgtgttttcttggtttgggttttttgagaagatgaaggagcagaaaagtgaaagtggaggagggtttgtaagagcagatcagatagatctgaagagcttagatgagcaacttcaaaggcatcttagtagagcatggacaatggagaagaacaagaacaggaaagaggaaggtgaggacggcggcggtggcggagaacggctccggtcacccagcaacactgggagaagacaagagtgggagattgatccgtctaagcttatcatcaaaagtgttatagctcgtggcacttttggaaccgttcatcgtgggatgtatgatggccaagatgttgctgttaaacttcttgactggggagaagagggtcacagatccgaggccgaaatagcttcacttcgagcagcttttactcaagaggttgcggtgtggcataagcttaatcatcctaatgtaacaaagtttataggggcgacaatgggctcatcggacctgaacatacagacggaaaatggtcaaattggcatgccaatttggtgtgttattgtggaaatattgtcctgggggtgcactgaaatcctacttgataaagaatcggagaaggaagttggcttttaa

SEQ ID NO: 21215 - DNA, 594 bp, Gossypium hirsutum
  unsure (1)..(594): unsure at all n locations
  Clone ID: LIB3825-012-Q1-K6-B4
tgnaccacttctgggtgccgacatttcttcatttggatttttaggccagatccctcgtaatttcagtctttccgatcttacagctgatttttctcagagttcagatatactggagagctacccccggtcacctttcttagcgcctgataatgaaacatttctggattctcgtgaaagagagcatcaaggcgacaacaaaaggttggacaccatatcagagggattgagttatgacgattttcgaagcgaatagctctacgtgttaatggtatttgctttacaaatatttactttatattttcatttatctgctgtgctagtacttgttttggaatttacttgcccattcttttgagactagtttttgctggtgctaagattcttttctgccaccattatgtgttttctcagttttatttaatttgtcgataaaattttcttttatgtaggtactaatttgtcaatagactttatcccatgaaacccatttcctaatgagtaaggtccaaggtgttcaagttccaggcaggcctattttactgttttaaaataataaatataattctatattaatatttatatatttttataatt

SEQ ID NO: 21216 - DNA, 369 bp, Gossypium hirsutum
  unsure (1)..(369): unsure at all n locations
  Clone ID: LIB3146-030-Q1-K1-G5
caaggaatgaatgggaaaatgataaaacctgaagctggttattcgggcggcgctccttacatgtttggcgctgagagcaatgttctggaggcacgtccaacaattggggatacgtctttcagtactgtagaatcaagcactcaaccactgaatgaaccacttctggatgccgacatttcttcatttggatttttagaccagatccctcgtaatttcagtctttccgatcttacagctgatttttctcagagttcaggtttatttctctctgtcggtttgtgtggggacatgcatgttcaccataccacatatacatatatntgtctgcatgcaagcatgtgtttgtgcatcgacatcttggttgtgagt

SEQ ID NO: 21217 - DNA, 614 bp, Gossypium hirsutum
  Clone ID: GOSHI-09MAY01-C51589_1
cgcgacaagcaatggtctaggtgtagggggtgcaggagtaggttaggaatttgacagtagaagagagacggcgatgggtatagaagaatccgaaacctgctccaccgcctaaacagaaatggaggtttatgcagaaatactatcacaagggtgctttcttccagacagatgctgatgatcctgctgcaactgctggagcccaaaatatttatcaccgcgatttctctgccccgacgggtgacgacaagatggacaagacaatattgcccaaggtcatgcaagtcaagcattttggtcgtagtggcagaaccaaatggactcatcttgtcaacgaggatacaactgattggaacaatccatggacatacaacgatccccttcgggcaaaatacaatgcaaaaatggctgctgtgaatgtaccgatagcgaaacctaaaggaagcaagaagttgaaggattgggaaatgaaatgaatactggtttcaatccatgatttgattggagaggttggtgtattttgttttttttactgatgactggcatgtttcattgcaaatggtactaggggtgatgcttatgatgtaggagtttaatgaattataaaaactttgatg

SEQ ID NO: 21218 - DNA, 556 bp, Gossypium hirsutum
  Clone ID: GOSHI-09MAY01-C51499_1
cagagtttggctgttggacatgctgaagttgaggggctttcccgtattacaactgttgtccctggtgctgatgaatcaattagcaaattagtgcagcaactctataagctcgtagatatgcatgaggtacgggatcttacacagttgccatttgctgaacgagaattaatgttgataaagattgctgtgaatgccgctgctcgacgggatgtccttgacattgccaacatttttagggccaaggctgtcgatgtttctgacctgcactgtcaccctcgagcttccaggagatctggacaagatggttgcactgcagagattgttggagccctacggtatctgtgaggttgctcgaactggacgtctcgcactggtgagagagtcgggtgtcgactccagatatctacgtggttactctcttcctctataaaattttaaagtattttctaggtattggtgtgatatgtatgacatattttgctctttatatacagtttgtgttatgttttgaataatcagaactctagtgaaatagacggttttcttttattatcag

SEQ ID NO: 21219 - DNA, 800 bp, Gossypium hirsutum
  Clone ID: GOSHI-09MAY01-C51459_1
ctccgatccttctgtggttcattatttcagctctgctttgggggaagattttgagcacaccgggaggatttaccaaaagtattgtgaaaagatgagggagctgtcgctagtgatcttcgaactgttggcaatcagcttggggatagatcgtttacactacagaaaatttttcgaagatgggaattcaataatgaggtgtaattactatcccccatgcaataattctggcctcacccttggcactggccctcactctgatcctacttccttaacaattcttcaccaagatcaagtgggagggctcgaagttttcatcaataacaaatggtatgctgttcgacctcgacaagatgcctttgtcattaacattggtgatactttcatggcattatgtaacggaagatacaagagttgcctgcatagagcagtggtgaacaaggagagagagaggagatcattggtatactttgtgtgcccaaaagaagacaaaatagtgagacccccacaagatctaatgtgcagatcaggagggccaagagtgtatcctgatttcacatgctctgatttgttggacttcactcaaaatcactatagagctgacgttgctacactccaaagcttctttccttggctcctttcttctaaccctacttccaacttctagttcttctctactcccctatcttttcatataaatatcttggtttccactttgtatctatctactatagattataatatgttttaagtctctctatatttgaatttgagttttcctattttaaaaattcaagtataat

SEQ ID NO: 21220 - DNA, 554 bp, Gossypium hirsutum
  Clone ID: GOSHI-09MAY01-C51439_1
cccacgcgtcgatggattgtggttcaatttattatttttacattttctggggggctggaaaattgcttgttgattcttgcttaaaataagaaactgtttgcaatattaacttgtacatttgtgactgaaaatgggttttctttttgagttgttgctgctgttcctgatggcttgacggcatgggagatgctgaagggaagaccccataacgtatgatctcattttggcagaagtggatttgccatctatatctggatttgctcttcttacactaatcatggagcatgagctttgtaaaagcatccctgttataaggatgtcctcacaggttcctgtatgctctctatacaaatgcatgttgagaggggctgctgattaccttgttaagccagtaaggagaaatgaactgagaaacttatggcagcatgcgtggagaagacaatcatctataattgatggaaacttccccggggatgagagcattggacgcaaacaggttgaagctacctctgaaaatgatgctgcaagacaaactgataaaggaagtgatactc

SEQ ID NO: 21221 - DNA, 395 bp, Gossypium hirsutum
  Clone ID: LIB3146-034-Q1-K1-A5
atgaattcgaggtgggagacgtttgtgtgtttgagctgatgaatgaaaatggaaacttgttggaagttgtcattcatcgcaagcttttactcgtcgaaattaattaagttgtcaagtatttcaatccaaattggaattgtttgatgattttgtgtatttattcaatggaactgagagttgcggatgggaggagttggaaagttgagtatgaaagaagaggaaggagtaaatgtagaaaagcagtgtttgggggtaagagttggggacaatttgcgatggacaatgaatttgaggtgggagacgtttgtgtgtttgagctgatgaatgaaaatgggaacttgttggaagttgtcattcattgtccaaattggaactgtttgatgattttgtgtatt

SEQ ID NO: 21222 - DNA, 311 bp, Gossypium hirsutum
  Clone ID: LIB3146-034-Q1-K1-F4
atgaattcgaggtgggagacgtttgtgtgtttgagctgatgaatgaaaatggaaacttgtgggaagttgtcattcattgcaagcttttactcgtcgaaattaattaacttgtcaagtatttcaatccaaattgtaattgtttgatgattttgtgtatttattcaatggaactgagagttgctgatgggaggagttggattgttgtgtctgatagaagatgctggagttaacttactaatgcagtacttgtgggaaatatttgttgactttacgcaaataaccacaatgtctttgacttggactatcaagtg

SEQ ID NO: 21223 - DNA, 187 bp, Gossypium hirsutum
  Clone ID: GOSHI-09MAY01-C51199_1
ctagatcgcgagcggcccacgcgtccgcccacgcgtccggtctatattccttgtcaatttgttggcgatacatttaagttcgcccctgtttgtaagtctttgtttgtgctggtttgatggaacaatcgatatgatcgccttgtaatgcttcttttcatatgcacttctttcttctagtagcaaaaac

SEQ ID NO: 21224 - DNA, 691 bp, Gossypium hirsutum
  Clone ID: GOSHI-09MAY01-C51159_1
atttgtgtagtttcaggaactggattcttttgaacccatttacgaatttggatatagcacagcgaagggaccgggtttttgtttagagttataacttttttaagtgcaggaggaaacgaaggttttgaaggagctggtgggtttgggtcagctagtaatatcgggattggttgaggaatttttgcagagtaatcaacaagatttaagttcgttatgatccatgctatctatccagccatcaaagcgatcatatgcacataactcacacgtacagttaagagcccatggacaatgtcctgttttgggatctctgaacatatagtgtggtttcccatcagcagtaaagctttcagtaagctttctttttggacctggttcacagggtccacagcaacagtcttggattatctccttcctctgggtctggtactggttgcatcattaacattgtgggaaacacagaaggcgtttcagggttctacaagtgactttgatcaaatttaatttctatagttccattccttctgaaagtgatctggctctttgtggattgtattggctgattatgctcatggagcttctcataatttgtaatccatcttttaggcagtaattttatcagttttgcctttgggatttgtcttggaacatgaatacagtggagttggtcctgtgtattgaccgaaataag

SEQ ID NO: 21225 - DNA, 1224 bp, Gossypium hirsutum
  Clone ID: GOSHI-09MAY01-C51149_1
cccacgcgtccgcccacgcgtccgcaaaattttaacaatttcagagctgatctctagcttggccgggccataacacccctaatcgctcgctctcgatcagatataaaagagctgtgaattggagttcgaaagatgcctgcacagaaaatagagacaggtcatgaggatgcactccatgatgttgccatggattattatggaaaacgattggcaactgcttcatctgatactaccattaagatcattggcataactggatctagttcacagcaacttgctgttctacatggccataaaggacctgtttggggggttgcttgggcacatcccaagtttggatcaatccttgcatcgtgttcttacgatgcccaggtgataatctggaaggaaaataatcaaaacgagtggctgcaggcccatgtttttaatgatcataagtcatctgtgaactccattgcatgggcaccccatgagcttggcctctgtttggcctgcgggtcttctgatggggatatatcagtctttaccgctagggatgatggtagttgggataccaccaggatagagcaagctcaccctgttggagtaacctcagtctcgtgggcaccatcaaccgcactcggtgctttcattggatctggtctactggatcctgttcagaagctggcctctggtggatgtgacaatatggtcaaagtatggaggctgtataatgggagttggaagatggactacagccctgccctccagatgcacactgattgggtgcgggatgttgcttgggcacccaacttggggctcccaaaatccaccattgcaagtgcttctcaggatgggaaagttattatatggacttgcggtaaagaaggggaacaatggaagggtgcgattttgaaggatttcaagaccccagtttggagggtctcatggtcgctgactggaaacttattgtcggttgccgatgccaataacaatgttacattgtggaaagaaacggttgatgatgagtggcaagaagtgaatgctattgagccatgaagttccttttgtttatcctcttttctattttctctctctattaatatttttttaggtctcctctgtttcaagcccctcggtatttttgttcgaatactgggagttgcattggatagttattgggttttgttggaaatgctcagttgaaagaaagaacagatgattaatcatataacgttccccttc

SEQ ID NO: 21226 - DNA, 632 bp, Gossypium hirsutum
  Clone ID: AI730908.1
cctgcacagaaaatacacacaggtcatgaggatgcactccatcatgttgccatggattattatggacaaccattggcaactgcttcatctgatactaccattaagatcattggcataactggatctagttcacagcaacttgctgttctacttggccataaaggacctgtctggggggttgcttgggctcatcctctctttggatctatcctcgcatcctgttcttactatggccaggtgataatctcgaacgataataatccttactactggttgctcgcccatgtctttaatcatcattaatcctctgtgatctcccttgcatgggcaccccatgatctctgcctctgtttggcctgcgggtctccttatcggaatatatccgtctctactgctctggatgattgtattctggatctccccactatataacctgcccccccttcttgagtaccctccttccctgggctccttcttgctccttcggtctctctttgcatcttgttctttggattccgttcctaactctggcctcctggtccatgtttctactctgttctacctttttatggcttttttcttcggattccgatacattgtacttcctccctgcttccgccatttatcttctc

SEQ ID NO: 21227 - DNA, 357 bp, Gossypium hirsutum
  Clone ID: uC-gsflnu33B059h09b1
atttatgcctgaacagaaaatagagacaaggtaatgaggatgcactccatgatgttgccatggattattatggaaaacgatagaagacggggtgcgtcttttctaggcatcaagatcattgacacatctgtacctagtttacactatcttattgtgctacctagaccactaatggactcggcctggggtttgtacgcttgggcacatgcgaagacgcagcagtccccgcctcaagtgcttatgatgccatcccgattttcccggaggaagataatcaaaaaaagcgggtgccggtccatgtttctaatgatcatacatcatgtatgaactatgttgcacgccctctccatgagcatt

SEQ ID NO: 21228 - DNA, 545 bp, Gossypium hirsutum
  Clone ID: GOSHI-09MAY01-C51389_1
ctagctctatggacagagaccttacaaaaaagtttcagattccagcaggctcttatgggatgttcaacatcatctcccttgcactatgggttattttctatgatcgcccgatcctccccatggcatcaaagatcaagggtaaaccagtacgcattggtgtcaaactaaggatgggaattggactctttcttacctgcattgctatggtagtttcagccattgtcgagaacgcacgacgaaaggaagcaattcgatccgggtttcaaaacaaccctactgcagttgtgaaaatgtctgctatgtggcttgtgccacagttttgcctgaatggttttgctgaggccttcactgcaatagggcagacagagttcttctattccgagttacccaagagtatgtcaagcattgccgctgccctcttcggactcggattggctgtggcaaatgtgctagctagtgttgttgtgagcatcatcgacgatattacttcaaaaggcggtaaagagagttgggtttcgagcaacataaacaaaggtcgcatcgac

SEQ ID NO: 21229 - DNA, 722 bp, Gossypium hirsutum
  Clone ID: GOSHI-09MAY01-C51259_1
gccacgcgtccgcccacgcgtccgcccacgcgtccggttaagaggcttatgacagatgtaccatttggagtgcttttatgaggagggttggactcatcacttgtcgctcctgtagctgcccgtcagctagctgattcagaagttgcttgcctgtggcgatcacaattacataccttctgcattggtttgaagggttctcctgacctcaaagctgcaaaagaggtaccagattatattggaactcgttaccatgagtttcatttcactgtccaggaagggatagatgctctggaggaagttatctaccacattgaaacatatgatgtgacgactattagagccagcactcccatgtttcttatgtcaagaaaaatcaaatctttgggagtgaaaatggttctttcacgggagggttccgatgaaatctttggtggttacttgtatttccataaagcacctaacaaagaggagtttcatgaagaaacatgtcgaaagatcaaagctcttcatctttatgattgcttgagagcaaacaaatccacttccagcatggggaccttgaagcttcgggtgccctttttagataaagagttcatcaacattgcaatgagtatagatcctgagtggaaaatgataaggcctgatcttgggaggattgagaagtggatcttacgtaatgcatttgacgatgataagaagccatatctgcctaagcacatttt

SEQ ID NO: 21230 - DNA, 287 bp, Gossypium hirsutum
  Clone ID: LIB3146-025-Q1-K2-F1
tattttcttactattttcatttaaatttttttttttacttgcatttccatataacacccggcaattatgatgatcttgaataaacctctcttaatatcatagctctttattttctttatttgctgtaatctaactaatcaacttcaccatggggactagaagctcgtgtgccctttttagataaagagttcatcaacattgcaatgagtatagatcctgattggaaaatgataaggcctgatcttgggatgatagattaagtgtatcttacttaatgcatttgacta

SEQ ID NO: 21231 - DNA, 532 bp, Gossypium hirsutum
  Clone ID: GOSHI-09MAY01-C51219_1
gattgggaaacttgtatctctgtcccggactttgattggaagcagattgctgagcccgtgatgaaattgtacactgaaacgacagatggttctgccattgagactaaagagagctcccttgtgtggaactaccgagatgctgatcctgatttcggattttgccaggctaaggaacttttagatcacctcgaaagcgttcttgctaatgagccagttttggttaagagtggccagcacattgtagaagttaaacctcagggtgtgaacaagggtctggttgcggaacatctcctggtgacaatgaaacaaaagggaatgctacccgattttgttctgtgtattggggatgacaggtctgatgaggacatgtttgaggtgataatgcgagcaacggctggcccctatctctccccagtagcggatgtgtttgcttgcacggttgggcagaaatgtagcaaggccaagtactacgtggaagacagaactgagatattgagaatgtttcaggttctagccaatgcttctgaacatg

SEQ ID NO: 21232 - DNA, 484 bp, Gossypium hirsutum
  Clone ID: GOSHI-09MAY01-C52859_1
gtcgagatgcaaggtataagaaaactgaggtttgtcagacttgcagtaagttgaaaaatgtgtgtcaagtctgccttttagatcttgaatatggattgccagttcaagttcgggatactgctctaagtataaactccaatgatgccattccaaagagtgatgttaatagagagtattttgccgaggagcatgacaggagggcgagagctggtctagattacgaatcctcatatggcaaggtacgtccaaacgacactattctgaagcttcagagaacaataccttactacaagagaaaccgagcacatatttgcagtttctatgtgcggggtgaatgtacaagaagtgctgagtgcccttataggcatgagatgccggaagctggggagttgtcccagcaaaatataaaagaccgttactatggggtgaatgatccagtggcactaaagctacttaacaaggctggtgaaatgcctttctttga

SEQ ID NO: 21233 - DNA, 846 bp, Gossypium hirsutum
  Clone ID: GOSHI-09MAY01-C52819_1
gcattatgctaatgaaatcaacatgggtttcgatatcgaaatagttagcctcgaggcattgaattcgtgttcttggtcttcattgcccctgcatttcggtgaaaacgaaacgattgctgttaatctaccgatcggttctttttccaattacccttcaactctccccttgatcctccgtttcgtaaagcaattatcacccaaaatcgttgtctcgtctgaccgtggctgtgaccgaaccgatgtcccgttccctcatcacataatccatgcactcctatcgtactctggcctcctcgagtcccttgatgcggtgaacatgaaccttgatgccttggaaaagattgaaaggttcttccttcaaccaagcattgaaaaaatcgtgttgggtcgacatcggtctcttgaaagaagacctccatggaggagtttgtttatacaatccggattctctccattacctttcagtaccttcaccgagtctcaagccgagtgtttgattcaaccaactccgattagaggtttcctcgtcgagaagaggcgagtcttcgctcgttctttgttggcagagacgtgaactaatcgccgcttcagcttggaggtgctgataatgatacccggttttcgcccggaacctaatgcatttttagtttactgatatctttgttttaccttgaaatttttgttttgccttgtgattctcttaaaaaagctcattgtccattatgcaccattaggtccctactgcttcaaatcaaaatccaaactccttttacctaaatgctgcagggctatgtacagcttacttccgatgtgtgaattaactgttttgggttcgttttactctct

SEQ ID NO: 21234 - DNA, 1711 bp, Gossypium hirsutum
  Clone ID: GOSHI-09MAY01-C52839_1
ctattttaaaaaactgacactattattttaatagtagattattcttctctttttctctcgtctgtttcttttagcagttttttgggtcaaattttttcgactaatttttttttcccgattcttttctagaaaacctttataaatattgaagttctgtgttaacgttaggggcgatcttcactacaagattacggcgaatttacttctaagacagcgatttttagatgccgcagtgattattttatatgtttacatttagtttattttccctgctaatgattttgttttgcagtaggatattttcaacatctctaacactgtctctggctctgctgatcatctgagttctgagttgcagttctctttggttaaagcaaatggaagatacatgtaaggattgtagggactgggaagaggaaatcttttggacccattttcagtgtgtacatttctcacaatttctccatggtgattttcttcagcggttggaaataccagaaaagtttgctaagaacatcaagaaaaagcttccagaaactgtgactcttaaaggtcctagtggtagcatatgggatgtaagactgacagtagatgatgatgataccttgtttttcaacggtggatggaaaacttttgtaaaagaccattcattggttgcaaatgattttttgatcttcaaatacaatggagtgtcccattttgatgttctaatgtttgatggcaagagcttgtgtgaaaaagcttcttcttatttcgtgaggaagtgtatgcatacagaatctgatgccactcaccaaactaaaaggaaggtgaatgaaaatagtgatgaaattttgcacaattcttctcaatgtggcctcgaaagcggtcctgaaaaatcgactaacaatgacatggatgcgaggccctcaagaaaacctatcaactctgcagctagtaaaaagaagatccgaaattcagataatggtactcggtctatccatgcgaagcagagccttgtaggcaaagaacttcctacttttcctggagaagtgaaggtcgaaagacttgaaactgagtatgaacatacaacaatggatggcgatggcgatgtctttggcttgtggcacacaacgggtaaaaggttcgtgactcaattcgagaaaacgaatgtcctcttaaaggcacaagaagcattaaccaatgaaggatttatgataattatgaagcccacacatgttgggagacggttttatatggctgtccctactgcatgggtggctaaatatctcccgaaagataatgcggatgtgattcttcgaatgaacaaacgtacatggaagacccgattttattatcacagaagccgtgattgtggaggtctttcaggtggatggaggaactttgtgaacgacaacaacttagaggaacatgatgtgtgtgtatttcagcctgcaaatataggaaagtaaaccaatgaatcctggatgttaacattttccatgttctccaaaaagcagttccactgagccaagcagacccactcccgagctcacccgagctaatagcatcaacgccggacatggattcgtgattcagtcagtagatgttaatagtttctaaatagcagttaatctgctttgctagtagcctactggaaaacacgacttgattgtaattatatatgttcagttttagcaaacaatgtagttctaggagcctgttttatctc

SEQ ID NO: 21235 - DNA, 204 bp, Gossypium hirsutum
  Clone ID: LIB3582-002-P1-K1-C12
ataacttacaacttttgggtttttctttttattttcttccattttctttgacttctggggggaacccattaagttctctttggttaaagcaaatggaagatacatgtaaggattgtagggactgggaagaggaaatcttttggacccattttcagtgcgtacatttctcacaatttctccatggtgaatatattcctcgggtgg

SEQ ID NO: 21236 - DNA, 1231 bp, Gossypium hirsutum
  Clone ID: GOSHI-09MAY01-C52529_1
gaggcgagaccctccggcctcctcttccaggagacccaaggaacagaacaagaacaagaagaagcataaggagaagagcaacaggaaccgctgacaaagacgcaaaaaaatccattaaaaaaccagagaagaaagcaagtgcctccaaaatacctaccaaatcaaagccaaagcccgaattaaagcgcgggcaaaagcaaaaacaagagcagcaatggaatcccagtcaagtcccaggttattgccgacccatcttcaagctctgaatcagaacccgaagaaaacagaaacaactaccacaagaacgttaaacccgacagcaaaagaaagcgaaaggaagaagtagacgaggaagaagaagaagcaaaggtgtgtagatttccaatgaacagaatcaagaggataatcaagactgaagattcacatatggctgtttctccaagatgttgtttttcttgttaacaaagccgcggaattgtttcttgaaaagttctgcgaagatggatacaaatgctccattaaagatcgcaagaaatcacttagttacaagcacctatcaacagttgtccatgaacagaagagatatgactttctatcagattatgtccctcagaaaataaaagctgaggatgcattaaaagtgatgaatttacccgcgcctgggcgggcgcgggggcttggatgatcaaggcactggcctgcttttaagcaaactaggacatcattggcttgtttatggttctaagttggaagaagatattggtgctgtactgtaacttgtttcggtaacacgggatttgatctctgagctcgcctgcatgccaatgtttcgctaacatgaattactgcatgtccgtacttttttgagatggtgaaatgaaaatgatgaagatatgataggttagtcataaatgatcattttcccccgcttctagcatagttttggggggcacgtaatatattgcttttatatcataagattgtgatgaaagatccgataacaaagaaattttttttgcccccccaacccttgatgctaaaacaaagaaaaaactgtttagtttcttataatttgatttccaatgaattatatcggtgcttgaaccgtctaggaagcagtaaagcttttatattttctgccaatgcccagcccaattgacatggcacgaatacaaagtccctctatttcaataaaaatgtcacattttcagtaaaaaaaaaaaaaggcgcc

SEQ ID NO: 21237 - DNA, 262 bp, Gossypium hirsutum
  Clone ID: uC-gsflmaxxa096a06b1
gcactgttctgcttttaagcaaactaggacatcatgggggggtttatgtgaagaagttggtagtagacaccggtgctgaactgtaacttgtttcggtaacacgggatttgatctctgagctcgcctgcatgccaatgtttcgctaacatgaattactgcatgtacgtacttttttgagatggtgaaacgaaactgatgtaaatatgatgggttcgtccttaattacaagatatgcggatcaagccgctatggcaaaaactat

SEQ ID NO: 21238 - DNA, 463 bp, Gossypium hirsutum
  Clone ID: GOSHI-09MAY01-C52499_1
cgtccgtttccctttcacttccttcctcgctttgtagcaattaagccaatggcaaaacttgtggctgctttcttcttggctctcattgccatctccatgcttcaagttatggtcttggcatcgcacggacatggaggtcatcattatgatcaaaaacattacggccctggaagcctcaagagttaccaatgtccatcacagtgctcgaggagatgcagcaaaacccaataccataaaccatgcatgttcttctgtcagaaatgttgcaacaaatgcctgtgtgtgccccctggttattatgggaacaaagctgtttgcccttgctacaacaattggaagaccaaagaaggaggacccaagtgcccttaaaaattcttatttcataatttatgcctaatgcttactgctaaccaacatatgtttggtgtttaatcatatggttattattacggctgtttttttt

SEQ ID NO: 21239 - DNA, 443 bp, Gossypium hirsutum
  Clone ID: uC-gsflnu33B062h12b1
ttcccacgtttccgattactgactcgctttgaagcacggaagccaatggcaaaacttgtggcggcgtccttactggctttcattggcatctccatgcttgaagcgatgggcttggcatcccacggacatggaggtcatcattatgatcaaaaacattacggcccttgaagcctcaagagttaccaatgtccattacagtgctcgaggagatgcagcaaaacccaataccataaaccatgcatgttcttctgtcagaaatgctgcaacaaatgcctctgtgtgccccctggctattatgggaacaaagctgattgcccttgctacaacaattggaagaccaaagaaggaggacccaagtgcccttaaaaattcttatttcataatttatgcctaatgcttacattgttattattaccgactgttttttttttttggaaatgtga

SEQ ID NO: 21240 - DNA, 418 bp, Gossypium hirsutum
  Clone ID: LIB3146-047-Q1-K1-G3
ctcttccttcattacatcacattccttactcgctttgtagcaattaagccaatggcaaaacttgtggctgctttcttcttggctctcattgccatctccatgcttcaagttatggtcttggcatcgcacggacatggaggtcatcattatgatcaaaaacattacggccctggaagcctcaagagttaccgtaagcaaacttcaactcatctcacatttttcttttgcttttctcttaaagatctcatctgaaacattggaaaacagtaacatggtaaaaaagaaaaaaaagaaagaaagaaaacccagtagtaaaaagtttcataaatattactctttcttgaatggatgagcagaatgtccatcacagtgctcgaagagatgcagcaaaacccaataccataaaccatgcatgttc

SEQ ID NO: 21241 - DNA, 436 bp, Gossypium hirsutum
  Clone ID: GOSHI-09MAY01-C52489_1
ggctttcttttgcagacgctgcggtcaacagaggcacggccgcccccgcgtccggcaagtaggggatgcctcgggagacgagtgcgctagagtcacatgggcagcaacggcgcataggaaaggagggaaccctaggattccctggtgttgtttagtttttgggctctattgggccgtttagggttttagattactttgggccatgttgggccattaaggatttgggtaagtagtttgttattttattttgttttgtaattggactcttattgggctagtcaaaaattggggcgtgtacatcaatattttaacatttttatttatatattaaaattccaaatatgttataagtttgacggataaaactcaaaattgtacatcaactttatccaatgtgcaatttgatatttttttaaaaaaaaaaaaaaaaggggcg

SEQ ID NO: 21242 - DNA, 1166 bp, Gossypium hirsutum
  Clone ID: GOSHI-09MAY01-C52439_1
caggaggaaatgcacgttgtattgcaatgctgcaggcatttcaggaggctatcagagactattccacaccacctgaaaaaaccctcaccagagatttaacttccaaaattggtggttttgtttcttttctgattgaatgccgcccactttctatgagtatgggaaatgcaatcaggtttctgaagagtcgtattgccaggttaccactaactctctctgaatcagaagcaaaaacaaccctttgttctgacattgatcgtttcataaatgagaagatagtgcttgctgataaggtgatacttagacatgctgctacaaaaatcagagatggtgatgttcttctgacatatggatcatcatgtgttgttgaaatgattcttttgtatgcccatgagcttgggaaacaatttcgtgttgtggtggtagactcgcatccgatgcttgaaggccaaaagctacttcgtaggctggtggtaaagggccttagttgtacttatactcaattaaatgctatttcttatgtcatgcacaaagtcactcgagtttttcttggggcttcctctatattttctaatgggactgtatattcgacggttggaactgcatctgttgctatggttgctcatgcatttcgtgttccagttttggtctgctgtgaagcatataaatttcatgaaagggtgcaacttgattcaatctgctttaatgagttaggtgatccagatgccatatcaaaggtcccaggaagagtggatgtgaattatttggataacttgactgataaacagaaggaaaaccttgaacttcttaatttaaaatatgatgccactccttcagattacatctcagtgattgtcacagattatggcatgatccctcccccaagtgtccctgtcattgtgcgtgggtatcggaaggagtccttgttgatatagagttctcccatgtttttccccaagtaaagctcttaccatagattcataaatggattccttttcgggaagccggatctatgatttatgcccctttagccccttagtttaggccctttcttgttctttctttcccccaaaatcataattttatccccttgtcaaattaaccccattcttaaaaacccccctgtatctgtaatggtaattttggcgtttgttgtgttggatgat

SEQ ID NO: 21243 - DNA, 412 bp, Gossypium hirsutum
  Clone ID: uC-gsronu33B103e08b1
cccactcgtccggtttcacttggctagcagccgacatgcaaatagctccatcaaaggctgacgacatgcgatcaacggctaaatccttgcccacgcaagtcgcaaccatggagatccggatcatccgtacggaggagcggggagaggtatgcttgaaagaagccgtgcgaggaaaccgctcgtgagacccaaccccctggcactgttctggcatgttccagaagcttttggtgcttgactgttggaattctttttgaatttgggctatacgggctaggggtttatgaatctgggtatttgggctggtaaaaatttgcaaaaggacattggtatttggattttcttgtctgggggtttttttaatttatttttttggtttttttaatttctatttttcattctaatggccccg

SEQ ID NO: 21244 - DNA, 408 bp, Gossypium hirsutum
  Clone ID: LIB3146-048-Q1-K1-A11
cgcacgcgtccgcccacgcgttcggaaaaattattcccttgctttactagactttatccgagggggcaaccactaacctccagtaatttggtggctaatagcacagacaatggacagatcttacccatggatgccaagacttttgggaatctggatcatccgtatggaggagcggggagaggcacgcgtaaaagaagccgtgcgaggaaaccgctcgtgagacccaaccccctggcactgttctggcatgttccagaagcttccggtgcttggctgctggaattccttttgaatttgggctatacgagctaggggtttatgaatttgggtttattgatggattaaaaaatgtaaatggactggactcttaaattattttggctttatttatattcttatttgattcat

SEQ ID NO: 21245 - DNA, 1035 bp, Gossypium hirsutum
  Clone ID: GOSHI-09MAY01-C52139_1
cgatccccgagtgtaataaagggatgaagaagatgaggttcctgaattggtacctattgctagtgagatggaattgaatatctctaatggtgcttcagagctggttgaagctaatggcaatggttctgtcagaaaggcttcaaagaagagcaagaaggcgaaaaaatcaactggggacagtggtaaaaagaccaagaaaaacaacaatgctaaatatacagctgcagataaggagaacaatgttatggtaccagcagaaagtgccagttctaatattgagaagaatggtgaaggtgattcaataacatttactgaatcagtgatttcgaaccttcagctccagtttgagaaggttgctgaagaagtaggcttgaatagtgatgttgcaagtgcctgtgatttgcctaaagtcaatggtactgtctccaagaagagaaagagaggaaagcatatggatggcaaaaaatctcagaatggggaggaaaccaatcaaggggaggatgaaattgatgcaactgcaaaatcttgcgagaacagcacaaagagggtaagattttcaatgaaaaacagcatagtttggaaaccccacagccctttacctccactaagcttgagaataccgccctctgtcattcctagaggaagtgctcttaagaaaggtttacctccaggtcctataagggaaatgcctcttatgacaaagaaggtaaagaaagctaaatctgtgaaaaaggttcggaaagtagtaaagggcatgcatcctctagtcaaacgctccaagaagttgaaatcaaagtccccctagcagactatgctttatcatgggaaaaaaaggttttgcatgcatagtcattaaaattcttctaaatttggttggttttgctcttgtttctcccctggttagactttccatcacacatgttctttgactttatagacttttggtctttgaatactcgactgtgatgagaagttaatttatacatgtctggaagatggaccttggaatgaatcatattctttgctttctggtgg

SEQ ID NO: 21246 - DNA, 440 bp, Gossypium hirsutum
  Clone ID: GOSHI-09MAY01-C52309_1
ctttgtctcaatttcactgaattttcttaccgacttctctgcattttccctcttctctcccttcacattggaggaactgaaccaaaagccaagaagcagtaggattgaacaaaggaatagaaaatatgcactctttcgggcacagattaaatggtctcttaaccttttccgtgacgatactggcaataatgtgtgctatcgcgtctctctcggacaaccttaatactccttctcccacggcagaaatcaagattatgaacataaactggttccagaagcagccgcagggtaatgacgaggtcagcctgacaatgaatatatcggctgatttgcagtcattgttcacatggaacacaaaacagcttttcatatttgttgcagctgagtacgaaaccccaaagaattctttgaatcaggtctcactttgggatgctataata

SEQ ID NO: 21247 - DNA, 893 bp, Gossypium hirsutum
  Clone ID: GOSHI-09MAY01-C52289_1
ctacctttcccccttttcctttaagccctcaatcaacttccaatccctttgtattttcttctttgctttagagaaaacaacactggagagcccatccatggctgcctgtggaaccattaaacacatctttgaaaacccattacctgaaaaccctactttgcttgaatccctttcttcttcttcttcatggaagcctgggattaaaccccttgaccaaaaaccttctttcactgaattctttggtgaacttcatttccaggaaaatttaagtatttcccactcttcttctactacctcttcctttcctacattgaaggtctccaggagtattggtgtttattcccatggaaatggtgaaaacagttctaattgccataagaagagtgatagcttctcgttgaaccctgagagcctccagctgtgtactgaagagcttggatttgagagctcctatggtgttgaagaggtgaacaatgagatgaaccaagactgggaaagcaaaaagacgaaagcaccatcaccaacaacaaagcattcaacaatggagaatcagaatggtgaaatgaagaggtcaagagcaagtagtggaggaggatttccaccgccgatttcatgtattgggaaaagtgggaagccatggttttgctttaaatcttacaggcaagatggcagatttgtgctgaaacaggtgaggatccccacgcaagaattcttgcatgcgtgtagggaagatgggcgtttgaagctgcaatttgtgcagcctaatgatgaacaagttttggaagatgaagattttgaggatgatgatgatttagaagatgaaatgataaatggtgatattgatgaagaagatagtgaacaagtttcataaataattacaatcaccggtaacc

SEQ ID NO: 21248 - DNA, 849 bp, Gossypium hirsutum
  Clone ID: GOSHI-09MAY01-C52219_1
cgcctctgttttcattttagaaattgtttcaatcaaattttctcttttatcttttgggttagcaagaaacgtgttctgtcatcgtaatcattgattgaatcgaattttgatccgccatggctgcaaagattcttgccaacttaatcgtaatgggctcgggtatttttgctcgtgctgttgttcaggcataccggcaagcacttgcaaatgctgccaattccggtgttactcatgagacactacaaaatgctgcccgtagagctggcaaagtcatgacagagcaagaagcgaagcagattcttggtgtaagcgaggatactgcttgggaggagataatgaagaagtatgatgtcttattcgagaagaacgccaaggtcgggagcttctaccttcagtcaaaggttcatagggctaaagagtgcttagaagccatctatcgagccaaaggagaaggcactcctcctagttgaggatgaggatttgtccaggtttgctcatttcacatacagatgcccgcttgtagactaattctcgtcctacgaaaatggtttcaaagatttaaatcatatgcacagcccatcgtgctcctccccattcctgggttcaaacttcaaacactgattcattcaaattttgtgtccttgatgttaaattagttgagtggttgcaaataataactaaggttttcataaaccgtctattgcagttgttgtgctcattgttaattaaatacacagtagattagttgaaacttgaggcactgataaaaagtatgtaagaaacttcatgtaaagataccaagagcttgaatttgattaaatatccatgtgtttttcttcaaaaaaaaaa

SEQ ID NO: 21249 - DNA, 655 bp, Gossypium hirsutum
  Clone ID: GOSHI-09MAY01-C53889_1
cgcgtccgcccacgcgtccgcccacgcgtccgtccacgcgtccgctaaaaagaagtttttacgtttgtttcaagtttcatttcttcctcgaaagtctctctttttgccctcggattcataagttcccatggcttctgaaactgaagcacctgaaatttcttctttgtttgagaggttgttgaggcacagagacctctatttctttctcccttttatcttgggtgtctctaacaacagtgtttccagagaaaacagtgaaaacccagatcaagaaacctcacaggaaacgacttcccaacgtgaaaggataatccttgtcaacccatttactcaaggtatggtggtggttgaaggagatccgaatttggaggctttgctacgtggttgggctaacaaggatggccagccgcctgcttcaaaagcatctatagaagccatgccaagtgtgaaaattggtgaaagtgaagatggggagtgtgttgtttgcttggaagagtggaagcctggtgaggtggtaaaggagatgccttgcaagcacaagtttcatgatgagtgcatacagaagtggcttggaattcatggatcatgccctgtttgcaggtataagatgcctgttgattaagaagatatgggtaagaagagagatgaggagagg

SEQ ID NO: 21250 - DNA, 485 bp, Gossypium hirsutum
  Clone ID: GOSHI-09MAY01-C53469_1
ctgagacctacttcttctcttagttcagcattaaatatgctagttcaagctcgagtaagttcaatgcctatagttgacgataatgactcattactggacatatattctcggagtgacataacggcattggcgaaaggcagagctcatacacataatctgaatgaaatgactgtgtatcaggcattgcaattgggtcaagattccaacagtccttatgagccaagaactcaaagatttcagatgtgtttgcataccgatacattgcttaaagtgatggaacaattggcaaaccctggtgtcaggcgacttgttatcgtggaagccggcagtaaccgcgtagaaggcattatctcgctgagcgatgttttcaggttcttgctcggttagtccgaaataatttacagatgaactatctaggagaggtgagtttttgcagtggcatttggactcccatgtcttgtgggcaacattccaaggccccaatg

SEQ ID NO: 21251 - DNA, 429 bp, Gossypium hirsutum
  Clone ID: LIB3149-026-Q1-K1-C8
gtcggagtgacataacggctttggcaaaaggcagagcttatacgcataatctaaacgaaatgaccatttatcaggcattgcaattgggacaagattcaaacactccttatgagatgagaagtcaaagatgtcagatgtgtttgcgcactgatacattgcttaaagtgatggaacaattggcaaaccctggtgttcgacggcttgtcattgtggaagccggcagtaaccgtgtagaaggcgtcgtgtcgcttacggacgtttttaggttcttgcttggttagttagaagtaattgcagataacttttatctagaagcagttttttttgcattggactcccatttcttgtgggcaccataccctgcccctaatgttccatagagactgcaatatttaaaaaccaatgatcatcgaatctcattcaacaatt

SEQ ID NO: 21252 - DNA, 921 bp, Gossypium hirsutum
  Clone ID: GOSHI-09MAY01-C53429_1
acccgaacttgttctgtctttcaaaaccagcaaccggacgaccccaatgcataaaacccacagtttttccctacccaaacccgaaaacactcccctctataaaacacactccaatccacattagacactcaaaaattccatcttcaatttctcaaggttgtttttcttttatcaactgttccaatccaaactcatagattcaatggccgaggatgacgttgtagctaaggatcgcaaaatcctggtggccgtcgatgaaggtgaggagagcacgaacgctctctcatggtgcctcaagaacgtgatttctcacacttcgaaagatacccttgtcctcctttacgctaaacctccacgagccgtatacacttccctagatggcacggggtatttgttttcttctgatattttggccaccatggacaagtacagcaacgatgtggcggattgtgtcatcgagaaggccaaaagggtgtgcagagagcaaggtgatcctgaggttaaagtagaggtgataatagagagcggtgatccaagggacgtgatttgccaggttgccgacaagatcaatgctgatgtgcttgttatgggaagccatggctatggcctgattaagagggcattcttggggagtgtaagcaatcactgtgcacaaaacgtgaagtgccctgttttgattgttaagaagcccacatgttcgtcttctgcaagtggaaccaaatgattgaaatttcggattacatagtcatactttgctttgtttatgtacaaatttcactttagtgggtatgtttctggtcttggttttcttttctcatatctttgtctgcttcattactttgttgtataaggttttatttatctctgaatgtacttttcatatttgaattaaaaagagtcccattatacattattgggaat

SEQ ID NO: 21253 - DNA, 648 bp, Gossypium hirsutum
  Clone ID: GOSHI-09MAY01-C53699_1
tgactggagaaatgacactgagaggtcttgtgttacctgtcggtggtattaaggataagatactagcagcacaccgtcatggtatcaagagagttattctaccagagagaaatctaaaggacttagttgaagtacctgcgtctgtgctttccaacctagagattctgctggccaagcgaatggaagatgtgttggagcaggcgtttgatgggggatccccatggagacaacactcaaaattatgacaaagctgcttcaagcatgtctctggtgaccaaattgtttgttcggggctttgtctgttcacagattccaattatttatagtcttgtttggaaataaagctcagctgtcatggaccttttgcaaataaggcttatatacctctgttgggaagcttcgggtggaaattgctggtatgcgtttcccttttccttttcttttaacacactgaatttcggaggctagcatacagctccccttgtaaaaagaaatcgttttccttcatttttcttcctgtataatttaataacattatagtcttacgtgtttaagatttatgtgtaaataagattacatatactatttataaaccaaggatgagatgtgattattataatgaaagcacgcaaggcaacctaacatttc

SEQ ID NO: 21254 - DNA, 647 bp, Gossypium hirsutum
  Clone ID: GOSHI-09MAY01-C53089_1
cgtttcatttcctcttcatcaacttccttcaatcagaattttgtggccatctccctcttagatccggtgttcttctctcgtctctcccaccaggctaatgcttctgctacaaatggagaggaaacgttggagtgaagagtagactttgagactgtgatttccccattctgacctcgggctaccattcctgacgctgatctagagttgttgatatcaaaagctgcatcaaactgtatagactcccgtagctccacctctctttgttcggatctaacggccgtagagataacccataaggcacaaaaaaatactcagatctactcctttgtacctctgctgaatacccaggacattgcctaaacacatggaagctatcttcttctgcagaacagtatcgtggacaccttacattagtggtcactctcttatatctgatattaactagtgaagggatgtagttccaggaaattcgccatatgagaattaggatttttgttagtaattgtaaattccataattttctgtagaaatctttagtttcgacctgtattaaatagttataatgatccaagctagcttcttataatagtttgtaggcacttctaactgtaaattctccggagagttcccctttccacactttcatg

SEQ ID NO: 21255 - DNA, 537 bp, Gossypium hirsutum
  unsure (1)..(537): unsure at all n locations
  Clone ID: LIB3585-041-P1-K1-A12
cccacgcgtccgtttttccgtttcatttcctcttcatcaacttccttcaatcagaattttgtggccatctcggtctgagatccggtgttcttctctcgtctctcccaccaggcctaatttggttgcctctaaacatgctaatgcttctgctacaaatggagaggaaacgttggagtgaagagtagactttgagactgtgatttccccattctgacctcgggctaccattcctgacgctgatctagagttgttgatatcaaaagctgcatcaaactgtatagactcccgtagctccacctctctttgttcggatctaacggccgtagagataacccataaggcacaaaaaaatactcaaatctactnccttgtacctctgctgaatacccaggacattgcctaaacacatggaagctatcttcttttgcagaacagtatcgtggacaccttacattagtggtcactctcttatatctgatattaactagtgaagggatgtagttccaggaaattcgccatatgagaattaggattttt

SEQ ID NO: 21256 - DNA, 634 bp, Gossypium hirsutum
  Clone ID: GOSHI-09MAY01-C53399_1
gaacgagtgggttatttgtagagtattacaaaagagtcccaatggcacaaaggtaccatatgtcaggtttgcctccactaatggatccctcgccgcacaccagcgaaacatgaaccgtggtgggcgccggcgagacgtcaaacgtgacctgcttctccgatccaatagaagcaccgtagagctgtggtaggaattgatggacagctttcgacactttccttgcaccttgttcatcatcctctgtgaattctcttcaaaaagcttcctacaccacctaccaaatcacgtcgatcatgggaaacttgcagtacccggattggttttggattcaacaaccgtccttattgaagacattaattctaagcctaagattttcgttagaatttatattttaactgaatatattcttatatatttatcatgttatttatcatctatatgtattaatttatctatttatgattcttttggaatcatttacatcgatgttaattacatgtattaaaattattttatatttaattatattttaatatgtataatttaatgtatgtaacaatattttatatatgtgtttatttgagattcattttgtatttgtataattttatgattagaatatattatagttaat

SEQ ID NO: 21257 - DNA, 583 bp, Gossypium hirsutum
  Clone ID: GOSHI-09MAY01-C53299_1
cttaactgtatctactctatcgcttccgtgatttagtttctcttttgaggacatcaatagtgttcgaaggggggcttcaattggtccttcgattgacttggtcattcatatccacccaagagaaaatcggacaactggctttgaggcgacaagttctggcgttgaccgacacagcagcctccagaatacgtcaccttcttcaacagcggcaaagatcgtcccttcgattgggtgctaaggctcgtggctgcaacggtttatcgtacaccctcagtggcgccgatgagaaaggaaagtttgatgaattaggtgaggacaagggcgtcaaaatattaattgatccaaaagctttgatgcatgtgattgggaccaagatggattttgtagatgataaactgaggtctgagttcattgttatcatcccaaactccagagggcattgtggatgtggcgaatctttcatgacaacagttggttgcacagctaatcacggtggtaattgacgatttcatcacccatgtcataagataagactttaattaaccttgatgataccaggatgcttgctttcctaaattcacca

SEQ ID NO: 21258 - DNA, 650 bp, Gossypium hirsutum
  Clone ID: GOSHI-09MAY01-C48959_1
aggcatctcactttgtggttattcatttgcatctgagattggctagtgtagggatatagtttcaggatatccaccaaaatagaagtagaattttttatggaagttgtaaattccatggttttctgtagaattctttagtatcggtttgtaataaatagctattaggatctgaattagtatcttgtaatagtttataggagctccgtactgtcagaaggttcacctttccaaacaagcatgtcttcacagtctgttactgcaagtggaatctgcaaaattcattgagcaatgtccgtttgaaaggttctacccgtggaatccaccaatccatccaaattgagatgtggcatttcctctcccaactctccaacttagcccttgaagaagaagtcattttgcagcccaaatactcttctagggacacaacacagataaccaaaagaaaagacagaagaaacaaggaaacctaaattcttgccagaggcagcagacacaagcgtgctaggatagtagacttattaacaattgattattaattatcctattaactaaaagttattattaatgattaaatggtggaaggaaagagaaagataatttctttcatcttttttatttcactaaacgaccaaacaaaagaaagaatattt

SEQ ID NO: 21259 - DNA, 506 bp, Gossypium hirsutum
  Clone ID: GOSHI-09MAY01-C48559_1
tgaagttacatataatgtttccataatcaattaggcgacactaaaccctctctgccggcctgctcccttactccattgtggtaagtaaattggcgacggttccaggacagctgatttgcgagatcgtgatgagaaacaactgtttcttggtgatggagttcggtcgaggcaccgccggcattcagttcagtaaggagagcatcaatctctacaatcttaactcttacaagcactctggtcttgctaacaagaagactgtaactgttcagcctggtgggaaggatcaatcagtgttacttgccaccacaaagactaagaagcagaacaaacctgcaagtgtgcttcataaatctggtatgagaaaagagtttcctaggttggctaatgctgttgtcaaccaggttgtagataatcactaccgaccggacttgaagatagccagccttgccaagacttagtgcttgtcacaggagcctgaaggtcgccaaatttcggggtcatgaaga

SEQ ID NO: 21260 - DNA, 1013 bp, Gossypium hirsutum
  Clone ID: GOSHI-09MAY01-C48699_1
gttctgaatctttcgcttgcaggctttctccctatcacataaacactctggggcggcgactcttgagaaaagaagcaaaataagactattgattggtgggtaaactataggaaacgtatccggtactctttaattgtggctcttcccgagcgctgctatatctaatctccgtatcaatgcatgatggatacctggaaatggcgggggtcccgtcacaacaataggaaaaaggcaatccgatttgaaaaagtctttcaagctccccgcgcgcccgcttctcactactatgccctacacaggaattcagcaaagcgtttccaaaattttcgagtgtcgagcaagaacatctccaccagctttctattcaggtcattacctctttacatgggaatatagaggacgaatttgagtctttatgcaatgaaacacaggtaggagatgcccttgataccgtggagcaacttgtggaagaacaatctcttgaccctttgtcttcagataggactaccgtaatggatgcagtgcacaatctgtcagcagcgaagaaagctgagatccattacttaagaggcctgctggaaagggctgaagaacataatcggcttattcaagctcgggtggacctacttaggaataagacacaagaagtcccggacataaaagatgttattgggaagttgagaggtggaattctcaagttccaagggaacacaaaatgtggagctttaaatggtctgcaactggtggggctggcaaagtgtatctcagactgcagtgactgagaagctgcatggagcggttaatagttaatacgtatttgtagtgagatggtgttaaaccttaagcgtggttgtaataagtaaatacattgcgagttctaaacctacttctacttgtttgggtaaagcaaaatgatgagtgtcgggatttgggtgagtcgaaaggtgtatagttggatttagacggtaaggccagcaagaatgaatcaagaaattgcaatgttggattgatat

SEQ ID NO: 21261 - DNA, 584 bp, Gossypium hirsutum
  Clone ID: GOSHI-09MAY01-C48159_1
gcgttcggactgatggattaaagctgcaggaatggggtttgtaatttcactgaaggtgccatgggttctttgcctcaattacgctgaccaccaaaagctatagaagctgccaaacaggcaggaaaagtcccagatgttttctactgtctcaagttgttggaggcaacaggcatctccactggcccgggcgtccggattcggacaaaaagaaggggtgttccacttgaggactacaattctacctgctgaggaagacatgcctgaaatcatgtcgagtttcaagaaattcaacgacgagttcatggctcaatatgaagataactggaatcgttcaaggatgtgaagcatgtttagaagtccttaatactgtatttatctattaactagctatggcaaaccactctataatacgttgtaaaactttgttcatgttctccttgtccttgagctgtaaacttaaatcctactgaagatttgcccctgcttctctctttcctttttctctaatgacatctctcatggaatctctactactgaattatggatctcttttgcaaaatcaaaaaaaaaaaaaaaggcggccg

SEQ ID NO: 21262 - DNA, 509 bp, Gossypium hirsutum
  Clone ID: GOSHI-09MAY01-C48119_1
cccacgcgtccgcccacgcgtccggggattcatgggtggtgaaattgccttgtttttgattgaagaattcagtgttcctgttgattgtattacctttttggtgcttctctttaattttgctgttattggtgtttgggctgggtttatgtcaaaaatgccaattattgtgactcaaggctacttggttttaattggaatgttggttgcttattggtttactcttttgcctgaatggactacttgggtgttattggttgcaatggcattgtatgatcttgctgctgttttattgcctgttggtcctttaaggctccttgttgagcttgctatgtctagggatgaagatttcccagctttggtttatgaggctaggccagttacacatcatgattctgctttaaggccggttcaaaccctgattttgagagaaaggctaaatgctaggcttgattcagaagacagttcaagttttaattctgatttgaattctacaatcaattattgttcaa

SEQ ID NO: 21263 - DNA, 663 bp, Gossypium hirsutum
  Clone ID: GOSHI-09MAY01-C48099_1
cccacgcgtccgcccacgcgtccgcaaaactctatcaaagaccaaaagtccagattttccttggaaatggacttttctcatcaaaaccctaactctaaccctaattacactttcttccctgaaaacgtcaatcccatgcccgattttgaggtctccgattatctcgatcttgacggcagtatcttcgacgacgatacatcgtcggagaaaggcatggctgcagctactgaacttagtggtgcaacatcaaaaaatagtaacagaaaatgcaaaaatggagtggggaaaaacaaatcggaactgggggtacgagttgcgtttagaatgaaatcagagatggaggtgaccgatgatggatacaaatggaggaaatatgggaaaaaatccatcaagaacagccccaatccaggaactatataaatgtcaagtgtaggatgcaatgtgaagaagaggatagaagggacgtaaaggaacaaagttatgtggtaactacatatgaaaggagttcacaatcatgagaccccatccatggtttactacaaccaaatgtccattatggctctaatgcttggacctttcaaagctctctctcttcttctttacatgaaagaaaactattcatacaacatacatattatatataatcctagaatatatatctgt

SEQ ID NO: 21264 - DNA, 663 bp, Gossypium hirsutum
  Clone ID: GOSHI-09MAY01-C48069_1
cccacgcaaccgaattctcgcccttctccttctcagattaaagcagcttatagaaggaaagggtgggaatcgcatcctgacttgtttcccgttcacgaaaagcgttcggcggagtctaagtttaagttgattgctgaagcttatacttgtctacagtctggttcaggaagagaaggttcgtactcagctacatattcacgtgtcgtcagaacgggagtaccaaaggctcatgggggaagaagaaaccgtggtttgattcagattcctttccttcttatagttctgggaactgttggacttgggggattaaatgcaaccagggcttatagaaagcaaaaagaggcatgcccttctcacaatccattcctcccctgaccaagacattattctgttttctcatttggtatcggtatggaagattcaatttatgttagccttatgtatcagatgtgttatagccgataagtataagcgcaaatttgggttatataatcttcaaaaagaaaaaagaggttatataggattccttttgacctcgatcggtttaaatagagatgcgaataagtaatcacagtgagcgaatttcataatgtaaattctacattgtacgttgtactcatgtatttgtacttatatcttcggcaattaagatcaatgttgctt

SEQ ID NO: 21265 - DNA, 686 bp, Gossypium hirsutum
  Clone ID: GOSHI-09MAY01-C48019_1
ctttttgaagggagtcgttgttaatggctagcgaccaagatcagttcacgctggtatcccgcgccataaaccaagaagggaagttgccaagaaagtacacggatgaaggtcaaggtgcaaagaggaaggtgtcaccaccattagaatggtacaacgtgccagaagggactcgttcgatggccctggtggtggaagacgtatatgcgccagaccccagcggccccatcgtgccatggacctgttgggtagccattaacataccgccaacgttgaagggtctcccagagggattttctgggaaagaagaggaagtgggtggagattatgctagcatcaaagaaggcaacaacgatcacaaggtccctggttggcgaggtcccaagttaccctctcacggccaccgtttcctgttcaggctatttgctttggatgatgagttgaatgttggcaacaaagtgacgaaggagaaggttcttgaagctatcgaaggacatgtggtcggggaagcagaattgacgactaagttttaagagaaagttgttgtattagtattttagtactttgttgaacatcgattaatgaaaatttagggaactttggctttttcaatcttcttattttgctcaaagttgaaagcataagtaattttcctcgcaagccttggaatgaaaatttgttccgtcttg

SEQ ID NO: 21266 - DNA, 487 bp, Gossypium hirsutum
  Clone ID: GOSHI-09MAY01-C48369_1
gcttgtggcctcttctcaaagagaaaggtggtcttttgatagtgaacactttggttctggtgatggcaagataagtggatgtagcagcaggttctcgtattctccatccataggtatgcgaacttgtggggcttgctcaaagcttttggctgagagatcttcgtgtagctgcaatgaaatttcagtggtagctgtacttgtatgtggacatgtttatcatactgaatgcttggaaactatgacgccagaggctgacagatatgacccagcctgcccaatatgtatgggtggagaaaagcaggtctcaaagatatccagaaaagctttgaaagctgaactggagttgatggctaaacatcttaagttattcaagaatagagttaaagatagttttgcggaaagtgattgtaatgattttaaccatcaacaaaatgccaagcgagaagggaaagctccaaagttagaaccccagtcaagccggagaagc

SEQ ID NO: 21267 - DNA, 553 bp, Gossypium hirsutum
  Clone ID: GOSHI-09MAY01-C48329_1
tggaacaacctcaactctttacaggtagttggagttgtaggcttcatggatagacgattagagctaccagaaggccttgatcctcagatagaatctatcatcagtgactgttggcaaagtaatccagaaaatcgaccatcgtttgaagacattatcaatagaatgacaggcattgtccaaaaatctgccattggattaggtcgaagacactcggagccttgaagttgcaatgggtcattacaaacaatgtcacttttttcattcattgggttggctatattttagagcttaggctaacagaagaaaaacatcaaacaaatgcattgtacaaataccttagtttgtagcttacctttagttaccattcctccccattgtggaaagcacgaaataagaagaggggtggccaagagtgttgcaatgtaagattttggggttttttatagaagaagaaaagcaaagctacaataattaatttaattattatttggatttaatgtatctttttaatggattgaaatgaagttattccaatgtagttgctattctagtt

SEQ ID NO: 21268 - DNA, 449 bp, Gossypium hirsutum
  Clone ID: GOSHI-09MAY01-C49989_1
tctttctctcgctcactcactcacattgggggagaaaagatttgatcttttagtgaagttttaggagggaaaatccaaatcaaagaagaaagaaacgaaaaccttccttaaagtgtccgattcattactggactgacccataagtgaaaaaaagagggaccccaatataataacctctttgtctttggtggtttagccattgaagaaacgaagcagaagagaaaaagaaaattaacagagttggaagaaagaatgttcgcagcggagaatggactcaaaggggacccgaggctacaagccatatctgacgccattagagtggttcctcacttcccaaaaccagggattatgttccaagacataacaacgttgttgctggatcacaaagcgttcaaggataccgtcgacatatttgtcgatcgctacagagacatggatatatctgtcgt

SEQ ID NO: 21269 - DNA, 745 bp, Gossypium hirsutum
  Clone ID: GOSHI-09MAY01-C49929_1
gctttcgtttggactggccaagcttggatcagacaaagcaggcggacatgtttcaactcgagtattgggcacccagggatacgttgctcctgaatatgctttaactggacatctaactacaaaatcagatgtgtatagttatggtgttgttcttttggagttgcttacaggcagagtaccagttgatgcaaagagacctcatggggaaggtgttcttgtatcatgggctttgcctcagttaacagatagggagaaggtcgtccagataatggatccaacactagaaggtcaatactcaatgaaagaagtgattcaggttgcagctattgctgctatgtgtgtgcaaccagaagctgactacaggccattgatggcagatgttgtccagtcgctggttccgctggtgaaaactcacaggtcaacagccaatgttggtggctgctcgaccttccagtagtgcaaagtctcctacatcccgatatacattccctgttaggtagggttatgagaataatcaagaccgaagttcaaatgtccttagctgaacttagagatgaaagtctagactgctataatatggttggctcttatcagtagaaagccccaaccgcatatatctctactgtgttaaagctgtggtcaacaaacattccatcgattttataaaccaattgaagccaaggatggtagatagggttgaaacaaagctatatccctctttcttggttgaatatatattagtgtt

SEQ ID NO: 21270 - DNA, 563 bp, Gossypium hirsutum
  Clone ID: LIB3828-028-Q6-K6-D5
gctgtttgtgacagctgtacttcttgtaattagtcgtattggatatttcatccctctacctggctttgatagaaggttgataccgcaggactatcttagctttgcctctgggtctgttgatgacctgggtgatttttctgcggagcttaaactgtccttttttcagcttggtatcagccctcagataattgcatctataattatgcaggtactctgtcatgttgttccatccttagtgaagttgaggaaggaggggctggatggtcacgagaagattaagagttatatatggtggatttcacttggctttgcaatagtagaagctgttatagttgcttgttattctcttcaatattcaatttatgcagccagttacagggtcaagcatgtgatggtgactgcttttcttttggtttgtggtgcaatgactatgacatggatctgtgatacaatatcagaatctggatttggtcaaggttcgtctctaattatatgtgttggaatattaaccggatacactgatacactgtacaagatgttgactcagctctcaggaagtgctg

SEQ ID NO: 21271 - DNA, 411 bp, Gossypium hirsutum
  Clone ID: LIB3135-058-Q1-K1-H8
gttcatgcaatttgattctcctttaggagaaggaaaaggaaggagggttgaggagctgctaaaacgatgcccaaatcttaaaaaaattattatttttagggttatttcaaaagccaagccacacaaggaatgccagatggtggatttcacttggctttgcaatagtagaagctgttatagttgcttgttattctcttcagtattcaatttatgcagccagttacaagtactttgggccaagcatgtgatggtgacttctttcttttggtttgtggtgcaatgactatgacatggatctgtgatacaatattagaatctggattttgtatctttcttatcacatttactccttatttgttattcattccatttgttacagacaagtttttttaattttatgataagaactga

SEQ ID NO: 21272 - DNA, 263 bp, Gossypium hirsutum
  Clone ID: GOSHI-09MAY01-C49019_1
cccacgcgtccgcgcaacctgaactcacctccattgcatgggctcttatcgcattaccactttctcgagtgacgataatgggtgggtttggtttgtttttggagcctgctggcctccctcgaggccgcctaacattgtcaccatcagctgcaatgattggggtcactgcctctggcattttgggagccattagcatcgcatgaaattccttgtcctgttctttgttatgatccataagcactctcaaatctgtggcttctccc

SEQ ID NO: 21273 - DNA, 528 bp, Gossypium hirsutum
  Clone ID: GOSHI-09MAY01-C49309_1
gttactgttcgcttttttcttttcttgttttgcttttgtttctgtcttctcgttgccgtttctgtgctgtttcttttggtcttttttgcaggtgtcgggggtcaacggagaggattgctatgtgggtgtcaatggaggctgggcaggcctcgggacgaggcgtggacgttgcgcccgaggaggagcgacgcaaaggagagggaaccctagggttccctgtgcttgcctagtctttaggcccccttgggccgtttagaatccgggccgttttgggcttgttgtacatgggtcatttaattttattattttggttttgtttcgggcctgggctattaagtttgatatgagagggaagataaacgttgataaaaatttctggtaaatgagaaatttttgttaagtttgtaagaaatctagcaaaagtagaatttttttttagtttaaaccatatatattgaaattttttacactttttttgttttctttttaattttttataatttatatatttttaaatttttaagatct

SEQ ID NO: 21274 - DNA, 504 bp, Gossypium hirsutum
  Clone ID: GOSHI-09MAY01-C49239_1
aaacgcccccccacttccccctctaaaaaaaccctgttctggaaacaactcaggaaaataaataaataaataaataaataaaacgacagagggacgaagaagaagaagaagatgttccgtgatgtttcaagctgcaacacctacaactatggcgatgccttgtattgggactcccgttatattcaagaagctggtggtgcctttgactggtaccaacgttactcttctcttcgcccttttgttcgtcgctatgtccctacttcctctcgtgttctcatggtcggctgtggaaatgcccttatgtcggaggatatggccaaggatggatatgaagacattatgaacattgatatttcctcagtggcttttgacatgatgggaaggaaatatgagtttgttcctcagctgaaatacatgcaaatggatgtcagggatatgagttttttcccagatgaatcttttgacagtgttatggataaaggaactcttgattctttgatgtgt

SEQ ID NO: 21275 - DNA, 774 bp, Gossypium hirsutum
  Clone ID: GOSHI-09MAY01-C44959_1
ttgagttttgttttctatctcaagaaccttttgagttagagaacaaaactcagtgttgtctttaattgaaaccatttattatttgtaataattgtaagaaaaatggcatccaatgggacaacagagaaaaaggctggcaaatatgcatccttcttctccggcacacaagacaaatgtggagtttgcaagaaaactgcatacccattagagaaggtgacaatggaaggagaaatctaccataaaaactgctttaggtgttcacatggtggttgtgtgcttacaacatcttcatttgctgcattagatggtatcctctattgtaagattcactttgcacaattgttcaaagagaaaggtagctatgcacatgttaccaaggcaactgccatgaagaaaacctcatcagaagccaagacagaagatgatccaacaccaggggctgaagctgaagctgaagctgaataagatgattcttacaatagggatttgaattaggtgttttctttttacgggttaagctacattccattacttttttttttctatcaccattcataagtatgacttattgaaaagtaatgaaagggatcttaacttctgtttattttcactctagttcttcccattcttcaactttgcaagcattttttaaacctactttaatgtagtgattgggagatggagggttttgataaatggaaatatattttgatttttttacttcaaaaaaaaaaaaaaaaaaaaaaaaaaaaaaaaaaaaaaaaataattaaaa

SEQ ID NO: 21276 - DNA, 573 bp, Gossypium hirsutum
  Clone ID: GOSHI-09MAY01-C44549_1
gttcccccgtcgcccgcccccgacccccgtgcttcaccgcggcccgtcggcctctccttttaccaggttaatcagtgaaaggaatctgaattcttgagatatggaaatagcaattattgcattgattttggctgtcttgcttggagcttttattttggtaccccgacatggtaaatcagctcataagaacaaggttaaatcgactgttgccaattctaaggcatccaagtcctatagtaaaacagaagttatgctacataataagaggacagattgttggattatcattaaggacaaggtttatgatgttacctcatatgtagaggaacaccctggtggtgatgccatcttggcacatgccggagatgattcaaccgaagggttttatgggccacaacacgcaactcggacgtttgacatgatcgatgacttctacatcggagatcttcagaagtaatctccaagcaactatccactattgggttttgtaaggttagggtgaaaacacttctgagaatatctttctgttagccctactccaacatcggtatgtgctttgcacatttagttcct

SEQ ID NO: 21277 - DNA, 388 bp, Gossypium hirsutum
  Clone ID: LIB3148-028-Q1-K1-B2
aagcctttctgacatgtattctgggctaaataccttttatatttaacatcgggggattatcggcggatacaactattgcattttaacctactttttgcggattcagttctgggatctgtaagttggtttctaatatggttgattagcttgttatatttttgttgattgaagtgatgtttgtaaccctgggaacttggaggtaagtttttgtatttgaaatttggttacattttgtctttgcttaaaaaataggtaaataggtaaattagttgtccattgaaaaaatagaccacaaacacgcaactcggacgtttgacatgatcgatgacttctacatcggagatcttcaaaagtaatctacaagcaactatccactattggggtttgt

SEQ ID NO: 21278 - DNA, 412 bp, Gossypium hirsutum
  Clone ID: GOSHI-09MAY01-C44539_1
ctctttgctgctttccattttactccttcatctttccttagctttgcattttccgacgagaaaaaaagcaataaaatgtcactgtggcaacatatccggagccgccatgaggaaaaaggcgttatctatgccgtcttgtttacatgttgttgctgtttctgctgctacgcgactctcgagggtatattggagaatgggatacgtttcgtgcctttcctttatgctaatgttttaatttccactctcatcatcacttgctcttgttcacggggaattagatcaccccatcttaattattgccaaataatgcaagtgttatccaccaataacttatgcagtttaggttgctgctaaaatttctttagcaagggtcgcttggatcacgtgcctctccatctactcaaagattgcg

SEQ ID NO: 21279 - DNA, 518 bp, Gossypium hirsutum
  Clone ID: GOSHI-09MAY01-C44469_1
gtgaagatatactttgtctcccccgacattgttaaaatgaaggatgacattaaagattatcgaacatctaggggtgtcgagtgggaagaaagtggtgatttaatggaagtggcgtctaaatgcgatgtggtgtaccaaactcgtattcaacgagaacgcccgggagaaaggatccatctttatgaagaagctcgtggtaagtatatagtggatgagaatgtgttgaaggtaatgcagagtcatgctgtggtaatgcatcctctcccgaggcttgatgagattaccgtcgatgttgatgcccatccgagagctgcttattttagacaagcaaagaatggtctctatataaggatggctcttttaaaattgttgcttgttggatggtgaggagaagaaaggggctgtttttggatttattttgggaaatttggcatcttttaattcagcttgattagggtaatcattgtgcttttgagaaactgaagcaaataactaaaaaaaggatcaatttcttaata

SEQ ID NO: 21280 - DNA, 551 bp, Gossypium hirsutum
  Clone ID: GOSHI-09MAY01-C44709_1
taaaccccataatttcctgtaaaattacttagattcggtctgtaatacataatcagtaggatttaaagtagcctcttgtaatagtttataggcgctacgtacagaaaattcgccggataattctccattccaaacttggatgtcttcatgatctaatctagctaacggcatctgtaaaaatttctgagctattttcgcttgaaagtcctaccaaatagagatttgtctgccctacctactctccagcataatcctttttggagtagaccttttgctgtccaaatactccaccaggtttgattaccagaataacacaagcaccacttttcccagacttcagaacaagtaaaaccagaagcgtagagatcaattgataaaacaaaatatagatgaaataagaaaacaagacaaaactcgtgccagcggcatagacctaagcgtgctagggcaacagacaatagtcctcgattttttattctacattcctaattcaatttttaaaaaaaaattgtctaaatcctttgattttattttattcaatttttgatggc

SEQ ID NO: 21281 - DNA, 218 bp, Gossypium hirsutum
  unsure (1)..(218): unsure at all n locations
  Clone ID: LIB3135-026-Q1-K1-E11
aatttttgggggaatttgtaaaccccataatttcctgtaaaattccttagattcgntcggtaatacataatcagtaggatttaaagtatcctcttgtaatagtttataggcgctacgtacagaaaattcgccggataattctccattccaaaaaaaaaaaatataaaaaaataaaaaaaaatataaataataataataaatttaatattggtctggcc

SEQ ID NO: 21282 - DNA, 339 bp, Gossypium hirsutum
  Clone ID: LIB3148-055-Q1-K1-C7
gccgttaaagaaaattaaaatgcatatctttttctttccttttcttttgtttaaggggcggtgcatataaatgaaggatggggcgttaaatggagcatgctaagtagttgcggacactttcggtgagacgagtctgttctagcttcttcaccgacaatatgaaatttcttgtatgcaagaaccaaactccattattttcctaaaccgcatatagatttgggtatgcgccaattcgcatgcattggactagtgttctccataagaaaatctaatatctactagtgcagtttaactaattgctgcaattgctgaaattctttaaaccaaacttcaagttcc

SEQ ID NO: 21283 - DNA, 339 bp, Gossypium hirsutum
  Clone ID: LIB3148-022-Q1-K1-G12
gccgttaaagaaaattaaaatgcatagctttgtatttccttttcttttgtttaaggtgcaatgcatagaaatgaaggatgaggtgttagatggagaggctaagtagttgcggacactttcggagagacgagtctgttctagcttcttcaccgtcaatatgaaatttcttgtatgcaagaaccaagctccattattttcctaaattgtatatagtttttgttatgtgccaattgcaaggtatgggacttgtattccgcataagaaaataaaagatttcctaatgaagttttaaaaatataaaaaatggttaatataattattatataaggggtataggtt

SEQ ID NO: 21284 - DNA, 589 bp, Gossypium hirsutum
  Clone ID: GOSHI-09MAY01-C44119_1
cccacgcgtccgcttggattggttttatgttttatacgtgatccttcaatttttggtgatattaagttcggcccatcaaaaattggatttttgagtataacttggaatgattggaaagttgggtttttgaaaggagcagtgccacaaattccactgtctgtattgaactcagttattgcagtttgtaagttgtctggtgatttgtttccaaacagagagctgtctgctgccaaggtttcagttagtgtaggggttatgaatttggtggggtgttggtttggggcaatgccagtgtgtcatggtgcgggtgggttagctggtcagtataggtttggggcaaggagtggatggtcggtggtatatttggggatagggaagttgataattggcttggtatttgggaactcctttgttaggattttgaatcaggttcctatagggattcttggagttcttttattatttgccggcattgagttggctatggcctcgagggatatgaactcaaaggaggagtcttttgccatgttggattgtgctgctgtatctttgacaggttctagtgctgcattggggttcgtgtgtggga

SEQ ID NO: 21285 - DNA, 1606 bp, Gossypium hirsutum
  Clone ID: GOSHI-09MAY01-C44059_1
cccacgccgtccgcccacgccgtccgcccacgcgtccggggaaggttgttgcattaaagaaagttcgggtcgagtaatttggagccggaaagtgttaagttcatggctagggagattaagattttacgtcgattggatcatcctaatgtggtaaaattagaaggattggtgacttcgagaatgtcatgtagtttgtatcttgtatttgagtatatggagcacgatttggccggactcgctgctagtccggctataaagttcaccgagtctcaggtaaaatgttatatgcatcagttgttatcggggctcgaacattgtcacaaccgacatgtattgcatcgtgatattaaggggtcgaatcttcttattgacaatggtggtgttcttaagatagcggattttggtttagcttcatttttcgatcctaatcacaagcagccaatgactagtagggtggttacactttggtatcgacctccagagctccttcttggtgccacagattatggtgttggtgtggatctctggagtgctggttgcattttagctcggttatttgctggaaggcccatcatgcctggtcgcaccgaggtggagcaattacacaagatattcaaactatgcggctctccttcagatgaatattggaaaaagtcaaagttgccacatgcaaccatatttaagcctcaacaatcatataaacgatgtgttgcgtgaagcttttaaggactttccaccatcatcgttgcctctgattgatactcttcttgcaattgatcctgttgagcgcctgacagctacagccgcattaaatagtgaattcttcacgaccaagccttatgcttgtgatccttccagccttccaaaataccctccttgcaaggagatggatgctaagctacgagatgaagaagctagaagattgcgagctactggaagacctaatgctggagtgaagaaagctcgtccacgtgatcgacctgcgcgggcaattcctgctccagaagcaaatgctgagcttcaagccaaccttgatagacgacggttaataacacatgcaaatgccaaaagcaagagtgagaaatttccacctccacaccaagatggaactcttggttatcctttgggttctgcacatccgatagatcctggttatgatccacccgatgttccgtttagtacaagtttctcatattcaaataaagcaccaatccagacatggtctggccctttgatcgactcttctgccgttggtgctcctaggagaaagaagcacatgtcaggtgatggtcattcacattcaaagtcatgtaagaaagacaagaattcgactcgaatataagagactacatataaaacgggctgctggaaagccaaaacattgctgctacgaagtgtttctttgatctgcaaccgggaaaaccggaaactgcatcagaggtaaaaacttgtattcatttttactatccattgtcttttgtttttggtggtattattgtgagaagcttatctaatgttgtacatctgttatactgtcattgtttcttcggttctgttggaaagccccaattagatttagtaaaaaaattgaataaatttgttctac

SEQ ID NO: 21286 - DNA, 577 bp, Gossypium hirsutum
  Clone ID: GOSHI-09MAY01-C44049_2
cgccccgcctgcctactttttttttaaaaaaacatgaagaggttttcccttattgttttgtgcgtggtgactctagtggtggtgttgttttccgggtgcagaggcagcgccagcgccgaaatgtgataaccccttggagtatagctcatgcttgaatgcgtacaagaagccacctccatcagccggttgttgccagaagatgaaggaacaagcaccatgctattgcgagtacatgaagatagaagatgtcaaacgtgtttttgacagagttgagattgcgaaaatggctaaattgtgtggagtttcatattcttccacctgctagaatcccgtttggtttcatttgactatctctggctgggataacctggcatctcaataaatgaaaattttatttgaaaactatttttttacccataatttcgactataatgtacttgtgttcttttttttttgagaatgatactggtggtttgcttttaaaaaaaaaaaaaaaaaaggcggccgccctaaaaatttttttttttttttaaatggaacgtacctatggcccctttgctccttggggattgccaat

SEQ ID NO: 21287 - DNA, 582 bp, Gossypium hirsutum
  Clone ID: GOSHI-09MAY01-C44049_1
cccggttcgacccagctttttccagtttagtcgcccagctagctaactttttatttaaaaaaacatgaagaggttttcccttattgttttgtgcgtggtgactctagtggtggtgttattttcgggtgcagaggcagcgccagcgccgaaatgtgataaccccttggagtatagctcatgcttgaacgcgtataagaagccacctccatcagctggttgttgccagaagatgaaggaacaagcaccatgctattgcgagtacatgaagatagaagatgtcaaacgtgtttttgacagagttgagattgcgaaaatggctaaattgtgtggagtttcatattcttccacctgctagaatcccgtttggtttcatttgactatctctggctgggataacctggcatctcaataaatgaaattttatttgaaaactatttttttactcataatttcgactataatgtacttgtgttctttttttttttggaatgatactggtggtttgctattatttacctttaatctccctttttttttctcttttttttttctgttttgtcctttctttttttcccttttttt

SEQ ID NO: 21288 - DNA, 572 bp, Gossypium hirsutum
  Clone ID: GOSHI-09MAY01-C44399_1
gcgtgaaagatgcggacactgacgggctatgagtaatattgaatcctctcccgagggttttaacatgcttaggcgtatgtatgaaaatgttcaggaaccatttatgaatgctacaactatgggctggaaataatggaaatagtccgagctcaaacccatttgctgctctattgagcaatctaggtgattctcaagctaggagcttacctaacaacacttctacaaatggttctgaaaccactcatggacatacttccccaaacacaaatcctcttcctaatccttggggaaacactgttggtggcgggggcgcccagaccaatgctactgcaaggtcaaatcctgctggagatgctagggcaccaggtcttggtggtctgggaggccttggacttccggatgtaccacccatgatgaatggaatgccagatgcttctcagttgactcaattgttgcaaaatcctgctctatcacagatgatgcagagcatagtgtctaatccccaatatatgaatcagattatgaatctcaacccgcaactacgcggaatgtttgatttgaatcctcaattg

SEQ ID NO: 21289 - DNA, 386 bp, Gossypium hirsutum
  Clone ID: LIB3543-002-Q1-K1-H4
cttccttgttcaggtgttgaagcaagaattgtctgttgaacttaaagcaccgccattctgttcaaacgaatcatcaaaaggaagttactaattaaagagctgctgttggttcatgattgagaccgagtcctaaagcagttcaaatcggactctctgaaatgaagaatacacttgctatgttctgaggggtaatccaaatatctataaatctatgaagcatggacacggacacacagcaatttttaaaacccgaggacacggatacggcaggatacagcaataaaagatattaaaaatatttttatatatatattttatgtgaaaatacttgatgtaaatgaaaatattgatatttttcattaatatataatcaatttttttctatt

SEQ ID NO: 21290 - DNA, 367 bp, Gossypium hirsutum
  Clone ID: LIB3148-024-Q1-K1-F9
ccgccattttgttcaaacgaataatcaaatggaagttactaattaaagagctgctggtggttcatgattgagactgagtcctaaagcagttcaaatcggactctctgaaatgaagaatacacttgctatgttctgagaggtaatctaaatatctatatatctatgaagcatggacacggacacataatatgggtacgacacgatacagaacacggccacatggcaatttttaaaaaatgaggacacggatacggtaggatagcaataaaaaatattaaaaatattatatatatttttatgtgaaaatacttaatgtaaatgaaaatattgatatttttcattaatatataatcgacttttttccatt

SEQ ID NO: 21291 - DNA, 1079 bp, Gossypium hirsutum
  Clone ID: GOSHI-09MAY01-C44329_1
ttcacgcccccggtttcggcaacacgaaagcttgcgagagagagaaaaaatggatccacagctaactgaagtgtcgcagatgttcgagcgattcaaagctgcattcattagaaaagatttcgattcatgcgccaatctcctttctcaactcaaggttttgctgacaaagtttaggagccttcctccgctatttgaaaacacccctaattcggttaacgaagtgctcttagcaagggaaatttacgaacatgctgttgtcctcagtgttaagattgaggatcaagatgcctttgagagggactttttccagttgaagccctattatacggatgctggtagccgtcttccaccatcccagcaagagtacctgattctaggtcttaatctcttgagacttcttgtccagaacagaattgctgagttccataccgaactggaactgctttcggccactgccctggagaatccttgcatcaagcatgctgtggagctggagcaatccttcatggaaggggcttacaatcgtgtcctgagtgctagacaaaatgctcctcatgaaacttatgtttatttcatggatctcttggcaaaaacagtgagagatgaaatagctggatgcagtgagaaggcatatgattatctttcaattaacgatgcccgacagatgttgcttttctcatctgatcaagaacttttggaatacatcaaagaggagcatcctgattgggaggtgaagaatggatccgtgtatttccagaaggccaaagactctgcaccatgtaaggagatcccatccctacaactgattaaccaaactcttagctatgctagggagttggagcggattgtgtaggcaagttgctatccagtggttgctttttctgctcttaaaagaaaattcatataacttgccatcattttgttgttgtggatttttactttttacattcagtatgcaacttaaaaaagttgtttccatttcatatttctagttatatacattagtaacttccaaattgctagaatctgtgttagttggatttcgagacgaatgttggatgtgtttgaatttgccgtgc

SEQ ID NO: 21292 - DNA, 537 bp, Gossypium hirsutum
  Clone ID: GOSHI-09MAY01-C45919_1
gacgtaaaggtagtcaatctttttactgcttttcaacaaagagagaattggatgaccgattgcttcacagatggagttcatctatctgctgaggggggcaaaatagtggtggcagagatactaaaagtactgaaagaagctgaatggaagccatctctgcattggaaatccatgccaactgaattcgccgaggactcgccttatgatattgttggcgctgatgggaaaaccacgttgaatccgtccgaatggacttttcaccgagagattcaatgggattagagttcagagttctggttaagatcatgatctccaaaatcccatggaaattaaaggaagacagagttcaatagataaacaagatttgtaggaaggactgaactacaaccatttgagtcctagttgcttcttgcaaagctatcaagagtttaattccatttagtgcaatatatatacatatggttaaattcctcataaataaacctagaaacatctattacaagaatatatatatatatacattttttttagatcgaa

SEQ ID NO: 21293 - DNA, 576 bp, Gossypium hirsutum
  Clone ID: GOSHI-09MAY01-C45899_1
aaattcttcaaatatcccggctggtcctttcgaaaccaatcatcgccgcaacgaagggttcatcgacccacgccggttatatccgatgggcgatttgcatgaccccggagtgaatccacagagacccacgaggagtagcatgagtagcacggtggagtcgtttagtggacccagaccggcccaaccaccgcaaaagtcggcggacttcgcggtggtttcgactaggaagtactatccgaggccgccgccagtagagccagaggattgtcatagtgactgtgattcatcatcgtcggtggttgatgatggggatatcgcgttgtcttcgtgtcggaaaactttgcctttcgatctcaattttccacccttggatgaagatggaagatctccagtgtactgctttatgtctttgatcgcgatgccggtgatgaatgatgatgatcgattattggatctctttttcttttttaaaaaatgttagctttttttaagcggaaaaaaaatatgagacatggttaagatgaaatggtcttaatctccctatgcgtatgaaattgaatccctttgatttttatc

SEQ ID NO: 21294 - DNA, 401 bp, Gossypium hirsutum
  Clone ID: uC-gsronu33B149d08b1
ctcacgcgtccgcccacgcgtccgagagaccgagcgaggtttagcatgagtttctcggtggaatcgcttagtggacccagaccggtccaaccaccgcaaaaatgggcggacttcgcggtggtttcgactaggaagtactatccgaggccgacgccagttgagtcagaggattgttatagtgactgtgatttatcattgtaggtggctgatgatggggatatactcgtaggatctgagtgggagtaacttattgtttggatctcagtgttccacccttggatgaagatgaagatctccagtgaccgctttatgtctttgatcaccatgccggtgatgaatgatgatgatcgattattggatctctttttcttttttaaaaaatgttagttttttttaagcgg

SEQ ID NO: 21295 - DNA, 556 bp, Gossypium hirsutum
  Clone ID: uC-gsronu33B029d09b1
cccacgcgtccgctttcctatgacagatgccaggcatattaaggcaggactgtctgtattggccaaatacaagagacctttactcgtacattccgagattcaatcacttgttgaaagccacttagaaactaaagatggtggtggtgatcctcgatcatattcaacttatcttaaaacaaggccaccttcttgggaggaggcagctgttagagaacttttgactgttacaaaggacacaaggagcggaggtccggcagaaggtgctcatcttcatgtggttcatttgtctgatgccagttcttccttagatcttataaaggaagcgaaaaggagaggtgacagcataactgttgagacttgccctcattatctagctttttcagccgaagaaattcctgatggagatactcgtttcaagtgtgccccacctatccgtgatgcagccaataaagaaaaactatggaatgctttatggaaggagatattgacatgctgagttctgatcattcaccaacagtcccggaacttaaaactctgaatgatggtaacttttgag

SEQ ID NO: 21296 - DNA, 415 bp, Gossypium hirsutum
  Clone ID: LIB3148-040-Q1-K1-H4
cccacgcgtccgcggcgacgtgggcggttcgctgcccgctacgtcgcgagaagtccactgaaccttatgatttaatggaaggagatattgacatgctgagttctgatcattcaccaacagtcccggaacttaaactcctgaatgatggtaactttttgaaggcttggggcggtatatcatctatacagtttgttcttcctgtgacatggtcatacggacagaaatatggaataactttggaacagttagtttcatggtggagcgagaggcctgcgaagcttgctggacaacattcaaagggagccatagcaatcggaaaccacgcagatgtcgttgtctgggaacctgaagtggagtttgacctcaatgaagatcatcctatgtttgttaaaaatccgagtatatctgcctacat

SEQ ID NO: 21297 - DNA, 612 bp, Gossypium hirsutum
  Clone ID: GOSHI-09MAY01-C45509_2
ccgtccgggcaaatggctgaaaatcatcagggcaagagtcctcgtctactgctccaaataccggaaaagagaaatcgtctggcgagaaagacagggaagctatgcaggttgatggtcctccggagaagaaaaccgagcctgagccatcatttgagattttgcccaacccagcaagagtggttccagctcaagagaagttcatcaagtttttagatggtcggtacgtgcccgtaaaggcggcaccgtccgggtttattcttctcaaggacaattgccctaatgaaccagaggagctttctctaacagatgccccagcaactacatctccagccggtggatcagcagctggacaacaacagagttcttcattggctatggcagttgacgatgaacctcagccacctcaaccttttgagtacacatcctgattctgctggacatgttttgttaaacctgatatttctttgtaacttctttttactgagtgagtacatgttaattcaacgatgttttcgtagatttgtcagttctggctcaatctttagaaactaacatgatcgaatttcatttaacaatcataaaaaaaatgagttaaaaaatctgaattcattc

SEQ ID NO: 21298 - DNA, 1046 bp, Gossypium hirsutum
  Clone ID: GOSHI-09MAY01-C45509_1
accaactactgtgcccaccaccacatctgctgttaaacttccaactgctgtcctatcaacttcgggtaaggctaaagctagggctaagaaagaggcagaacacaaggcaaatgctgagaaatcaactggagcagagtcttctgctgctgctaatactggaaaagggaaatcatctagtgagaaggatggagaagccatgcaggttgatagccctccagagaagaaatccgagcctgagccatcatttgagattttgaccaacccagcaagagtggttcctgcgcaggagaagttcatcaagtttttagaagacagtcgatatgtgcctgtgaagttggcaccatccggattcgttcttctcagagacctgtgccctaatgaaccggaggtgctctctctaacagatgcacccacatccacggcatccccggcaggtggatcaacagcagctgcaggacaacagagttcatcagccatggccgttgatgatgaacctcagccgcctcagccattcgagtactcatcctgattttacccaatcctggaactgaaacagggccaagaatacttttatacttgagcagtgccttttgacatcacggctgttcaacctagagtgaaactaggagaactgatgctcgattcccatcctcaacttagggagattctgagtttagattacatcattcttaattccacgaggatatgttttacttgggttagggttgaacttaatttcccttttcaggcatgagtgtgcgttttaaaggatgttggtcccattgttgattgttccctttttatcgtgtgtttttattcctctggaaagatagttgtatacatttatacatgttcaaccgttattcccttttcaaggtttggtttcagcaatcattttagggtttaggtgcaaaaacctaagatttgctccctcggcaacgatgtctggttttgttatttgcatggtcgttgaaactgagtcctggtcatgttggtctgaactgagattaaattggttggaccatcaatagttatgattggaatat

SEQ ID NO: 21299 - DNA, 387 bp, Gossypium hirsutum
  unsure (1)..(387): unsure at all n locations
  Clone ID: LIB3149-055-Q1-K1-A6
gaccacgcgtncggcagaacagaaggcanatgctgagaaatcaactggagcagagtcttctgctgctgctaatactggaaaagggaaatcatctagtgagaaggatggagaagccatgcaggttgatagccctccagagaagaaatccgaccctgagccatcatttgagattntgaccaacccagcaagagtggttcctgcgcggagaagttcataagtttttaaagacagtcgatatgtcctgtgaagtggaccattgattgtctttaagactggcctataaccaggcttttaaaatcacaatacgatccgtggataaaagtgagaaaatatagctgcgtgtataactacctacatagctatctttacattaataaagcaattttc

SEQ ID NO: 21300 - DNA, 492 bp, Gossypium hirsutum
  Clone ID: LIB3584-024-P1-K1-F9
agaaaacaattttctttgatgatagtgctcgaaacatagctggcggcaaagcagcagggcttcacacagttatagtggggaactcagcgctggtgccaggtgcagatcatgccttgcgtagcatccacaacatcaaagaagcaatacctgagatatgggatggcgatgaggagcagatggaacaagttatccaagcagctgctgttgaaaccgtggtccttgcttagatttcagttcaagttgaaaattagagaggctgcccttgttatattattatggacatgggaagcattcatcttaagcttattaaataaatgactaaagctcactaatatatcgatatgtacttagaatataagcaaatgtttctgtatttatattgtatctaagatttatgtactaaacccagacttatgggtagggatggtgtcaccctttgaaaataggcttaaggctttgccatactcatttttaagtatataatatatattc

SEQ ID NO: 21301 - DNA, 403 bp, Gossypium hirsutum
  Clone ID: LIB3148-039-Q1-K1-C11
cggacgcgtgggttttctttgatgatagtgctcgaaacatagctagcggcaaagcagcagggcttcacacagttgtagtaagctacataatttggttttcaatctagaaagctgcctataaacgattcaatgggtaacatgggagaatatgatggcaggtggggaactcaacgctggtgccaggtgcagatcatgccttgcgtagcatccacaacatcaaagaagcaatacctgagatatgggatggcgatgaggagcagatggaacaagttatacaagcagctgctgttgaaaccgtggtccttgcttagatttcagttcaaattgaaaattagagaggctgcccttgttatattattatggacatgggaagcattcatcttaagcttattaaataaatgac

SEQ ID NO: 21302 - DNA, 487 bp, Gossypium hirsutum
  Clone ID: GOSHI-09MAY01-C45429_1
tgtttattcacggtgttcttgttcgacctgtcagtgatcagtttggagggttgatttttaactttatctatgtgaaggaaattcttttccaaagctactttaaggtccctgtgtaaccagactccgcggcgatgaatagcgtctgatatttgagccccatagccagattggttgatcataaaaataatctcgtggtttattcacagattttttttttctttttcctctccccccccccttttttttggcttgtatttttgctctaggaggcatggatatggtggtataagagcgcagccttgatgtcaaacactggatattgctgagttagcatgcagcactatatttacttggattcatgtgtgcgtgattgatactaatatttttctaacatgactgttcaattttttcattttcatggtttggactttggagagtttagagggtatatttcaagaaaaataagagtccaagcaatattttagtt

SEQ ID NO: 21303 - DNA, 368 bp, Gossypium hirsutum
  Clone ID: LIB3148-043-Q1-K1-H7
cctcccccaccctttttttttggcttgtatttttgttctaggaggcatggatatggtggtataagagcgcagccttgatgtcaaacactggaaattgttgagttagcatgcagcactatatttacttggattcatgtgtgcgtgattgatactaatatttttctaacatgactgtgttcaatttttcattttcatgatttggagagtttagagggtatttgtttgtggtttagatatatcaagaaaaatgaagagtcgaagcaatattttagttatttttttaaacgtgtttggagggcctctaaaggatatctaggaccatgttcggaatgtgacgaatcagacatttttaacctaattctctaaac

SEQ ID NO: 21304 - DNA, 892 bp, Gossypium hirsutum
  Clone ID: GOSHI-09MAY01-C45789_2
gcgacaatgttgaccgtggtgataatctttattttattgctacaactacaaacggaaaggtggggaacttctcaaccccttccccacatcatcctctcaaggcatggagatcacttaaccaaggaataaacactggcgcaaaccgtgacaaccgtgaggtaatatttgttgcacattcatcaagagctttccgcgatgaggaaagcaaaagcttttggctggagattgagattgtggataagcatagatatccttcagggttccaagcaccttacaatgtcacaacaacattgttagtcccggctcactaccaaggagaaagaaggataaagcaaagccagatctttgagcgtccgggaaaatatcggattaaacttccaacggtaggggtgaggactacagggactgttgttgtggaaatggttgataaaaacggactctatttctcagacgacttctccctcacattccatatgtattactacaaactgctgaagtggcttcttgtcataccaatgcttgggatgttcgctgtgctagtcatctttcgcccacaggaagccatgcctttgccgtcattctcccgaaacactgacttgtgacaactgtaccgaattgagcctcaacacgtgctatacttcacatcacttaaatcaaggcccctgatataagatgtcttctaagtcttagttacagagagagatagagagacagactacctcaagtttgatttttctgttgtctaaaatgttggcctttacaacgtatttgattaaggatgtcgaaaattgtaatattgttgcggaatttgaggtttttttagaggtagtcaaaaagttaattttgacacgctgctttgtgcagtgaagcaatgtcgaccggtttttgcccc

SEQ ID NO: 21305 - DNA, 919 bp, Gossypium hirsutum
  Clone ID: GOSHI-09MAY01-C45789_1
actcactattgttacaacatccttcgatggttatctgtatctgatagatggaccaacatcatgtgctgacgttgttgatatcggtgcggccgcgtggggcatggtgttagcagacaatgttgatggtggtgatgatctagatcttatcgttacaactatgaatggaaatgtcttttgcttctcgacccctgccccgcatcatcctctcaaggcatggaggtcaaataaccaaggaagaaacaatgtcgcaaacaggtacaaccgtgagggagtctatgttacccattcatcccgagctttccgtgatgaggaaggcaaaagcttctggctggagattgagattgtggataagcatagatatccatcagggttccaagcaccttacaatgtcacaacaacattgttagtccctggtaactaccaaggagaaagaaggataacgcaaaggcagatctttgagcgtccaggaaaatataagataaaacttccaacagtagcggtaaggactacagggaccgttattgtggaaatggtggacaggaatggactctatttctctgatgacttttcccttacattccatttgtattactataaactactgaagtggcttctcgtcatcccaatgcttggtatgtttggtgtgcttgtcatccttcgtccgcaggacgccgtgcctctgccatcattctcccgaaacactgacttgtaacaaccgcaattcaagctacggtagatgcattttaattcttagatagatcgaactaaattagacagccaagttccaattggttttctgctactctaagaacttggccttttccaacgttttgttttgagttcttcataaaagaggtcgaaaattgtaacatagtctgagtttttgggttttatttattttttaaatatttttattttg

SEQ ID NO: 21306 - DNA, 863 bp, Gossypium hirsutum
  Clone ID: GOSHI-09MAY01-C45749_1
gcgtttttcgcaggcaacatctccaagtagaagacgctcaaaactaccatatttactatggtcagactttcaaagtcattaagaatggcattgatggcaagagttatcttctcatccagagtgatacaaggatggctggaaggacaaaatattgcacaccaaggattaagtcatttgtcatcccactctctaacttttcagtcgataccaccaccagttttccagtttccttttttgagctattgggagtagtgggaagcatgaaagggatgacatcaaacacggtggcctctgaatgtgtactgaaaatggttgaaggaggagaaataagtttgatcaacgcaagtgagcctcaacagctcgcaccatttgtcgcacattttgtttctaaccttgatctatatcaagcttgcaatttcgctaactttgccgctactggagaggactctcctttacagagggcagaatggatcaagttcttgggggcttttgcaaatttggagaagagagcaaatcatgtctacaaagcggtaaaggacaactattgatgcttaactaaagttccagaggccaaggaaaaagcattcaaaccaatagtggcatggatggaataccagaatgtaggttgctgaaccagtggccacacattcatatgcttggtttcatccctaaatccaagtatacgtagggtgagtaaaattcgatttgattcgagaaaaatttaaatttcgagttaatcgaattaagttattcagattattcgagttgagttaaattttacgactcgaataattcgaataacaaattggtgtaaatatccctttggtccctattaattttgaaaatgagcaaattagtctctc

SEQ ID NO: 21307 - DNA, 508 bp, Gossypium hirsutum
  Clone ID: GOSHI-09MAY01-C45729_1
cagggtcgggccacgcccacgtttacgtttttttaggtcccaatctgcaattaaaccctttagtatatggtactatctatgccttcccttttctgtcttccctttatggctccaattttctcttcgtttcttgctttaactctcatttttccattaagcaatgctcaaggtccaccttcccctggattctccccaagctccagagtgagcactgtggcttttgataaagggtttcgaaacctctggggtcctcagcaccaaaaactagaccagggctcattaacagtctggctcgataaaagctcagggagtggtttcaagtcacttcgttcgtaccagtcaggttactttggtgctgcaatgaaactccaacctggttatacagcaggagtgattacatctttctatctttcaaacaatgaagaacaccccggaaatcatgacgaaatcgactcgagttccttggaacaacgccggataaaccctacacattgcagaccaatgtgta

SEQ ID NO: 21308 - DNA, 288 bp, Gossypium hirsutum
  Clone ID: LIB3148-044-Q1-K1-A5
cgggccgacccacgcggtccgcccacgccgtccgtttattggttccaattttttttttgttactggcttaaactctaattttcccgttaaccattgctaaaggtccaccttcccttgaatcctccccaagctccaaagtgagcactgtggcttttgataaagggtttcgaaacctctggggtcctcagcaccaaaaactagaccagggctcattaccagtttggctcgataaaagctcagggagtggtttcaagtcactttgttcggacacatcaggttactttggtg

SEQ ID NO: 21309 - DNA, 739 bp, Gossypium hirsutum
  Clone ID: GOSHI-09MAY01-C46989_1
cgcaaataagtcagttaaggagataattgaagagcttaaaaaacatcaacaaagtacagaagcttcagtggtcgagtgggcaaatgaagctctgcagggtctcggaaagggtgctccattttctcttttcttaacacacaactatttctctagagttgcatctggatatggtaaacagaacaacgaatttacgatgctaaaaggcgtcatgaaaactgaataccgtgttgccttacggtcttctctgcggaatgattttgctgaaggcgtccgtgcagtcttgattgacaaggatcagaatccgaagtggaaccctgccaccttagacgaagttgaccaaaaggaagtggaggcagtttttgaacctttaggtccgggaatcgaagagttgaaagtttaaggttcacacttccacataatcaagttcgctttccttgtcttccgttgcgaagatgaatgaaaggttcgtggttgtagaaatatgaactatgaagctaaagaaaaataaaagaacatttacaagcgcaactacctcagtttctggcatgaaggtatgttaacgtatttatatacttggatcatgacacttatggctttagtaatattgtcatgttaaagaacatccatgtttcctaagatgttacacttttggactgccattgctataatcaaatctttatgttcaatcaggtttagggctgaaaaaaaaaaaaaaaaaaaaaaatataaaaaataaaaa

SEQ ID NO: 21310 - DNA, 580 bp, Gossypium hirsutum
  Clone ID: GOSHI-09MAY01-C46959_1
cggacgcgtgggtgctgatgtatggtcatgcggggttacgttgttcgtaatgctggttggggcatggcgttttgaggatcctgacgagccgaaagacattcggaggacaatacaaagaattatcaacgtacagtattcaattcctgattttgtccaaatatctcctgagtgtcggcatctgatttcgaggatttttgttgcagatcctacagctagaattacgattccagaaattaaaaatcatgcgtggttcttgagaaatctccctgctgacttgatggatgagaacacaatgggttatcactttgaagagcccgatcaacctatgcagagtattgatacgatcatgcagataattgctgaggccactattccagccgctggagcccatggcttaaaccatttaatggtagacaaccttgatgatgaggacatggatgactttgattctgaatctgagcttgatgtttatagcagcggtgagatcatctatgcaatgtaatatgaagaagaaaacttctctccaatgttgtagttgattcaggcatgtcacagctgcagagggtggtaagatgctggt

SEQ ID NO: 21311 - DNA, 863 bp, Gossypium hirsutum
  Clone ID: GOSHI-09MAY01-C46519_1
gcgtttcggaaaagaaccttctgtgtaggttggggaacgaggggggacaggtggtacgtaattggtctggtcctgtaagtgagcggaatggaacccatcagtcattgccacctatcaagtatctgcacttgcatgagtgcgacagcttctctataggaattttttgtatgccaccttcctctgtggtgacctgtgcacaatcatcctggaatgacagtgctgagcaggcttatctatggctcattacacgttaagtcatatgattggcttgacccaacagagcctgaagatccgctacaagcaagagctgcaaaacttgtcaaggatactgagatgacagccccttgtgcaacaacagtactttatcccacaagtggaggcaacatccattgtttcagggcacggactccctgtgctatttttgatattttatcaccaccttactcctcagaacatggacgacactgcacttacttccggaggtccccaagaagggatttacctggtgagattgaaatgaatggagaaacgttctcggaagtgacatggttagaagagtttcagccccctgatgactttgtgattcggagagggctgtacaagggtcctgttattagaagatgaaatattcttgtagcatccatctaatattctaatgaataacaaggaacatgcatggggttgtagaagttaggcatttggcgttgtacatattactacaccaatgtaatcctgtgattttactgacctcacattttattagtgggacagagagtgggaatagagaggaactactcgcttaatgacttttcttttgttcttttggattttgtttgctgaatgacaattgagaattcatgatt

SEQ ID NO: 21312 - DNA, 470 bp, Gossypium hirsutum
  Clone ID: LIB3493-006-P1-M1-A10
cgaaataaattcctccttcgttctttatttcaactcttgcgaacatttctataatcagtttgatggatctcaaattgggtggggtggttgtatgtgaaattagcagggaggaatgatgaaataattgccatgcagatctattaccggcgggttacttcgcagatccagttgtcaccgaattagcggcgttctcgcccaatggccctgtttctgatgaagctcttgacagagttcgtactatgctaggaggcacaggtggtacgtaattggtctggtcctgtaaatgagcggaatggaacccatcagtcattgccacctatcaagtatctgcacttgcatgagtgcgacagcttctctataggaattttttgtatgccaccttcctctctcatacctctgcacaatcatcctggaatgacagtgttgagcaggcttatctatggctcattacacgttaagtcatatgattg

SEQ ID NO: 21313 - DNA, 664 bp, Gossypium hirsutum
  Clone ID: GOSHI-09MAY01-C46749_1
cccacgcgtccgcgaatcatgggtgttttaagtggattaattgctgtcggaaaatggttcgagcaaatctgtaactggagaaacccgcttacgacgattttaatccatatcctttttatcatcttagtcctttatcccgagctgatacttccaacaatctttctttaccttttcttaattggaatatggaactatcggtggagaccacgacaccctcctcatatggatactcggctttcacatgctgatgcagctcatcctgatgaactagacgaagagttcgatactttcccaacttctcgaccttccgatatcggacggatgaggggcgatcgttttagaagtatagctgggagagttcaaactgtgatcggggacctcgcaactcaaggggaacgatttcagtccttgctaagctggagagacccgagagcaaccacattatttgtgacattctgtttgatcgctgccttggttctttacgttacgccattccaagtcgtgctcttcttgcaggaatttacattttacgacacccgaggttccgtcacaagcttccatcgacacctcttaacttctttaggaagttgcctgcaagatcagacagcatgttatgagcaccccaagcagccattatatgttttccgatgttcgcggcaatcgg

SEQ ID NO: 21314 - DNA, 417 bp, Gossypium hirsutum
  Clone ID: GOSHI-09MAY01-C46649_1
tcctgatgatgatggccggtgcggttcaaaacttcagagtgcaggtcttccgtgctaaaattggagcatcaaatgggtcatctcttagtttgtttcggaaattgggcttcaaggagacttcttatagcgaaatcttcaaggaggtaacattggaattggcggtgacggagcaaaagcaagaggagcttctgcagttgttgggcagtgtggttacacatgcatagcctccgggaggccgtaatttattttcccctaaaacttattaactgtcatcatacatgtatctgtgagttgtagaaactagaattgtagatgattccctgttttcggaaaagggttttgatgtttatgatgatgatcaatgctggaaacttacatttgcaataatgataaacaatgatgaattgctttagcatt

SEQ ID NO: 21315 - DNA, 700 bp, Gossypium hirsutum
  Clone ID: GOSHI-09MAY01-C46669_1
cggacgcgtgggtttgacagacaccattagtgcagttatccccactgacaaggaacaaacgaacacatcggttgatcacaatggtgtttgggggtctcttgcagctgcgtctcatattgatcagaatccagaaacagctaaacagaagcatgttgcagcagaggcctcgtccaaggagatgcaggctaagcagggtgcatccaccacttcaaccagaagtcgtactaaggtacaaatgcaagggattgcggttggtcgtgctgtggacttaactgtgttgaaaggatatgatgatctcattaatgaagtggagaaaatgtttgatatcaagggagagcttcgccccagtggtaaatggtccgttgttttcactgatgatgagggtgatatgatgcttgttggcgatgatccatggatggatttttgcaagatggtgagaaagatcttcatatattcaagcgaagaggtgaagaagattagtccaagatgcaaatttgcagtgtcgtctttggagggtgaagggactgctgtaaccattgattcagagcataaatctgaaacatgaaataataaagtttgaagacccttcttatttacgttacatatatatattgtttattttggtttccttggtagattatactctgattagaacagtgaatgaaatgctgcattgaagaaaaagtacacagttgatgca

SEQ ID NO: 21316 - DNA, 421 bp, Gossypium hirsutum
  Clone ID: GOSHI-09MAY01-C46189_2
aaatgggagtggagaagaagatcatggtgttgtggatttgttcattggtaataagctcaatggtgatggaagagggtgcaaacgccacaccaatcagctacccgggactgggaaaaaatcttcaagttccatgcaaactaggaggcggtaattgcctcccaccaccatcaaacggttatgacagaggatgttcacacctaaaacgatgtcgaagtcattatacaacgcccatctttcattgaccacaactagaaaatgcacatcattaacttctcccttttttctataaaattatgtgaaaaaaaggaattaatcatttcatatgttaattcattcctgattgttgtaagccatgaattccggaaatatatacttcaactatttttttgaaggaaaaaacctattctaccttaataaaaaa

SEQ ID NO: 21317 - DNA, 443 bp, Gossypium hirsutum
  Clone ID: GOSHI-09MAY01-C46189_1
cccacgcgtccgatatttcttggaagaaaataggaatggagaagagatcatggtgttgtggatttgtgcaatggtgataagctcaatggttatggaagagggtgcaaatgcgacaccaattagctacccaggactgggaaaaaaccgtcaagttccatgcaaaattggaggcggtaattgcctcccaccaccatccaacgattatgacagaggatgttcaccccaaaaaagatgtcgaagtcatcatacaatgcccatctttcattgaccacaactagaaaatgcacttcattaacttctctctcttttttttttttgctatcaaattatatgtcaaaaaagaacaattaatcatttcatatgtttattcattccttattattgtaacccatgtattccagaaatatatacttcaacaatgttttaagaattctgaaataaga

SEQ ID NO: 21318 - DNA, 391 bp, Gossypium hirsutum
  Clone ID: LIB3828-013-Q1-K6-E2
atttcttggaaaaaaatagattgcagaagagatcatagagttctggatttgctcaatgctgatatgctccatggttgtggaagacggtgcatatgcgacaccaattagctacccaggactggtgaaaaaaccatcacgttccatgcaaaattggaaggcggaaatcagcctaccacctccatccaacgatactgacagaggatgttcaccccaaaaaacatgcgataagtcatcattcaatgcccatcttccattgaccacaactagaaaatgcacttcattgactaatctgtatatgatttgaattgctatcagattatatgacagcatagtacatataatccttctttatgatgtattcataccttattattgcaacaaatgtatgcca

SEQ ID NO: 21319 - DNA, 400 bp, Gossypium hirsutum
  Clone ID: uC-gsflmaxxa098e02b1
gattaaaatgggagtggagaagaggatcatggtgttgtggatttgtgcaatggtgataagctcaatggtgatggaagagggcgcaaatgcgacaacaattagctacccaggactggaaaaaaaccgtcaagttccatgcaaaattggaggcggtaattgcctcccaccaccatccaacgattatgacagaggatgttcacccctaaaaagatgtcgaagtcatcatacaatgcccatccgtcattaaccacaactagaaaatgcacttcattaacttctccttatttttgctatcaaattatatgaaaaaaaagatcaattaatcatttcatatgtttattcattccttattattgtaacccatgaattccagaattatatacttcaacatttttttaag

SEQ ID NO: 21320 - DNA, 626 bp, Gossypium hirsutum
  Clone ID: GOSHI-09MAY01-C46139_1
cccacgcgtccgtgcagttgttgaggaaattggagtgccagctacatccttgtcagatcctctttttatcggcatatcccgcagggtcttgaatgttagaccagctatctttttctttattaaatgcagtcttgaatcaaaagaaatccatcaactgtattctaaggcacaagatggctatgaatccactcaactttatacagtctcaatgattgaagtagagcatatgacattaaaaatgcctggctgtcatcaaggtggatttgctctctataaactaatggttgaagcgttgaagaagaactgatgatagttcattgctgctgctctcttcgatttcaaatttctactcttctatatattttccatcttagatttcaaagcaataacatcgagttcataaactttgatgtaactataacgtcattttaattgctttcaaggaaattccaggctaattgtaaccagtgtgatatgttgtataataaaccagaggagttatttattgtattgtggggatttctttctgttggacattttcattccaacttgcatgtaatttgaaagtcttgtagctttaccaaaaaaaaggtttaggggccaattcaagcattcttgttttttcc

SEQ ID NO: 21321 - DNA, 631 bp, Gossypium hirsutum
  Clone ID: GOSHI-09MAY01-C46299_2
cccacgcgttcggaaaggttccaggctaagcagcaggatgctagtgataattggaacgatgcactgcaaaatgctaaagcacatccatttgacgatcacactaccaaatccagaaaacggaaatctagagatgaccaaggggcaacgaaccattcagagttgaaaaaggctgaaatggaaaacgtggttgccaccgaagaaggccaagctagtaaaaagccaaagcttaacccaaccggtgaaaagagaaacccattttcgaaggaaatttttgaaggctccaatcagaagttgaaaggatcaaggcataaccccaaggatcgtaaaggtggcgcaaaacctgctgttggtagttccgacaaggttgaaacaaatgttaatgagaccagcaaattaaagttgaaagaggtgaaagcaatttcacacccgaaagagaggacacgacaagaaaaggcaaagccggaggagggagagacaaatttaaaaaggaaaaggccaaaaaggaataaagatccatcaagccgagacgtggtagacaaactcgacatgctaattgaacaatacagatctaagttctcacagccgaaatccggaacacccgacgcggaaaagcaaggttctaagaagctta

SEQ ID NO: 21322 - DNA, 650 bp, Gossypium hirsutum
  Clone ID: GOSHI-09MAY01-C46299_1
gaaccttttcgaaagaaaatttggaaggctacaatcagaagttgaaaggatcaaggcataagcccaaggatcgtaaaggtggcgcaaaacctgctgttggtagttccgacaaggttgaaacaaatattaatcgggtcgactttgcgtccggagaccagcaaattaaagttgaaagaggtgaaagcagtttcgcacccaaaagagaggacacgacaagaaaaggcaaagccggaggaaagagagacaaatttaaaaaggacaaggccgaaaaggaataaagatccatcaggccgagacgtgggagacaaacttgatatgctaattgaacaatacagatctaagttctcacagccgagatccggaacacccgacgcggaaaagcaaggttctaagaagcttagaaggtggtttcaagcttaattccattggcagcaggttagaaccagttttgtagcatatcccatcatactcatctttaaggggaaaatatgagaatattagatgaggcacttgataatgcaattgctataaatttagtaccttgttgaaaggttttaacaattttgtgcactctgtaacacaaatgtaccaatttcatactagtctgttgaatattctttacgctaaaaaaaaaaagaaagggggcggcc

SEQ ID NO: 21323 - DNA, 737 bp, Gossypium hirsutum
  Clone ID: GOSHI-09MAY01-C47969_1
ctttttaaggcgcagagccaaataacatcatcaaaataatttgaaaaaaaaaaagaaaaaaatggaaggagcttcgtaccagcgattcccaagggtcaaaatccgggaactcaaagacgaatacgctaaattcgagctccacgacaccgatgcttccatggccaacgccctccgccgcgtcatgatcgccgaggttcccaccatagctatcgatctcgtcgaaatcgaagttaactcttccgtcctcaacgacgagttcatcgcccatcgactcggtctcatccctctcactagccaacgcgccatgtcgatgcgattctcgcgtgactgtgacgcctgcgacggtgacggacagtgcgagttctgctccgtcgagttccatcttcgcgccaaatgcataagcgatcaaacactggatgtcaccagtaaggatctttacagttccgatcatacggttgttcccgtcgatttcaccgattccgctggctacgaatcctctgaacaaagggggattatcatcgtgaaattgcggcgagggcaggagttgaggctgagggcaattgcaaggaaagggataggaaaagatcatgcgaaatggtcacctgccgcgactgtgactttcatgtatgaacctgagattcacatcaatgaagatatgatggataccctgacccttgaggagaaagcaaagcttgtcgacagtagtcctactagagtctttgacattgatcctaata

SEQ ID NO: 21324 - DNA, 455 bp, Gossypium hirsutum
  Clone ID: GOSHI-09MAY01-C47519_1
ctggataccacgatcaggatgttttcaatattatattgtttgatcctttaatctcagatatgggattaaagattaaatttttggatactgcttattttggtggtctttgtgaacctagtaaagatttgaatttagtatgcacaatgcatgcaaattgctgttatggtatggatagcaagcttcatgatctcaaaattatgcttcaagattggagagctttcacgtcattgccaccagatctgaagaatgaatctgttatctcctggagggttcctcagaactgcagtctccattcgttacgccattttgattcaccatctccagagattaatgtcgaacgagaggaagaaaattgattggaattggacatatgtttatattattaaccggcacaagaaccttgagaggggtaagctttcgttttccttcgggtgttgggatccttctcatttacg

SEQ ID NO: 21325 - DNA, 603 bp, Gossypium hirsutum
  Clone ID: GOSHI-09MAY01-C47789_1
cccacgcgtccgcggacgcgtgggaaagaaaaatccaatctttggttctgtgccggtccggacaggaaaaaggagagcaaagaaaccgagcaaagattctggcaaagcgaatggctcaaaccatctcctacattaccggctctcaactccttccccttaaacgccttccgaatatcgccatcatagatgttagggatgatgaaaggagttatgatgggcatatagctgggtctttgcactatgccagtggcactttcaccgataagatctccaatcttatccaagatgtcaaaggcaaagatactcttgtttttcattgtgctctaagccaggttcgtggcccaacttgggcacggaggttagcgtatcatctagaggagttgaaggaagatactgggatcaagaacattttggttttggagcgcggcttcaatggctgggaagcttccggacgacctgtttgtcgctgcactgacatcccttgcaagggcgagagtgcatgaccaaccatccattagaattaattcgggctgataaggaagcaaaaacatatatcatctacttggtgcccaccattttttggtattctctcttctgattgat

SEQ ID NO: 21326 - DNA, 431 bp, Gossypium hirsutum
  Clone ID: LIB3135-036-Q1-K1-H3
gaacaggaggttcatcagcatggactataaaagtgatgtgtgaatcaaggttcgtggcccagacttgtgcacggaggttagcgtatcatctagaggagttgaaggaagatactgtgatcaagaacattttggttttggagcgcggcttcaatggctgggaagcttcccgacgacctgtttgtcgctgcactgacatcccttgcaagggcgagagtgcatgaccaaccatccattataattaattccggctgataaggaagcaaaaacatatatcatctacttggtgccaaccatttttcccgttattctctcttctgattgataatgtgtaatggagatatactatattactgggtttgcgttctaccatacgtgttttcactgttgcctcaacaaaatcgcacgcttgacccacatattgaggaacaatt

SEQ ID NO: 21327 - DNA, 747 bp, Gossypium hirsutum
  Clone ID: GOSHI-09MAY01-C47769_1
aaaaaaaattacgatcgaactgaaaaagaaaagaacacagaaaggaatgagatcttggaattcatcagttgttttgttcttcttttccttgcctttcctccttcccctctctgccttagcttcttcaattcatgaccaacatgaaagaatcgggcacagagttttgatgagcttcaaagaaatttcgaaagaacctaacaatactttcgattgctctccctctggaccttgtgttccttgcctttactctgagaagagtgaccaaaaatatcgatgtagtgagactggctatcgtatccctttcaaatgtgtagaaactgatgatggttcaaaggccgaaaataaacaaaaaacagaaaagggtaggtctaatcttgaaatctcagttatcaatgaggatttaagacaacgaagaagcttacttgatgattcatcgacatcggagagtgggtcacgagcttatatcacctataggagctgtatacctgcagttaacgaggagaagttatcagtactcggttttgagggaattatttttgggttactgctcattagtggttcggttgtattcttgagaagaaagcgggccattaccatgcctggagtttcagcagggaggatccaaccaaactctaggttttgattaataagccctttcatatgaaaccgactttgttgattgttgaggctttggagtaatttagtataaaactacatctaaaggtaaatgcttagctgctcttcctt

SEQ ID NO: 21328 - DNA, 576 bp, Gossypium hirsutum
  Clone ID: GOSHI-09MAY01-C47189_1
agaaaacgtaaaccaggtagtggtccatatgttgttattgataatagaaccaagggctcagctagtacccaggaaacatcaagtgatgatggagacagtgacactgaagaaccatctggagctgaggatgctgatgcttcaaacaaggatgaactgaaaaccgtaaagagtgatacagtacaggatccagaaaactctgtaccagctgcaaatgaacagttggaaaggactattgatgaaggtgctcaagcttgctctactttattcatagcaaatctaggtccaaattgcactgaatatgaactgaagcaagttctatccaagtatcctggattcaatatgctcaagattcgggctaaaggaggaatgccagttgcatttgctgattttgagcaagtagaacaagcaacgaaagtgatgacggatcttcagagcagccttttgccttcatcagaccgaggcggcatgcacatagagtatgcaaggtccaagatgaggaagccctaggaaaaaggtaatggagctggctatctgcaaaaaatggtcccaccagttgtattttagaagcagtctcgt

SEQ ID NO: 21329 - DNA, 511 bp, Gossypium hirsutum
  Clone ID: GOSHI-09MAY01-C47129_1
gccaaacaagccggagcagagggcggattcaccgcaacgggaactggtgcttacaaagcagctgggactcactcttattccaccactggggaacgtggacaatccactggagctcatcagatgtcggcgttgcctggacatgggagtgggcagcctgcagggcaagtggttgagggtactgctgctgcccatcctattgggtcaaatcctggtgtgggaggggccaaatcacataatactcgaggggagggaaatccccatggatatggtactggagggacttacagttaatcccttttttcttgttttgtttgaggaaataagtaatgcacaagatgatgcaggtatgttatgatagaaatcaaatattgagcttagtactgtgaaacgaggtttttgcatggaagcttgagcttaatggttatgataacgcataaacattatcttcaacaaaaatcaactttgaattctgttgggacaaaataaaaaaatgatgggtaggaaattttac

SEQ ID NO: 21330 - DNA, 992 bp, Gossypium hirsutum
  Clone ID: GOSHI-09MAY01-C47049_1
ttttcctctcagatttttaaaaaaaaaaaaaagcaaaaaaagaaaaaagagctctcttgttaatcaaggtcacgtaaaaaagacttgagaaccagctgatcatggccaatgagcgctacatcgaagaggccgaagttcgaagctatttattagaaagcaaaaattccatggagaagtgggtgaattcgccggaaacagtcacgggtgtcggacgataatccctcagccggttttgactgcaacatttgcctcgatactgtgcaagatccggtggtgacgctatgcggtcacctatattgttggccttgtatttacaaatggcttcactgtcaatccatctccactgaaagccatgaccaaagacagccgcaatgccccgtatgtaaggccgaagtttcggcttcgacaatcgtaccactttatggtcggggccggatgagtatggcatcaagaggcaaggctccccaacttggcatagtcattccaaagagacctgttggtcctgattttggcacaccaagatcacctaatagtgccactagtccacaatttacacatcaaatacatcaccatcaccatggctattcatatcaaccacaagtgtccgattatccgtcttcgccgatgcttagtcccggcggcacaatgatgaacgtgccggatccagtgacccgaatattcggtgaaatggtatacgcaagggtatttggggagtcaattacgaacttatatgcgtatccgaattcatacaatcttaccgggagcacccctaggatcagaaggcacctaaagcaagcggataaggcactaaacagaataagctttttcctcttctgttgcttaatcatatgccttctttcattttgatctattcggttaaccgaccattatgtatatatacgctgtccggctgctgttccaatcagcttaggagatgttgcatctcctatgttacgatataatattatatatgaaattacaagttttgatcg

SEQ ID NO: 21331 - DNA, 1075 bp, Gossypium hirsutum
  Clone ID: GOSHI-09MAY01-C47229_1
aaaacatgaagatatatccagctttcctcagtttcctcttcatatccatcttcatttcaccttctgtctcagaccactgcaacgctcaagacaagaaggttcttctcaagatcaaaaaggccttaggcaacccttacctcttggcctcatgggaccccaacactgtcggctccgcgtccgcccgcccggccggccatcccaatacccaccgtgtcgtttccctcaccctgttctccgatgatcgtctcaccggccaaatcccccctgaagttggcgaccttccgtaccttgaaacccttcttttcagacacctccctaacctcaatggaaccatacaacccgccattgccaagctcaagaacctcaagacgcttcgcttgagctggaccaatctttccggtccagtccctaattttcttagccaacttaagaacttgacttacttggacctttcatttaataacctctcgggatctattccaagctccctttcaacactcccaaatctcgaggctttgcatttggatagaaacaagttaactggtaccataccagaatcttttggtatgtttcctagcaaaaacctgtatttgttcatcttgtctcacaataaactttctggtacaatccctgcctctttagccaacatggactttaacaccattgacctgtcgaggaacttgctgaaggtgaccttcagtgttgtttggcccgaaaaaaacgacattcgaaatcgatctttctggaaacatgttcaattcgatcatttaaagtgcagttcccaaggagtttggcaggcttggatctgaatctaacaagaatccgggaagtattctgcggtgaacggaactgaggggcagtcatgaatggttagtaccataagggtgtgcggacaatcccgtggaggggtgtgcaagtttcgattcttcacgtattttcacaaccgtgcttgtgccgtgctccgctcgacactgcagtaaagtgcgctgcgacatataagtaggctttatatgctaaaagcagtgaagtgattacccccctgtaattagctaacattcaggaattctttatcaca

SEQ ID NO: 21332 - DNA, 589 bp, Gossypium hirsutum
  unsure (1)..(589): unsure at all n locations
  Clone ID: LIB3585-037-P1-K1-F10
cccacgcgtgcgtccacgcgtccggccacgcgtgcgaccacgcgtacgcccacgcgtacggatgtatccagctttcctcacggtcctcttcatatccatcttcatttcaccttctgtgttagaccactgtgacgctcaagacnagaaggctcttctgaagatcaaaaaggccttaagcaacccttacctcttggcctcatgggaccccaacactgattgctgtgattggtactgtcttgaatgccatcccaatacccaccgtgtcgatcacctcaccctgctctgcgatgatcgtttcaccggtcacatcccccctgaagttggcgacctttcgtaccttgaaaccctttttttagacacctcccttacctgaatggaaccatacaaccccccattgccaagctcaagaacctcaagacgctttgcttgagctggaccaatcttttcggtccagtccctaattttctttggcaacttaaagaacttggcttacttggacctttcgattgataaccttttggggtctattttcaaggttcctttcaacactcccaaatcttgaggctttgattttggatagaacaagtta

SEQ ID NO: 21333 - DNA, 353 bp, Gossypium hirsutum
  Clone ID: GOSHI-09MAY01-C40989_1
cacccgtccggggaacttataatttgttatcaattttcttaaagctaaaagctgccaaatatttcatggctttagactttaatttgtatgaatacgtattagccagccttataaattcttccctttgagttcctattagcttggaacatgctgggcctcaattgaaaggatacaccatagcaagttgattgcagattcagttgggttgaggctcatatcatatcctgaattttaaggcccagcagaaaacacccttctaacatcgtctagtaataaaaagcaaatagaaaatgttttcccagatccccttgtattgtaaaaggaaagaaaatcccagcattactttttgcttt

SEQ ID NO: 21334 - DNA, 494 bp, Gossypium hirsutum
  Clone ID: uC-gsronu33B160b04b1
gtgattgcgggaaacaagtatatttgggtggatttgacactgcttatgctgctgctagagcctatgatcgagcggctattaagtttcgaggtgttgatgctgatatcaatttcagtctctgtgattatgaggatgatatgaaacagacgaaggatctgagtaaggaagaattcgtgcatgttcttcgtcggcagagtactggtttttcgaggggaagctcgaaatatcgaggagtaacgttgcacaaatgcggcaggtgggaagcacggatggggcagttcctaggcaaaaggtatatttatcttgggctattcgacagtgaagtagaagcagcaagggcttatgacaaggcagctatcaaaagtaatggacgggaggcagtcaccaactttgagctgagtacatatgaaggggagatggtctttgataccaggaacaaaggcaatggtcacaaccttgatctgaacctggggatatctccacctgttagcgat

SEQ ID NO: 21335 - DNA, 445 bp, Gossypium hirsutum
  unsure (1)..(445): unsure at all n locations
  Clone ID: LIB3147-036-Q1-K1-B5
gcgcccacgcgtccgaccacgcgtccgcccacgcgtacgcacaaatgcggcaggtgggaagcacggatggggcagttcctaggcaaaagggcttatgacaaggcagctatcaaaagtaatggacgggaggcagtcaccaactttgagctgagtacatatgaaggggagatggtctttgataccaggaacaaaggcaatggtcacaaccttgatctgaacctgnggatatctccacctgttagcgatggtcccaaggaaaaggaaaatgcggggcatctccaaatgaataacggaaagagtttaagggcagagaaccctgcagctgcaacatttagtgttccatctttccaagggttagcggggacttcagatcagcctattttctggaatagtgcatatccgagattcttccctagtgaggaaagaactatggtgaaaccggttg

SEQ ID NO: 21336 - DNA, 705 bp, Gossypium hirsutum
  Clone ID: GOSHI-09MAY01-C40909_1
gcgcccacgcgtccggtttcctttttgcaaaagattactggccagaccatacaattacccactaccgcaactgttattgtacccgcacctgcaccaccaccaccaccttcaccgacacaaccgaccgtctccgttgttccaccggaggtccctattgctccaccatcgcatcaaacaccgtcattaccacaacaaaagcaacaagaacaacaacagacgcatatatctcaccatcaaccaccaccaccacaacagcagccacaggttgttcaacagcagcagcagcttcaccatatggaacttgtgaggcatcaacaacagcccattactacagaaatagtaatggcaatcccggaacaacaggtcccaccacaagagactggtgggagtgggagcttggcggagccagcctcgtctagatggcctaaagctgaagttcttgcacttataaacctgaggagtgggcttgaatccaggtaccaagaagctgggcctaaaggtcctctttgggaagaaatctctgctggtatgtccaggttgggttacaagcgaagcgccaaacgatgtaaggaaaagtgggagaacatcaacaagtacttcaaaaaggtcaaagaaagcaacaaaaaacgtcccgaagatgccaaaacttgtccctattttcaccagctcgatgccctttaccgtaagaaaatacttggtggtgcc

SEQ ID NO: 21337 - DNA, 541 bp, Gossypium hirsutum
  unsure (1)..(541): unsure at all n locations
  Clone ID: LIB3585-011-P1-K1-F2
agctcatcagagagcagtaaggacattttcttttgcagtgcctctccggactcagacagaaatgacccttttctacagattcaaaagtcttctttggtcattgacgatggtgggttccatctccgtcggtacttcttcgatccaataggacgagctagtcagattgtactctcaagcttcaaaggcgtgcgtcatttcatttgtttttcgagagagcatcaccttctacaaccaaatctcggaaacccatttcttccccaaatatgacggcttgaagacacgccttcgcttctgcagtggtcgaatcccctgttcttcctagagggacctgttttgtaaattcgcagtctcaaaaaaaatgttccacagtttattctccaactgagcagactagacatgcagcatcattcttgagtcttcgaagtttaaggatactgagcgtcggaagaaaattgttagcaactctccacagatgtatttttattttacttgngatcaggagaatccaaagctttgtaaaataatctttttttgttgattt

SEQ ID NO: 21338 - DNA, 430 bp, Gossypium hirsutum
  Clone ID: LIB3147-035-Q1-K1-G2
aaaatccacaaccttttgtacccttcccttttttccttcgtggtaaagtctattgctggtgataccaaactgcccaaatagaaattaccatggttgcacatactttaatattattcatgtagaagaaagaggctaaccattgtttctatgtgtggtttgcgtttatgtgcgagatggccaacccaacttcctgcaggatctgttttatgaatttgcaatctcgaaaaagatgttccatagtttcttctccaattgagcagactagacatgcagcatcgttcctgagtcttcgaagtttaaggatactgagcgtcggaagaaaattgttagcaactctccacagatgtatttttattttacttgggatcaagagattccaaaagcttgtaatataaaactttattttttgatttgggatgtaacataatcc

SEQ ID NO: 21339 - DNA, 764 bp, Gossypium hirsutum
  Clone ID: GOSHI-09MAY01-C40869_1
tctactgcaattgaattgttcactctattaattattgtctttaatgatatttattgtcctttcagtgatatattgctttgcttgctatgtatattcttctctgaagtaatgtcttctgttttctgcataccagaaaggatcttttaatgttcacttatgcttacctcagactcttgaggctataaagaggatatgtccaaaacgagctctattaatcggaatgacacatgagttcgatcaccacaaggataatgagtttcttatggaatggtctgagagggaaggaatccatatacaacttgcacgcgacggtttgagggttcccttccacctattcccagaagcctctcaaatgcaagtgctgagaagatagcatccatccaaagaagctctttaccaacccagtacatgtcaaacagagatacatggtgtgcagggtgaggaagtcaaaaagggcacaaggatgatgcgataaattactggaacataccccttccagaaccccttgtgtcaaattaaggcggccatctgtttgcttcagctcattgagaggtttaagaagcatctgcaggccatttgaagaaaagtaaaaaagaaaaacaacatatttcgttgtttaagattgtcactgcatggaataggagagaactccaccttacacaattggtaggactgcgatcttgccctaagcatgtgttgtgtccagccattgcataatactgagcagcagtaaagaaagacaaaaaaattggaggtggatgggg

SEQ ID NO: 21340 - DNA, 790 bp, Gossypium hirsutum
  Clone ID: GOSHI-09MAY01-C40539_1
cgttttgagtcattataaaatacccctcgctgactcagatataagtctacattcatagcttgcattagttgacgaagcatcatattatcggagagataagaaatatgtcgaagacggagcagccggtgctgggagtcccatactatgcagggccgcggatggatggataccaacaggggaggataccagccaacgccatatacggcgatccaaagggaattccgattcagcaaaccatgtatcgggatactcccgctcctttcaattgcccttactgtggtaattccggtctcaccctcgtcagatctaagcctagtttggcagcagtggttggatgcatgatgccctttatgcttggaatctgcttcctttgcccttccatggactgtctttggcataaatatcattattgcccaacctgcaatgagaagattgctgattttgagaaatcagatccttgtctggtggtggatttgccccaatggatgcagaagagttttgctttgcctgcatgataaccaagtctactaaaacccatttgcttctgatttgctacaaaccattgtctatacaagcaactgtgttttgaataaaagctttccactcgactctgttgccagtcgcaacagcctgttgtgtatttttttggatacatacaatctatccatagctgaatttaatgttataagtcaatttgatcttacctccattagaaaaagcttcatgacattattgacgaatagccccttcggtttgaactatacaataataaacatatgtaatattcttc

SEQ ID NO: 21341 - DNA, 646 bp, Gossypium hirsutum
  unsure (1)..(646): unsure at all n locations
  Clone ID: AI055491.1
gaagcatcatattatcggagagataagaaatatgtcgaagacggagcagccggtgctgggagtcccatactatgcagggccgcggatggatggataccaacaggggaggataccagccaacgccatatacggcgatccaaagggaattccgattcagcaaaccatgtatcgtgatactcccgctcctttcaattgcccttactgtggtaattccggtctcaccctcgtcaggtatttcctctttctttttcattcccttatcatatgagatcggttttttctagttcccgatcatctatttgaggcggttgtgcgggattgtaacgaccagagtcgactctaggtcctgcctgacttctgaaatttgtggtttgtttttcttatatgcgagtttgtatttttaatttataacgtcaaattcagtaagagcgttatatagatagatagaatgaatcaatggtagtttaatttataataaaacatgtagatgctctgtagttcctaattttaagttncttgtggcagtggatacaataaaagtggcttgttaaataacatgacaaacatgaaatggctgtttctggtacccctggctggcatatacatatgatatatactcataaattattgtgaatcaaactaaccn

SEQ ID NO: 21342 - DNA, 312 bp, Gossypium hirsutum
  Clone ID: GOSHI-09MAY01-C40499_1
ctgcctatattaaataagcattaagatccatattagcctattgtaatagctggtaggcacttttgactgaaaattcgctagaatgttctcctcgccagacttgaaaatcatcatgttcatcttctgccaaaggaatttgcagaatcttctgtggtgtgtccgcttgaaaggtactatctttgagtccattcgttccttctcccgatacccaccgatcattctaaatagatatttgatctcccctactgactcgccaacataggtcatcttgcagtaacccttttgctgtccaaacgctcttccaagtaagtg

SEQ ID NO: 21343 - DNA, 555 bp, Gossypium hirsutum
  Clone ID: GOSHI-09MAY01-C40459_1
cccactcgtccgggcatctcaaatttcagagtcccatctccttcacaaactcgacattttcaagatccaaggcaaagataaacgcggccacaagattcttcgcattaccggaaagtccttccccgctcggtttttgagcgttgatgttttgaaagagtatttagatgagtatatatttccaaggctttcaaagaagccgttttcggtgttgtacatgcataccggagttcaaaggaccgacaactttccgggaatctcagccctccgatcaatctatgatgctattccggtcaccgtcaaagataatctccaatccgtttattttctgcaccctggcctccagtctcggctcttccttgccactttcggcccccctttctttggtgacgggttgtacgggaaattgagataccttagcagggtggattacctgtgggagcacataaggagaaacgagattgaggtccctgatttcgtgtatgatcacgatgaagatatggagtaccgtccgatgatgatggagtacggttgggatatgatgatcctcaccctagt

SEQ ID NO: 21344 - DNA, 435 bp, Gossypium hirsutum
  Clone ID: GOSHI-09MAY01-C40739_2
ttttgatcggataagatgtatctccagttctacataaacgagaatggtgacaaagtttacaccactaagaaagaatcaccacatgggctgcctactcagtctgctcatccagctcgtttctccgggggggacaaatacttttttaaaagagttcttttgaagaagcgtttcggattattgcccacccagcagtcgccacttattatactgattcatttcatgtcatgcatgcgggacttttagatagcatacttcgcgtctttgtatgtgtaatgaagttcctcttcggctcatatctgagtccctttatgatgacgatgatgatttaaaactacaaacagctaagtcacttgagcattttgtttgttccaagagtagattaaggcttgttatcccttctttgttttaagaattaggtttactatgttcctatct

SEQ ID NO: 21345 - DNA, 387 bp, Gossypium hirsutum
  Clone ID: LIB3147-033-Q1-K1-F2
tgtatctccagttctacattaacgataatggtgacaaagtttacaccactaagaaagaatcaccgttgggtatgcctactcagtctgctcatccagctcgattctcccctgatgacaaatattccagacaaagagttcttttgaagaaacgttttggcttattgccaacccagcagccacctcagaaatattgatagatcggatgtgttctttttgaagctttatgcagtgcctctggctgtaaaatgcagtttcctgtaagaacatatcaagtatatgaatgcattgcattggcatgttttcttcctggattattgtttgtatttatacatgtcgtgacttaaattttcttcaaagataatggtgcatacatgtgaacgtctttta

SEQ ID NO: 21346 - DNA, 387 bp, Gossypium hirsutum
  Clone ID: LIB3147-036-Q1-K1-E4
accggcgcggagacccaggcgcgacgcgcacgcagtcggacatgcagcacatgctactaacgatctcgaatcgtttgcagttaaggcatgctgaactttgatatagcatacttcgcgtctgtgtatgggcaacgaagttcctcttcggctcatatctgagtccctttatgatgacgatgatgatttaaaattacaaacagctaagtaacttgagcattttgtttgttccaagagtagattaagtcttgttatcccttctttgttttaagtattaggtttactatgttcctatctcagagaaaaaaaagctatacagaacactaaagatataattgtccaatctgcatgaccctatgggtagaaggccgtcatgaaataaactcaaaa

SEQ ID NO: 21347 - DNA, 701 bp, Gossypium hirsutum
  Clone ID: GOSHI-09MAY01-C40189_1
tctttttgccatgggaagaattgctcagggaacaaaggttttagcagaaggtgggtatgagaaaatttttagacaaacttttgagacggtacctgaagagcaacttcaaaattcttttgcatgttacttgtccacatcggctggtcctgtcatgggagttttatatgtatctacagcaaagcttgcgtatggcagtgacaggccgctttcctatcaaaatggtagcaagactgaatggagctactacaaggtagttatcccattacatcaacttaaagcaattaatccttcaacaagcagagtcaatccttctgaaaagtacatccaagttagctctgttgatagtcatgaattttggttcatgggcttcttaaattacgagggtgctgttcaatgcctacaggaagctttgcaacagcatagcttacaatctgtgtgataatgatttgaccagtatatcggttgcaacatgttgtcatgcaagcatttggtctgctgcttcgaggcatttgatggtaaatgctccttcggaagctcttcaatattctgtggcaatgaaaaaataggtgaaaacatagagtgatatctggatattatatggcaattagaagaaaagaatacaatgaatctgttctgttttaaactcatctgattgtaatttactataaacattcggtatgctataagttattggaaggatt

SEQ ID NO: 21348 - DNA, 1250 bp, Gossypium hirsutum
  Clone ID: GOSHI-09MAY01-C40099_2
gtcgaacatggattaacggtggtagaaggtgtcaccagactatgagaggaatcctcgtcctaactttttggaagttaaagaaaacagatcagtagtatatggtgatggaattccgtcagctcgatcagatggcaaatttggtggtcctaagttgcagccatcaccgtcagaagcatctgagcggcccaagttgaagttacttcctcgcaccaagccattggataatctagaaccacctgttgttgatgctaagcaggagcagcagcagttgagcgaatctgttcttactcatgctggaattggtaatgattcatatggatatgtgaatactgtgaaacctggttcagctggcagtgagaatgggaaccaggcagtggagcgtcctaagctgaatttaaagcctcgatcacagcctgttgaacagttggagggtaacattgagaaagaaagaaatgtgttgttcggcggtgctcgcccacgagaactggttctgaaggagagagggattgatgacagcatccatgagccggaccaacatcctgatagggtcgtcaagcataatgttccgaggagtgaaaaagtagcagagcaagcagctcctcgtcccagtgaaagagttgggaatcctcctgttgatcagagagctggaagaaaatctgagagaaaccatggtgtttacaatgaaagagttgatacgcagaggaggaaccggcctaatgaaaactggcggaatgacaaggaaattgagaggcagcagcggcaggagaggcagccatcacctgagacctggcgtaagcctgcggagcagcctaaaccagtctctcctgaagctgctggtgttcgctatggaaaagcagcatcagctttggagcttgctcaagccttttccaaatcattctcagatcagaaaacagatgatcgatatgcggggcaaaggggtcttcctggccgtcctcaaatgcccttttctcggctgatgggttcaactccaaggcctcagataaatggttactaaattttgggaggctattttcttaccggtgactggattgtgttaccggtaattccctaattggttttaggatgtcagtgattatagttgtgctgtatgacctcatcatttcatacagttgatctgtctttgtttttttcatttaaaacaaattttcagaacaattggcacaccaaatcaattgctatgtcatctttattcgcctcaaatgattcccagattttgctagtgtcccttc

SEQ ID NO: 21349 - DNA, 643 bp, Gossypium hirsutum
  Clone ID: AI055716.1
gtacaatctgtatggtctgaacaaagtgctgtctcgaagttggctcatgctagtgctatggaaaagatttcctcaggtagatggcagtcaaagcagtctattcaatatcagaaagatgtcgatgttagtaaacattcagaaacagaaaccggcttgcactcccagggttatgatgtgattgctgtggctgggagggaacattctgatgtgatatcggcaaggcaagttgaaaggggtgtgaatgttgaacatggaattaactgtggtagaaaggtgtcaccagactatgagaggaatcctcgtcctaactttttggaagttaaagaaaacagatcagtagtatatggtgatggaaattcttcagctcgatcagctggctaatctcggtggtcttagtttctaccatattcgtttgaattatttgacctgctcaaattgaagttactatctggttctaatccttggaaaattataacaccctttgatgtactctatcctatctgaagtattatttacctgcttggctttcatactgtcttacttatttaaatcctgacttttattttgaaactcctatacgtgttcatataaactcccaatttgattaatggttgatcctgctgatggattatgaatcctatct

SEQ ID NO: 21350 - DNA, 475 bp, Gossypium hirsutum
  Clone ID: LIB3135-024-Q1-K1-G5
gaaagacctgctgcgaaaagagacaatctctgaatctgtggctgacagatacctctactgcgggagagacccatcatacagagcaagctgccaactttcgcagttttcgattatataacagggagggagtaggtattagctattgctgacacgcgtattcgtaaaagatttggcattccgagaccccatcagagagcttagagagaatgtgagatactcacatctgtgaaccagagccctaggctgtactctgacgttggtcccccctaatgaaaactggcggaatgacaaggaaattgagaggcagcagcggcaggagaggcagccatcacctgagacctggcgtaagcctgcggagcagcctaaaccagtctctcctgaagctgctggtgttcgctatggaaaagcagcatcagcttttggagcttgctcaagccttttccaaatcattctcagatcagaaaacagatgatcg

SEQ ID NO: 21351 - DNA, 429 bp, Gossypium hirsutum
  Clone ID: LIB3146-055-Q1-K1-D3
cccacgcgtccggtttgttattcacctattggctatggttatgcgaagggtcgtcaaacgtaatgttccgaggagtgaaaaagtagcagagcaagcagctcctcatcccagtgaaagagttgggaatcctcctgttgatcagagagctggaagaaaatctgagagaaaccatggtgtttacaatgaaagagttgatacgcagaggaggaaccggcctaatgaaaaccggcggaatgacaaggaaattgagaggcagcagcggcaggagaggcagccatcacctgagacctggcgtaagcctgcggaacagcctaaaccagtctctcctgaagctgctggtgtgcgctatggaaaagcagcatcagcttttgagcttgctcaagccttttccaaatcattctcagatcaaaaaacagatgatcgatatgc

SEQ ID NO: 21352 - DNA, 671 bp, Gossypium hirsutum
  Clone ID: GOSHI-09MAY01-C40359_1
aatgaaagaagggccattggcaaatgccctctaactccagaggaggttggtcttgtcttgcgtgctatgggatttgacaactctacacggatatacttagctgctggtgaactatttggtggagatcgttttatgaaaccgtttcgggatcttttccctcgccttgagaatcacagttctgtggactcttcagaggaactagttgcaaacacacggggtttgttaggctcggctgttgattacatggtctgtcttctttcggacatttttatgccaacgtatgatggaccgagcaactttgccaacaacctacttggtcaccgtctctattatggctttcgaactacaataagaccggacagaaaaggtcttgctccaatattcattgatcgagagaatggacagactgctggttttgaacaagcagttaggcgtgtcatgctcaaaacgaatttcggtgggcctcacaagcgtgtgccaccggaatcattttatacgaattcttggccggaattgcttctgtcaaatatcacctagcaatcctgcagacaaatgccctccggataatgttttggaaattttagaaagccagttggagaatgaagtgaatagagacctagaaaccttgatggaaacaattcaacacgtagaacggaaatatgagaattttc

SEQ ID NO: 21353 - DNA, 999 bp, Gossypium hirsutum
  Clone ID: GOSHI-09MAY01-C40379_1
aaaaagaaagaaaaggaaaaggatttttcatttttttctctttgaaagttaaagaaaaaagtccagagctaccgtcgagcttgatttcttcggcatggagaaagccaattcctgcaaatctcagttccagaaattcctcgatcgccgccggagcttccgaggtattcaaggtgccatttcgaagatgaatccggaacttatcaaatctgtgattgcttccggttcgacgaaccggaatccggttgattggagaaaatccttttcggttccgtcgagtcctaaagaagatcggagtacttcgcttccttctttacctctactcaatcctgctttgaggtctactccttctgaggatagtcctgaaacagcaccgttgacgattttttacaacggaacggtttccgtaatcaatgtacctcgagacaaggcggaaagcatcttcaaacttgccgttgaaggaagctcaaaaaacattgaatctgtagactcatcaaaggctgcaaatccttcaagtgatcaacaaaacctcctcgaagctcgtaatggagatttgccaattgctagaagaaagtcgctgcaaagatttctggaaaagcgcaaagagaggttgacttccccttatgcttggtagtcgctatacaccacctaaaccaaaaaacgcgttttgaagaaaaaaggaggaagggccccattttattaaacacaacgtagaagaaaactcaaaaaaggagccgacaaagaaagataattttagttttagcttatacagataatataatatatatctacaaatatatagaagaaaatggctaatttagggtctaataatagggacttgaagcatttctttttctttttttttaatttatatatatttatggatttgaagacgttggtttttatgtcacatgttatatgctgacctttcctttaattaattaatttatgactttatttactgttattatacaattctaataaaagcatgtgtttgttatt

SEQ ID NO: 21354 - DNA, 433 bp, Gossypium hirsutum
  Clone ID: LIB3147-027-Q1-K1-D8
cccacgcgtccgcccacgcgtccgttaatattcaaaaaaaaaaaagggtttaacatgttttgttcaggtctattccttctgaggagagtcctgaaacagctccgttgacgattttttacaacggaacggtttccgtaatccaatgtacctcgagacaaggcggaagcatcttcaaacttgccgttgaaggaagctcaaaaaacattgaatcagtagactcatcaaaagctgcaaatccttcaagtgatcaacaaaacctcctcgaagctcgtaatggagatttgccaattgctagaagaaagtcgctgcaaagatttctggaaaagcgcaaagagaggttgacttccccttatgcttggtagtcgctatacaccaccacctaaaccaaaaaaacgcgttttgaagaaaggaaaaaaggaggagggccccattt

SEQ ID NO: 21355 - DNA, 795 bp, Gossypium hirsutum
  Clone ID: GOSHI-09MAY01-C40319_2
cccacgcgtccggatgaagtccaaacgagagaagtatttgatgatgatggctggtttcatagaggagacattggtttgtggttacccggaggtcgtctcaggattattgataggaaaaagaacatatttaagttggcacaaggcgaatacatagcaccggagaagatcgagaatgtatatgcgaaatgcaaatttgtttcacaatgttttgtatatggtgatagtttcaattcatctttagtagcagtagttgcagtggaacctgatgttctaagagactgggccgcatctgagggtatccagtatgaggatttacgacagctgtgcaatgatccaagagcaaggaatgctgttctcgctgagatggatgatgtgggaagggaagcacagttaagaggctttgaatttgctaaagctgtaactttggtgcctgaacaattcaccttggaaaatggacttctcactccaacattcaagatcaagcgatctcaagccaaggagtactttgcgaaagccatagccaacatgtatgctgagctttcaacttccgaacccgcaccttcgaaactataaatttggctttcgcttcaataaaatgcaaaaacagattcaagaaggtgacaactttttacccattccacttttactcaataaaacattgacgtcaatgattgttgtagttttacgtgcatgctcgatggctaattcatagtcatgtttaaaaacgagtgtttcaatgcacttctctgttgtaatgtatattcatatttattactaaataattttttttaattc

SEQ ID NO: 21356 - DNA, 640 bp, Gossypium hirsutum
  unsure (1)..(640): unsure at all n locations
  Clone ID: LIB3582-031-P1-K1-C5
gccacgcgtccggaactgnaccctctctgnctctggccaatattcccacagctgatttattttgtctaccgtgggatgtggcgtcgaaattgatcttaacaacccggtcaggtggctttctccatttgttaacaatagcccataatgcacaacaaaaaatcctacactgtgatgccgagctctgtgaaaatactcaggatattcacagaagagatgatccatattctctgttcctgagccacaccggggacaagctattgtgttcattagccttttaagtagcatattaactcgtgtagctaggaaattccatgatatattccacactgtaatttttatcttggaaggaagatccagaagccataaatttttttgtaaaagtccttgtagtcgacttgtaaagcataagctctacggtcatctttgatgccttgtaatagtttgtaggcactacgtactgtgtactcgcccgacgcttcagcactccaaacttggaaatcttcatgtggttcttcagccagcggaatactaataatcttctcggcaacctcctcctgaaaggtggttgaagttgatgatggagatcaaattggaggaagctgatgaaaacgttccgaaaaccgattttgtttatgatgga

SEQ ID NO: 21357 - DNA, 511 bp, Gossypium hirsutum
  Clone ID: LIB3825-004-Q1-N6-H6
aactacgaatttgaatgatattaaagttgcagaattaatagattcaagtagtagaacatgggaaaaaggagttgatagcgtctacctttcaggaggaggttgccgagaagatattagtattccgctggctgaagaaccacatgaagatttccaagtctggagtgctgaagcgtcgggcgagtacacagtacgtagtgcctacaaactttttgaatctgtttttgcattttattgaagcgaaagccaaatttatagtttcgaaggtgcgggttcggaagttgaaagctcaacatacatgttggctatggctttcgcaaagtactccttggcttgagatcgcttgatcttgaatgttggagtgagaagtccattttccaaggtgaattgttcaggcaccaaagttacagctttagcaaattcaaagcctcttaactgtgcttcccttcccacatcatccatctcagcgagaacagcattccttgctcttggatcattgcacagctgtcgtaaa

SEQ ID NO: 21358 - DNA, 728 bp, Gossypium hirsutum
  Clone ID: GOSHI-09MAY01-C40219_1
gttctttgggcctgatgacttctgtgttgctgtcatctgatgggaaaacactagaagctgaggcagctcatgggactgtaacacgacatttcaggctacatcaaaagggacaagaaaccagtacaaacagcattgcttccatatttgcatggacaagagggctggagcacagagctaaactagataaaaatgaaatgttgctggactttgttcagaagttagaggctgcttgcatcgagacagttgaggcaggaaaaatgacgaaggatcttgccattttaacccatggacccaaggtaactagagagttttacttgaacacggaagaattcattgatgctgttgccgtaaatcttgacttgaagcttcaggaaccagctctgtgcaagtagacacttacattaagttgttcaggtaatttccaacatttgaagacattttttatggcgcatgacaaggcataaaccacaaactgaatgttgaacctattcttgaaatgccaagagcactttggaatcaattggatgtacatttttatgaaactggtacattttgtagtctccagctatatgttagctagagtcgggggtggctgtaggatataaacatgcatcaaggcatgttcatttttcctttaaaaaagggtttttatatttgatgtcctcactcatgtcaaataagtatactaaataataataaagaacccggataacatgggtctccttttt

SEQ ID NO: 21359 - DNA, 489 bp, Gossypium hirsutum
  Clone ID: GOSHI-09MAY01-C41979_2
gtgaccaccaggaatcagttgcaggcagacgtgtcgctggtaaaggagaatgaggcattgcgaacggagcttttgaagatgaagatgtacatatcggacatgcagaagaacaatcaaactggaactagttcaaagagcgttgggaccagaaagcctaccttcttctcttccatgtccaagactctaggcaagctaaatcccttccgacatggctccaaggacacttcccatatcgatgataaccttggagtggacgttaccaagcctaggaggagaaggttttcaatctcttgataccgcagctagcttgtttgtttgtttgtgatgcttgatgtttacatatattgtttgatttctatatttgtgataaaacaatctaaatttcttaattataaaaactcattgtgagcagaatagtccagggaaaagggaaagttgtactagctgctgcttctttttaatttcatccatccactcaacttcataacc

SEQ ID NO: 21360 - DNA, 819 bp, Gossypium hirsutum
  Clone ID: GOSHI-09MAY01-C41979_1
cccacgcgtccgctaagactgtagacgcatacctggcggagatagcaactgcagttgaacttgccatctccaagttcaacggcatcgccaatctcgtccctaaaggagccagaaaggtggaggatgatctctaccgggccattgacgtctacctcaagtctcatccaaatctggacgagatagagagggagaaggtcgcctccgccatggaccccctgaagctgtcctatgaagctcgagtgcatgcatcccaaaacaagcgcttgcctgtgcagattgttttgcacgcattgtactatgatcagctaaagctaaggagtgggggggcggatgaccgcaaccagccagacgccgtgaccaccaggaatcagttgcaggcagacgtgtcgctggtaaaggagaatgaggcattgcgaacggagcttttgaagatgaagatgtacatatcggacatgcagaagaacaatcaaactggaactagttcaaagagcgttgggaccagaaagcctaccttcttctcttccatgtccaagactctaggcaagctaaatcccttccgacatggctccaaggacacttcccatatcgatgataaccttggagtggacgttaccaagcctaggaggagaaggttttcaatctcttgataccgcagctagctagctagcttggttgtttgtttgtttgtttgtaatgcttgatgtttacatatattgtttgatttctatatttgtgataaaccaatctaaatttcttaattataaaaactcattgtgagcagaaggttgtactagctactgcttctttttaatttcatcc

SEQ ID NO: 21361 - DNA, 617 bp, Gossypium hirsutum
  Clone ID: GOSHI-09MAY01-C41889_1
cccacgcgtccggcaggttcaggcccaacatcgactgagggaagggctgaaactaatgccggtgccaggggtcatggttcaaatagacaagaatcacatcaagctaggaagcagagcactttagaaactcgagctatagcttgggatgaagctgaacgtgccaaatatatggcaaggtataagcgtgaagaagtgaagatacaggcctgggaaaatcacgaaaagaggaaagctgaagtggaaatgaagaaaatagaggtgaaggctgagagattgaaagctcgggcaaaagaaaggtgtgcatacaaagtcgcagccgcaaggagaatagctgatgagaaacgtgcaaatgctgaatcaaagcttaacgagaaagctataaggacatctcaaagggcggattatataaggagaactggtcattttccttcttccttctttttcaagttgccttccctttgctggtagtaagcaactctgcagccaaatctggcttcttcttatccaatagagatataacgtacgtatgtatgtatgatgttactttgggattaatttttatatgcattgtgatttactgctgaaaagtatcagtttatggtgattatttctcattt

SEQ ID NO: 21362 - DNA, 410 bp, Gossypium hirsutum
  Clone ID: GOSHI-09MAY01-C41849_1
accgctctatctttgaacagacttgtttgatggccgagcagagaatggctgcagagggttgtaaacactgtaatgaaacgatttagatggggatttgtgcttgctggttttattgcactagccatggcagcaataagctggaatcttgaaagcagtcaaagttactggatttggcacagtgtttggcatgttgccatatattcatcttctttcttcttcctctgttcaaaagtaataaccataaatagtgggaacagaacacccaccgacgcaaactatcagttgactcagcaggattctctctctcaaggtgcataagaagaaggaagaattttcagagaattaaagttcacataaggaaaataagttactattaaaacatgcaggaaaaaagttttatctggcaatat

SEQ ID NO: 21363 - DNA, 616 bp, Gossypium hirsutum
  Clone ID: GOSHI-09MAY01-C41589_1
gtttacatatgagccagcaaacccagatgatatttttgccgtttttgaagatgttgctttcggtgaagcaaatgaaagagaaattgaaccctttactgcatatagtcctgctagccatgcctcaaaagttcttatggtgagtcccgaaatgaacatgatgaagaaagacagcattatgaaacattcaaatgcactttttgatcagaatgatgagatagaggaagatgagagtgggtgggaaactgtcagccatctcgaggatcagggctcaagttactcaccaaaaaggagtgctgcatctgtcaccaggaatcaccgggacagcaatttctcgggtagtggaactgaatgggaagaaaatgcatgtggagataccccaatcactgaaattagcgaagtttgttcattacctgctaggcagtcgaagaaggcgtcgtccataacgaggctttggaggtcatgcccgaataatggagaaaattacaagacaatttcagtagaaggagcaaacggcagactttcaaatggaagaaagtctaatgggggtattgtatccccagatcgaggatccggtaaaggtgggctcagtccttcattgggacagtggagttcacct

SEQ ID NO: 21364 - DNA, 699 bp, Gossypium hirsutum
  Clone ID: GOSHI-09MAY01-C41549_1
cccacgcgtccggtttcgaacaacaagaaaaatcaccccaacccatcagatcccaaacagcggttcggctcctcccttggaatggaacacttctagatctactccttggaacaagttatgaaaatggctatatctcttgtactgagtcgactcattctcttcctcactctcacctgctttgcagccgtctcatcatctactacgacctcaacaactctaaaacggcactctgggtttctctactctagaacccgaggaaaatgcactcctcagttctggagcagcaggagagaggcgtggccaaggatggtcccacagggatcaacggtatcgaacgtgttcgggtcgagagcgagtgagcggtacagatcggatatgacattgttggaatcaagggctgtgaatgaagaagggaacgtgttcaatgagctgctgaagcaggcgagtgctgcattgctgaactcgtatgcgaggaaagggttcccttactcggcatgggaagtgaagactctgatgattcaagggttggtctcggaacatgccgcagcacgcctaaccagacgctttttcgttgccaatgatgcttgtatttagtagtattcgggttgatactagcttaaaaggcgataggagaagctagttttgcttgaagcactacgactctgttctttttatttttagtttgtcaatttggtagat

SEQ ID NO: 21365 - DNA, 426 bp, Gossypium hirsutum
  Clone ID: GOSHI-09MAY01-C41519_1
cggacgcgtgggtttggctcagtgaatcaactcgacggaggaagtcgaacgtgcaacataacccatatgtcctgcagggcctcacgaagaccacaataagtgctcagaattctccaggtcaaatcatgcatagtggatacactttttcccccacacagagttcgacgcgccagattactataatgaggcaccaagttattaaacaacctccacacatgtattttaattttctcaggaatttttagcaaccacaaatctgtgtgaaaactcttgtaatcctcattgtcgaaacctttttttggaaaaacgggaatcgacttagattttgaaaatgaaaatgaatagaggagtcgccaccaatcctttttgatgaggtgcgatcgggtcacctcgaattaatcattctaataaaagttaagatttact

SEQ ID NO: 21366 - DNA, 403 bp, Gossypium hirsutum
  Clone ID: LIB3582-011-P1-K1-G9
gctcagtgaatcaaccgacggaggaagtcgaacgtgcaacataacccatatatcctgcagtacctcacaagggcacggtgagtgctcagaattctccaggtcaaatcatgcatagtggatacactttttcccccacacagagttcgacgcgccagattactataatgaggcaccaagttattaaacaacctccacacatgtattttaattttctcaggaatatttagcaaccacaaatctgtgtaaaaactcttgtaatcctcattgtcgaaacctttttttggaaaaacgggaatcgacttagattttgaaaatgaaaatgaatagacgagtcgccaccgaatagaagaaggcataaagcatcaaattataggaattgacagaaccataagcagacaacact

SEQ ID NO: 21367 - DNA, 618 bp, Gossypium hirsutum
  Clone ID: GOSHI-09MAY01-C41479_1
cttatgggatgttgggaatctgctgtggacaccatggatttcgtggatgttttgaggtgactcaattcgaccatagtcttcttcaagttgatggtggtttcaaccagaacctgaattcaaagaccttgtcagctcccaatctgagtacaatggactttcctgcacttactgtgtcagatggtcagagtggtcctccaaaatatacaggagatgatcttcaacatagtgccagtacctatcgatctgctgacagggacaatctgcttatgttcaaaaccagttcttcccttccatccagaggtgccatagattttgcatcagctgtcaggaaaatggcatctcaagattccggaatgtggaagtatgatagaaatggttctgctgattcaactgtggggtcaagtagaagttctaacgggtcagctaattcctacagtgctgcacctggaagaggggtttatgctaataggttgcagactcgtggttcagctcgctcagctcctgtttggcttgaaactggagatgcagtgggaaatttatactctgaactacgggaagaagctcgagaccatgcgcgtttacgtaatgcttattttgaacaggcacgtcaagcatttc

SEQ ID NO: 21368 - DNA, 429 bp, Gossypium hirsutum
  Clone ID: GOSHI-09MAY01-C41419_1
gtcaaatgtctaatgcagctttagtcaccattgctcagaactgtccaaacttcactcgttttcgtctttgtcttcttgatccaaaaatagccgactaccggacccttcagccacttgatgtaggtttcggagccattgttgagcactgcaaggatctgagacgcctttccctctctggtctcctcacagatcgtgtgtttgaatatatcgggatgcatgcgaaaaagctagagatgctgtccgtggcttttgcaggagaaagcgatttggcacttcatcatgtgctttctgggtgcgaaagcctccggatactggacattatcaactgccccttcggggacaaggctctattagcgaacgctgcaaagctggagacaatgcgatccctttggatgtcttcttgctctgtgagtctcggagcatgtaaga

SEQ ID NO: 21369 - DNA, 662 bp, Gossypium hirsutum
  Clone ID: GOSHI-09MAY01-C41769_1
ccctaggattgacaagacggggacagatctaattggagaccctataattattgacgatctgctgaactcgtaagacgccacatgagcatcaagaggaaaattatacgatgctgtcgtatccacactcgggcatcaactgctgaacttgaaagtgaaagtcgacaaatgagcgctcgagcaatctatccgattagaaaaccatctcaaagatggcgcagaacgagcagccaatatcttgcaccaggtagatgtggatccatttgggtcaggaagccatgaatatattaggtatgaatcctcggtagaagaaaccctaacgacgctgaatgctatgagtcccgaagaagccgctgcacatgtttatacgagaatgggatattcttgtgaaggccggattggttcaaggattcgcaggtatatggatcccactgaattgatgggattcgcagcgagaggcttgctaatgaactgcagatccaaggaaaagtattcagacacaagtgacatacgcccactgaagacttggaaacagtatttggaagctaatatgctaaaacaatggaatacatgttaaaatttggtgttcgaatatgtaaataagaaaccttgatatttcagcagttttgatgtatgctaaatataaatttccagcttttacgtct

SEQ ID NO: 21370 - DNA, 585 bp, Gossypium hirsutum
  Clone ID: GOSHI-09MAY01-C41699_1
gagcgggtgggtgggtgagtgttttggggaagaaaacataaaaacaaaagcgccgtatttgattatagttttggagttgagagatcataaatgcttttgctgaagcgatacattggttggcagatcttggggagaagaaagtgaatggaaatgcaaggtgggaaaatggagaaagatttcgtgttgcaatggggaaacagaaagaggctaagatgtttcaacaagcttaaaaaacagcaccagcatcagtttggcaacagcggcggcggcacctctaccacgccgcactccttacctctgcccaacaagaagatgggctcctcgcctgttgccaatcgtctcaaaatgaattcggatttgggaacaaataagtcaagatcggcattgacatctccggagaaggaagataggtactatgcaacaaggggatcgggttccatagtggtggaagacaataatacccaggtttttgatgggtcgccgccgggggtaggtggattatgggtcggtgtggcccagattgttcaccacattatctaataaagaaaaagaacaggatttcatggcaatgaagggatgtaagct

SEQ ID NO: 21371 - DNA, 436 bp, Gossypium hirsutum
  Clone ID: uC-gsflmaxxa027e07b1
agagaagtgagcgggtgggtgggtgagtgttttggggaagaaaacataaaaacaaaagcgccgtatttgattatagttttggagttgagagatcataaatgcttttgctgaagcgatacattggttggcagatcttggggagaagaaagtgaatggaaatgcaaggtgggaaaatggagaaagatttcgtgttgcaatggggaaacagaaagaggctaagatgtttcaacaaacttaaaaaacagcaccagcaccagtttggcgacagcggcggcggcacctctaccacgccgcactccttacctttgtccaacaagaagatgggctcctcgcctgttgccaatcgtcttaaaatgtaaggaatggatattgtttggttgcttgattacccaaaactagtttatttttagttcagaagtgtaaatatagatctggg

SEQ ID NO: 21372 - DNA, 471 bp, Gossypium hirsutum
  Clone ID: GOSHI-09MAY01-C41659_1
cccacgcgttcgcgatcatgcctaatgccgcaccttgggcaggctatacaacatcaggtcctgctgccactggagtcatgactggttccgcctcattaaagaagtcaaactctggacccctgaatagacatgggggtcctgctaagaaatcatctggtccacagtctggaggagtaacaacaagcggacgccaaaattctggtcctattcctcccgttctccctgcaactggccttattacgtccgggcccatctcttcaggcccattgaattcctctggggctcctcggtaattgtctggtcctttggactctatgggatcaatgaaagtaaaaagttctgtcgttaaatagtcaggctgtgaatgttcttagccaagatgatgacttttctttcaagaggaacttcccaatgctaattttttggggcactgatatggtttttggaatggggatcattggtggtggtttt

SEQ ID NO: 21373 - DNA, 477 bp, Gossypium hirsutum
  Clone ID: LIB3584-041-P1-K1-E11
aaaagacttcggcatccaaatgttctgtagttcatgggagttgtggtttcatctcaacgtctctgcattgtcacagagttccttccacgtgggagtttgtttcagttactacaaaggaatactaccaaattaggttggagacggcgtgtcagtatggctttggatattgcaagtatcaagcacgaggcatgaattatcttcacaattgcaatccacctatcattcatcgtgatttgaagtcttcaaatcttctagtggataagaattggaccgtgaaggttggcgattttggtttgtcacgtctcaagcacaaaacatatctcacaacaaagtcggtgaaaggaacgcctcaatggatggcgcctgaagttcttcgcagtgaaccctcagatgagaagtatgttgatcccattccgcaccctttgaattgcacaagtccgatgtttatagctctggtgtcatattatgggagctagc

SEQ ID NO: 21374 - DNA, 399 bp, Gossypium hirsutum
  unsure (1)..(399): unsure at all n locations
  Clone ID: LIB3147-043-Q1-K1-H11
atgttactgaattccttcaacgtgggagtttgttccgattgctacagaggaatgctgcgaaattagagaggaaacggcgtgttcatatggctctggatattgcacgaggcatgaattatcttcaccattgcaatccgactatcgttcatcgtgatctgaagtcttcaaatctcctagttgataagaattggactgtgaaggttggcgattttggtttgtcacgtctcaagcatgcaacgtttctcactactaagactgggaaaggaacgcctcaatggatggcgccagaagttcttcgcaatgaaccctccgatgagaagtccgatatttatagttttggagtcatattatgggaacttgctactgggaagatcccttgngagaatctcaactcaatgc

SEQ ID NO: 21375 - DNA, 699 bp, Gossypium hirsutum
  Clone ID: GOSHI-09MAY01-C41109_1
cctgttatgagcctgtatatagaggcttttgttggctccagcataaaccaagagagtggtttggtgtggcaccatggagatgcacaccctgaccccggggcgtgccgggccaaggaattgttggatcatttggaaagtgttctcgcaaatgaaccagcggttgtccatagaggccagcatattgttgaagttaagccgcagggagtaagcaaagaggctggtagcagagaaagttttgtcgagaatggtcaatggggggaagccacctgatttcgtgatgtgtgttggtgatgataaatccgatgaagatatgtttcagagcatattaacttcagtttctaatccatccttgcctgtggctccggaaatctttgcatgcacaagtggggcgaaagcctagcaaagctaggtattacctcgatgacactgcagatgttttaaagttacttaaaggccttgcaactgctacaatttcaaagcctaggtgcctgcctgagattaaggtatctttcgagagtaatgcttgacaaaaacagggtagccggcgtaaatttaccagttctatacgttgggagtgtctgatttgcttcaagggattcccttgaatgagaaaaactttgatcataactcatccgaatcgtgattggcacttgctagcatagagatggtgggcaggagccgaaatgctaagataactgc

SEQ ID NO: 21376 - DNA, 390 bp, Gossypium hirsutum
  Clone ID: LIB3149-048-Q1-K1-C1
atacaagctacgttggatttatgaaggatggagcagagtggttggttaaacacactgacataaaacttattggaattgattacttatctgttgctgcctttgatgatttgattccatctcatatagttttcctagaagaccgggatatcattcttgtggaaggtttaaaactcgataacgttcaacctggaatatattcagtccattgcttaccattaagattgcttggtgctgaaggatcaccaacaagatgcattctcatcaaatgatgttgttgtccttggcatgttgtttggaaagaggaaatgggcgggtgacattaagggtggtgtttgattggaacaaggcaaataacgggtttatgagttagaacttgacgctgttaggaat

SEQ ID NO: 21377 - DNA, 353 bp, Gossypium hirsutum
  Clone ID: LIB3585-014-P1-K1-D10
cccacgcgtccgattctcatcaaatgatgttgttgtccttgggcaatgatgatgctaatggcacaccgtcgtcttattaggcatgttgtttggaaagaggtaatgggcgggtgacattacgggtggtgtttgattggaacaaggcaaataacgggtttatgagttggaacttgacgctgttaggaatcctagaagggagcttcagtatagaaatttagttgcagtgaactacacttttcgtgtaatatatcattatgatatttcttttaagttctcttttatttcataaataataatacacttacgccacgtttggttggttggagtattagtttttccacattttaattatt

SEQ ID NO: 21378 - DNA, 239 bp, Gossypium hirsutum
  Clone ID: LIB3147-037-Q1-K2-D10
aaaaaagaaaaataatatgagagtttgttttatgtaaaaggaatttttgtgcaagtgagaggtataagaggaaatgggcgggtgacattaagggtggtgtttgattgtaacaaggcaaataacgggtttatgagttataacttgacgctggtaggaatcctaaaagggagcttcagtatagaaatttggttgcagtgaactacacttttcgtgtaatatatcattatgatatttctttt

SEQ ID NO: 21379 - DNA, 439 bp, Gossypium hirsutum
  Clone ID: GOSHI-09MAY01-C41019_1
attacaattaccatggggatttcccttgggctcttgagcactttccggaatgtgaaagggggcttaaggctcattctcttttcatgacttcagttgctcatgaattgttcttgtctgccaaggactcacaggtatggaggattgccacatccatggagaaccacaagtctgaaattgaaaattgggatttgggagctggaatatatatatcattctatgtgctaagaagttcattccaggacgataacaatactatggctgaacttggttccctcgacagcaaaaatgctgcttgtagagactttcttggctgtttgaatgagtcctcagcagtttggggtggcaggttacatgttgatgctagggtagcatattcaaagatggcggatgaggtatgcaatttgttgctttcagatacaagcggaagtcgaacgcatga

SEQ ID NO: 21380 - DNA, 702 bp, Gossypium hirsutum
  Clone ID: GOSHI-09MAY01-C41009_5
tcctctttctctccgataccctaccatataatcccaggccatttatggtcaccaatcttcacttatttatgttgtttctgacaagagcttgatcgtcagcttcagcccaagttaacatcacatgcagcgacaataattcatcagtgccatttgcctccctagttgccgttaatgatcccctcaggactggtcctgagcctgactcggagctgattggaaatgttcagggtattgcgctcctggctggaacgaatgcatcaagctcgcagtacatagattttggatccaataccggtaagtttaacggccgctctctaagcgtattttcaaggggagaacctgggcttgccgcggtcggaggaagaggccgattcgcgatggcaacagggactgcactatttaaccctatccttataaatgccaccaatgtcatcattgaatttaacgttactgtaattcattactaagatgttatttacagagtcaatcgtcttgggttgtgtgaaagtcatatgattatgctccacttgttagaataaatgtatgagaaatatataggtttgtagtattaaaaattaaaattctcatacttgcagtcattgtactttatcattatacgagaaataaatattaaatccttagctactaaaaaaaaaagccaaaaaagttaaatgtgaagcagaaaaaacaaacataagaaat

SEQ ID NO: 21381 - DNA, 838 bp, Gossypium hirsutum
  Clone ID: GOSHI-09MAY01-C41009_2
tttacgcgtacggttttatcactataaatctttgggttttcttaataaaattgaagcgccaattctatagttttcatctacatttcgccccagaaattatagtaaagcagagacaatgagaggaacattgatgttgagttggattctgatcatctgcctctcccaagtagcagtgcagagccaatactactcggagacccgaccatatcatcccaagccacctaaggtcaccaatcttcacttctttatgcacgaacatacgggtgttacagcagtcgtgctaacccaagctaacatcacaagcaataattcatcagtgccatttgccaccctagttgccgttaatgatcccctcaggactggtcctgagcctgactcagaggtgattggaaatgttcagggtatttccctcttagccggatcaaatgcatcgagcacgcagtacatagaatttggatttaataccggtaagtttaacggcagctctctaagcgtattttcaaggggagaaccagggcttgcggtggtcggaggaagaggacgattcatgatggcaacagggactgcactatttaaccctatccttataaatgccaccaatgtcattatggaatttaactttactgtagttcattactaaggtgttatttacagactcaattctcttggattgtgaaaaagtcatatgattctgctccacttggttagaataaatgtatgagattgacattctcatacttcatcattgtactttattattttattacaaatatatttattctgcttttatcttaaaaaaaaaaaaaaaaaaaaaaaaaaaaaaatagaaatcccaacc

SEQ ID NO: 21382 - DNA, 723 bp, Gossypium hirsutum
  Clone ID: GOSHI-09MAY01-C41009_1
ttacatttcgcccccagaaattatagtaaaggaaagcagaaacaatgagaggaacattgatgttgacttggattctgatcatctgcctctcccaagcggctgcgcggtcccccccccccttccgctcggagacccgaccacatattcccaggccaattaaggtcaccaatcttcacttctttatgcacgaaaatttgggcggtacaaacgcatcagcagtcatcgtagcccaatctaacatcacaagcaacgacaataattcatcggtgccatttggcaccctatttgccgttgatgatcccctcaggataggtcctgagccagactccgaggtgattggaaatgctcagggactttcacttctggccggaacaaatccaagaacctcgacgacatactttgatttttggatttactaccggtaagtataacggcagctctataagcatgttttcaaggacagatcttgagcttgcgggggccgccgcaaagaggacgattaaggatggcaacagggtttgcactacttaatccttacctcataaatgccaccactgtcattattgaatttgatgtgactctatttcatcactaagatgttatttacagactcatttctctgggttgtgaagagtcatcggttctgctgaccttattgatagaaaaagactaatacttgaccatgactttatcatcaaattgaaataagattattcccttgat

SEQ ID NO: 21383 - DNA, 532 bp, Gossypium hirsutum
  Clone ID: uC-gsronu33B098e07b1
cttttatctacatttcgctcccagaaattatagtgaaagcatagacaatgagaggaacattgatgttgacttggattctgatcatctgcctctcccaagtagcagtgaagagccaatactactcgaagacccgaccatatcatcccaggccagttaaggtcaccaatcttcacgtttttatgcacaaaactgcgggcattacagcagtccaggtagcccaagctaacatcacaagcaacgataataattcatcagtgccatttgcctccctagttgcctttaatgatcccctcaggactggtcctgagcctgactcgaaggtgattggaaatgttcagggtattgcgctcctatccagaatgaatgcatcaagcacacaatacatagattttggatttaataccggtaggtttaatggcagctcaataagcgtattttcaaggggagaacctgagctgcagttgttcgaggaagaggaaacttcttttgttatcagggtttgttttttttacccttttcattcatttccctc

SEQ ID NO: 21384 - DNA, 492 bp, Gossypium hirsutum
  Clone ID: uC-gsflnu33B060g02b1
acggcaccggcccggacttcctttttcgacccacccacccttcctctcacccgcccacgcgtacgaggtcacgttctttttctagaaaaaaggacaagcactagaattgatttaagaggagagcaaaaagaaggtttcttcttatcccgatcaaatgcatcgagcacgcactacatagaatttggatttaataccggtaagtttaacggcagctctctaagcgtattttcaaggggagaaccagggcttgcggtggtcggaggaagaggaccattcatgatggcaaaagggactgcactatttaaccctatccttataaatgccaccaatgtcattatggaatctaactttactgtagctcattactaaggtgtcatttacagactcaattctcttggattgtgaaaaaggttgcatgattcccctccactcggatagaataagtgtttgagattgacattctcatactcaatcatgcaccttattatttta

SEQ ID NO: 21385 - DNA, 346 bp, Gossypium hirsutum
  Clone ID: LIB3272-037-P1-K1-H6
tcgcctctctaaacctggctagcaattatatcgctgatgaggaacattgatgttgagttgggttctgatcatctgcctctccctagtagcagtgcagagccaatactactgggagaccctaccatatcgtcccaggccaggtaaggtcaccaatcttcacttctttatgcacgaatttacgggtattacagcagtccaggtagcccaagttaacatcacaagcagcgacaataattcatcagtgccatttgcctgcctagttgccgttaatgatcccctcaggactggtcctgagcctgactcggagctgattggaaatgttcagggtattgcgctcctggctgga

SEQ ID NO: 21386 - DNA, 443 bp, Gossypium hirsutum
  Clone ID: GOSHI-09MAY01-C41039_1
cccacgcgtccgggtgctactcctgggttgacgagaccaatgcaagaggttcaattgggcaagaatgtaaaattattgggctgtcctggtgttgttatgcttaaatctagtggaaatgatgcatcaatagctcttcgaaactgcaaaagaatagaaaagttggatgatccggttgctccagtgaaagagattctcaagctttgtccagagcgactgttggtgacaatatacaagatcccgggctttgaatcagttgacgaattccttcagaatgtagccactggaaggggtaagctcaaaaaaggtggtattgtggatgtcgaagctgctgcaaggatcattttgcacgattggaatgaaggtaaaattccctattacaccatgcccccgggccgaaatcaagaagagccttcggaggcaaggattgtcacagaacttggaaa

SEQ ID NO: 21387 - DNA, 707 bp, Gossypium hirsutum
  Clone ID: GOSHI-09MAY01-C41029_1
aataaattgagggaaagaaggatttaaaagggatccaccattggtgcctttttctttttatagatctgtgttttatctaacatttggcaaaaacaagagttcctgggttttcctgtttttctttttgtatcctaaagtaagtaaacgaagtcaacaaaatgggagacagcaagcttatcctttgttgcttcattgcttgcattttgttcctcggcgttaatggagaaaacccttatcgttatatcacttggaaagtcacctacggtgatatttaccctcttggagttaagcaacaggggatcttaataaatgggcagtttccagggcctcatatcgatgcagttactaatgacaacttgattatcagtgtttataactacttaaatgaaccattccttatctcttggaacggtgtgcagcaaaggaggaactcatggcaggatggagtttctggcacaaactgtccaattcgaccggggaaaaacttcacttacgttctccaagtgaaagatcagattggtagcttttactacttcccatcacttttattccataaggctgccggcgggtacggtgctatcagaatctggagccgccccaagatccctgtacctttccctagtcctgctggggatttcactgtactggctggggacttgtataagacaaatcactatgtattgagacgtctcttggacagtggtcat

SEQ ID NO: 21388 - DNA, 412 bp, Gossypium hirsutum
  unsure (1)..(412): unsure at all n locations
  Clone ID: LIB3147-037-Q1-K2-F10
cccacgcgtccgcggtgaaaaanttctttttttagcnaagcaacaggggancngaagggangggctaaaaggagggcctgggatcaaaacagnnaccaaagacaacnngannatcagnngggataacnacccaaangaaccannccggancncncggaacggngngcagcaaaggaggaacccaaggcagganggagnnncnggcacaaacngnccaanncgaccggggaaaaacnncacttacgttctccaagtgaaagatcagattggtagcttttactacttcccatcacttttattccataaggctgccggaaggtacggtgctatcagaatctggagccgccccaagatccctgtacctttccctaatcctggtggggatttcactgtactggctggggactggtat

SEQ ID NO: 21389 - DNA, 349 bp, Gossypium hirsutum
  Clone ID: LIB3196-004-P1-M1-C8
aattgagggaaagaaagatttaaaaaggatacaacaatggtgccttaaactttttatagatctgtgttttatctaacattttgcaaaaacaagaattcctgttttttcctgtttttctttttgtatcctaaagtaagtaaacgaagtcaacaaaatgggagacagcaagcttatcctttgttgcttcattgcttgcattttgttcctcggcgttaatggagaaaacccttatcgttatatcacttggaaagtcacctacggtgatatttaccctcttggagttaagcaacaggaacggtgtgcagcaaaggaggaactcatggcaggatggagtttctggcacaaactg

SEQ ID NO: 21390 - DNA, 1108 bp, Gossypium hirsutum
  Clone ID: GOSHI-09MAY01-C41209_1
gttgtcttgtaatcttcaaacgcttttggtgactaattcacagcttttacttacacactcgtcactctttactagtttctgctctgttttcatggagttgatgagaatttttagctatgcttcgattattctttcgatttcagtttatttgcttccaattatggttaattcgattgggatcaattacgggcaaatagcagacaatcttccttcccctgaaaacgtagtgccgctcgtgaaatctattggggtcaccaaagttaaactttacgatgcagatccgagagtgctcggcgcattcgccaactccggcgttgaattcatgatcggattaggcaacggggacttggagaagatgagagacccgaacaatgctcaagattgggttaaacaaaacgtgcatgcccatttaccggacacgaaaatcacctgtatctttgtcgggaacgaggttctcactttcaacgacactaatctttccgataacctcgtcccggccatgcaaagcgttcatacggcacttgtaaacctcgggctcgacaaacaggtgacagtaaccacagcgcattctttaggcatactacaaacctcttttccgccgtcagccggagctttccgtgaggatttagtcgatattttgagccaaacattgagctttcatcagaaaacagggtcaccttttttgatcaatgcgtatccgttctttgcttataaaggaaacccgaagcaagtttcgttggattttgttctgtttcaaccaaaccaaggggtaatcgatccagcaacgaatttacactacgacaacatgttatacgctcaaatcgatgccgtttactcagctttagcttcgttgggttacaagaaactcccagttcatatatcggaaacagggtggccatcaaagggagatgaagacgaagctggggctacacccgataatgcaaagaaatacaatgggaatttgattaaattgatgtctcaaaacgcagggactccattgagaccggattcggatcttaatatatatgtttttgctttgtttaatgagaatatgaaaccaggtccaacttcagagaggaattatgggttatttaagcctgatggaaca

SEQ ID NO: 21391 - DNA, 703 bp, Gossypium hirsutum
  Clone ID: GOSHI-09MAY01-C42859_1
gagattcttttctggtgcaatcatccacatgttcctgcatgtgcttcgtttgttgagatattggctcccgtgttttcacgagacacatggcggtgcgtatggcatatgattcagaatgacttggtccatggctggggtcttgattttgccctcagaaaatgtgtagagcccgcccatgagaagataggtgtagtagattctcaatggattgttcatcaatccgttccctctcttgggaaccagggagagtcattagatgggaaggcaccatggaaaggggtgagggagaggtgcaaaaaggaatggagtatatttcaaacgaggttttcaagggcggagaaagcgtacttgaaggaaataaattcaacatctcgttaggaatatatatatatagcaaagcaaaactagaaaagctaaccctttctatactttcattattagttattaccccacccccccgcattgggatttcatcggatcttccagtattcattcaatcataaaacctcactcccaatacctgcaatggttgcgttactaagcgagtctcagattttattttagaacgattcttcttcttattgttattcacataaagtttgatgaaatgcatcattgtttttgtagccacaactttctggtccccaaatcacattgagactttaattcccattttttttttttactttttgaaaatggaatc

SEQ ID NO: 21392 - DNA, 1300 bp, Gossypium hirsutum
  Clone ID: GOSHI-09MAY01-C42869_1
ccccgcgtccggttacagctactaagagaatagtccaggcaaaatatatggatcaaaagaagatgacgaagatgctctgaagtcactttcagaaatacatttagcagagaaccaatctaaagattcacttgcaaccatgatagtgaagtttcttggaaaattgtcggatcaagaatcatccaaaataagaaaccagttacttagcaatttcatccctgatgatggatgtccatgtggaactaatctgttcatggagacgcctgcacaaacatatgaatctggatcagcagataaccaatctcctgaaaaggttgagcctccattattcacagtagatgatgatacaatcaaaggtcaaacaggtgccgaaacatatttggcacctgaaactcaaaatctcctgagtgttcatgaacttcttgatgctctttcagagacagctcatcaagttggaagacagtctgtgtcagctccccctgacatgccttatagtgaaatggcagggaactgcgaggcacttctggtgggaaagcagcagaagatgtctgctgtaatgagtgctcaacagaatcgagaaggtttagtgagcatttccacaaaggaggggcaacctcgttcacatgctggttctggttttttgaaggctgaaaatccatttcttgacgataacattggtgctgtctctttaaatcaacctgctggcgctaatctgatgctttgtgcaaacgagcaccaacatcagccctgctttcagcttcctgcctcaatcccatatgacaatttcctgaaggctgctggttgctgataacctagagaaagaagtgaaacttaggctcaagatatggatgcacctctgtttggccagggaccaactaattttgttgattttgatgccacaccaggttgatagttgatggcttcattatcttcttgtctattcatagagtgttttcaatctcatttttccctttgtatccataaattgatgagaccagttgggatggcactccagggttgactttaactgccccttcatgtgaattgtacttttacttgtgtttcattgggaaccaaggaagggtcgttcttgcttgcaatgtagagttatttccctcttccttttgacagatcaaggttatgtaaagattgttaattgcaaaaagaaagaaagaaagaaacgctaaaataaataagcaaaaaaaaaaaaaaaaaaaaaaaaaaaaaaaaaaaaaaaaaaaaaaaaaaaaaaaaaaaaaaaaaaaaaaaaaaaaaaaaaaaaaaaaaaaaaataaaataataa

SEQ ID NO: 21393 - DNA, 560 bp, Gossypium hirsutum
  Clone ID: LIB3828-016-Q1-N6-C9
gcaattaacaatctttacataaccttgatctgtcaaaaggaagatggaaataactctacaactgcaagcaagaacgaaccttccttggtttcaaatgaaacacaagtaaaagtacaattctcatgaaggggcagttaaagtcaaccctggtgtggcatcaaaatcacaaaattagttggtccctggccaaacagaggtgcatccatatcttgagcctaagtttcacttctttctctaggttatcagcaaccagcagccttcaggaaattgtcatatgggattgaggcaggaagctgaaagcagggctgatgttggtgctcgtttgcacaaagcatcagattagcgccagcaggttgatttaaagagacagcaccaatgttatcgtcaagaaatggattttcagccttcaaaaaaccagaaccagcatgtgaacgaggttgcccctcctttgtggaaatgctcactaaaccttctcgattctgttgagcactcattacagcagacatcttctgctgctttcccaccagaagtgcctcgcagttccctgccatttcactata

SEQ ID NO: 21394 - DNA, 486 bp, Gossypium hirsutum
  Clone ID: GOSHI-09MAY01-C42589_1
gtggttcctttttgtaactgggattcctctgctgttaatgggttctggcgccagtgcaggtgttggaggttatgcacttccaaaggttgctcagctcaccgtcacttcctattatgctgcctctagtgcctcgcattatggaatttcactcctcacgcgacacattgaagatgcatatgctactccttctcaacaagaaaggctaagatgaatccttaatcatgcatttactcaagattctactttcatcagttctgaaatagccatatgatgcctatgggtataggacctttgggaggattcggctttttcctttttaatgagttcctttctgatttttacatttgggtccttctaaagttaatatataatataggaatattcatacattgatgtatttctgaggaatttactagaagtttttgctaatcatatttaaaggtaagatcacaacttactcaccactgaatggtaattggatgtgtt

SEQ ID NO: 21395 - DNA, 589 bp, Gossypium hirsutum
  Clone ID: GOSHI-09MAY01-C42549_1
cttcgcgtgggttccgacattccaaaggccctgtgaacaatatcgtcattgttagactcccatacccccttggtcgggcagaatcaaaatcacaaccttcctcaagaaagcatgaactttcactcccacctccgctagaaaaatacgcaaattcaagcgatgaagacatggacaacaaggctattgttatgctcccagatactatcgacctcccttcatacctcagttctcagctaatcaatgatcacattaaacaacttcagcaacaagggtcttcggctgtggccgaaatggaagcgaagagactgaaggttgattgtcaaagatcaaaggagatgtttcaacagctgagaaaagtttatgataacttacaggaattttgtgtcaatgagctcttagatgagcaaacaatggaaggatccaaagggaattaactcagatacccctcaaacccttttctttttacaccttttttcttcaaattttcatggttgaatttgtttccattataaacaagaatcccatagctaatttttgtaccttaattgtgaagcatattctagaaagattatatggatttatgacagca

SEQ ID NO: 21396 - DNA, 336 bp, Gossypium hirsutum
  Clone ID: LIB3135-041-Q1-K1-E11
tccacgcgtccgattgaattcaacgttactgtaattcattactaagatgttatctacagattgggaaaaagtcatatcattctgtcacgcttgattagaataaatgtatgagatatatatcttcatctgattaaaagttaaaattctcatacttgatcattgtattttatcattatattacaaataaagattaaattcttagctgcaaaaaaataacaaaaatatcaaaattaaaaaaaaaaaaattaaaatgaaattgttatacatcagataagtcattcactgaaaatgtagtatacatgcatacactttctaagctaaaccatttgatctttt

SEQ ID NO: 21397 - DNA, 211 bp, Gossypium hirsutum
  unsure (1)..(211): unsure at all n locations
  Clone ID: LIB3147-058-Q1-K1-G9
ttccgcccacccttccaatcattctgtcacgcttgattagaataaatgtatgagatgtatatcttcatctgattaaaagttaaaattctcatactggatcatggtattttatcattatattacaaataaagattaaattctgagctgcnnannanaaaaaaaactaaataacctgttatacaaatgaatttggaaggatgtacaagggttc

SEQ ID NO: 21398 - DNA, 438 bp, Gossypium hirsutum
  Clone ID: GOSHI-09MAY01-C42429_1
acgggcgccacgcgtcgcccactcgtccccctactctgcccggtgtggttgcttcaaagctttatccacaagtggagggctctcgcatggatgaggacatgaaaatttatgtttaaatcaaactaatgtaagaatcgatgactttcacttcagccaaacaaaataagggatatctaccggaatattgctcacgtcttccctcatataggaattcataactttttccacctcaaatcaaatcaaattcatgactttcatgtatttctttttctttttcttttttttttccttttctgatatactctcatatccattttcttaaaagaaaaacttatttctttatttctttttgctataccataaatttaatatgttggaccttaaaattctttattaaattatttaagacataataattaatttagtccattatgtcaa

SEQ ID NO: 21399 - DNA, 574 bp, Gossypium hirsutum
  Clone ID: GOSHI-09MAY01-C42749_1
tttataaaacactctccctcctcaaatactgaattcaacttccaatggcggttcagcccctaaccttcctattcctactcctcctcaccgcctccgttctcgaatcttcgacttcttttgaacccaatatccgcctcccgacaacggcaacgatcgttcctcgatccgacattgatgacgacctttactgtgccagctggcagttagccgtcgagaccagtaacgcaggaagttgggccgcaatcccctcccgctgcgttcccttcgtcagagattatatgaccggtcaacgctacgcttccgactgcgaggtcgtcgctaattactccctcgcttacgcttccaccgtcaagatcgcatccgacggcaaagacgcctgggtcttcgacgtcgacgagactttgttgaccaatttaccctactatcgagatcacgggttcggatcagaaatttttaacgagagctgttgggatgaatgggtggcagaagccaaggccccagctataccatcgaggttgaaattgtataatgggttgaagcagatgaggttcaaaatatttgtgcttaccggccg

SEQ ID NO: 21400 - DNA, 864 bp, Gossypium hirsutum
  Clone ID: GOSHI-09MAY01-C42719_1
ttcacgcgtccgtatagctctgcctctttttgtttatatgttagtactcgtaattttctctttatctttttttattatttaattccagtttcttggtcccttggtaattgatcacatttgataattgtggtttcagttcttctcaggggatatagcgacgccaaaacgatgaagcgagtagtactgaaaagggtggagccaccaaggcccgttacgactgtgagatatgtggagtgccaaaagaatcatgcggcggctgccggaggccatattgtcgatgggtgcagggagttcatccccagtggagctgaaggaaccgatgcagcctttacttgtgctgcttgtggctgccataggaatttccatagaagggttgaaagttaaccttgttggccactgttcttcggctccatcttctaatggagcataaaaataatatatttatatttcaaacctctttcgttacctataatttgtgttatatatgtttcttgaaggaagggtttttttttttttttgatcttagcttctttatctatctcataaagagggcaaaatttaaagaatttgtgctatgttcttgatgaaggggggatttttcttctgagttgctacattagaatttgattgatgggtgacctagctttggggaatttcatgatatattgaactatatatgaaatcatgataatatggtttctggtataacagatgaagtagcctaaactctaggtgcaaatcatgatacttcaagtgttactaaagctttacttgatagctctgaagaacaatcagctaattaagtatgagctgatgattttcgctaactggactaggagaatatatttctatcaactttagagc

SEQ ID NO: 21401 - DNA, 229 bp, Gossypium hirsutum
  Clone ID: LIB3148-001-P1-K1-H11
aaccgatgcagcctttacttgtgctgcttgttgctgccataggaatttccatagaagggtggaaaggggaccttgttggccactgttcttcggctccatcttctaatggagcataaaaataatatatttatatttcaaaccatatgcaataaaataaacaaataaatactaaaaaaaaacatcttgaaaaaaaacaatataaatgactaatttacaactttataagaac

SEQ ID NO: 21402 - DNA, 513 bp, Gossypium hirsutum
  Clone ID: GOSHI-09MAY01-C42689_1
tgataaaccatcattttgatctgcagttcacggccggcatttcatattctcaagtgcaacagcaggtgtcaatggctcaagtagcagcagctctctctctctctttcctcatcttttccttcattccaggtggaactttgatgatggtaaatggacagaaaagttggtgtgtggctaagccatcatcggatcaggcaactctactggcaaacattaatttcgcttgttctcaagtggattgccgcgtaatgcaaaagggttgtccttgtttcagccctgataatctgatgaaccatgcttccattgctatgaatctttactaccaagccaagggtagaaacaagtggaactgtgatttcagaggctcaggtcttattgtcatcactaatccaagttatgctgactgcatttatgactagcctaagcttatgactggacattggtgtggtttaagccgctttacatattgtaattccttcgagaaaaagggaatctgtagcttaaattatcatc

SEQ ID NO: 21403 - DNA, 451 bp, Gossypium hirsutum
  Clone ID: LIB3148-001-P1-K1-B10
attcaatcaaaacagtatctgaagttgaacctcggagatctaatcggaagattcaaccaacgtcaagactcttggaaggcctacaaagctcattgatcatctcaaaaattccttctgtttcgcacgacagaagtcacaaaagtcaaaataggagtagtagaggtgaaccttaaatttcgtggtattcgtgaagtaatgttgctgtttttctttcccttgttggttgccgaaccgaacatgttgctgactgcatttatgactagcctaagcttatgactggacattggtgtggtttaagccgctttacatattgtaattccttcgagaaaaagggaatcttgtagcttaaattatcatctttgcttcaattttaagaattatgtaaatgtatttaactaggttgataaaaagtgaattctcatgatttccaatttaaaaccaatttattatt

SEQ ID NO: 21404 - DNA, 763 bp, Gossypium hirsutum
  Clone ID: GOSHI-09MAY01-C42189_1
cgcagtcctcctattgttcatagagatttaaaatctccaaatcttctagttgataaaaaatatacagtgaaggtttgtgattttgggctttctcgtttgaaggcaaacacatttctctcatccaagtctgccgctggaactcctgagtggatggctccggaagttcttcgtgatgaaccgtcaaatgagaagtctgatatatatagttttggtgtaatcttatgggagcttgctactttgcaacaaccatggggcaacttaaatcctccacaggttgtagcagctgttggtttcaagggccaaaggcttgaaattccacatgatttgaatcctcaagtggctgcgataattgaggattgctgggcaaatgagccttggaagcgtccttcattttccaatatcatggatcgggtgaaaccattgattaaaccctccactccttgaccagatcctggcatgccattgcttacctgcatggcaggaactcctgcaaagtcttcttgcacataatacatcattctttttgacataatgccttcaacactacacgctgttaactaatctcaggtatgctcgttgtccttctccggcctcttagactattgggaccctttgtgattttggcatggattaaaagctcccctccctcttgcccaagatcatttgttttcgattaagtaaaatttcacatgcaattacgtgaaaaagtgtatcatattatatcgtcttgcatggtttagttctatatgtaatgatttcaact

SEQ ID NO: 21405 - DNA, 643 bp, Gossypium hirsutum
  Clone ID: LIB3582-058-P1-K1-B2
cgcgtctcggttggttggggtaccggttttcgattgccaaaccttccgttttgagagccgagaccaacaaccccatggcttctgatctctcctctgaccgctctgtcttccgcggcgtatcctcctcttctcctatccgccgccgtgatctagtcttcatcgtcaatcctcgaggtgctaacgggagaaccggtaaagagtggaagaaactgcttccttatcttcaatctcgcctcggcagtgattgtaatatatgtgaatctttgacttcgggtccttctcatgcaattgacattactagggaggcaataagggagggtgctgatgccgtcattgcagttggaggtgatggaacgcttcacgaggttgttaatgggttcttttgggatgggaaacctgttgctaattggaatacagaggcagttcattcaaccgctcttggtctcattcccttggggacggggtcagattttgcccgaacattgggctggaaaaatgatccccgtgaagccatagaccggattgctagaggggtgagatcacaaattgatgtcggtgtcattagcagagaaggggaaggatctcattatttcattaatgttgctgatattcaatctgatgctaaggcagggtattatgcttc

SEQ ID NO: 21406 - DNA, 489 bp, Gossypium hirsutum
  Clone ID: LIB3147-052-Q1-K1-F10
ggtaatggttagctattataatcacttactgacgcctgttggtggggtacggtttctgagtgccaagccttccgttttgacagccgagaccaacaaccccatggcttctgatctctcctctgaccgctccgtcttctgcggcgactcctcctcttctcctatccaccgccgtgatctagttttcatcatcaatcctggaggtgctaatgggagaaccggtaaagagtggaagaaactacttccttatcttcaatcttgcctcggcagtgattgtaatgtgagtgttcttttttcctctcttttttttcggttaatataataagaaaatctcttgtatttgtctcagatatgtgaatctttgacttcgagtcctcatgcaattgacattactagggaggcaataagggagggtgaaagagtatgcagtgcctgggatgggtatgcttctttttccgctttaattaccaagttatgtacatagacagacat

SEQ ID NO: 21407 - DNA, 592 bp, Gossypium hirsutum
  Clone ID: GOSHI-09MAY01-C42179_1
cccacgcgtccgggaagaggcaatgaattggttgctttcacacatggatgatccagggagagatgctcctatctcccatgggtcacaaagtgctgagatatctatcgaccaatcaaaagttgataccttgatttcgtttggatttcaagaagaaattgctcgaatggcattgaaagcatcgggtggcgacattgaaaaagcaacagactggatatttaacaatcccagtgcctctgcttcatcagctatggatacaaatgcatcaagcaacggcccatctactccagtcgatgcaggactgcccgacggaggagggagatatcggcttttcggaatagtgagtcacatcggaacctcaactcagtgtggccattatgttgctcacatcctgaaagatggtagatgggtgattttcaatgatgataaggttggtgcttcgatcaatacacccaaggacatgggttacttatacttttttgagaggattaatagctgaaattgtaagtgaaaaccataatagaatttcagttggaaaattttaggcaactcctttcagtcttttatagaagtggcttcaataacattggtattc

SEQ ID NO: 21408 - DNA, 416 bp, Gossypium hirsutum
  Clone ID: LIB3493-003-P1-M1-F7
cggacgcgtgggctactgtcagcacatcgatgtccgtatcagtcagtttgcaacctccttttacttgcatcattctactgacaatgacatcttttgttgctggattcatctttaaaaattgagctcatggtttgagccgttttaactctttccggggaagaaacgatgatcttagagttccgaaatgacttagtcatagcagccaaggcttgttgaagatgttcattgcctggataagctgcaaaccaaaaaaaaaaagtagtgactttcacatgaaatatacaagatgtttaatgttaggtgctatttaaggctacattagaataggcacagagatgatcttggatatgtgttttctatcaagtagtggagtttataggtttgaaaaggacccttttgatgattttgtgcattaa

SEQ ID NO: 21409 - DNA, 379 bp, Gossypium hirsutum
  Clone ID: LIB3147-051-Q1-K1-D7
ctccttttacttgcatcattctactgacaatgacatcttttgttgctggattcatctttaaaaattgagctcatggtttgagccgtttttaacgtctttccggggaagaaacgatgatcttagagttccgaaatgacttatacagcagccaatgcttgttgaagatgttcattgcctggataagctgcaaaccaaaagaaaaaaagtagtgattttcacatgaaatatacaagatgtttaatgttaggtgctatttaaggctacattagaataggcacagagatgatcttgtatatatgttttttatcaagtagtggattttgtgcataaacagagaaaaactgtaatgcttaatgggacatatttgcaaggtactatt

SEQ ID NO: 21410 - DNA, 527 bp, Gossypium hirsutum
  Clone ID: GOSHI-09MAY01-C42039_1
gacgaccggccgaatcccggtcacccaccgtcggggaaggttacattgtgtgttggagtaagagacagcagattgacattcaagttggaggtgggtcctgaatggggtcaagggaagccggtgattcttttcaatggatggattggcatcggcaaaaacatgcatgagggcggaaaaccaggagctgaagctcatttgagagtacaactcgatcctgatccaagatacgtgtttcagtttgaagatgtgaccatgctgagtcctcagatagttcagcttcgtggttccatcaagcaaccaatttttagttgcgaatttagtcgagacaggttatgtaaaactatataatttcatcgtccatcttccattggttgagttcaattttaaaagagctgcaattactcagtttttaaaaaactatatttggacacctttaaacaactcttacagcccgcgttttttataatttttattttttatttttaaaaatggattataattttgtttttttggttttttttttttta

SEQ ID NO: 21411 - DNA, 717 bp, Gossypium hirsutum
  Clone ID: GOSHI-09MAY01-C42309_1
gttcttgtcaatgaagcttgaagcagttaattcaagaatgaatcctaccattgaagtggggcgctcttaaagattatggccaacaaacgtttgatgctactggaatggcatttggtccacaagcaacgagggaatacagtcgcggtgcatcaccagagtggttgcatattcgtggtggtttcgaaagaacaacataatctcaacagttcattgtcaatcagcaataagaacattaatttcccaatgaatcctctctttcagtcatacccaaagaagcatattgcatcctggtaaaaccagcgagacactctatgtgcatgctcaacatgaggcattgagctctaaaagaatgctaaagtcagtacctgaacattttgattgttgtgtttgggagaatgtgttctttttcttcatatatgaaatgtcggccttgtctgtactaatacctgaacagaatctcctagactgatttatcgttgggtgtacaagaaagttgcttgttcagaattactgtctgatgctgacatgttgaatcaactttgttttagtgtcttgttagttaaacagtttgaaattgtgataaataaataaagccagtttgccggtatcttttaaaaaaaaaaaaatatttaatatataataaataattattaaaaattattaattttaatattattaaaataaaattatatattaatataggggcggcccttttaa

SEQ ID NO: 21412 - DNA, 700 bp, Gossypium hirsutum
  Clone ID: GOSHI-09MAY01-C42269_1
ttccactcgtccgcccacgcgtccgcccacgcgtccgcccacgcgtccgcccacgcgtccgcaacaactcaagttgaccttcgaaaagatgaatcatctgtgacaccaggcgcttctcttcctcagaagctcgtgttttacagcacaagctcggcaagtgggcatgatttacttccgaacgaaccccgtcggaaggacctcaaagcttctctcatgaatgacctaaagagtgaagatgaataccgatttggaaggtcatcaaacaatgatggatttgacagcttagaaagcatggtaagaattaaggaagcagaagcaatattgttccaaagcaaggccgatgaagcacggagagaagtggagagttacatgaggatgatccgggccaagtccgaaaagttggaagaggaatatgccgagaagctatcccgactttgcttacaggagacagaggaaaggcgaaggaataaaatggaagaacttaaggttttggaacattcacagtgtgattactacaaaatgaaactaagaatgcaagcagagattgccagtttgttggagagaatggaagctacaaagcagcaatgggtttaactcttttcttttctgtttgttttcttcttttccttaatttattggttaacaattaattaatgcaaaacgtgtggtttgttccaaagttttaaccttatggattcta

SEQ ID NO: 21413 - DNA, 753 bp, Gossypium hirsutum
  Clone ID: GOSHI-09MAY01-C42209_1
ctgaggttgatgatacatccgttggtcgtgttggttctccacttccttgctcctttgtcaggttagtagattggcctgaaggtgggtatttaattagtgattcaccaatgcctcgtggagaaatagtagtcggtggtcccagtgtaacacttggatacttcaaaaatgaagagaaaacaaaagaagtgtacaaggttgatgagagaggaatgaggtggttctatactggtgatgtaggacagtttcacgctgatggttgcctcgagataattgaccgtaaaaaggacattgtcaagcttcaacatggggaatatgtttctttgggaaaggttgaggctgctctcagcatcagtccctatgtcgacaatattatgttgcatgctgatccgttccatagttactgtgtggctcttgtcgtggcttcccagcatgcagtggaagattgggcctctaagcaaggagttgcttttactgattttgcggagttgtgtgagaaagaagaaactatcaaggaagtactctcgtctctcgttcagatcggcaagaaggcacgactggagatatttgagattccggctaaaatcaaattgctttcaactccatggactccagaatccgggcttgtcactgcagctctaaagatcaagagagaggccatcaggaaagctttctctgaagacctggctaagttatatacataatagtttcaagaagattttgcttgtttttacatgggactttgctgatgaattt

SEQ ID NO: 21414 - DNA, 764 bp, Gossypium hirsutum
  Clone ID: GOSHI-09MAY01-C43919_1
cccacgcgtccgctccccccttagtgatgaagatgaacatggtttcaatcctgatgatgcctctgctgatgctaagagaaagggttctccatggcaaaggatgaaatggacggatagcatggttaggttgcttataatggcggtttattatattggcgatgaaggtggatcagaagggaatggatcagaccctactgccaagaaaaaggctggtgggttgttgcaaaagaaagggaagtggaagtcggtttcgagggctatgatggagaaagggttttatgtttcaccccagcaatgtgaagataagttcaatgatttgaataagaggtataagagggttaatgatatactgggtagagggacagcttgtaaagtggtggagaatcaaagcttgcttgattccatggatttgtctcccaaaatgaaggaagaagtgaagaaattggtgaattctaagcacctgtttttcagggagatgtgtgcttatcataatagttgcggccatgttgcaactgctggggctcatcaatcatcagtggtggctacggagatatcccagactcagcaccagcaagctcaatgcctccattcctctgaaaatgctcaaattgccggtagaattgagacagaggcatcgaaactagctaaagtggggagtgaagaagaggatgacgatgaagatgaggacgatgaggacgaggatgatgacgaagacgacgatgatgaggcagtggatggtcactcaaggggccaaaatggacatg

SEQ ID NO: 21415 - DNA, 329 bp, Gossypium hirsutum
  Clone ID: LIB3148-019-Q1-K1-B11
agaagggaatggatcagaccctactgccaagaaaaaggctggtgggttgttgcaaaagaaagggaagtggaagtcggtttcggttggaatgatggagaagaatatgttgaaaatatgcacttattagagtttgcagtttgagtagaagaatgagtagcatttttcttgattgaactctttaagttggagagatttgttaggtcaaaagtacaattggatacggtggttgtaattttcagtctgaattgggaatcatgggcttatgatgatatcttggtatgcactctagaatcttttattcctgttaatatatagaatagttccctttt

SEQ ID NO: 21416 - DNA, 864 bp, Gossypium hirsutum
  Clone ID: GOSHI-09MAY01-C43939_1
agaggtgatcagtgccggtaccgatacgagtaccacgacagttgaatgggccatgcttaatttggtaatgaatcaagatatccaagagaaactttaccaagaaatcgtggattgtgtaggcaaagatggtgatatcaaagaagaagatatagagaaaatgccttacctcgaagccgtcgttaaagaaacgctccggcgacaccctccgggccatttcctcctatctcatgcagctataaaagacactgagcttggcggctacacaatccccgcaggggttcacgtcgagttctacactgcatggatcactgagaatccagatatatggtcggatccaggtgagttccgacccgagaggttcttgcacggtgacggggtcggtgtcgacgtcaccgggactcgtgcggtgaaaatggtgccgtttggggcagggagacggatttgtccggcttggaacctaggcattttgcacataaacttgttgataggaaagatggttcaagcattcaagtgggttccagttccgggtgccccaccggatttgaccgagacatattctttcacagttgtgatgaagaaccctctcaaggccgtgatcatgcctcggtgagaaaattgaaagcttaattaggcaatttatatatatatatatatatatatatatgtatttttactttaataatacttttgacatgttttgtttcattgttttgagtgtttattcatgtatttcaagcatgccattttcaaccattttatcaatcactttcagttttaatttaatgcttcaccaattgatggctatatataaaaatgataatttatttgataaaaaaaaaaaaaaaaaaattgtcgacgcggccg

SEQ ID NO: 21417 - DNA, 328 bp, Gossypium hirsutum
  Clone ID: LIB3148-019-Q1-K1-D4
cccacgcgtccgcacagttgtgatgaagaactttcttaaggccgtgatcatgcctcggtgagaaaattgaaagcttaattaggcaatgtatatatgtatttttactttaatagtacttttgacatgttttgagtgtttaatcatgtatttcaagcacgccattttcaactatttaatcaatcacttttatttttaatgcttcaaaaaaaaaaaaaaaaaaaaaaaaaaaaaaaaaaaaaaaaaaaaaaaaaaaaaaaaaaaaaaaaaaaaaaaaaaaaaaaaaaaaaaaaaaaaaaaaaaaaaaaataaaaaggggcggccgttttaa

SEQ ID NO: 21418 - DNA, 494 bp, Gossypium hirsutum
  Clone ID: GOSHI-09MAY01-C43819_1
cttttacttgaatttattggactggggctgcagcaatgttcttgcaatagcacttggaaacactggttatttgtgggatgcttcaaatagttctacctcagaacttgttaccattgatgatgacaatggcccggtaacaagtgtgagttgggctcctgatggtcagcatattgccataggcttgaacaattctgaagtacaatcatgggattctgcttcaaaccggcagttgcgcactctgagaggttgtcaccgatcgagagtgggttcaatggcatggaacagtcacgttcttacaactggaggaatggatggtatgatagttaacaatgatgtaaggattagatcccatgtttgtaaaacctacagaggacatcggcaagaagtttgtgggctgaaatggtcagcttctggacaacaactggccagtggaggtaatgataatcttgttcacatatgggatatgtccaaggcatcttcaaattcaccaacac

SEQ ID NO: 21419 - DNA, 283 bp, Gossypium hirsutum
  unsure (1)..(283): unsure at all n locations
  Clone ID: LIB3148-031-Q1-K1-A3
cgtcattcatgccgctcgtaacaattactttgaagctgtaagtgtttgataagcattgcctcattggtggtttaggatatgggaagtgtcatcgacatttatgttcctctctttctatatatatgaattttaaagtaagaagcagaaagtgttgagtctgtaaatactttcggtgattggattttgcaccgcattcttttgaagatcaacattttacagatgtaacttttcataaaaagaaaaaagaaaaaaatttggaaattatgaattgaacaaannnnaa

SEQ ID NO: 21420 - DNA, 228 bp, Gossypium hirsutum
  unsure (1)..(228): unsure at all n locations
  Clone ID: LIB3148-013-Q1-K1-H3
ctcatattattattatataaatcaaaagaaaattggtatagctttttctttcctgcagatgtcatttgcttatgaatttacattacatggcagctgctttcaaacagagccaacaaactactaagaatttacatttgcaccgcattcttttgaagatcaacattttacagatgtaacttttcataaaaagaaaaaagaaaaaaatttggaaattatgaatntaccana

SEQ ID NO: 21421 - DNA, 1002 bp, Gossypium hirsutum
  Clone ID: GOSHI-09MAY01-C43519_1
ggatgcttttcttgaagatggatcccttgaagcaactattgctgtggtccgttcattagtggtagctgttccacatacaacggagagacttagggattatcttttgtccaagattttccaactgacaaacacacctgtttcttcaacggatgtgatgcgtcgtcggcagagagctaatgcattttgtgaagctattcgtgctctggatgctacagatctttctgcaaatagcatccgtgatttcctcctccccaccatacagaacttattaaaagaccccgatgcactagatccggcacacaaagaagcccttgaaagaatattgaaagaacggtcaggtgggacttttgaggctttaagtaaggtgatgggagcgcacctcgggattgcgtcgtcagtgactagcttttttggtgaaggtgggctgctaggcaagaaagaaattacggaatcaccaactgaaccagttgaagctctgcaatctgcagcatcaccagcagcggcagaggataccagattcatgcgaatcatgagggtcactgacatgcttagaggcaaaggaaagaacccagaagaaactcaccagaaccagtgaaatcaagtgagactgttgtttcctaataccctatatggaatgaatatatctaatttttcatgttcatatgcgaatacgagaatgctatgttagtaaatgctgataattctttttccttgtaatcattgcttaaagcagtcacaatcgcagaggattattgttttcaaaagtttgtttgtagctattgctatctctaaattgctgtattcttaggatgattatgtggcttgcattacaattacgaactacattccctagggactgaaactaagctttccttgcaattaaaggacttcttatattatgcaaaaaaaaaaaaaaaaaaaaaaaaaatataaaaaaaaattaaaaaaataaaaatataataattcttataaaaatataaaatataaaaatttaaaaaaata

SEQ ID NO: 21422 - DNA, 317 bp, Gossypium hirsutum
  unsure (1)..(317): unsure at all n locations
  Clone ID: LIB3148-029-Q1-K1-C12
cccacgcgtccgcccacgcgtccggattatgtggcttgcattacaattacgaactacattccctagggactgaaactaagctttccttgcaattaaaggacttcttatntttaaaaaaaaaaaaataccaaaaaaaaaaaaaaaaaaaataaaaacactttcaacttgataaaaaagaatataaagaaatatataaaaaatctaagaaatgacaaagaatattgctgtgcgacaaagagcattatgcaaaagtggattaaacttcnttggagatttaaactgattgcattttcatgaatagaccaaaaaaaccaagc

SEQ ID NO: 21423 - DNA, 506 bp, Gossypium hirsutum
  Clone ID: GOSHI-09MAY01-C43499_1
caaaagactcctgagaaggctggaccaagcaagaagagacctgctgagtcatctaagaagacccctgctcccgaaaagaaggcaaagctggtcactccccaaaagacagttcattttggtgcagatagcaagaaagcgggtggacatactgcaacccctcacacttccaaaaaggctgggaaaacatcagctgctgctgctgctgctgctgctgcacaggtgaagcagactccaaagtccggtggttcattcccttgcaagtcctgtggcagatcatttggctctgaaaatgctttacaatctcattccaaagcaaagcatggcactcaagcgtaaaaagtgaaccggtttagggtcgttgtttgaattttgtttgtttctagaatggacaaatggacgtgactagttgaatgtagttaatgtagtagtacataattgccttatgtttgaagatggtcctttgcaaattaacaggtttataagatcttgtttgaaattgccagctt

SEQ ID NO: 21424 - DNA, 867 bp, Gossypium hirsutum
  Clone ID: GOSHI-09MAY01-C43469_1
gcgttctgctgtgagaaatgttgcgaagtattttccgacagctattattagtggcagaagtcgtgataaggtttataaattggtaggactaactgaacttttttatgctggtagtcatgggatggacattatgggccctgtgaaacatacagagtctgatgatggccatccaaactgtgttagatcaattgaccaagagggcaaggaggtaaaccttttccagcctgctagagaattcatacctatgattgacgaggtttttagaacccttgtcgagaacactaaagatattaagggtgcaaaggttgagaatcacaagttttgcacctcagtacattaccgtaacgtagaagaaaagaactggcctattattgcgcaatgcgttcatgatattctgaaagactatcctcgtttgcgattaacgcatggacggaaggttttagaggtccgtcctgtgattgactggaataaagggaaggcggttgaatttctgcttgaatctcttgggctaagtgatagagatgatgtgctcccaatctatattggagatgacaaaactgatgaggatgcgtttaaagtcttaaaggaaggaaatatgggttatggaatcttggtatcttcagtgcctaaagaaagcaatgcaattttctctgtcaaggacccatcagaggtgaagaaatttctgaaggcacttgtgagattgaagatgcttgaagaagcttgaatgaaaagcaaggctttgggagcaaaaaaaaggcagaatataaatttcattgaagaggataatttagtttttatttttatattttgcagattatgtaaatattttgcatttcaattttttatcaacgatttattccccccttt

SEQ ID NO: 21425 - DNA, 728 bp, Gossypium hirsutum
  Clone ID: GOSHI-09MAY01-C43429_1
ctcctaaccagttagaacaccttgtggtgaatgggtgcactaaaatcaatttagaaatggaagcagaagaggaagaagacaatgaccttcagttgagccttaaaactctctcactcgagagtttatctgtcttaactgctttgccacgattgcttcttcaaggatcttcttccactgtgcagcaattacgaattagggggtgtccaaacttgtccattctaccggcatggctaccgaatctcacttctcttcaaaaacttgagattgttaattgtagaaatttgtcagctctaccggagggaatagaccgcctcaccaaccttagagaattgagaattctcggatgtccgaagttgagcaaaagatatagtgaaaatgggggtgaagattggcacaaaattgctcacatccaaaaggttgatatttactaatgaagaatgaagtatgtggtaaaattttaatttctctatcagatttgatttcattttatctttcccttttatatgcttaatgttcgttaagtactcattgtgtttggaaacattgcatgtatgaactgtgaagatggagatggatgaatgaagcaaggccacccaagacttttactttatttgcattcagatttcacagtttagagttgtaattctaataactgagcttttctttggatgtttcaaatgccttcatgctatggattgtaatgtataaattttatgcatatttatggt

SEQ ID NO: 21426 - DNA, 429 bp, Gossypium hirsutum
  unsure (1)..(429): unsure at all n locations
  Clone ID: LIB3148-012-Q1-K1-C3
cccacgcgtccgaaatttgtcagctctaccggagggaatagaccgcctcaccaaccttagagaattgagaattggcggatgtccggagttgagcaaaagatacagagaaaatgggggtgaagattggcacaaaattgctcacatccaaaaagttgttattacggatgaagattgaggtatgtgataaaattgtaatttctctatcagattcgattccatattagagtagagtagagacgtggcttccataatagtccgttctaccagcatggttttggttagaaatttggtatgtttaaagttgatcaagtactcattgagttataaaacttgcatgaatgaaatgtgaagatggagatggaagaatgaancagaggttgaggcatggcacggaagacttttactttatttgcaagtgaagctttgcat

SEQ ID NO: 21427 - DNA, 386 bp, Gossypium hirsutum
  unsure (1)..(386): unsure at all n locations
  Clone ID: LIB3146-021-Q1-K1-A10
ggcaattgacggatgtccggagttgagcaaaagatacagacaaaatgggggtgaagattggcacaaaattgctcacatccaaaaggttgttattaaggatgaagattgagatggagatggatgaatcaagcagaggttgaggcaggacaaggaagacttttgctttatttgcatttgggtttcagttgtaattctaataagtgagcttttgctttggatatttcagactcttgcttaatggcttcatgccatggattgtaatgtttgtttgacatgtatcaacttttagctttatgcatatttatgtttctcatggttnanaaaaaaaaaaaaaaaaattaaaaaattaaaattaaaaaaataaatattttaaattattataaaaa

SEQ ID NO: 21428 - DNA, 471 bp, Gossypium hirsutum
  Clone ID: GOSHI-09MAY01-C43799_1
cccacgcgtccggcaaaagaaagagacgatgggagtgacgaaggaacaggtggggtcttcgttgacttcaaaattgaagccttctcatctggaagtaatcgatacatctggagggtgcggtgcaggtgtggttattgagattgtatcggagcaatttgaagggacgagactcctggaaaggcaccgaattgtgaatgctgctctcgaggaggagatggagcaaatccatgccctgtctataaagaaagctctgaccccggagcagtggaaacaacagcctgaggctgaaaaagctaaaccagatgcttagagagacactcaagactgtaatttagacattggaataagagttcatgagaactcagctggaatactaagccatcatttcacctttagcatgcattgtagaaccatacttcggaatgactgattacttgcccacagaggcgtttgggatgcatgaacactaca

SEQ ID NO: 21429 - DNA, 256 bp, Gossypium hirsutum
  Clone ID: GOSHI-09MAY01-C43709_1
gtgacgcccctgggagaccatgggtcacacttgattcatctctgaatggtcagattatatcatttgattcagttttctttgttattaggattctatagtctaaacctgttctgtttttgcatgctatatgttgctgaagcctgttaaaaattgtagtctctttctatcttttacttagccctatgagtatattcaactgtttttctcgtatctctatactcgtgctcgaaaattatatcgaataaaggtgttagac

SEQ ID NO: 21430 - DNA, 537 bp, Gossypium hirsutum
  Clone ID: GOSHI-09MAY01-C43659_1
tcgcccacgcgtccgcccacgcgtccgcccacgcgtccgcccacgcgttcgtgttgagggagatgatgtaccagatgaacagaaagctagaatttgcaagagtttggctgaagcagataagcgtctagttgatggtgctgatgagtatttgcagctgctggatgtggccagcaacacaatgcgagctttgtgtaacatgccacaggaattctcttttgaaacttagtgggaaagcccagtgtgagatggcagatacttttgaagacaaggagagattcttcaaccttttggactgtaaactggtacatattgcaacaaacctgcttttctaactttctgtcatgcctgattgtcatagatgggtccatccttttgaatctcttgtcatttaacatggatttggtgttagttctctatttaactcgtctctagtctattgctataggcgatgagtctttagcactcctttttgcatgccagagtaataagattgttctccattcgaagcttataaaaaaaaaaaaaaatataataatt

SEQ ID NO: 21431 - DNA, 585 bp, Gossypium hirsutum
  Clone ID: AI725740.1
gttctcctgtcccgatgtcgaccagattgccccttctttgcttttacaaccacaacatctgttcggaggcgtctgaacctacagtggggtttaatacccttccgtttaagcttctccgacgatatggatgccaaccttaacaaaaccttctcgttactcaaagccaggggaatgatcaaatcaggcgaccttgttatcgctgtatcagacatgttgcaatccatccaagtcatgaatgttccttaaagccacggtatcactggttttggtaaattttagacacacctggctctcaactgttttatgcattaaacttcctgtatacttcacaatcagttgaagttgattacaattagaaagaaaactattggcataggtaaatcaggcgtcatcgtgagtctgctcttcctggttttaagtcatggattgtcccacatctgtaattttctttcttttagtatttgtttttcgggattttcaccgacattgtagctcatgactcatgtttgttagctatttgtttttcatgttttttcatgcgtaaattattacatgatatctaggcatcatacatcgttatccttt

SEQ ID NO: 21432 - DNA, 227 bp, Gossypium hirsutum
  unsure (1)..(227): unsure at all n locations
  Clone ID: LIB3148-015-Q1-K1-E5
cccacgcgtccgatgcattaaacttcctgtttacttcacaatcagttgaagttgattacaattagaaagaaaactattggcataagtaaatgaggagtaatcgtgagtttggtcttcctggttttaactcatggattgtccaaaaaaaaaaaaataaaaaatatattgttttttnataaaaaatatttaatttttaaaaataataatttaatatatttttttataat

SEQ ID NO: 21433 - DNA, 718 bp, Gossypium hirsutum
  Clone ID: GOSHI-09MAY01-C43619_1
cccacgcgtccgcacaaatctcaggatgggaagaatggtgatggtggatgagaaattctgtttcgaagaagaaacgcagctaaccgtgcataagacgtcagtgttttatcgaggagatgggtttgtggtatacaacccaaaaggggagctgatattgaggttcgattcttactatggcccccatggccatccactacccaaagacgagctggttctcatggacgccactggcaactgccttctcaccctcattcgcaagaagccaagtctccatcaaaggtgggaaggattattaggcgaaaaaacaaaaaatgaaagcccaattttctgtgtccatcgatcatccatcatcggacggtcaaatgttgtagtggacgtttacggtgatccaagccaggagtaccatatagatggctcctatccccatcgttgctgtacaatctacaacacttctttagagagctcatcaaaggaaccaatggctgagatcaaaagaaaagtggacccctcaactcatgtgatgctgggcaaaaatgtggttttgttgtgtcttaggccagggtttgacagtgcatttgcaatggccttagtcctcattcttgatcaaatgtttgatgatgctgatattgatgacgatgatgccaaagaggatcctactcatgttgcactggattctttctcttaactcgctttttactacttttttaaataactttaa

SEQ ID NO: 21434 - DNA, 766 bp, Gossypium hirsutum
  Clone ID: GOSHI-09MAY01-C43189_1
cgtcggttgcaaatcacccagccaagatccaatgctccgcaggcttcaatttcatgaagtctcaatcccccaaccccaacattctggtgggtgcagtcattggtggtcctgaccagaaagacaggttcccagatcaacggtccgattatgaacagtctgaaccagcaacgtacatcaatgcaccccttgtcggagcgttaacttaccttgctcattcttttggtcagctttagggccctacaggcgttactactactactactactttttagggttatcagtaactttttaacatatttaggtgttcgtaatgtattcccttttagttaattttaaaatattaaaaggttatagtaatattcctctggaagtgcacaaggcggtcgaggcaaatgggttcagacctaaggctcgagccacaaaccttgaagactgaatgcacaattgtcaaggatgaatgccattgtggggggcgtgtttgtttttttcatctataacaatattattatcattgcaagtgtaaacagttatcaaccattgtggcgttgtcgtgcaaagaacggcgttcaattgtaatgacatgctcaagctcagacttatgggctccaacaagtgataagcagttttggggctctgcttttctttttttgtgttgggtccggtcttgtaatatgcctggtctactactagcgtttaacttgaaaaaaacaaaccgaacggataatttaaaaaaaaaaaactaaaatcgggccggccgtttaaagat

SEQ ID NO: 21435 - DNA, 516 bp, Gossypium hirsutum
  Clone ID: GOSHI-09MAY01-C43179_1
agttttcatcaaagaaactcagttcgcattttttttttcaaattattattagttgtttaaagcttgggatacaatggagttagctctgaacatttcgtctccgctaatatttcccacaaattcaacaccaaaattgaaaaaaattaacaaaatttcttatggtttcggatccaatggatcctacccgacctctaaaatctgcgctgtttgttccaatggctctggttcatcatcatcttcttctcatggggctgaggctagggcagtgggagatgcccgcagacgaagaagcaggcgcgaatcactattttgttgtgacatacctatccccgaggagcgaattgaagaaccggttggggtatcgttggctgaaaaattagttggagataacccccgttgcactgattgtcaggccaaaggtgctgacctttgtaccacatgctctggttcaggattatatgtggactcaatactagagagccagggtatcaatgtcaaagtccgctgcctaggttg

SEQ ID NO: 21436 - DNA, 436 bp, Gossypium hirsutum
  Clone ID: LIB3148-006-Q1-K1-H11
aaacccgcgccgacccacgcgtccgactagatctcacactgccggttcatatgatttacgcgctcgtatctcttcagctcacccgtgaatttggagcaggggtcatggatgccaaacaggcttcaaccattgttactgtcacaatgctagcatttgttctaacaggaggatactacgtgcataaggtgccagcatgcatggcatggatcaagtacgtctctactacatattacagctacaagctgtttgttaacgtccaatacagccaaggcaacaaaatttcctcgttgttgggttgcctgcaccatggaagtaatagagttagctgcaagtttattgatcaagacatcgcagggcaaattagcccgaaactgagtgtgggaatcttgcttctaatgtttgtaagatataagttgctagcttaccttgcattgag

SEQ ID NO: 21437 - DNA, 406 bp, Gossypium hirsutum
  Clone ID: LIB3148-006-Q1-K1-H10
gctcgtaccggctcggaatcgatttcttttgacattggtggttcttctcggctacgtgctcgtctctcatgggctcggcggtgtatttggagcagtaatcatggatgccaaacaggcttcaaccattgttactgtcacaatgctagcatttgttctaacaggaggatactacgtgcataaggtgccagcatgcatggcatggatcaagtacgtctctactacatattacagctacaagctgtttgttaacgtccaatacagccaaggcaacaaaatttcctcgttgttgggttgcctgcaccatggaagtaatagagttagctgcaagtttattgatcaagacatcgcaaggcaaattagcccgaaactgagtgtgggaatcttgcttctaatgtttgtaggatat

SEQ ID NO: 21438 - DNA, 795 bp, Gossypium hirsutum
  Clone ID: GOSHI-09MAY01-C43359_1
cggcgcgtgggtggaaatgttatcagacccgactggaatggattcaatgttttacttctcaatgcagcccaggctgcagccctcgaccttggccttgttccagaatccagcaacagcatcgagtccgcgaagttcttgtatctaatgggtgctgatgatgtgaacttgaacaaagttccatcggatgcttttgtggtgtatcaggggcaccatggggaccaaagtgtctatcgtgccaatgtaattcttccttcagcagcattcagtgagaaggagggtacatatgaaaatactgaaggttgctctcagcaaacattacctgcagtccctacagtgggtgatgctagggatgattggaagattattcgagcactctctgaggttgcaggaattcgtttaccttatgatacattaggagccatacgatccaggatgaggactgttgcaccaaacctactcaacacagatgagatagagccagctgcttttggaccttcattgagtccagactgtagtcagaagataagcttgacaccgttcaaggctgctgttgagaatttctacatgactgattctattaccagggcatcaaagataatggcacaatgcagcgctatgctactaaagaagtgagtgataggattcaggtattaataaacatttgagattcacttgtttttttggttcatttctgtcatgccttaagcagtgtactggcttaacttcttgaacagtgacagtatgtgaataaaggaaactaaggtccttggcgttttgctttaaaaaaaaaaaaaa

SEQ ID NO: 21439 - DNA, 530 bp, Gossypium hirsutum
  unsure (1)..(530): unsure at all n locations
  Clone ID: LIB3825-031-Q6-N6-C12
attagaaactttaactcttaaataattataagatcatgttaaagcacaagcaaaatctctgctcaatctcaaagtctaacccttgagtcttataggcagtgttttaccaggaaaanagcttttacattgcaaatcatattacattgattgaaacaaaaggacctcaaattcctttatttggcatataagccactgctcagagaagctcggcagtgcaggcttatataggtatgacacaatggaaccaaaaaagaaaaaaagatgaatctcaaaagttcatcaagattagtaacccaccactcactcctttaatagcattgcgctgcattgtgccattatttttgatgccctggtaacagaattagtcatgtaaaaattctcgatagctgctttgaatggtgtcaagtttatctcttgggtacagtctatactcaacgaaggtccaaatgtagctggctctatctcatccacgttcagtaggtttggtgctacggtcctcatcctggagcgtaaggatcctagtgtatcat

SEQ ID NO: 21440 - DNA, 475 bp, Gossypium hirsutum
  Clone ID: GOSHI-09MAY01-C43269_1
acacccccaaacgtggatcccaccgcatgcattaggttctttttgtcacattctggaggacttggccctatttttatccaaaaagggggaaagaatcagtcgaatcttgcctcgctccagtggttccgttattcggtcaagaattactagttgtttccgaaaaagccatgggcgcccttccatgacacgctccaagtcatcctcgtcttcaaaaactattgaaaacagtgcagatcagcgttggattttctgccggagttactagcgaactctttactgttaactggatcagttcttcttcaaggagagctaattccttttctgcttccataccctcaactcaccactcgtacgctgcctaaccacagtagccgctgtttctttgggatgctcagagagcactcttgactttttagggttaaattagagttgaattaatttccaacctatttttgggttttatttttaatgttct

SEQ ID NO: 21441 - DNA, 370 bp, Gossypium hirsutum
  Clone ID: GOSHI-09MAY01-C43209_1
gaaatgacaattgagaaactatagtaaagacatacaaatttgttcaactgggtccaacttgtttaagaggtgaccataatatgtgtttgttgttagttaattaaatagatttagttgattttcatgtgtctttgctcaatttttcccaattttaagatgaatttagagaagcaatggaggtacccatttttctctttgaaatttcatgcacctagaaaaaaaaaaaagggaaaatctggaaagcttataatttgaaaattatgctagtgtttgtgttggtttgaattaaataagcatattttgtcaccattaaatgctttgttatttttgtttgtctcaagttatattttagtcacttatatttgaaatg

SEQ ID NO: 21442 - DNA, 259 bp, Gossypium hirsutum
  Clone ID: LIB3135-052-Q1-K1-B8
accacgcgtacgaccacgcgtgcgattttcatgtgtctttgctcaattcttcccaattttaagatgaatttagagaagcaatggaggtacccatttttctctttgaaatttcatgcacctagaaaaaaaaaagggaaaatctggaaagcttataattcgaaaattatgctagtgtttgtgttggtttgaattaaataagcatatttgtcaacttttcatggaatgcaaaacgtaaggagactgaaaaaagcaaacaatg

SEQ ID NO: 21443 - DNA, 748 bp, Gossypium hirsutum
  Clone ID: GOSHI-09MAY01-C78999_1
cccacgcgtccgcgtcgaacaagaattgagattgcggaaaatggcaactaagataagtattggtattgatgtgtgtatgagctttgaaaggcgtttctacttaaacctacctgaggttcagatggcacttcatgctaatcgcaccaaattaccttatgattggagtatgtgcagtggtcgtttaagctacagtgacagtgatggtaacataaacatccttcctattctcaaaaaaattatcctgaatggcattcctgtctggatattcagtggggatcaagactcggtagtgccattgcttggctcgaggacactggttcgtgaactagctcatgacttgaagttcaagattacagtcccatatggagcttggtttcacaaacagcaggttggaggatgggtgactgaatacggaaatttgttgacctttgccactgtgaggggggctgcacatatggtaccgtattcacaaccatcaagagccttgcatttgttcattcattcgtccatggccggagactgccgaacaatacacatcctcccattcatgaatgagaacactgtaaaccatacagcaaagtgtgatacagtttcaagttgttccgagtgtcagaatatgcttgtccaatagggtaataaaggaataagggggtgtctccacaagaaaatgggggcaaaccttgatttgtattggccgacagagacagaggagagagagtttgattgttgggactaattctttatgtgt

SEQ ID NO: 21444 - DNA, 757 bp, Gossypium hirsutum
  Clone ID: GOSHI-09MAY01-C78529_1
cccacgcgtccgcccacgcgtccgctttgctttgcagaaggtgaacaacgagagaagctactttaggacaatagcaaatatggatatgaagctggattttgtccctccatcccttataaacttcattgcaaggcagcttattggaaatggttttagactctatcagaagactgtggcttctgtcactaatagcgatgaggattacagcaaagccttgggagaccctctgttttgcctaattcgtggagctcttttttccaataacaaatcaggcgaagttcttgaagcacaagaaattaaaagggaacctggtatttttcctaaggaggatgaaattgtgcctaacgagaatgaaattgtagacatacaagatggcacaaacgatgcagaaccagaggttcatgctaatgaacctgctggtgaatctccactggagatagcactagacgcaaagagaaaagcttttggtgaaattgaggaagaagaaagtgaagagagtacctgcttggaggagagcattaaggctgcaaatcaaccttcaaccaatagttttgctgattcaagtggcgtaaatgctaaacaaagggtttctattcgtccagaggtgaaagaagctctgggaacattggagaaggccatttcaattgtacggcaatatagatttaatgcccaaagcagatcttctagtttctctgatgaaaaactccgaatttgaagagggtgctgtagaagacttaacttttttgcaaagccaatg

SEQ ID NO: 21445 - DNA, 625 bp, Gossypium hirsutum
  Clone ID: GOSHI-09MAY01-C78419_1
ccccgcgtccgttttcattttcatgataacaagaatgtgactgatgttcaataaactaataatattttttggaaaaatcaccgttcaccaagaaattcaaacttttattttttatacaaaacgcccccccacatcagacaactgtcctgtcgcttgttcttcttctgcaacttctcgttgcgttgagttgagttgggtttttttttgctggattaaatgatcgaatgaagtgttagaaagagtggcgaaacgatgtttcgcttagttcttaaagttgtttcttttttgtttttgtttacttcattggtttcgtctcttaattctgatggtctttctcttcttgctctcaaggcagctgtggaatctgatccaactcgatgtcttgaaagttggtccgagtctgatgcaaccccatgtcactggttaggaatcggttgtactcggaaacgagtcacttcgatctttcttccgaacaaagggttaactggttatatcccatcggaactcggtcttctcgactcgttgactcgccttagtcttgctcaaaacaatttcccaaaactgattccgtatcatctctttcatgccacaaaccttctctatattgacctgtctcataactcgc

SEQ ID NO: 21446 - DNA, 917 bp, Gossypium hirsutum
  Clone ID: GOSHI-09MAY01-C78749_1
gtccgaaaagcgtggccgactgcaaggtgctcttcgtattttagcttttcgcattttgcgtccaaaccaagcgctttctctttgttccatccagatggcgaatgcaatcaagttcttcgagttgaacaccggagccaagattccctccgtcggcttggggacttggcagtctgaacctggcctcgttggcgccgccgtttctgccgccgtaaagatcggataccgccatatcgactgcgctcaagtgtacggaaatgaaaaggagattggtgtggtttttaagaagctgtttgaagatggtgtggttaaacgtgaggagctgtttatcacctccaaactctggtgtactgatcattcacctgaagacgtgccggctcccgtccgcccacccgtccgggatcttcagcttgactatgttgatttataccttatccattggcccgttcggatgaagaaaggatcagctggcttcaagcctgaaaactttattcagcccgacataccttgcacgtggcgagcaatggaagcactctatgactctggtaaagctcgggctcttggtgttagtaatttctcttcaaacaaattgggggatctgcttgctgtggcacgtgttcctcctgctgtcaaccaggttgagtgtcatccttcatggcagcaggctaagctacgtgaattttgcaaatccaagggagttcacttatcgggttattctcccctgggttctccgggcacaacatggctcaagagtgatgttcttaagcacccaattctaaatatggttgcacagaaattaggcaaaactcctgcacaagttgcactgcgctggggcctgcaaatgggtcatagtgtgcttccaaagagcacacatgatgagaggatcaggagaactttaatgtctttgattggtctattcc

SEQ ID NO: 21447 - DNA, 474 bp, Gossypium hirsutum
  Clone ID: LIB3582-012-P1-K1-E10
cccacgcgtccgcccacgcgtccgcccacgcgtccggtagaatcttgctctagaagtaaatgcccattttggcgtggcgcctgttttcagtatcttactaaataaacaggagtcaagcgggatggttggacgtttgtactttgtgccctttatggatacttgattgggtttctttgttgctaattgggcatggttttataaacttaaaacattgcgagttttttttggcgcaacaagggatctgcatactaattgaatatataagcaccccccatgttcttcatggtgcactgatggaagagttccatttcctctaaaccaatggtaggttgtttggaagcgctttgatgagttcatcaaccgcgtttcttccttcccatgagcctataaactgttgctctgggtgcagatcgccgttctccatgccgccttgttaactgagctctaatttttgaaccttttggctaaaagctc

SEQ ID NO: 21448 - DNA, 383 bp, Gossypium hirsutum
  unsure (1)..(383): unsure at all n locations
  Clone ID: LIB3829-024-Q6-K6-H1
tctttggttggtaacgttggttatatgggggggggcatcatttgggttttgcttcttctcactttgaggatagaatcttgctctagaattattttttttttgctggccctgntttcattgtggggggggggggacannantcaancnnnatnnttnnacctttgtactttgtgccctttatggatacttgattgggtttttttgatgctaattggacatggttttataaacttaaaacattgcgagttttttttggcgcaacaagggatctgcatactaattgaatatataaggacacccnatgttgttcatggtgcactgatggaagagttggatttggtctaaacccatggtcggttttttgggaagctgtttggtttttt

SEQ ID NO: 21449 - DNA, 727 bp, Gossypium hirsutum
  Clone ID: GOSHI-09MAY01-C78249_1
cccacgcgtccgcccacgcgtccgatcatcttaaatatctccttctttctgtttggttcccgagaaaataaccgcccacgcgtccgcaaaatcaccccccaaagttctctctgccgccaaacacagtctgttctctttaagatgactttagttctaaaccacagcgtcacctcttccttctctaatttcttcaaaatctcaagccttaaaaatcacccacgaacctgctatggtaaatatactatgacaatcaataaaccaacaggaagtcaggatctttgcaatgattttgagtccttgaaatttactgctcttgtaaatactatagcagtggcaaatttggttgcaattgactctgcaaaggctttaagtgaagataatattttggaaggagctgcttcactttacactttggctgatggaagttctggagattggtttggaggtctactatattcagctggccaacaagctaatgaagccgttcagggccaattatcagctctcagttttactagtttggctgttatttttggggctggtcttgtaacaagcctttcaccatgtacactaagtgttctgccattaacacttggatacattggtgcatttggttcaggcaagggcagaactgaggtaattgcaaattcaatggctttctcactaggattagcgactacattagcactcctgggtataggagcctcctttgctgggaagcatatga

SEQ ID NO: 21450 - DNA, 629 bp, Gossypium hirsutum
  Clone ID: LIB3543-051-Q6-K6-F3
cggccgcgtgggcggccgcgtgggcggacgcgtgggcggacgcgtgggcacagtctgttctctttaagatgactttagttctaaaccacagcgtcacctcttccttctctaatttcttcaaaatctcaagccttaaaaatcacccacgaacctgctatggtaaatatactatgacaatcaataaaccaacaggaagtcaggatctttgcaatgattttgagtccttgaaatttactgctcttgtaaatactatagcagtggcaaatttggttgcaattgactctgcaaaggctttaagtgaagataatattttggaaggagctgcttcactttacactttggctgatggaagttctggagattggtttggaggtctactatattcagctggccaacaagctaatgaagccgttcagggccaattatcagctctcagttttactagtttggctgttatttttggggctggtcttgtaacaagcctttcaccatgtacactaagtgttctgccattaacacttggatacattggtgcatttggttcaggcaagggcagaactgaggtaattgcaaattcaatggctttctcactaggattagcgactacattagcactcctgggtatagga

SEQ ID NO: 21451 - DNA, 927 bp, Gossypium hirsutum
  Clone ID: GOSHI-09MAY01-C79939_1
agaaatttgaaagactgaaaaaaaaaaaaaaattgatctccttgtttcatatgggagtctggtgtcacaggaaattcataaattctcctacttaaaatccttggagcagactactattcccttccacccaatgaaattcataaattctccttcttctttttcctactctcctgcttgggctcttccatgcattgactcaatctctctgcatgcactcatgtaatttgagtgcatttgtgcgtattattctgatttgccttttacaaaacaagtatggaggaccttgggtattctagtaaatatgtttagagaagtggacagaagcctgttgcctggcgaccattgcacaagtgtttctgtgcagaattgctcttagaggaaacaatagaatacaatgatcttgtacccttagacaagcagaatgcaccactgaccgacagatggggatggtccaaagaattagaaagatttgccgggaaaaatgtagtccagagcatcgtggggaccccaatgatccatgtggaagattgaaaagagattgtgtaggaattatggctgcctttaaactcaagcaaccttttcatcacgccgttgcccatctttattggtttttcagtatcttatttctggtaactctacatcatcggatagatgtttggaagaacttccccttcccttgtgcagtgtttatgcttcgacaagaggagaaccactatttacgacctacacccccacctttactaatacacttgactatattttcttttccccatctgacagcctaatgcctgtcagcattctccaacttccagagttggattctggtgcattgtcaaactatagccacccaagtgatcatctgccaataggtgctaaatttgaaattaccaaagaccaaatgttcatactgagaaatgaacgaaaata

SEQ ID NO: 21452 - DNA, 628 bp, Gossypium hirsutum
  Clone ID: GOSHI-09MAY01-C79879_1
gggactcaaaaacgaagccatgaacccctcttcgtcttctttagaatatggcaattcaacaacatgaacaagaagaatcttacccttctttcttactcgatggtctttactgtgaagaagatgaagttttagaagaagggagttctttaagtggctgtaacaatgtcggagacattgatttgttttgggaagatgaggagcttgtttcgttgttttcaaaagaaatggagttggttcatcttggtcctgaaaatgtggaaagtaaagatgatgagtttttgacaacggtccaccgtgaggtccgttgtgaggcggtggagtggatgcttaaagtcaatgctcattatgggttcaccactctcacggcggtgctttctgttaattatctcgataggtttttaagtagtttctgttttcaaagagataaaccatggatgattcaccttgttgctggtacttggctctctttggctgctaaaggtgaagaaacccatgtccctcttcttctggacttacaagttgaagggacaaaatatgtttttgaagctaaaaccattcaaagaatggaacttttggttctttcaacattgaaatggaaaatgcatccaattactccactttcattcct

SEQ ID NO: 21453 - DNA, 904 bp, Gossypium hirsutum
  Clone ID: GOSHI-09MAY01-C79779_1
cttcctttatttaaaaaaaaaggggtgggggttgcagaaatagaaatagaaatagagagagaaaactaattttaccgttcggatctgtgtttctgggggaaatggcatctggatcatcgggtcggggaaacacgggtaattccaagggttcgattttgggtccgatgatattggggggtcctatgaggattacggcaaccaggaatcgtctaatggcaaccacaccgaacccaacagctccaataaggagtttcacaaaggaagagtggcacgttcaatgtttccacctagtggatacagtcagccggaagactctttctcctcagatgtggctgctactgttgaaaaaaccatgaaaagatacacagataatctcatgcgctttcttgaaggaataagttctcgattatcacagttggagctatattgctacaatcttgatagatcaattggagatatgcgagctgatttagttcatgggaatggagatgcagattcaaagctgaaatctattgagaaacatctacaagaggtccacaggtctgtgcagatcctaagagataagcaggagcttgcggagactcagaaggagttggctaagctacaacttgcacagaaagagtcttcttccagccattcacaatctactgaggagagagtatcaccacctgcctctgatcctaaaaagactgacctcacatctgagatgcaaaaccaacaattagctctttccctacctcatcaagtagcatcacaacaacagcccgtggcggcacactctcaagccccacctcaaaatttgacccaacaatcctactacatgccttcaaatcaattatccaaccctcaagctccagctgcagcttcttctccagcccccgcccctaaccctaaccctccccct

SEQ ID NO: 21454 - DNA, 301 bp, Gossypium hirsutum
  Clone ID: LIB3585-042-P1-K1-A5
cccacgcgtccgaaaaaaaaaaaactttcaaaagaaaattccttgccttgcagacaagctcattaaaacgaaaaccgtaatgtctcttccatttatttaaaaatttgtttttgtttttttgttatctcttccagaaatagaaatagagagagaaaagtaattctactgttcggatctgtgtttttggaggaaatggcatctggatcatcgggtcggggaaacacgggtaattccaaagggtttgattttgggtccgatgatattctttgctcctatgaggatttctgttcccaggaattgt

SEQ ID NO: 21455 - DNA, 880 bp, Gossypium hirsutum
  Clone ID: GOSHI-09MAY01-C79169_1
ttcaagtaaagatatcatcttcaatcattgtgattttcccttctctcaattggctctgcccgaaaccctagaaattcaccctcccaatatcacaaaatcaaaagaacccccaattttctcaataaaaccctcccttttcccgagaaaatccttttcgatattaattaagaagggaattttaaagcccaatttcaggtttaaggaaattagaattttcttggggggcatatgtgggaaggttctattggaagcatcgaagccatcctcgtcgtcggcctcctccgttagcacgacaacgacttcgacgtccgtgacggagacagtgaatgggtctcaccagttcaagatcacggggtattccggtgtctaaaggtttgggggatcggaaaatacatagcttccgacacgttcatggggggtgggtattttgtgggccgatctatttttatccccgagggaaagagccccgaagataatgccacctacgtttcattgttcattgctttggcaagcgaggggaccgatgtaagggcgctttttgagctcacgctcttggatcagagcgggaaagaacggcataaggtgcatagccattttgggaggacgcttgagagtgggccttacacacttaagtatcgcggcagcatgtggggatataaacgatttttcaaaagaactctactggagcagtcggactacctcaaagatgattgcctctcggttcactgtagtggtggtgttgttaagtcatacacagagggtcctaagatctactccatagctgttacaccttccaacatcagtcatcattttgggaaactactaaaaagtggaaagggaactgatgtaagctttgaggttgatggggaagtctttcatg

SEQ ID NO: 21456 - DNA, 535 bp, Gossypium hirsutum
  Clone ID: GOSHI-09MAY01-C79099_1
acgccctagactgacgccactgaatccatcactcgataataagctggccgcccgcgcgtccggttcaaggccgctaaagcagactatcaagatgaacatcaatgctaaggccccatcaacttcaacctcttcgcttccactctccaaatcgaaatctttcgatgtacacaacattgaggggttgtacactcacacgctagatgagtgcctgcaacatctcaccagcctcaaaagattaacaataggagattgcacggaggctgatttagagggcatgcaatgggaaccccttaagaatctctctcatttggagattgataatattccaaagctggcgtctctctccattcggcttcaacatcttgttcaactgcaaacattaaaaattcataactgcactggattgcggtcactgcttcctgtgttccaacatctcactttccttgaagagttcccaggataggcctgccagcagctgcagctatctggagccggccttccatcactttcccagatcatacaagcctcctttctt

SEQ ID NO: 21457 - DNA, 533 bp, Gossypium hirsutum
  Clone ID: GOSHI-09MAY01-C79089_1
cagagaagtagctcgagttctttaaacagtttggggaaattgaggaaggtccattggtgcttgataagcatacagggaaaccgaaaggctttgcactttttgtctacaggtcaattgaaagtgcaaggaaggccttagaggagcctcataagaattttgaaggtcatgttttgcattgccagaaggccattgatgggccaaaacagaccaaaggcgggtttggtggacgtgcttctacccggcatcatcagcagtaccagcagcatcatcagcaaggacaacatcaaaatcagtctcgttaccatcactctaagaaggggaaatactcgtctagtggatcagaaactggccatttgatggctccatctgggcctgctgcagtgggagtggggttcaaccctggagttgctgctgctgggtttaaccctggggtggctgctgctgcaccagctttaaaccctgtgcttggacaggctttgactgcattgctagcctctcagggagctggtttggggcttggtaatctgcttgga

SEQ ID NO: 21458 - DNA, 779 bp, Gossypium hirsutum
  Clone ID: GOSHI-09MAY01-C79399_1
cccacgcgtccggcaagggctttcgaaaaatgaagtgaaaggtgattttgtatcccacgtgtcttgtcttgctaaaactgatgctccatcgtcttccctagatcttagaaccaacgatgaagataccgatgcaaaaggtagggtagtgaatagagagcagaaaacacatgcgatcgatgcaagtctgggtgagggatttgcttctgagaacaaccaagattcacttaggcaagccgttttgtctcataagaagaaagcacttgctttgaagagagacggaaaattagcagaagctcgagaagaacttcggctagcaaaactgttggagaagagcctgacagaggacggcgctccaccaaaagccggcacaaatgatggctcaatatctgcatcctctttcccttctgatgcaacaaaagagaaggctgcatcaactttggctccaaaaccactgtctggacgtgatcgcttcaagctgcaacaagaatcccttagtcataaagcgccaagctttgaaactccgaagagaaggtaagcttcaagaagcagaagctgagtttgaaatagccaagtctcttgaggcacggttggaagaatcatctggtcaggattcaacaaacaccgggggaggaaaatcagatgatgtagctgttgaggatcttctcgatcctcaacttttatctgccctgaaagctattggattagatggttctagtacgatcgaacatagccctcaaagaccagaacccgtaaagcacaacatcgcaaaaactgacaat

SEQ ID NO: 21459 - DNA, 791 bp, Gossypium hirsutum
  Clone ID: GOSHI-09MAY01-C79359_1
gcgtccgaggaaattgatttggacttaaagaatcttggggatactttaccagctcttttattcacttgccactcagtggtgacactgaaattggatgcagtaggttctgagattaaggtgccatctgacgtttgtttagggaatctgaagactttgcagcttagaaactcggtacttttcggtgattccattcataggttaatttccaattgccatgtcttagaagatttggcttttattgaatgtggttttgataatataagtgaggtcaatatccaaagtccttcgcttaagagattggttttagagtttgatgtgacagaaggcagatatttcaattttgtggtggtgattaatgctcccaatcttgtttattttcaatatcatgccgcagtagctaaaagttatattgtgaaacaagtgcaactcatcttattcaaggaatttgcaatgtatggtctctaagtttaaccattgatgaagtggtttgtaaacttagtattcatgtgtttgtttttccttttaacattatataatataactttatatgatagctccaagtttatgtgtgtgcagattttcagaacaagtcgacttcctatatttcacaaccttattgaattcaaatatcttggtgttggttttaatgggagagaaacttggcttgtggagtttctacattgtgtgcctaatctaaagacacttaccctcaattttccgagtttaggacgatgcgggaactcgatggaaggctttacgtatgaaagttccttcttgtttgtcatttcacc

SEQ ID NO: 21460 - DNA, 609 bp, Gossypium hirsutum
  Clone ID: LIB3825-001-Q1-N6-H2
atacaaaaccaaaccagacactgataagttctaaccataatataaaacagtagtacaaaatcacaattagagatttctttgaacgctttagtaactgcaataatttgttctgcgcttcacatttctgtctccaagtcagggcagccattcttattatgagcttttccagaaccattgcattatccaagaaataactaaccatttcaatcatatgtgtgtcaaagtatgaaatttcaatctccttgaggtgaaatgacaaacaagaaggaactttcatacgtaaagccttccatcgagttcccgcatcgtcctaaactcttgaaaaaagaaaaaaagttatttggtttgtaccatgaatttaggtgatctcgaatatgctttctatttttttaaagttttttgtaattgtggatgtaactgacactaaaacaatgacaaagacttcataccggaaaattgagggtaagtgtctttagattaggcacacaatgtagaaactccacaagccaagtttctctcccattaaaaccaacaccaagaatatttgaattcaataaggttgtgaaatataggaagtcgacttgttctgaaaactgcacacacataaac

SEQ ID NO: 21461 - DNA, 471 bp, Gossypium hirsutum
  Clone ID: uC-gsflnu33B051d12b1
agatatttcaattatgtggtggtgattaatgctcccattcttgtttattttcaatatcatgccgcagtagctgcaagttatactttgagtaccatgaagtccctagaaaaagccgatattagcatctatcagtttgattccattaatagtgaaacaagtgcaactcatcttattcaaggaatttgcaatgtgcggtctctaagtttaaccactgatgcagcgattttcctaactagtggacttcctatatttcacaaccttattgaattcaaatatcttggtgttggttttaatgggagagaaacttggcttgtggagtttctacattgtgtgcctaatctaaagacacttaccctcaattttccggatgatgcgggaacccgatggaaggctttacgtatgaaagttccttcttgtttgtcatttcaccttcaggagattgaaatttcatactttgacccacgtatgatt

SEQ ID NO: 21462 - DNA, 1104 bp, Gossypium hirsutum
  Clone ID: GOSHI-09MAY01-C74989_1
ggtcggaaagccggccctcgcgtttccccacgcctccggaaaaacgtggtgttacatttgaattctacgagcttgttgctttgcaactgaggcaaacagtgagcattcccttagccaaagccattatcgagtattgccaagaagttcagagaagatggaaggggagacgcctgcattggccagaagcacgtgacttttcgtctctatttaacaggacatggagtgaaagccattgttaggaacaaggaggagtaattgtgggaaacaagagcttaatgtccggaaaaaaacattgttattccagttgatgctcaagacatgttaaccgaaaccgaatcaatggctcaaaccggcattttagtatcgatagacggtgaagtaacgggagttctcgccatatccgatccagtgaaaccaggtgcacaagaagttatttccattctcaagtcaatgaatgtaagaagcatcatggtgactggtgataattggggaactgcaagttccattgctagtcaaattggctttgaaactgttggtgcagaagctaaacctgaacaaaaagcagagaaagtaaaagagctacaagcggaaggttatgctgtggcaatggtaggggatggcatcaatgattcgccggcacttgtagccgcccatgttggtatggcaatcggtgcaggaacagatattgcaatagaggcagctgatatagttctgatgaagagtaacttagaggatgtgatcacagccatacacctttccaggaaaacattttcttcgtattcgccttaactatatttgggcattggggtataatatacttgggattccaatagctgcaggggctctatttccatcaactggatttcgcttacctccatggattgctggagctgccatggctgcttcctctgttagtgttgtttgctgctcactcttgttaaagaattacgagagacccaagaagctggaaaaccttgagattggtggaatacagattgagtaatagatgatgggagttctatatatccacatatatatctaagcaggtttgttatatatgtatatgtataggttagggatgtgaaatttggcaaactaaataat

SEQ ID NO: 21463 - DNA, 520 bp, Gossypium hirsutum
  unsure (1)..(520): unsure at all n locations
  Clone ID: uC-gsflnu33B114e03b1
acggttaggcatgcggtcaagcatctatgcggcgaccagtagccagctgagtgggtatgatgccggtctcgcgaacagatattgcaatagaggcagctgatatagttctgctgaagagtaacttagaggatgtgatcacagccatacacctttccaggaaaacattttctcgtattcgccttaactatatttgggcattggggtataatatacttgggattccaatagctgcaggggctctatttccatcaactggatttcgcttacctccatggattgctggagctgccatggctgcttcctctgttagtgttgtttgctgctcactcttgttaaagaattacgagagacccaagaagctggaaaaccttgagattggtggaatacagattgagtaatagatgatgggagttctatatatccacatatatatctaagcaggnttgntatatatgtatatgtataggctagggatgtgaaatttggcaaactaaataataaaagtatcatgaaaagactg

SEQ ID NO: 21464 - DNA, 599 bp, Gossypium hirsutum
  Clone ID: GOSHI-09MAY01-C74569_1
cccacgcgtccgcggacgcgtgggctgtgataggggattttcttttctcttttcttttttagatgcggtatggcttgaaatccggggatcttaggtgaattgtcttttagatttgttttagggctggcgagatggagatagaggtaacgggtccgagcagcaaggaatcgtttgcgatggtagtaggggggttgaagagaaaagttgtggaggagaaagatcaggttcgtgttacgaggaagactttgcaagctgtgctggaacagtgccaaagagctatcgaatcgattagtaacagcgaaggtggaattgacgatgacgacgaggatgataaagatgacgtggatcctcaaggggaagccggtggcgccggtcttcaaagagatcaagaagtcgacgagttgtgcgatcttctgaaatctagagttcaatgctctgattttctagaaaagctagtgtgtgctcgggtgccaatttcagaaaacgtttcagaagaaggttgtttttggaactgagaattttacaattgtctatttttaaatcaatttaaaatcgtaaacatgtttaaaaaaaaaaatatttttatgtttatcttcaat

SEQ ID NO: 21465 - DNA, 826 bp, Gossypium hirsutum
  Clone ID: GOSHI-09MAY01-C74489_1
attttcttcttcacagcctcaaccagccgcgccggatttccctacttaccccgctggcacttgcttttctttgtcatcttctcccgaatcacagcctcgttactataattccatcacccaactttgtgtgacttgcatccttcaatcctctacaagtccaaattagtagatcatgaatgaaagtaatacaagtgtgggaggtcaggatttcatcacccttcctgcgtctagtaattctatgtctggaagtgaaagtggtgaacttcgggatgtggatgatggacttcatcaagtagattctcaacctaataatgctgaggctaaagatggtgaagtgaaagctgagatcctgcagctgaatgaaggagatattagaaatcctcagaacaatttaattgtggaagcaaaggtagacaacactcttgctggcgattcatctgacatggaaataagtgatgaaataactgaagctcttagagttgaaaagaaactggatgaggttagctctggagctcattctgaatcatttaaggttgaagagaaattggatggctcttcaatgtctaccaaaaagcggtgtcttgatctcgaaaatggaagtcccatccagaaccacacaatggatgctgttgttaagagacctcggatgacatttgatgaccggcaaccttctattcgtattgtgtataatttcttaacaagagctagtaaacagaagcttgaggagcttttgcagaagtggtcagagtggcaagctgaacagggttcttcattgcaagaaaatgaacttacagaatcaggagaaaagacctactttcctgctcta

SEQ ID NO: 21466 - DNA, 729 bp, Gossypium hirsutum
  Clone ID: GOSHI-09MAY01-C74169_1
atttattttgatgaaagaatctctattacctccactaaaatcttgaaaacttcttcttcttcttcttcaccttgttatttaccgttgaattgcagtgtgttacacaagtcttttgtacctttggctgcttcagttactattcttctgtctccaattccaggattttgtttataaaattctttcttgggttggatatgccaaagctggattgttatcaggattccccggaatcgaatcaatccctggtcctcaattacctgaaattgagttcctaaatcgcttcgctgaagaaaaccagaagaagtacgctgaagctgatgcaagattcaagtcatctcccttgctgaagcagctgttagagcggtcaaagcagaacaaagaaaagaacaagcaagaaattcaagacaagtactgcatgcgcggggcggagtggggagtaggggattgttcagtggaggcaatgtcgccggaagacaaagaaaacttcattgcaatgttgaaggaaaaggctggaatcaaatgaaatggtcatttcaatttgcttggatatagatcaaagaagaatgggaagcaaagccaacatgcaagaacaaaatgtaatagcaatggcaatatatagcccttttttggtttaaacatccccattcttcaaatcatcaaaatccatacaaaacaatgacaggatgaaagatgggaaatcatccttaaatcgaaaatttgtatgctttt

SEQ ID NO: 21467 - DNA, 855 bp, Gossypium hirsutum
  Clone ID: GOSHI-09MAY01-C74049_1
cgcacgcgtccgagcaaacactctcaaccttccccccttttctccaagctccgccctaagtcctgtcagcggtcgaggatcgggcaccacgccggccgccgatcttcggagccgacaccgcggtctgcggaggccggaaaaggaaaaaatctttattcggccttttcgacccttataaaaccagatccaagctcaaaactcccaaaaaaaaaccacaaaaaacctcaaaaatgtcaagaaacctttcggtttccggccaccgatcctcgggggtggctccctcgaccgtttcagaaacaaacaggtggatgctctctttttatcatttattatatttattttacgaatgaagaaagaaaagaaaaaaacaatagataaaataaaacaaatataaaaaaacctgtaaaaaataaacctttgaactgatctttgctttcgtattgagttctctttttgattgaaagtacttattttttatgatttcgaattcggctcctggttacagtattaacaatggctttatatagccgaatgaaaatacaagaaatagaaacaagaaatattcttgatttgatttggtttgattttctttcctttcttgtgtttgcaggtgaagatcatgaagattcggcttggtgatggttgcggttgcggcgcaaaagtcttcttcagaaaccctagggtttctgcaaatgatttgggccattgagctttgggcccctgttgtatttcgggttttgggctctataggcctatttgtaaaaaaatggactacttatttatttggggccctttattatttgtacccgggcaaaatctgttattacagtttgaatacagtataagtttcaaaaa

SEQ ID NO: 21468 - DNA, 508 bp, Gossypium hirsutum
  Clone ID: GOSHI-09MAY01-C74319_1
gttttcttatatatttccttcatccccacaatcccccaatctctttcctggcggctcctcctgcctctgttctcttctcgcatcatcttatctttttcattgtttgcatatttcgatctaattgaggaaagatctttttcttttgttactttcttttgaaaaatccgccatggtagcggctacgccaccacaacaacaacagcagtagcagctgaagaaacaggcggcggtggcgaccacaacggtgacggtggccggggctacaaagccatcggctgaagaagaggctttgaagaggaatacggattgcgtttactttcttgcttcccctttaacctgcaaaaagggaagtgaatgtgagtatctgtcatagtgaatatgcccgggttaacccaagggattgttattactggttggatggaaattgcttgaacccaaaatgtggatttcgacatcctccccttgatggcgtgttgggaacccaagcaacaactccgactggttcttc

SEQ ID NO: 21469 - DNA, 691 bp, Gossypium hirsutum
  Clone ID: GOSHI-09MAY01-C75999_1
ctcaatggcaatagcaatggtggacatgtgcatacatacatacataaacaactaaaaagctttaagaaagaaaggaaaaaaaagaacaagatccacctttctctttggattttcatctgcgctcttggagcagattcagttccccctccccccaaaatttagggtttcgatttgttgttcttttaattgtaattaatcgttattgtgactgtttaatttgtgaataatatatgtaataattatgagagaaattgaggattcctccaatttggttggaaaatgggaagaacagctgccgtcgccggaggagcttatgcctctttcacaaaccctaattaccccccaccttgcccttgctttcgacatcccgaatccaaaccaccgtcaacggaaacacccgcctcctccgccgccgcctcccccggccgaattcgccggtgattccggggacttgggatccggagcgggcggtgacgaaccggcgcgaacactcaaacggcctatgctcgtgtggatcccgcagctccacaagcgattcgttgacgccgtggctcatttagggatcaaaaacgccgtcccaaagaccataatgcagttgatgagtgttgatgggttgaccagagagaacgtcgctagtcatttacagaaatatcgtctctatttgaagagaatgcaagggttatccggcggc

SEQ ID NO: 21470 - DNA, 1166 bp, Gossypium hirsutum
  Clone ID: GOSHI-09MAY01-C75869_1
gggagatcagaaatggcatcaacgcccactctcaagcctctcgtttcctctctctactctgatcctacccgccactgcggttctttgctagaaaattatttcccaagaagttttcaggttaagaaggaattaagtttagagggaaagctaaagttgtccacaaagcaattcagattgaattgtttagggcacagagacatggatgttagtgcttcagttttggctgattctgttacagatgctcaattggatgtcaacgaggaagaccctagcatttcgactttattgatgaattttgatgagtaattttgatccttatggtgcaatgagtacacctctttaccaaacagctacatttaagcagccttcggcaactgaaaatgggccttatgattatactaggagtggaaaccctacgcgggatgtcctggaaaggctcttggcaaagcttgagaaggcagatcgagcattttgctttaccagtggaatggctgctttgtctgccgttgctaatcttgttggaactggccaaaaaattgttgctggggatgacatctatggtggctctgatcgtttattatctcaagtaactccaagatctggagttgtggtaaaacgagtaaacactagtgatctgagtgaagttgcaaaagttattggccccaagacaaagcttgtgtggctggagagtcctaccaaggctggacaacaaattgctgatattcgtagaattgcagaaatggctcatacccatggggccattttgttggtggacaacagtattatgactccggtcttgtcaaggccattggaacttggagcagacattgtcatgcattctgctactaaatttatagctgggcatagtgacctcatggcaggcgtgcttgctgttaaaggagagagcttggcaaaggagttgtatttcctacaaaacgcagttggctctggtttagctccttttgattgttggatctgtttaagaggcatcaagaccatggctttacgtgttgaaaagcaacaggaaaatgcacagaagatagccgagttcctttcttcccatccacgagtgaagaaagtgaactatgctggtcttgctaatcaccttggacgtgatttacactattctcaggcaaagggcgcaggatctgtacttagttttttga

SEQ ID NO: 21471 - DNA, 610 bp, Gossypium hirsutum
  Clone ID: GOSHI-09MAY01-C75789_1
cctgatgattgttttctgggcctgacgcttgctgtgaaaccaagtgtttcaaaattagaggcagtccataatggctctcagcgaatggaagaggatatactgttttgtcctagtctgaaagatcatccagagcaatcagttttttggtcattgcttactcctgatcaaaatggaattcacacaccagttgaatcctccttgtctctctcatttagttcgattcagcatccaccaattggagttccacaatctgctgggtttgcaatcgcatcattgcagcctaatctcccagttcgtcaaaattattggctgtggcctcccccttccagcaaggttataccctctgactgagttggttggataatctaataagggcctgtagagaatttgtaatttatttaatttgtttttgtaaagtcggatccatttagcactctcatagcttctattgttgtctaatctaagctttgcctgtattgatcggcaaatctttcccgggaaagctcctgggaagtttttcagatttctatcacttccgagtgtaggaaatttcaccctatagcttgaatattgatcttggttaatgcaaatgttctccccttcatttgtc

SEQ ID NO: 21472 - DNA, 518 bp, Gossypium hirsutum
  Clone ID: GOSHI-09MAY01-C75769_1
ccgattctagcatgattgcgtttgtgggaaatgaaggttatatcttgttggtttcatccaaaacaaaggagcggattggaacacttaagatgaacggaacagtccgctctctagcttttgctgataatgggaaccaattattgagctctggcggggatggacaagtctaccattgggacttgagaactagaacatgcatccataaggccgctgatgaaggctgcattaatggtacggctctttgtacatcaccgaatggaagaatgtttgcagctggttctgatagcgggatagtgaacatttacaatagggatgaatttttgggaggtaaaaggaaaccaatcaagactgtcgagaatctaaccaccaaagtcgattttatgaagtttaatagtgatgctcaaatactagctatctgttctaccatgaagaaaaacagtttaaaactgatgcatgtcccatcatttacagtctactctaattggcctccactgaataagaacttacagtatccccgc

SEQ ID NO: 21473 - DNA, 654 bp, Gossypium hirsutum
  Clone ID: GOSHI-09MAY01-C75169_1
gtccttcttgactcaaagcatcaaggatgggtaaaagtcctggtgtcttcgtgttcgggggtttttggaaatgaaaatgctgacgcttggagtgattttcttggtcttttgaaattcagaggtgtgactgtggatagaactctaaccagggactccgctaatcaaagttggtgcccttcaaattcttcatctatggctaagatttcatccgagcttgtagcggtcaaccctgcaatggttgctgcattagcatgaatactcagatctttgggtgaagatccattaaggaaggagctggtggaaactcctagccattctgtgaggtggttgatgaactctgataatacgaagttggagatgaagctgaatggctgtgctcgtggcatatccgatcttctcaaacctaatggggaaatcagctcccgcaacaacgaacagatgcattcggagttgaacctctcattctggtcacaatgtgagcatcacctacttcccttttatggtgtggtccatattggatacttctgccctaaaggaatcaatcaccttgggaagtcccttttgcggtcaatagtacatttttacggtttcaagctccaagtgcaagaaaggctgaccaggcaaatagccgaaacagtttcatcgatcctaggt

SEQ ID NO: 21474 - DNA, 902 bp, Gossypium hirsutum
  Clone ID: GOSHI-09MAY01-C75379_1
attttactgaatgtgttggtaaaacaaccgcttacgggtgtcatattagtgcgaaaacgccgataaaccaaagaaatgaaacagaaaaacgagaaagctcaaaacagattcttactacaaaatggcagcaaatgcaaagctttcttcagtttgccgtgccgtgtttgcaattgtggtgcctaaactaaatccacctcctccctcctccttttagtttaggaaaagagtctctacttcataatttctagggtttcgtttctttgccatctcatttcctcggctttttttggatttaggcggggattggaatcaatgagagatcaattgaattcggatctgtttgacccgagaactgagatggtcccagatttttcgcgaggggcgtctagctccgatggtgatttcggtttcgctttcaacgatagtaatttctccgatagacttcttcggattgagattatgggtgggccccctcagtgccgccccgatggagagggttgcaccagcatcgccgattgggctcgccaccgcaaaaggcgtcgagaggatatcaagaaggaaaccgttttggatcttagtttatgtcctgaggagcagattttaaatgacatccagcctgatatggacgatggtggaggctgtgagaatcaagacgaggagccagtggcaatggttgaagaaacacaatcaggtgatgaggatgcgaatagcaatgaatcaagctggagcatggattgttctacagttctgagagttaaaacattgcatatcagttctcccattttagccgcaaaaagccccttcttctacaagcttttctcaaatgggatgagggagtcggagcaacggcctgttaccttaagaatcaatgcctctgaggaagctgctctcatggagctttt

SEQ ID NO: 21475 - DNA, 610 bp, Gossypium hirsutum
  Clone ID: GOSHI-09MAY01-C75369_1
gtagcttttgaagcttggaacttctgcaatgaagttgcccatgaagctcctggcatgggagtccgagagctgctgattgttttgacgtttcaaattcaaccctgttacacaaggtatctgaggcagatgacatgcttggaataggcaaaacgtttaaaggattatctacagaagcaatgcatcggccagatctgtatgcagttgagaaggagttgtatttgggttctttatgcgaagtttcagacagttcaaagccatggcaattttgggatggttatgttgaaaaatggaaactttgataccaaaggccggtttttgtcctgaaaatgggaaacccaaacccccttttactacttcaaagaacttcccttgctttggagaagggtgcatgaatcaacccactttgaaccatcagcctacacaactgttaggtgatggtacaatgaggggatggttcaatggaacttatgatttggatgctgatattgggaaaggtcttacaaatttatccttttatgaagtgatttgggagaaaacgcttggttctggaagttgggtatttaagcataggctcaagacttcaatgaaatatccatggttgatgctttac

SEQ ID NO: 21476 - DNA, 975 bp, Gossypium hirsutum
  Clone ID: GOSHI-09MAY01-C75249_1
aagattttctgcctcccagcatgtctgaatacagatatacattcaataatgtatttggattcttaaattttgcttcatgttcttcattgttttcgaccatggaaaacgggaagatagtcaaaggacttgcaggggttccagatgagggtccagtgttattagtaggtaaccatatgttactggggatggaccttagctctctgtgtgaagcattcttaagagaaaagaagatcctggtccgtggagtggcccatccggagttgttttggggaaattttcacacatcatccaatgtttttaattattttgatttaatgaaagtgatgggggcaatgcctgtctcaccaaaatcacttttgaaagctttatctacaaattcccatgttcttctttatcctgggggtcccccgcggcccctccatcgtaagggcgaagcatacaaattattttggcctaatcaaccagaatttgtgagattcgcagcacaatttggggcaaccattgtaccattcggggctgtaggagaagatgatatggcaaaagttgtctttgattactatgactatatgaaaatccctatgcttaatgatagaatcaaagaagtcattcggaacggtggtgtacaaataagggataaagcaaagggagaggtggctagccaagagatattcataccgggaatgataccgaaaattccgggtcgattttactatctgtttgggaaaccgataaagctgaaaggaagggaagatttggtggagaatagagaatctgcaaatgaagtatatttgcaggcaaaagctgaagttgaacgctgtattggttacttgttaaagaagcgagaagaagacccttttagaagtatcattaatagactaatctatagaactttctatgctctttacaccaagttccttctttcaagccctgataacaaaataaaaaatggcactggaatatatccatctttgattc

SEQ ID NO: 21477 - DNA, 1038 bp, Gossypium hirsutum
  Clone ID: GOSHI-09MAY01-C76809_1
ccccgcgtccgcagatttcgcagctatgactgagtattgggtgagtcagggaaacaaatggtgtgatttctgcaaaattttcatatcgaataacccatcgagtattcgaaaccatgagcttggtcaacggcacaaagagaatgttgctaagagacttactactatgcgaaaagagagtgcagccaaagagaaggaacagaaagacgctgctcgtgctcttgaacagatcgaagctaaagctaagcggagctatcagaaggacgttgctagttttgaggcgagagattctagtgaccaagcattagacagtcaagaagattgggactatgacagtagctcgggttattactacaatcaaaacaatgggttatactttgatccaaagtcaggattttactattctgatgctatagaaggaatgcaacaggcaggtgggtgacacaggaagaggcatactccaaggttcaagcttcatcaaatactaaatcaagagatcctattttgaaaaagccatttccaacttcagagacgggaccagttgcagatagcaaaagtgtcgctaaaagtcaaaacaagaccgcaccagggcctgtcatttccgctactttaaaatcccatgagatctgttaaaggtgctgcatcctcacttgctggtaagagaaaaagacaagatgaaaaacccaaggctgtatctaaagaagaggcggctgcactcaaagcaagggaagctgcaaagaagagagttgaagagagagagaaaccattgcttggtttgtacaagggatctcgttgatacggaatgattcaaacaagcaagcatcctgccgattcttgattcaagggatgccgagatcgtgtcgaagcaggctaggatattttacataacatgaatgctgtattgctgttgaacaatgaaccaatatggcatatcttaacacattgttgttattgtaaaatattgagctttttttcttgtgtgctaaaactttgttagtgtttgtggtgctttgtgttggaattttatcaaaatttcctttt

SEQ ID NO: 21478 - DNA, 606 bp, Gossypium hirsutum
  Clone ID: GOSHI-09MAY01-C76579_1
attttcgtattcgattttgcgttgatttttttctttcgttcctttttttttctttttaggtagaaaaaaagcgataattaggaatagaagttttatcttttgatattatcgtagattttcacgataataatggtgtggttctagtccttgctatggcggagatctgttacggagttgtgagcgaaggcgaagcatcaataccgcgcgagccgagttcacgtgcagcaaggaggcgtaggatggagattagacgaattaaaatccgcgacgtggctccatctgaagctgggaatggccggaaacgccagaacctgccaggttaccgagcatcattttctctggactgtgaaaacgctgtagaaaattgtgcctcctatgaggacggaaaaaagcgaactgttaaacctaaaaatggaagactaaaaacaaaaggaacaatagtgaaaagtaactcgagtccctcgcttttgatacctgaaatcgattcagagttacatcctaaattcggtgttgcttcggtttgtggtaggagaagagacatggaagacgccgtcgctattcatccgtctttccatcgtcaaggccaggactctgccgccattggct

SEQ ID NO: 21479 - DNA, 698 bp, Gossypium hirsutum
  Clone ID: GOSHI-09MAY01-C76469_1
ccgcggcgcgtgggaagaaaatagcgcaattcaccccgcggttgcgccactgtcctacttgttgggcacatggaaaggcgaaggcgaaggaggataccccaccatcaactccttccgctatggcgaagagcttcacttagctcaccctgcgtctgggaagcccgtcatagcctactctcacaagacctggaaactcgattctggtcagcctatgcactccgagtccggttattggcgtcctaaacctgatggctctcttgaagttgtcattgctcagagcactggccttgcggaagttctcaaggggacctacagtgcagaggacaatgtcatcaagcttcatagccaagtcgtagccaatgcttccaaggtgagggagataagtcgagtttacaagattgttaatggagatctacattatgttgttcaaatggctaccaatcttacaactcttcagccacatcttaaagctgtgctcaagaagctgccataaaacttcaaagtaagtagtttttcatttcgttggaccggatcagactattttttatataatatccctaaactctggtcccggtcaaaggccagaggcagattgttttggctacaaaagatattgcaatgtggtggccaagtcacaatctctggcgcagaaactggattatcgtgtactgaaggccaactcatttaaatgttgactt

SEQ ID NO: 21480 - DNA, 420 bp, Gossypium hirsutum
  Clone ID: LIB3493-019-P1-M1-B10
cggacgcgtgggcggacgcgtgggccgtcatagcctactctcacaagacctggaaactcgattctggtcagcctatgcactccgagtccggttattggcgtcctaaacctgatggctctcttgaagttgtcattgctcagagcactggccttgcggaagttctcaaggggacctacagtgcagaggacaatgtcatcaagcttcatagccaagtcgtagccaatgcttccaaggtgagggagataagtcgagtttacgagatggttaatggagatctacattatgttgttcaaatggccaccaatcttaccactcttcagccacatcttaaagctgtgctcaagaagctgccataaaacttcaaaaggcagattgttttggctacaaaagatattgcaattgggtggccaagtcacaatc

SEQ ID NO: 21481 - DNA, 469 bp, Gossypium hirsutum
  Clone ID: GOSHI-09MAY01-C76649_1
attttacttcatattacctaaatttaataattaagaaaataaagattgagatataggaatgagaaaggtggagattgcaataatatgtctcttttcattggttttcgtagccatgcctgttaaactgccacaaaggccacagctgatggcaccaccccgtccactttgtgcttcacaattttccctggtcaactatgcgtgtgcggcgctgccattaacccctttctcaccaccacctcctcgcaatcgcaaccatagccgcagccgcagccgcagccgcagccgcagtaacagccgccgtcgcagtcgcaagcataggcgcaggcacgggcaccgtgagacggaaatgcatagctactgttgtcaatggctgaagcaggtggacactgagtgtgtgtgcgacgttctggttcacttgcccaccttcctttctaggcctaatcatcagtacacccgttgtcgtgatgat

SEQ ID NO: 21482 - DNA, 457 bp, Gossypium hirsutum
  Clone ID: GOSHI-09MAY01-C76669_1
ttcgcaagttatttggtgatcaagatttgagtacatctttattggacttgggtctgcttaacagacaagcactgatagtggttccacgtcagagaagcactggcttccaagggcaaagatcatttgctgaccaaagaaattctacaccttctgaagctactgcaggaagcaatgggggatattttgcatacgttagaagctttatgtcctatttcaatcctttttcttatcttggtggtggtactggtaccagctcttcaactactggaccggaatctcaaagtggcatctgggaatacagtccaaaccctacactgcaaaataacttggctggagcaaacaggacatattcacctaactcgacaaacagaaacagttcgactgacagcaggaacagacgacccacaacatcccgatatggtagcaatattcacacactaaaacacgatgaggatga

SEQ ID NO: 21483 - DNA, 501 bp, Gossypium hirsutum
  unsure (1)..(501): unsure at all n locations
  Clone ID: uC-gsflnu33B009e10b1
tttagccaccacctcaataagaaattctaattatgaatctaaaaatcctatgcacaacaataaatgaatctgcttaaaaaaggaaagaaaagaacctgatcatatgccatattcaatcataggtggtggctatctagtagcacgagattgcattcatacgttttttctttctttttgggatcttgagtaaccatgtcacagctcattaacgatccaaattttggatcgtgtaatcccccatgaaactgnagtggtcaaacagaaactcttgaaaattgccttggcaaagtattttctcatgttttctggattggctgcatttataggtccaaaccctacactgcaaaataacttggctggagcaaacaggacatattcacctaactcgacaaacagaaacagttcgactgacagcaggatcagacgacccacaacatcccgatatggtagcaatattcacacactaaaacacgatgaggatgacagnccgttctcggatag

SEQ ID NO: 21484 - DNA, 559 bp, Gossypium hirsutum
  Clone ID: GOSHI-09MAY01-C77979_1
accgggacaggagggaatagccaccgcatgccactagaacagccactcgagtgatggaaaattctgagagcatggctctttgcacttaccctttactgaatactattcttcttggggtttttgccaccgtgatgagtgtctatttgttttggcttggaaggcggattttgaatttagttatcaacaagggtttgcagaagagagtttacacattaattttgtcggtttcaagtttccttccattaagggttcttttacttggtttgtctgtattatctaaaccagagcaatttgtttttgaagttcttgctttctcagcttttgttgtccttctatgttgtgttggggtctgtatctgcatgcttatatgctgtccagttgtggattgtatagccctggggaatctttcttgatgtggaaggtagaagtgatgatcagaatgatgctgctgttttctcttatcggtaatcagaaccatcttggaagtagccctgagaggaattccaggaatggatcaatttctttccggacttttgaaaaagatggtacggcggcaact

SEQ ID NO: 21485 - DNA, 1211 bp, Gossypium hirsutum
  Clone ID: GOSHI-09MAY01-C77819_2
tagggtttcatttttctgtttagtacgagatggggaggtatcggagccggagcaaaagctacagtcctcgtcgtcgtagccggagtcccactcgtggaaggaagaggtacgacgatgaacctcgcgatcgccagcaatctcaccgtgaccaccgtcgccgctcccctctcccttctggtttgctcattcgcaatctccctctcgacgctaggcctgaagatcttagggttccctttgaacggtatggtccggtgaaggacgtttatctgccaaaaaactattatacaggggaaccacggggctttggttttgtgaagtttcggtatggtgaagatgctgctgaagcaaaacaacgaatgaaccatcaagttattggtggacgtgagataagaattgtttttgctgaggagaatagaaagactccccaagaaatgcgtctgactgcccgtgtaagtggtcgagataggggaagcaggagaacaccgcctaggtccccaagacgccgatatcgctcttactcttgctcaccttcaccttgctgggcatgattcaggagacagggatcagagggggaaagattatcaccactcccctaggcggtctagatcaatttctcaggatcgtggtatgagagatgattatcgctctcccagtcggtccagatccatgtcaagggattgtggggcaaaagatgattatcgctctcccaggcgatctagatctgtttctcggtctctttctccacgttctccacatggtgacagggacagggaatacagaaccaagcagaggtcccctagtcctagggagaatggtcagagtctacaagatgagagagatcatgtgagcagcaggtcaaagagcccaaggcgtgtcaatcgcagtccttcaaggtctcgttcacgatctttgagtcctcgctagcagctttccaaatgatgctgccttctcatggctctatgcacgtggttactgctggaaactgtaagtgtgtttgtccggtgctttatatttacgtacaagtaggtaccatgtggtagtggtgggtagattatggacatgtatggagtccagcgggtttttgaagtgtctgttgatatgtttctgcaacttgttttgaatgattttagagatacaatttcagactgatgtagcagtctactttaatcctgaaaggatttatctaaataccctttagtatagccttgttt

SEQ ID NO: 21486 - DNA, 790 bp, Gossypium hirsutum
  Clone ID: GOSHI-09MAY01-C77819_1
cgccgtcctcttcatttattatcatttttcattgttttcgtttggtttagggtttcatttttctgtttaatacgggatggggaggtatcggagccggagcaaaagctacagtcctcgtcgtcgtagccggagtcccactcgtggaaggaagaggtacgacgatgaacctcgcgatcgccagcgatctcaccgtgaccaccgtcgccgctcccctctcccttctggtttgctcattcgcaatctccctctcgacgctaggcctgaagatcttagggttccctttgaacggtatggtccggtgaaggacgtttatctgccaaaaaactattatacaggggaaccacggggctttggttttgtgaagtttcggtatggtgaagatgcggctgaagcaaaacaacgaatgaaccatcaagttattggtggacgtgagataagaattgtttttgctgaggagaatagaaagactccccaagaaatgcgtctgactgcccgtgtaagtggtcgagataggggaagcaggagaacaccgcctaggtccccaagacgccgatatcgctcttactcttgctcaccttcacctgctgggcatgattcaagatagtaaagtgaaaagagattcctaaagacttctggattaataaagattaaagagatcataaagtgatggacaacttgattttctatcaaagcttctccataagtattatccataatcccaccttcaccagccattgactacaaattgcatgaggtcttgttttttgacccttgggttgtcaggcttgct

SEQ ID NO: 21487 - DNA, 573 bp, Gossypium hirsutum
  Clone ID: GOSHI-09MAY01-C77469_1
cccacgcgtccgtggaaagggcactggacctcacaatagtaagaaccaaaatgattttagaccttctcattgcttgcctcctctaccccatcagaaagtacatgccaaagcaagctctcctcatgaccaacctgaacatcttaaatctgtggaaggcctaagggtcacttgtccagttgatacaagggaagtcattggaccacctgtgttgtcacaatctgaagcggcttctattcagtatgccacaagtgttccagttgctgcagcagcagctgctgctgctgttgcatcttcaatggtagtcactgcaaaaagattgggcacagattcaaatgttgaacttcctgtagcagctgctgcaatggcagctactagcgcagctgtgatgaagcagactgattgtaatgatggagatgctaacttggctggctgtgagcatattagtaaaagggggcaagatgcctggagggtaaattctgaaggcgagagaatgtcagataaatcagctggtaataatagttcaaagtccgataatgctcttgatggtgttgcggaatgtgagataccttggga

SEQ ID NO: 21488 - DNA, 636 bp, Gossypium hirsutum
  Clone ID: GOSHI-09MAY01-C77729_1
gaaaaaggtcactataaagagttggagtggaaagaaaaatgccttgaggtactttatcgggagctcaaagcaaaagagaagcattatgatgaatgtttgagaaaagtcgaactgagaaagaaggagattgaagaattatctgcagaacataggagaaagtatgagcaacagtccagcgatcttgagttcattgttaaaaagtgtgagcagcagttcaaagatcttcattcaaaggagaagaaacttgcagaatggtctaaagaacttgaaaggaagagtcttgcttttgccatgcatcctcaagtgaaaaacgaagcagcaggtagtttgtcgattaaatgttccatggatcattcttcaccagcacatcttcggttttgcatacatatggatggaaaggatttgcaaatgttcctaaatgggcgctggaaagagcacggttcaataggtactgaagttgctatggtgcttcaactttcaggagaccctgcaaagcttgtcttggatgccatggaaagggttttaccttccacatttgagtaagggagatagagagtttgcaggggatgttgccagaagaagttgcattctcttgttagagcaattgatgaaactttacctgaaataagcctaatg

SEQ ID NO: 21489 - DNA, 740 bp, Gossypium hirsutum
  Clone ID: GOSHI-09MAY01-C77639_1
ataaattaaaacttttaatcaaaatcaggttgagaatggctgctgcggcaaaccctaaagaagctgtgtgcgtgaccggagctaatggatttatagggtcatggctggtccgcaccctccttgaagacggctatacccgggtccacgcagcgatttacccaggctcagaccccaaccatctgttgtctctccccggcgccacttcccgaggcgtggtgctgcaggtgtacgaggccgacgtcttggactacccagccgtcctcaaagcggtggagggctgccagggtgtattccacgtggcctctccttgcagtctggaagatcccaaagacccagacaaggaactggtgagaccagcggtgcggggcacactcaacgtactcgaagccgctagatcagccaagggcagacgggtggtgctgacttcctctatatcagccatggttccaaaccccaattgggaccctaaaacccaaggacccttcaacgaatcatcctggacagacctggaatacttcaaggcacgacataaatggtatccagtgtcaaagaccctagctgagaaagcggcatgggaatatgcagagaaacatggacttgatgtagtggctataaatccagcaacatgtttaggtcctatggtgcaacccaactggaatgcaagttgcgcggtgctgctacaattggtaccaaggctctaaagatacccaggagttccactggttaggggcagtccatgt

SEQ ID NO: 21490 - DNA, 645 bp, Gossypium hirsutum
  Clone ID: GOSHI-09MAY01-C77139_1
cttttcttctatttcttttccccaaatgcagcctctattttagatcaaaagaaattccagcctttaaaatcaaattttttagggtttcctccacttgactgccaaaccaccatgatttgaggtgattaccagtaagcgagacgtgcccaatcttgccgttaaaggaactcgaccagatctaaaaggattcggtaagtattttcccttctttcttctttatttgaatgaagctttcaaatctcatgttatttaaaaaaaataaaaatagatttgtaaaatgaatagatttccactattatgtgacctctcgcccttatactcgcatgacaaatttagggctttcatcagcctttagttgcataaaaaggagcaaacaaataagaaaataaagagaaaagaaaaaacaggggaaaaaaatcggaagagaaaaaaaatgaaatcacctctattgatctaaatgcacctttctctcttttctgtgcgtgcatacagatattgtatgcgtagagtctattctgtgtgcgtagagtgtgtaatctcctccctttacaaagattaaaagctgggcttttgtagtcgaaaaaggaaatcaaccgaaaatatacaatatatttgtttccattcgcttgcctgttttgttctttc

SEQ ID NO: 21491 - DNA, 761 bp, Gossypium hirsutum
  Clone ID: GOSHI-09MAY01-C77249_1
cccacgcgtccggctgactctcagataaaagcgaaaagaatagaagctgatttgaagattgtgagattgcaggaagaaattatggaagttctaccactggatgacacgaaccaacatgttgaaaagaagcttcttcgtcctgaggagctcatagagctgtgtctcgaaagtggaagcaaagagctagctttgcaggtttttgatgtatttgcatggactagctcatcatttcgcaagagccataggaaccttttggaggagtgctggaagaaggctgccgatcaagacccttggagcgagctatatcaagcatcagtatccgaaggttggagcgacgaggaaactttgcaacaacttagccgaactatccttttcaaggcttcaaacaggtgttatggtccgaaagcagaaaccattgatgacggattcggtgaagtgctgccattgagacaagaaaacgtagaagtagccggtttgaaagatgcacgatcatccgttgaggcaatattgatgcaacatagggatttcccatatgcaggtaagctaatgcttactgccctcatgctaggatgtgtacaaggggacgatgttaaattagaggagagcctttccccaatggtatgacagattagggctaatactgatcacattcttgagattgcctttctcattagtggtatttgtataatttcatatcttattttgggggtcttattaaatgcataccctaagcacgcatttacaagtttttcctttttcag

SEQ ID NO: 21492 - DNA, 538 bp, Gossypium hirsutum
  Clone ID: GOSHI-09MAY01-C77209_1
acctgatgttgcaagaggttaatgctagactcatatcactgggaatcggtttagaggtgtctgaatcaatcaaggacctcatttgtcagcaaggctacgaccagacctacggtgcacggcccctcaggagggcagttaccgcaatagtcgaagatcccctaagtgaagccctcctggctggaaattacagtcccggtgaaacagccgttattgatcttgatgctttaggaaaccccattgttacaagtcgatcagatcggaacatcagcttgtctgatccagcgtccatcttctagcttgcttattcctagggcccatacaagtttccccgaaatctaatccctaaattcccgggaattcatggttttaggtttcgagtttcaacatctgcaactcatttctccattctctggttacaatatattatatgatgatgtaaataatgtaggaagattttttgggcagtttatggtatatatttgtatataagtaaaccttcaagttgttaaactatacatatggagtatacatttcattt

SEQ ID NO: 21493 - DNA, 581 bp, Gossypium hirsutum
  unsure (1)..(581): unsure at all n locations
  Clone ID: LIB3582-055-P1-K1-C1
agcgttcgcaacataagtttgagagaaaaaaagtcaccaccatgatcaagaccttgaatccttattcagctaaaacagctgaaattatgtctaggtaccgtcctatagctcctaaacctgaagtgttnacctgaaaactccattgatgaaagctcagctatgtctcaaaagatgagacagtcaccttgtttgaggaatttatggcctcagttacaagctcgacctagtaggaatagaaagagagggagaggtactggcttatcaccaccaccgccaacaacaacagcactgaaaagagcaagaacccaatatttcttagggctttctccaccgncgccgccgccaccaccaccaccaccatcaacaacaagtttggtcacactccctcttcttccatgtttaaaggtggcgtgctcatgaataccggaagagagggattttttgaagcagctccaagggcttcctgttcttcccactagtagtcttataacacctcagccaattagaccagtgggtagtgttataacaccttagccaattagaccagggggttcaaccatcattgttgggtgcattaatga

SEQ ID NO: 21494 - DNA, 545 bp, Gossypium hirsutum
  Clone ID: LIB3583-007-P1-K1-E4
gagggagaggtactggcttatcaccaccaccgccaacaaaaacagcattgaaaagagcaagaacccaatatttcttagggctttctccaccaccgccgccgccgccgccaccaccatcatcaacaacaagtttggtcacactccctcttcttccatgtttaaaggtggctgctcatgaaataccggaagagaaggattttttgaagcagctccaaggtcttcctgttcttcccactagtagtcttataacacctcagccaattagaccagtgggttcaaccatcattgttgggtgcattaatgaagcaccagcaccagcagcaccattgcaagcccctaagaaaccagaggaggttgaagatgatatagaatctgagtccatgccaacaattatatctgattccaacaacaaagtcaggctagcaaactcagcttacaaagccatggtgggtcaacctgaatgtccctggcttgattccatggtgaaaggcagtgaatgcaagagaatctgtggggaagtgatgcttaatctatctaattcaagg

SEQ ID NO: 21495 - DNA, 842 bp, Gossypium hirsutum
  Clone ID: GOSHI-09MAY01-C70929_1
ggcaacgtagatcacccccttccagccgtaggtcagtaactccttcccgtggtaagtctccgtcaccttatcaatcaagttctatgtctcctgtgcaacgtagatcttcttcaccagttaggaggtctccaaagggacaaagatcatcttcgctttctccaggaggacagcgaatgcgtcggaagttgtctcctgtgggacataaccactctagtatgaggtccacacgctcagatcgtatggatcagagtgatacagatgataaagtgcctggtttatcaccacccccaaataagtctcctctctccaaatccccatcacatgtgaggaatcgatctggaagtgaagataggaggtcgtcaagtccatatggaagtcccccgaggcagaggaaggcccgaattgctcgtgatgatagctttagtcctgaacggaaaccaagagaactgaaaggtcatcgggacggtcaaggaacggggagaagaaatgaaaccagtgaaagcaggcattcaccgccgatcagtaggcaaagggtttctcctaggacggttcatactcctgaacgattggcaggcagtcggtctacagactctcggagtcggcttgataacgttgaatcgagaaagaaagaccttgaaacaaagagcaaaaggtcttccggagaaggtgttcattcaggaactgaccgacagcgatcaccagcaatatcggaggactcgtttcaaggtgagaagcaaagtagatcacgcttgagagaaggaaaaagatctgacgaaagaagttgttcccataaaaacacaaaggacagtgatgaacaccacaaactagaaacttcacctgtg

SEQ ID NO: 21496 - DNA, 530 bp, Gossypium hirsutum
  Clone ID: GOSHI-09MAY01-C70499_2
cccacgcgtccgcccacgcgtccgcgacttcagagagtaaagctggcactttccattgcctgtaaaactctctgtactagcaaaagaagaacaaggaaaatctctcaacaaaaactgaaaaagtcagatatttgcgaagttaagacgtgaagaacagaaacatgattctgaagtacataccactagatgaagggatgatgataatggatgaggcgattgtgaaggcaaagaagattattgaagggtaccctgaaacaaagttctctggagaagaataccagaggttctatgaatgtgtttatttcatgtgcacttaccatagctctaatgagaaaacgatgcagctttatgagaaattcagaaacagcttggaagagagcatcttttcaacggtactgccaactttagtcaataaacaaggtgcaaatttgttgagagaatttgtagtcatatggtctaattataagctgatggcaagatggttatgtagattctttgaataccttgatcgcttctttatcccttaacat

SEQ ID NO: 21497 - DNA, 554 bp, Gossypium hirsutum
  unsure (1)..(554): unsure at all n locations
  Clone ID: LIB3582-019-P1-K1-B5
gagcagttttactaataatacaaagaaaatcagcgacttaagagagaaaagctgtactggcaaaaaaagaacaaggaaaatctctcaccaaaaactgaaaaattcagttgtgcagatatttgccaagttaagacgtgaagaacggaaacatgattctgaagtacataccactagatgaagggatgatgataatggatgaggcgattgtgaaggcaaaaaagattattgaagggtaccctgaaacaaagttctctggagaagaataccagaggttctatgaatgtgtttatttcatgtgcacttaccatagctctaatgagaaaacgatgcagctntatgagaaattcagaaacagcttggaagagagcatcttttcaacggtactgccgactttagtcaataaacaaggtgcaaatttgttgagagaatttgtagtcatatggtctaattataagctgatggcaagatggttatgtagattctttgaatacctcgatcgcttctttattcctcaacatattgagcttgagtcactaaatggcatctctntttct

SEQ ID NO: 21498 - DNA, 787 bp, Gossypium hirsutum
  Clone ID: GOSHI-09MAY01-C70489_1
acgcgtacgaggaaatacacccccaaactactttctttcaaaaatatttcagctatcttggtttcaaatcataaccatgtctggtgccaccccaccatcgtcttcatcccctgcattagatactttcagagatataattctatggaggagaaagaaagtgagtgcaacagttgttctggtttcaacagcaacatggatattgcttcaagtatatcagttcaacttcatcactgtcgcttcatggctcatcatcttcatccttgcttcacttttcctttggggaaatgttctcaggcttctcggcaaagaaccaccaaatgtgtcggatttcgatatctcgaaacagacaaccatggagattgccaacacatatcgaacatttttggaagatgtattgagatggatgtttcatgtgaccgttgaggagaactggtttgtgtttgcaagaacactggcggggcttttgatactatcctacgttggagccttctttgatttcctaacacttgtttacataggtatatcgttggtgttgatccattaatccgtattatgtgtttattttattgatttgattgggggggggggggttgcaggtataacgatggtgatgatagcgccagtgatatatatgaagtatggggaccaaatccagaggagtggggagaaggtgaagggtgaaatgggaagattttatgagatatttgatgagaaagtggtgaggcacacgatgagtaaatttgtgaaacacggaaaagagatgaaaaatgggtaatttttgtttaat

SEQ ID NO: 21499 - DNA, 475 bp, Gossypium hirsutum
  Clone ID: LIB3582-010-P1-K1-D4
caaatgtgtcggatttcgatatctcgaaacagacaaccatggagattgccaacacatatcgaacatttttggaagatgtattgagatggatgtttcatgtgaccgttgaggagaactggtttgtgtttgcaagaacactggcggggcttttgatactatcctacgttggagccttctttgatttcctaacacttgtttacataggtataacgatggtgatgatagtgccagtgatatatatgaagtatggggaccaaatacagaggagtggggagagggtgaagggtgaaatgggaagattttatgagatatttgatgagaaagtggtgaggcagaggatgagtaaatttgtgaaacaagaaaaagagaagaaaaatgattagaggataatgtataatttttgttttaatgtttttcttagctcaaattaattattaattagaagattaaataatgcgatgtattgtgttgattg

SEQ ID NO: 21500 - DNA, 677 bp, Gossypium hirsutum
  Clone ID: LIB3582-040-P1-K1-B10
aaattgactttcaatctttgtggttcagattcaagtttgtagatgaatacgtcataccttccttctagcatgtccaacaacttcttgttggatgctataatggatagggttggatatagttttctcttggtttccttagcagcaactaggtttagatgttttcttatgcaggtcattcacttggcgtttcattcttgcactgatcttgattttgcccctgagcctaaatactaatttgtatgccagttttggaacgacagccagtctatatctgaaggaaagcattggtcaatttggcaactgaaggggaaaattcctatatcttcttattaggttcatatgcactcactttggactgtttatgtcagctgttatacacggagaacaagtaaatggtttagagctaccaatttgcagaactcttagaccttgttcaatcggaattcactttgacatcaggatctttccactccaggatctggagattgcattgaaaatgattaaagggtgggggggtgaacgattgtagtcatgccattatcttaaatccattatattttacccatgtgttagcatgctcgatgcttgttgtagggtgtcacaggaggtttagggagtgactgacataaaggaattgataatagtgtctcgtgctgtgtagttctaagatgtaatga

SEQ ID NO: 21501 - DNA, 477 bp, Gossypium hirsutum
  Clone ID: LIB3582-010-P1-K1-G11
cgagattcaagtttgtagatgaatacgtcataccttccttccagcatgtccaacaacttcttgttggatgctataatggatagggttggatatagttttctcttggtttccttagcagcaactaggtttagatgttttcttatgcaggtcattcacttggcgtttcattcttgcactgatcttgattttgcccctgagcctaaatactaatttgtatgccagttttggaacgacagccagtctatatcggaaggaaagcattggtcaatttggcaactgaaggggaaaattcctatatcttcttattaggttcatatgcactcattttggactgtttatgtcagctgttatacccggagaacacatatgcactcattttggactgtttatgtcagctgttatacacggagaacaagtaaatggtttagagctaccaatttgcagaactcttagaccttgttcaatcagaattcactt

SEQ ID NO: 21502 - DNA, 168 bp, Gossypium hirsutum
  Clone ID: GOSHI-09MAY01-C70619_1
ggggacgcgcccgagcggcgcaaagcgcggcggggggggggacgcgcagcggaccgcacacgccagcgcccgagcgcccgccccgccccccccccccgccacgcgccggcccccgcaagccaaacgggggcccccaagggggccgaaaagggcacggcacccgacccc

SEQ ID NO: 21503 - DNA, 767 bp, Gossypium hirsutum
  Clone ID: GOSHI-09MAY01-C70019_1
ctcatcttcatccatccatccttcgttagacatccatggcttcgctcaagttcagccacagcaacggcaacccatttgctgtcactcgccatgttactcccaggtcgactcggcccactcggataggatttaagatttttgcttctgataatcattctgaacctgatttgagtgtttgcgttaatgggctgcaaatgcccaacccttttgtaatcgggtcgggtcctcccggtacaaattatactgtgatgaagagagcgtttgatgaaggctggggcgctgtgattgccaaaactgtgtcgctagatgctgccaaggttatcaacgtaactccaaggtatgcccggctacgagcaggagctaacggctctgccaaaggacagataattgggtgggagaacattgaattaatcagtgaccgccctcttgaaactatgttaaaagaatttaagcaactgaaaaaagagtatccggacaggattctgattgcctccattatggaggaatataacaaagctggctgggaagaacttattgatcgagtagagcaaactgggattgatgccattgaagttaatttctcatgccctcatggcatgcctgagcgtaaaatgggtgcagcagttgggcaagattgtgcactattggtggaagtttgtggatggataaatgcaaaaactactgttcctgtatgggcgaagatgactcctaacatcaccgacatcacaatgccagcaagggtggctttgagttcacgttgtgagggg

SEQ ID NO: 21504 - DNA, 600 bp, Gossypium hirsutum
  Clone ID: GOSHI-09MAY01-C71999_1
gaaggtagccaaagaattggagcaagttgtggaggaatggctacaagagcacaaagaaaagagagctgaaaatgaggcaaacagtgaggaagatttcatgggagtgatgctatctattcttcgtggtgcagaggagcacgatgccgataccatcaacaaagccgtcagtctcgcacttatcttagccgccgaagatactacatcaattacaatgacatgggctttatctttattactcaataatcgcgatgcattgaacaaggtcaaacaagaactagacatccatgttggtaaagatagactcttaattacagaatcagatactaaaaacttagtgtaccttcaatctgtcattaaagaaacattacgcctctatcctgctgctccactcgctgtaatccatgaagccattgaagattgctcagttcatggatacgatatttcagccggcacttggcttattctcaatcttcaaaagatacaacgtgattcacagatatgggaagctcctttaaaatttctaccagaaagatttatgactacccataaagatattgatgtaaagggacatgactttggacttatttcatttagcagtgg

SEQ ID NO: 21505 - DNA, 492 bp, Gossypium hirsutum
  Clone ID: GOSHI-09MAY01-C71549_1
gaatgtgatccattgagggaagttgtgattagtcttcttcatgtgaaagacaagctcaagaaggctgaggtcacagctgctgcccaagttagtcttaagagggacattactaataatgaatataacaaggtaatgagtgatttttgcgagtataaaggtaactggtgggtattgaaaagtggtgatgggaagccaagctaatttgatctaaattataatgttcattgaggattgctgatgaaaatagggcaaaagaggaggccaaattacatgggatgggaatttacgcattgcactcagtaatttccggtggaactcaccctttttttccccaccaaggtacaattaagattgatattgtagtagtgggttccaaattgcaatggtgttggatcgggctggtttggacccgaacttggttggagtattggtctggtttgagggattagattggttgactcacaaatcagtataaattagttgaattgagat

SEQ ID NO: 21506 - DNA, 530 bp, Gossypium hirsutum
  Clone ID: LIB3825-023-Q6-N6-B7
ggaacttgagttaaggggatgtgcttgatcgcctttaacttataaattccactttatttgtacataaaccacatttttaacaataagcttggattttgtacaccaccagaaaacaccatcaaatctcaaaactccttctaccaaattatccaaatcattctttacaattgagttacgctgaatgttcttattctttactaaattaatcgtctttgtcatcgtcctcatcataattgaatggtaatggtacagacttgaatgctcggtacttcccaacgttgttcaaatgctcattttccaacctgaagaaattccatatgccacgacgaatgatctcaagactagccacaatcgtcgtcagggtttgtggatgcaatggcaactggaaattcaacactgtttggagccaggcaaatctgagtaaaatattcaagcccatggctccaaaatatactttcttgtgaggaacaaggagtttgtctctcagccaacggttcttggagtgcctatttagaagcccccagtcataa

SEQ ID NO: 21507 - DNA, 304 bp, Gossypium hirsutum
  Clone ID: LIB3585-065-P1-K2-A9
gaaagatgcgatgcaaggactgaatggattgaatatatttcctgacaattgcagctgtatgtgggagaacagcttacagccttaacaagggaattgcgtggagaataatagcctggattgtctcagccattgcagcaatattttgtacatactgggacttggtttatgactgggggcttctaaataggcactccaagaaccgttggctgagagacaaactccttgttcctcacaagaaagtatattttggagccatggtgggttacaatctacaatattgaaaaataactagtttccaccatta

SEQ ID NO: 21508 - DNA, 641 bp, Gossypium hirsutum
  Clone ID: GOSHI-09MAY01-C71799_1
gaaaaaagaaacaaaagaccgtttcctttctaaacacaaattccggctttcttttggtttttttttttctctggtcaattttagttttttctttcgtttctttgacagcaatgattggaaattgctgttaggctgatgcaaatgcgtatgatttgttcagttaaaaggaatcatgtctttcgatgtcagtagaaaagaggcccagcagcctgcgccaccgagcactggtcacaatggcaacgccgtggcggtattgcctagcatgtcgacggttacggcgaaccggttacggctgaatcctaacacggagcacaagccggagaactacgagggtttgcagttggagttcagtccgcttctgttcagctccctggaacgttacttgcctcctcccatgctctcactccctcgcgattccaagctccattacatgcgcgatattatccttcgttactctcctgatggcgaacgtattcgcgttcaaaggcatcgagaatacaggcagaagattatatcccactatcagcctctgcatagagaattgtataccatgcatgcctcaaacttctttgccccttcatttctcaaagcaattaatgagaataaagaggaaggttttagaagtataatggctgaaccta

SEQ ID NO: 21509 - DNA, 652 bp, Gossypium hirsutum
  unsure (1)..(652): unsure at all n locations
  Clone ID: LIB3543-066-Q6-K6-F1
anaaacaaaanacctttcatttctaaacacaaattctggctttcttttggtttttttttttctctggtcaattttagtttttccttaagtttctttgacagcagtgattggaaattgctgttaggctgatgcaaatgcgtatgatttgttcagttaaaaggaatcatgtctttcgatgtcagtagaaaagaggcccagcagcctgcgccaccgaccactggtcacaatggcaatgtcgtggcggtattgcctagcatgtcgacggttacggcgaaccggttacggctgaatcctaacacggagcacaagccggagagctacgagggtttgcagttggagttcagtccgcttctgttcagctccctggaacgttacttgcctcctcccatgctctcactccctcgcgattccaagctccattacatgcgcgatattatccttcgttactctcctgatggcgaacgtattcgcgttcaaaggcatcgagaatacagacagaagattatatcgcactatcaggtgcatagtataattgttgtttgactaggattatttatactcaaggtggtctgtaatgattaatttctgcctgcaaaaactccaaactatactngattttgctatatatgatgattgaccctttatgtgccat

SEQ ID NO: 21510 - DNA, 725 bp, Gossypium hirsutum
  Clone ID: GOSHI-09MAY01-C71789_1
agaggatttagaactgcattaggtagatcatggggatgcagcttcagttggcatctgtgttcttcactttctcccttggaacaagagtccattactttgggcgcactattttgcatggtggggctaaatacagagcaacagggcgtggttttgtggtgcggcatgagaaattcgcagggggctaccgcttgtactcaaggagccactttgtaaaagggctggagctaatggtattgcttatatgttacaggctttatggttctgcagcaagtggtgccgcctcttacgcactcctctcattttcaatgtgggtcttagttttatcctggctgtttgctcctttccttctgaatccatcgggatttgaatggcaaaagatagtaaaagattgggaagactggtcaaagtggattagttgcagaggtggtattggagttccctccgttaagaagctgggaatcttggtgggaggaagaacaggagcacctgcgccatactggatttataggacgtttctttgagattatactttcaatacgcttttttatttaccagtatggaattgtgtatcatctaaacatgaccaccagtacaaacaaggtattcggcttagcattgtggttatggtctttcctggttggtcattggtgctgtgttgattattttgaagatatgtctatggggagaatgagtgcagtgccgatttccatttgatgttcagactt

SEQ ID NO: 21511 - DNA, 881 bp, Gossypium hirsutum
  Clone ID: GOSHI-09MAY01-C71759_1
caaaactatctgtatgttgttggacgttggatcagaatggatcaattcctgaagctgctaatgttgaaaatgagggcaagggtgaagttgatggtttgcctgcattccgtgaatactcaattgacacactcaagacagctacatctggattttctgtggagaatatagtttcagaacatggtgagaaggctcctaatgtagtttacaagggcaagttggaaaatcaaaggtggattgctgttaaacgatttaataggtctgcatggcctgatgctcggcaattcttggaagaggcaagagctgttggccagcttcggaaccacagattggcaaatttacttggttgttgctgtgaaggtgatgagaggttacttgtcgcagaatttatgactaatgatacactggcaaaacacttattccattgggaagcacaaccaatgaaatgggcaatgcgattaagggttgctttgcatcttgcagaagctctagagtactgcaccagcaaaggacgtgccctatatcatgacctaaatgcatatagaattgttttcgatgatgagggcaaccctagactttcatgctttggactaatgaagaacagtagagatggaaaaagttacagcacaaacttggcatttactcctccagagtatttgaggacaggaagagtaacaccagaaagtgtaatttatagtttggcacccttctacttgatcttctcagtggaaaacatattcctccaagtcacgctctggaccttatacgtgacaggaacattcagatgctgacagattcttgtttggaagggcaattttcaaatgatgatgggaccgagttagtacgtttagcatcacgatgtttacaatatgagccccgcgaac

SEQ ID NO: 21512 - DNA, 483 bp, Gossypium hirsutum
  Clone ID: GOSHI-09MAY01-C71649_1
cccacgcgtccgtatatagatagcgagcggtctatataatacaagcaaacttacgcacgcatgcaagctaatagatattttatagagagagctacctaaaatcaactgactggccgtcgacaaacaacggactgactgaacaaaccctggacccacctaactcaattggcttgacatacatctttctttagctagctggctaaataacaggcaggcaccgatcgatcgtcctaacaaacacgcacgcagaatggatagtgagtggcacgctcgatggacccattcatcacgcgcggtgtggggggtactcacacgcagaccgatccattcactagcgagctagctagcgctcgtttctttcgctttctttcctttcttgctacgcacgtcggctggctttgccaagctagatataaatggctggctttatggaggggatcgattgattgacggaacgtacatccaaaaaaaatagattaggga

SEQ ID NO: 21513 - DNA, 619 bp, Gossypium hirsutum
  Clone ID: GOSHI-09MAY01-C71089_1
ctctctcgtccgcccacgcgtccgagagattcagagagggattggaaagatgggtgattaccagtttcttatgctaaaggacgccattacttgcattaaccagaaagttaacctatttgccgtcattcttgacttcactctgccccagcgaaccaaaggcaccgattatttttgtaagctaaaagtaattgacgagtcacattccgagttctgggttcctgtgcatgtatttgctcaagaaatcgacggtcttcctcttgttgcatctgttggagatattattcaactttcacgtgtcacgatgacagttcatgaaggagatgtatatgctatattcaacaacaagttttcttcatttgctttatatgatgggaaagatggtgataatttccatccttataaagtttctttaagatttcatgagagagaacatgatgaaaagataatagcaagcatgagaaaatggttagcaagttcagaggtcattgacgtgccaaatttctcattgttgagggagatcgaccgaatgggttgtgtaaatttaacctggcagggtacttcatataagcaaaactactaatgacaagtggatggtctttctttgggatggaacggatgc

SEQ ID NO: 21514 - DNA, 507 bp, Gossypium hirsutum
  Clone ID: GOSHI-09MAY01-C71039_1
cccacgcgtccggaaaccctagccagtgccatttttacgttaaaaattctaaattccaatcaaaacaaatccctaatccccaaatttttgttctcaaatcgaattcgtttccgtttccttttattgtatggtatttttgtttactacaaacaatctaagagatttcaggatccctgccccagcagcagcaacgaaaccctagaaatctcccgtttcacctctcccttgtcaattgtgttggtttcgatgtgggataactgaatcgattgagagtgcgctgtgaggtgaaagaaaaaggaagaacaaaaaatgagtaggctatcgtttaggccacgcccattggacatacacaaaaagctaccgattgttaagtcagtcaaagactttgaagacgatgacactccaacttccgctactcgcaactctcaaatgctccgtcttgctgctgccgaagttgaacccgaggtgcaaccacttgctaccaagaaactggctcctgaaatacct

SEQ ID NO: 21515 - DNA, 1652 bp, Gossypium hirsutum
  Clone ID: GOSHI-09MAY01-C71389_1
cccacgcgtccgcggacgcgtgggaaaaaaaaggaaacagagaaggtgaaaactgcaaaaaggcaaagaggaaagcaaagaaaaggtaagccgaagagaagagaagagaagcgaaaggaagaggagagaattatagaaaatcgtttcttcgcttcttcagccttctctttcttttttgcttcttttctccaattcctttctctatctctttctcctttgcttcttattagcaaagaagagaacggtagagtaaaaagaaaaaaaaaaaagaaaagaaaaagaaaacccacattttttgttttgcaaatctcttatttcacccaagctttttcgagggtagagaagatgatggttgtaagtagttttgatttatggcaaaaacacgccttcttttcggcagcagaagaggttcaagaatccgctgatgtaatggaatcagtatacaggatgtggatcaaagagatgagagaagggcaaaagtcttcagatacggctgaactttgtcgaggattgcaaactgctttaggtactgctaaatggcagttggaagagtttgagagagctataagattgagctgtggacatggttgtgacgataatagagcatctaggcacaaacaatttattgctgccattgagagtcagatatgccgtgtagaagctgcattaaaagaagctattattgaggagggaaagcagccccttcggtgggtagatttggataaacaagaatgtgatgatttagccatgttcctttctggaacctctccgagcttgcaacaatctatggaaaacactcttttggtgaattctcataggagaaaggacacaaatcctaatgtcaatgctacttgcaacaggaatatgcctgaagtgaaaagtttaaatgattttggtaaagatgttgagtgtctcattgatgtagaagatgagcgaagttctggaaagacagatgatgttagttcgggacaagatagaacaaccagtacaagaagaacatggagcacaccaaattttggttcattgaaaattgtaattgctgatgagtacgcagatagaaaccaaatgaggtctggcatggaggctacacctaaggaaaaaggatccaagcctttcttcagtaagcaaaggtgtggagaactaacacaggcaaagtgtgtgtttaatttattcaatcggtgttttggctgggttggtgggttacagagacaattacgaagtccagtgcacttgcagtttagttattcattgcaactcaaactcgttttaacggtagccatctttctaatcgtaccctttgtactgtattcaagttgagagcaattggctgctatgccctgtagatcatacaacaggtgttggatgatctatgtcctcagggctcgggaatccattgttgacaacagttgtgatggtggcttccttccccgttgttttcgagatgatgtggagctggcttatacaaggagttggatgtcattctatatttgcttgctatatactctgtaaatgcattggtagtcaggtgtgtgtgtacatatatatatatgcattcttgccagagtattatgtaacatggacactcacgttgcaatgtgagcttaagcttcatagttcttgataaatattccattaagaagggggcttgcatt

SEQ ID NO: 21516 - DNA, 595 bp, Gossypium hirsutum
  Clone ID: LIB3828-003-Q1-K6-D8
ctccacctctctttcattcaccaccgtccctatttccataaacccatcttctctctttccttcaggcttcgtcttcgttcaaattatcctccatcagggcttcctcttcctccactcccttctttgaacccccaaagccttcgccttcgctcctccaaacgctgacgcccctcctcaaaaccacctgcattaccgtcaccgctgctgccgcgcttttcttcgcccgcttctaccagaaacccgctctcgccgccctgacgacacccatcgtggagaccgccacgagggaatcgatggtctccttagaagagcaagagaaaaccctggtacaaaaattagggaagactccgaatgacgttgaaacgctgcggtctctgatggaggtccggatcaaattaaagaaactgcaacaagctatcgatgttatcgagcgtttgattcgtctcgaaccccaagacccggaatggcccatgttaagagcccaaattcatagctacgctggcaatttcgagctagccaaggaggagttcgaagaaatattggctaaagacccagatcgggtggaagcttttcacggccttgtaatggcttattc

SEQ ID NO: 21517 - DNA, 437 bp, Gossypium hirsutum
  unsure (1)..(437): unsure at all n locations
  Clone ID: LIB3493-043-P1-M1-C2
acctttacacctatatttcatgaaccaccgtcactatttccataaacacatactgggggtggtatacaaggcttcgtgttggcctaaattattctacatcaagtattaccattgctgcatccttatttgaactcctcaaagccttcacacttcggtcattaaaaccacctgcattaccgtcaccgctgctgccgcgcttttcttcgcccgcttctaccagaaacccgctatcgccgccgngacgacacccatcgtggagaccgccacgaggggatcgatggtctccttagaagagcaagagaaaaccctggtacaaaaattagggaagactccgaatgacgttgaaacgctgcggtctctgatggaagtccggatcaaattaaagaaactgcagcaagctatcgatgttatcgagcgtttgattcgtctcgaacccc

SEQ ID NO: 21518 - DNA, 621 bp, Gossypium hirsutum
  Clone ID: GOSHI-09MAY01-C72899_1
cccagcgtccggcgctcgatgggttgattgggtgtcttcctgggaggcaacaagaactcatcgtcagcgttgcaaaagctgcaaagagaccggttgttttagtgcttctttccggaggtccgattgatatatctttcgctaaggatgatccgagaatcggtggcattttttgggcgggggggccaggagaaggcggaggtaatgcactcgcggaagtaatcttcggtgatcacaatccaggagggagattacccgtaacttggtatccacaagatttcaccaaagtaccaatgacagacatgaggatgagacctgaatcatcattggactatcctggacgcacatacagattctataaaggagacacggtttttgaattcggttatggccttagttactcaaagtattcgtattcgttcacccgtgtgtcccaaaacaatctttatttgaaccattcttcaagtttacatacaaaggagacctccgattctgtacgatacatgctagtttcggaagtaggtgctgaaatctgtgatgaaaggaagatcacggtccacgtcggagtgaaaaaaacggggagctggcaggtaagcatccggtattgttgtatgtgaggcatgg

SEQ ID NO: 21519 - DNA, 727 bp, Gossypium hirsutum
  Clone ID: GOSHI-09MAY01-C72599_1
tccgggtatatgcccttgcggtgacggcgctaatatgcgctaggcttgttgttacttgcttcaatatggggcttgattcttcagatcacaaaatcaactcgatcttctgcatgggcggtgctcatatttcgatgaatcaaaggaagccgggctatgctgtatccaagattgacacaggtcccttgccgccaacttatggtactgaattacctcgtaccgcatacttgggatctggatcgaaaggcgatctggaaaagctttggagaactcttcatgctctgtatcatcctcgaaagcaatatgttgtacatttggaccttgaggcaccctgccgtggaaagagtgacacttgcttccagaatagccaaccatactgttttttcgaaagttgggaatgtttatatgatcaccaaggctaatatggttacttatcgagggccgaccatggtcgccaatactctccatgcttgtgccattcatctcaatagaagtaaaaattgggattggtttatcaatctcagtgcttcagattatcctctagtgacccaagatgatcttattgatgcattttcggatttaaaccagaaccttaattttattggcacacaagtcagcttggtggaaggcgataaaggctatgccttgatatagatcctgacttacatgtaacaagtcgattatttggccctacaagaagcatacctactgattaatgttactgtcacat

SEQ ID NO: 21520 - DNA, 723 bp, Gossypium hirsutum
  Clone ID: GOSHI-09MAY01-C72489_1
cggactcttgggcgggctgatgcctagacttgcaggcaacatcggcacacctttgcggccaggatatttagaagtgtacttatttggccttctagatgaagatgtaaagagtgttgctcctggaaactttgagcggcattggggaatctataggtatgacgggcagcctaaattcccacttgatctttcaggccagaatcagaaccggttcctcatccctgctcagaatgtcgaatatcttcctcagaaatggtgtatactcagtccaaatactaatgacctaagcaaacttgcggacaacataaactatgcctgcaccttctccgattgcacagcacttggctacggatcttcatgtaacatcctggatgcgaatgggaacgcatcctacgcatttaacatgtactaccaggtgcaaaaccagaatgacatggcctgtaattttcaaggtcttgccaaggttacaacacagaatccttcacaagggacttgcaattttatcattcaaattgcatcttcttcttttgctattggtccctcactgataggaatgacattttttgctgtaatagcatctgtattactataaacttgattctgtagataacggggatggtactctctctctctctctctcttttttttcaattcatttttgctagtcacttttgtatgtcatagattcttgggttatttttggatccgattgacttcaaataatta

SEQ ID NO: 21521 - DNA, 875 bp, Gossypium hirsutum
  Clone ID: GOSHI-09MAY01-C72449_1
ctcaaaacagcagagctacgacggtacccgagaagcaaacgcttctctatcaccacaaggaaaaacacttcaccgccggagagatcgttcgcgacatcatcatcggcgtctccgatggtttaactgtgccctttgctcttgccgccggattgtctggcgccaatgcctcgtcttccattgttattaccgctggtatcgctgaggttgccgctggagccatctctatgggactcggcgggtatctttgcggctaaaagtgatgccgttctttacgcgagggaattgaaaagagaggaagaagaaattatcagtgtgcctgatgttgaggctgctgaggtggctgaaatactagcagagtatggggtagagccacatgaatatgcacctgtggggaatgccctaagaaaaaggcctcaagcttggcttgatttcatgatgaaggttgacctggggctagagaagccagatccacgaagagcattacaaagcgcattcaacattgccgtttcttacatattgggtggattggtgccactccttccttacatgttcattccaagagcccaggatgcggtggctgcatcagtggtcatcaccattgctgcactcctcatcttcggctacgccaaaggttacttcaccggcaacaaaccggtaaaaagcgcattccaaactgctctcattggtgccattgcatctgctgctgcttttggcatagctaaggttatccatcctaggaagttttatgctttgtttttaagaactgaaaatatgggtttcctttaatattttcatgttggtatttagattaaaatctcaaatcttcatgtaattctctccttttacctgtacgaatgagtaaatcaccatttcaa

SEQ ID NO: 21522 - DNA, 651 bp, Gossypium hirsutum
  Clone ID: GOSHI-09MAY01-C72059_1
caggattcgagcttcattaatggagtttttttttgtggacgggggcgaccacgaggaagaagaagcagctcaaggttttagcaatgtcgagtgataattcaacgttgaagatgaacttgaatgagtatatggttactttacagaaacctctgggtattcgtttcggtttatcgctcgatggaagaatcttgggtcatgctctcaaacgcggaagtaatgcggagaaatcgagaataataatggtaggagatacgttgaagaagacgagcgattcgtctggtggaagctttaccgagatcaagaacttcggcgatgctcaggagatgctgacggaggaaacaggatcttttagccttgtccttgagagacccttctcgccttttccgattcatgaattgcatcaattgagtgatcttgacattttgtttaatagaggtcgtatgccagttgccacttggaacaaagctttattggcatctactttacaaacaactgagggtgggggaaattctggttttgtagtattttcctcaaagtttctagcatcaccaggtttaaagttcttgaatgatcaaaatggacatgttgattccggattgcacaagaacattctttcttcaccagttagccaacttgtttgtattttttctg

SEQ ID NO: 21523 - DNA, 590 bp, Gossypium hirsutum
  Clone ID: LIB3543-036-Q1-K1-C2
gcgttcgcagggttcgcgcttcattaatggtagtttggtattcaaaacgaggatgactaggcaataagaagatcagctcaggttttagcaatgtcgagtgataattcaacgttgaagatgaactctgatgagtatatgcgttacctttacaggaaacctctgggtattcgtttcggtttatcgctcgatggaggaatctttgttcatgctctcaaacgcggaagtaatgcggagaaatcgagaataataatggtaggagatacgttgacgaagacgagcgattcctctggtggaagctttactgagatcaagaatttcggcgatgctcaggagatgctgtcggaggaaacaggatcttttagccttgtccttgagagacccttctcgccttttccgattcatgaattgcatcaattgagtgatcttgacattttgtttaatagaggtcgtatgccagttgccacttggaacaaagctttattggcatctaatttacaaactactgagggtgggggaaattctggttttgtagtattttcctcaaagtttctagcatcaccaggtttaacgttcttgaatgatcaaaatgg

SEQ ID NO: 21524 - DNA, 875 bp, Gossypium hirsutum
  Clone ID: GOSHI-09MAY01-C72069_1
ggaaggaacattgttagctgtttcaactgatgataatggggttaaaattctagcaaactcagatggggttaggttcctaaggacggtggagaatcgttcatttgatgcttctagagttgctcctgctgctatagtaaaggctcctagtgttggtccatttggctctaacaatgcaactattggaacaaccattggtgatcgggctgcaccagtagctgctatagttggaacgaacaatgatgctcgaactttggctgatataaagcccaggattacagaagagtcagcggaaaaatctaggatctggaaacttacagaaattaatgaaccatcacagtgccgctccttgaggcttcctgatagtttgacagcaatgagggtttcaagactaatatatacaaattctggagttgccatattggcattagcgtctaatgctgtacacaagctctggaaatggcagaggaatgatcgcaacgtaactgggaaggccacaactagtgtagcaccacaattatggcagccttcaagtggaatattgatgaccaatgatataagtgatacaaatcctgaagatgctgttccatgctttgcactttcaaagaatgattcttacgtcatgtcggcttcagggggtaaaatttcactattcaatatgatgacatttaagacaatgacaacgttcatgcccccaccaccagcagctacatttcttgcatttcatcctcaggacaataatatcatcgccataggcatggatgattcatcgatccaaatttacaatgttcgggtggatgaggtgaaaacaaagttaaaaggtcatcagaaaagataacaggtcttgccttctctcatactctgaacgtgcttgtatc

SEQ ID NO: 21525 - DNA, 761 bp, Gossypium hirsutum
  Clone ID: GOSHI-09MAY01-C72329_1
agaaaatgaaagaaagtggagggaaatttagacaaaaaaccaaactgaacccagaaaaaacagcagacaaaacagtgtgtgtgtgtgtgtgtgtgtgtttttctggttcagtgtaagaaagaaagacaagagacatagagagaatttctgggtttttttgtctccttttttttttgttcttcgttttccatctagaaaaagagatatatttagccatttgatcggattacagttagggtttacttgggggttgctgtttgtaccgtgaatggagccggtcccaaaatccgatccgcaaccggaatggaatactcagggacccgaaacgggactcgaaaaaccggtttgtcgattgggattagaaggtgggtcggaatcatacccggaacgacccgatgaagctgattgtatttactatttgaggactgggttttgtggctatggttctaagtgccgattcaatcatcctcgtgaccgtgctggggttatgggagctggaaaaggtggtgttggagagtatccggagagagcgggccaccggtttgtcagtattatatgaggacgggagcatgcaaatttggtgcttcttgttattaccatcctccccaaccaaggaggtgttcctgttacctctgtgccactaaataattacggatatccattacgtccgggtgaaaaggactgttctattatgtgaagacggacagtgtaaattggtacaacatgtaattccatcatcctgcaccaccggctatgcaatt

SEQ ID NO: 21526 - DNA, 807 bp, Gossypium hirsutum
  Clone ID: GOSHI-09MAY01-C72249_1
tttcttcgtaagcagggaaatggtgctgtggcatctggttcacatacagatcgtgatggaaatataaactcaaaagttgtagtatcagagacgaataaacctagtgaagctgctacaatgccaaaggagactttgagcataaaccaattggcagctaaggctttgcagcttcggttgaaaggaaagcatgatgaggctgagaaacttctgctggaagttgagagcatgaaggctaagcagaacactggagatcatgccagtaagcagcagaatgttgacaacaacagcagacatgttgttcatgatgtattgcttcggaaagggaaggatgatgatgataccgataagcatctagctcgaagaataatgcagaataaacaatttagtgtatctggtcaggctgatgatgaatatgactatgaagatggtccaagcagaaaaccatggaagaagggtggggaaagcaattgggtctctggaaataatcatttggctaagcgtatattgactcagcaagagcgctgtcttttctgctttgaaaaccctaacagaccaaaacatcttgttgttgctatagcaaatttcacatacttgatgctaccacaatggcagcctgttgtgccaggtcactgctgtatcttaccaatgcagcatgagccagccacaagaacaattgaaaataatgtgtgggatgaaatccgcaactttaagaaatgcttaattatgatgtttgccaagcaagataaggagatggtgttcttggaaactgtgatgggattggcacaacagcgtcgccattgtctgatt

SEQ ID NO: 21527 - DNA, 787 bp, Gossypium hirsutum
  Clone ID: GOSHI-09MAY01-C73859_1
aaaggaaccctaaagctaaggggaaagtcgggggaaaaaacctcttgaaattcctccaatggagaacttttcctactcttcgtatccggaatccggtgaatcttcgcctatttctcgagaaatcgactccgaaaaccagtcatgggacgacccgccatcaaccaatgctggggggggggggggtggtgactatagggtcaagtttttgtgcagttatgggggcaaaatccagccgcgatcacatgataatcagcttgcttatgtcggtggagatacgaagatcttggctgttgatcgtaacatcaagttctccgctatgatagctaagttatcttcattgtgcggtggagattctgaggtttgtttcaagtatcaacttcctggtgaagatcttgacgcgttgattactgttacgaatgatgaagatcttgatcacatgatgttggaatacgatcgggtgcatcgtggctctgccaaaccggccaggctgaggctgtttttcttcccgttgagtccaccgcttgtggcgtctgggcttggtgggagtgaacccaagtctgagcggcagtgggtcgttgacgcattgaattctttgcaggttcagaatattgatggcgtttcgcctccagcttctgcggtgccggttgccaatcctgatttcctctttggttaggataaggcgaatttgccgggttcggtccctgctccggggactgcggttgttcaagagattgttgcgaatgatgtgactgcgggatcggaatgcggaccagaagaccggtatgtg

SEQ ID NO: 21528 - DNA, 586 bp, Gossypium hirsutum
  Clone ID: GOSHI-09MAY01-C73509_1
cccttattgaaatctcaactcctcttgcaagcaggcgctctcctgttgtacaggggtgctgcgttggagatctgatccaaaattcatgcactgatagagagtgatttttccattttttttacgagatgggtattctgtttacaaaattgttctcttctctattgggaaacaaggaggctcggatccttgttctcggtcttgacaatgctggcaaaaccactattctttatcggcttcagatgggtgaagttgtctccacaattccaacaattggatttaatgtcgaaacagtacagtacaataacatcaaatttcaagtttgggatttaggcggacagacaagtatcagaccatattggagatgctactttccaaatactcaggccataatctatgttgttgattcaagtgacacagataggctggtgatagctaaagaagaatttcatgcaatcttggaggaggaggagctaagaggagcagtagttcttatttttgcaaataagcaggtttgtaccttttttatttattcatttcttcttcttggacctggggtagaactagttcttttgcttatattgtgtga

SEQ ID NO: 21529 - DNA, 447 bp, Gossypium hirsutum
  Clone ID: GOSHI-09MAY01-C73499_1
gtggtgacagtgggcggttggatgagaaatttggttaaaacggtgtgcgggattgaacttcctatccgaccattggaaaccaatgtatgttattggcggattaaggacggacacgaggtcgagtatacaattggaaatgattttccgacgttcgctagctacggacatccatacatttatggaacaccgtcactggagtacccgggattgattaaagtagcagtacatggaggctatcaatgtaacccagacaaaaggccatggggaccaggacttgtgcccgactcattaaagcaatgggttgagcaaagattcaaagggaaagtcgattcgagcaaaccagtcatgactcaattgtctgtgtactcgatgacacctgatgaggatttcgtgatcgattttttgggaggggagttcgggaaggatgtggtgatcggaggtggattt

SEQ ID NO: 21530 - DNA, 580 bp, Gossypium hirsutum
  Clone ID: GOSHI-09MAY01-C73799_1
cccacgcgtccggatttctactgaatccactccattgcttatccccaaccttaccgcttgagaacatacacaagcctccgcagcgaacagagaagcaaccttcttcttcaatgacgattttgagatcaggacctttccactatcatctttggcaattagtcccgaggccgatctaaattgtagaaggttataggccgcgtctaagtttattcaaatggtttggttttctggaggcctccattcggaaacaatacaccgtttgataacccaaagcgcgtagcaaaagatacaacattggtgactcgatcctcttctaaacacccagtgttttcaggtcgactcggggtttgagatcgtcggaggcagcatcacactatcaagccaatacctttggaatattgttacatatgttagaattatcaagtcagtggcatgtatagggacctagttttatgacatttgttattatgatttggccaaatgtattgccctattttgagctattgtatacggtcatgagatgtggctcatattgattatggcttgtaagtctacctagtcatgttatgatttattactt

SEQ ID NO: 21531 - DNA, 649 bp, Gossypium hirsutum
  Clone ID: GOSHI-09MAY01-C73619_1
ttttaagatgtgttatcttggcttctactatgatcatcgcttgctaagataggctttgttagagttgaatctgttaagtgaggcaagttttgtagaaattctcggtgccaaatgagtcgagaacagaaggggaaacaggaaaaaggtggctcgaatgtagctgagaaagttgtggttgctgttaaggcatccaaagaagttcccaagactgctcttgtctgggctttgactcatgttgttcaacctggagattgcattacgttgcttgttgttgttccttcacctagctcaggtagaagatggggtttcccaagatttgccggggactgcgccagtcggaagtctcaattaggatcaagttcagagcagaaatctgatatcactgattcctgctcccaaatgatcctccaacttcatgatgtttatgatccaaacaagattaatgtcaagataaaaattgtttctggatcgccatgtggagcggtagctgctgaggccaagcgagccctagctagttgggttgtattggacaaattaaacatgaggaaaaacggtgcatagaggagttgcaatgcaacattgtggttatgaagaattcacaagctaaagttctccgcttaaatttggttgggtcacctgagaaggaagc

SEQ ID NO: 21532 - DNA, 602 bp, Gossypium hirsutum
  Clone ID: LIB3829-017-Q6-K6-B2
ttttaatccatgttttcttctcttttttttggtttctgcaatggtagttggtactaaagtttttaagagttgaatctgttgaagtgaggaagttctgtcgaattctttgtagcaaatgactgaagaacagaagggaaagcaggagaaaaccagcttgggtatgacagagaaagttgtagttgctgttaaggcatccaaagaaattcctaagactgctctggtgtgggcattgactcatgttgttcaacctggagactgcattacgttgcttgttgttccttcacatggttcaggtagaaaatggggttttccaagattttctggtgactgctcaagcagtagccgcaaatctcaatcaggatcaagttcagagcagaaatctggtatcagtgactcctgctcgcaaatgatcctccagctccatgatgtttatgaccctaacaagattaatgtcaagataaaaattgtttctggatcaccatgtggagcagtagctgtagaggccaagagagcccaagctggttgggttgtactggacaagcagctcaaacacgaggaaaaacggtgcatggaggagttgcaatgcaacatagtgattatga

SEQ ID NO: 21533 - DNA, 498 bp, Gossypium hirsutum
  Clone ID: GOSHI-09MAY01-C73609_1
ctaaaatcaaactaagagaaaaggaaacccagaaattccctttttttcaattttttgggctcaaaacgcaagtggagaggacgagaaaaaaggaagaaagaaagaaaaaaacaatgggttttgcttcatttgttggacgagtttgctttgcttccattttcattctatcagcttggcaaatgttcaatgagttcggggtcgatggcgggcccgcaggaaaggagttggcaccaaagcttaatcttgctaagaaacatttatcttcacaattccatgtaaattttccggatatcgaagttagacaaatagttttaactgctattgctatgaaaggacttggtgctattctctttgtattcggccatggttttggagctttcctcctgatcgtgtatttgctggttagcactcctattctccatgacttctacaactacggccccgacgagcccagatacaatattctgctccgtgatttcttgcaatgtgttgcacaat

SEQ ID NO: 21534 - DNA, 597 bp, Gossypium hirsutum
  Clone ID: GOSHI-09MAY01-C73049_1
ttcagttgttaatctagaaccttcgatcacttgccagaaaatctcaacctcaggagcaaaaaaccctctataataaagcaaaaccctaaaccctagacgcctcttcttcatcttatattaaccaacggagcaccctcatttctatctctgtcggcccttctcgttctattgcaatttatagctatggctgcggcagctctgcttcgttcattccgacgacgggacgtcgctgcttctcctctctctgcctatagatgccttactaacaatggcaagacctcagcgggaattaattggacaagtttttgtagagcattcagttcaaaaccttgccggcaatgatgtcattggtattgatttgggtacgaccaactcctgtgttgctgtcatggagggaaagaatcccaaagttattgagaactctgaaggtgcacggacaacaccttctgttgttgctttgaaccaaaagggagagctacttgtgggcacccccgcaaaacgtcaggctgtgaccaatccaaccaacacagtttttggaaccaagcgtctaaatcgtagaagatatgaagatcctcagacgaaaaaagaaatgggaat

SEQ ID NO: 21535 - DNA, 788 bp, Gossypium hirsutum
  Clone ID: GOSHI-09MAY01-C68839_1
ggaataacaaatccaaccctaaaattctcgctcgtcttttttccctgttttccatttctcactcttttttgctctcgcgtttgtttcccgagaaaaaaaagtgaaaataaatataaaccaagaaagagaaagaggaaaaagaggagaaggattgggatctcaacaactgtcactctaacctcaaaactgttgtcctccatttttctttttaatttcccgggaatcaaagggacagttattctttcggtccgttttaatttgattatcgtttcaagcagcgttaattttgatgggaaattggtgatcaatataaaagctgaatttctgttgaaataatagaggagatgaccaaagaacacccgcctgagccactcgatttcttcatttggactgttgaggatgttggaatgtggttggaagagattaaatcttggtagctaccgtcagattttcaaagaaaattgtgtcaatggagaatacttggaaggcatgtctatgttcaccactgaacagaatcctcgaattaataaggcgggttcttataaattggggagactttatcacgctatgtagggaactcaaacaaataaaagtggcttgcctgaaaagagagcaaaaagttcgcaggccatggtgggctccttctgcctttcaatattctttgttaaggtacaaaacgcaacaaacaatcacgtgttgtttcccttgaactggaacatgatgccaaaaattctttttaactacgtatatggtgtgttccttctcgtgagggagcaaaaaatgggggc

SEQ ID NO: 21536 - DNA, 657 bp, Gossypium hirsutum
  Clone ID: GOSHI-09MAY01-C68529_1
cccacgcgtccttaaaatccccaaaaaccaaagatctctaagccagggacttccacaacttgagctaagatgccgaacctcgaatgtcgtatgtacgaagccaagtatccggaggtggatatggcggtgatgatacaagtaaagaacatcgccgacatgggtgcgtacgtttcgctccttgaatacaacaacatcgaaggcatgatcttgttctcggagctctcccgccgtcggattcgtagcgtcagcagtctaatcaaggtcggacgaaccgagcccgtcatggtcctacgtgtcgacaaggaaaagggttacatcgatttgagtaagaggagagttagcgaggaagatattcaagcttgtgaagaaaggtataataagaggtaacttgttcactctatcatgcgacatgttgcccagactttggatatcgatttggaggaattgtacattaaaattggttggcctctataccggaaatatggtcatgcttttgaggctttcaaaatcattgtgaccgatcctgattctgtcttgaacaccctcacctgtgaagtaaaaaacccggccctgatgggccaaaggtgactgaagtggttcctgtgtgacggatgagtcaaagatgccttggtgaaaaacattaggagaagaatgccc

SEQ ID NO: 21537 - DNA, 434 bp, Gossypium hirsutum
  Clone ID: LIB3189-051-P1-K1-H2
gcttctgaaaaccctaatccccccgaaaataaaatccctcaaagagtcgaatccaaagaacaaagaaaaggaattcacagtttgaataagatgccgaaccttgaatgtcgtatgtacgaagcgaagtaccctgaggtggacatggcggtgatgatacaagtgaagaacatcgccgacatgggtgcctacgtttcgctccttgaatacaacaacatcgaaggcatgatcttgttctcggagctttcccgccgccgtattcgtagcgtcagcagtctgatcaaggtgggccgaaccgagcctgtgatggtccttcgtgtcgataaggaaaagggttacattgatttgagtaagaggagaagtagcgaggaagatattcaggcttgtgaagaaaggtataataagagtaagcttgttcactccattatgcgacacgt

SEQ ID NO: 21538 - DNA, 476 bp, Gossypium hirsutum
  Clone ID: GOSHI-09MAY01-C68499_1
atcttcttctaaaatggcttcaagcagtaacccagaaattgcccgtgtattcttcccttcatatcccatgttccaactttacaaagacggacgcgccgagagactccggcaaacggtaacggtcccaccgtccgacgaccccaaaaccggcgttcggtctaaagacgcaccggtgcctcccctgtcgtcagctcgtattttcctccccaaaacctcagaccccaccgccaaactcccgctcctcatctacatccacggcggcgcgttttgcatcgagtcccctttctcccccacttaccacaactacctcacttccctcgtcgccaaagccaacgtaatagccgtttccgtacagtacaggaaagctccggagcacaacctccccgccgcgtacgacgacgcctgggatgcaatcaactggatcgcttcccacattgaaaggaacggtcccgagccatggctcaacgaaaacgccg

SEQ ID NO: 21539 - DNA, 530 bp, Gossypium hirsutum
  Clone ID: GOSHI-09MAY01-C68769_1
gggaaactgggcagaacttcccattttttccatagataatgctttcttctagattcgtaaacagcattgccaagagaagcttcatttcttctggatacaggtaccccgaacgtcacttgattttatcacagcaccgtccgatcttcaccacgtcacctgtccactcctcatggatggactcgatcaaagaggtcttcaccggcaagaagacctctccagatgatcatgtaaccagtgccgaatccttcactctcctccgatttgccgatgaactggagaatgctagaaatgtagggaaatttaagcaatacatagttgggagaacccgcgaggcttcgtttgggggtggttttgggaaaaaattagccatcgttaggtatcttggaggttgtgagccgaccggcgagaatctccaactgagtcaaaagaaagaagctgcaaaacaatgtgattgtactttattagatgttgagaatgctcttgcgaagttcacatgggctaaagaagttcataagaaagatggtcagctg

SEQ ID NO: 21540 - DNA, 829 bp, Gossypium hirsutum
  Clone ID: GOSHI-09MAY01-C69849_1
cctagtgattaattatactaaaactaatgcaaactatgaatggtgtagtaagctctgaagacgctccttggaacagggacttgaaccttccctttcttgcagttcctccgtccaacacaaagccaaactcagagcagatgagggcactgagattagcattttcgatgcccagagatacttcaacgaaaccaacagcgatatcagagtgtgcaagagggtttccccgcttaacatgcccaacctggaattagatcctatttcatcagcgccccagcgtgatgtttcctccacctcttgtgccgacggctatggctatggctatggctatggcatgacctaccgagttcgttctttccatgcaactccaacggcttcatcagaggctagctggaatagccagactggtcttttgtcgaatcctcctggcgccattgcggtgtctatgaccatgaaaaatcctaccactgatcacaagagaaaagggtgtggtaaattgaaatggctttggggccgaagctgtccctgctccggcaacaaatccgttcaagttgagcccaaaacacccttgggcatgaatcagaaaagttcaagcgttgccgacggagataataaacgggaagagagattattagcctctaatcctcacaggatgtcagcagagaatcaatttgattccagcttagggcgacagcgtgtggtagcttcggtttcagcatcagcaagaccaaggcccctgatgataagtgatggctactccgggacagctgtagctggtttcacctttccaatacttaatcaacaaccaacatcttcccgtcttaaaatggca

SEQ ID NO: 21541 - DNA, 587 bp, Gossypium hirsutum
  Clone ID: GOSHI-09MAY01-C69739_1
cccacgcgtccgcagacccttaaactctctctccttcctccattttctcatttcggctagggtttcaacacccatcattgccgccattgttgtggctctttgaggccaccgtggttcccaccgtatacgggggttaagggcatgcgaaaaggggcttttcacctccggagtttattaggatagacccccttttatttcccctttggaatcggtttcaacaacggagcagaggctctggcgacgcgaatccaggcttaggtaggtcccctttcctctccctctttatattttttgttataaaataaaactttaaaaaaaaagaaaaagaaaaaggaaatataaaagtaaggaaaacagaaagatatatgaaaaaacgagattgaacctttgttttctttgcttttgattgcttaaaattgtgtgttacagtatttttttgcgtttgtggctatatagccaaaataccaatgctttttgtctattccttccactatttggtacgtttctgcttttttgctttctttttgtttccgtttttgcaggtttagagggtcaacgaggcaaaaactttgccgtttggtgcaaac

SEQ ID NO: 21542 - DNA, 572 bp, Gossypium hirsutum
  Clone ID: GOSHI-09MAY01-C69689_1
ttttatccctaacgtctctcactctccatctttgctttggggccccgtctatggagatttcttcaatttccactactacaatacactacttctgtccctcaacagagtctttgctgttcaagagagttaagcttccttcacgggatcaacatctggtgtctatttctttgaattcaagaactgaacagcgtttattagctcggccatgttctcttgctcacaaggggaactcggtgaaggttaaatgtagtcaaaagagagaaattccggttttagaggccagttctatggatgaggtttttgatattttggctgaacgtattcttcctacatcatcagtagcatcaaatcctaatacaaagcatattgtcggtttagctgggcctcctggttctgggaaaagcactctagcttctgaagttacacagcgcataaacaagttttggttgcaaagtgcttgttcttctgatcctcaagttaagcctcctgatgtggctatagttgttccgatggatggattccatctatatcgttcccaactagatgcaatggagaatccagaagaagcacat

SEQ ID NO: 21543 - DNA, 750 bp, Gossypium hirsutum
  Clone ID: GOSHI-09MAY01-C69679_1
gatgatgtctccaaagagttgtttacccttggagagttgctttccatgccagaactcagcacagtgaaacccaaagctatgtcatccaattgcaaaagtgatggaatcaaacaacagtgttttcagaactcgaaggagaaggaagtcatggtgatgcctcctttggtttctgcagataaagaatcagacaatagctgcaaggagacaattctatctgcttctgcaccggtctctgtagctgaagaaatggacagtaggaaagaggaagctaccatgttcagccctgttaccagcagcagccttgtcaatgaggtatctgatgatagcaaactggcagctcgaagtatcgcatttggctttgattcttctgcattgacgagcagcaaagatgagggttgccacaatcttgatcgtgaagctcttgagactggccatacacccaagcttgaagacatagctgatcagccttcttcaaacaatcttcaatgtggaaacggagagtctagtttctctgctgctggccttgtaacaggtctaataagttactctgggccaatagcatattcaggcagtctctctcatagatcagatagcagcacaacgagcacgcgttccttcgcctttccaatattgcagtctgaatggaatagcagtccagtaagaatggcaaaagcggatcggagacattaccggaaccataggggttggaggcaggactcctttgctgtaaattctgaaatccataggttc

SEQ ID NO: 21544 - DNA, 529 bp, Gossypium hirsutum
  Clone ID: GOSHI-09MAY01-C69199_1
cggacgcgtgggcaaaaaagcaacaaatattttccctttgattccctgcctagaaggtaacgctcacacagtttcaggaaatggatcttgacgacgacggaggcacctctgatcttagcaccagtgctggagaacctaacgctgccaccgagaaaatttgtgaaagctcagcgtttcagattatgccatttaaagaagagccaatagactcccaccctccgccgcctatcggggtggtccctgtttccatgcggcctctacccactgttaaacgctcctccaccaaggaccgtcataccaaagtcgagggccgcggtcgaagaattcgtatacccgccacttccgccgccaggatcttccagctgactcgtgaactcggccataaatctgatggagaaaccattagatggctccttgaacatgctgaacaagctatcagaaactaccggtaccggcaccgtttctgccatcgctgtcttagtcggtggtaccctttaagatttcccacaacgtttggttaaaacgcttt

SEQ ID NO: 21545 - DNA, 719 bp, Gossypium hirsutum
  Clone ID: GOSHI-09MAY01-C69139_1
gtttcatccattagattctcatcattctaacatcggttctcaggtgaagttcatggctccagaaggcatgatccatcatgatgcaccaccaaatcatcatttacctgcaaatatgcttcatcctctccatcatcctagcagtggactaactggatttgatcctccgattcatcatcctatgttacaacaaatgcatatacccagaaactttcctcctccaatcatgcaatgtggaattcccggtgttccactgctggcacctcattcaactaatcagatggctggtttgctacctgaattgaatccaatgcatggttttccattggggcatggtcaccggcagccccaacccaactttgctggtcttggaatgcctccaggtaatgatgtcggcagtgggagccatcatccggaggcattgcagaggcttattgagatggaactcaggtcaaagtcgaagcagatgggcccttttggtgcacctggccatagtcaaggccaaggtatgtatggtcttgagccagacatgggttttcagtatagataatggcattggatgagttttgccctatccccaatggattgttttctcctagaattgaggataggtttgatgttcttaattcaggagggatttctctggcttactgtaattaaaatggtcattatcatatttgaaattggcatttggttgcaattgcctctttgttcttttggtc

SEQ ID NO: 21546 - DNA, 759 bp, Gossypium hirsutum
  Clone ID: GOSHI-09MAY01-C64809_1
gacgacgtgctcttgcctaaaactggatctccacccaaattgggaatcctgaacgccaaaaacttattgatgagatacatgaatatatgttaagcaagacaccccctgtccctcaactcagcccttcacaggccttggaagagcaccctactaacagtgacggagaagctcaggctaatcagaaggattctgttaccatggttgctgggaatgggctaccgaacccagtagtaggtgacagggctgtcgaagaagagcctctggttctggccaatgctaatccaggtactgctgtaatgggagtgagggctgcaagagagattcctgccgaggaatcaagtaatcagccactgcaaaggccagagatgagggttcaaagatctgccgatgaccgcttgtttacatgggctgccgttggacttacgatagcaattttggttcttttgttcaagaagttcatgaaatccagcggacatggtgctgtttttatggatggttcgtagttctcgcctcaaggatctcggttgacctgtactcgctttgccgtattagttcaacaagaagtaagaaacccttcaaagacatttatttacatctataatgaatcaatctgtaatatattataccagcttgataagtatcagctactgtaattaacagtatgtgtcagcaatcaattaccatatatatatatatgcaagcatgataaaaatacttatgtaagttttgattattcaattcctggtgaaatctttttag

SEQ ID NO: 21547 - DNA, 524 bp, Gossypium hirsutum
  Clone ID: GOSHI-09MAY01-C64509_1
attttaactgctaagaataatcaattagaaatccctctcttattcgttctctttcgctcttcaccgttcggattctacaataaaagaggaccctagcctaggcgtttccgatcaaatcaggggagtaatggatggatcgggtggaagaggaggaagtggagtggataatgtattacctaattacaagcttggaaaaacgcttggaattggttcttttggaaaggtcaaaattgctgagcacattttgactggtcacaaagttgccattaagattcttaaccgaaggaagattaagaatatggagatggaggaaaaagttagaagagagattaaaattttgaggttgtttatgcatcctcacatcattcgactctatgaggtgatagagacagcaactgacatttttgtggttatggagtatgtgaagtctggagaactctttgattatattgtagagaaaggaaggttgcaggaggaggaggctcgcaactttttccagcaaataatttctggggtggaggtct

SEQ ID NO: 21548 - DNA, 865 bp, Gossypium hirsutum
  Clone ID: GOSHI-09MAY01-C64009_1
gtaactttaggttcgagattgaacgcttctataatcttacgactcctgatacaccattgacatcgacaccaccaccagcaacatccccgccatcaaacaacaccaaaaatacaacaggaaaaaagagtaattcgtctcgaactattatcatcgcatctgtctcagctgttgctttggtggtacttgtagtttccagctgcatcttcatctttttaagggtgaggaagtcaaaggtgaaagctgaaaaaggtggtgaggcagctgaagcagtggatgaaataaaaaatgcagaggctttgcaatatgatttcagcaccattagtgctgcaacaaaccacttttctaattcaaatatgcttggacaaggtggatttggtgcagtttataagggaaaacttgccggtggcgaattaatagcagtgaagaggctgtcgactgattccggacaaggagatctagaattcaaaaacgaggttctgttagtggccaagcttcagcataggaacttggttaggcttcaagatttctgcctggaacgaaacgaaaggcttctcatctatgagtttgtgcctaatgctagcctggatcagtttttatttgatcccgttaagcgtgcatatttgggctgggaaaaacgatacaaaatcatcggaggcattgctcgtgggctcctctaccttcacgaagattctcgactaagaattattcatcgtgatctcaaaaccagcaatatactattagatgcaaagatgaatcctaaaattgcagatttcgggatggctagattgtgtgcagttgatcaaactcacggtgctactagcaaaattgtggaacatattacatggcaccggaatacgcaatgcat

SEQ ID NO: 21549 - DNA, 617 bp, Gossypium hirsutum
  Clone ID: GOSHI-09MAY01-C64269_1
gcttgctggtgctaattcgtatgctggtgtagtctgcgcccgcgccgcttatgtcccctttttctttttctcgctaaacaaacagaaaatcagcaaccctcttcttttacattctgtggtaatttaactaagagctgaatcttatggcgtcttctttggcttctccgtccccaacttcttcctttatcaggaacaagaaagatttgggtttctctgctttcccttcaacatctcaaatcgcaattcagaaatgtaagaaacaagtttcgaagaaaatcgtctcagtcatggcacctcagcaatcagagcgtaaaccagcgaccacaggctctgtgaagactggaatgacaatgacagaaaagattcttgcaaaagcctctgagaaaccacagctgagtcctggtgataatgtttgggttaatgttgatatattgatgacacatgatgtttgtggtcctggttccattggtatcttcaagaaagaatttggtcaaaatgcaaaggtttgggaccgtgaaaagattgttattatacctgaccattacatatttacaagtgatgaacgtgcgaatcggaatgtagatattttgagggatttttgcacagagcaaaatatc

SEQ ID NO: 21550 - DNA, 466 bp, Gossypium hirsutum
  Clone ID: GOSHI-09MAY01-C64229_1
gccgcgatgagatggggtttcttcatccggaagaaagctgctgagagacgggcacaggtagtcgagttagaagacgaagaagaagaataggctatcaacaagtcgtattggtactatggttttggaagttgctaacaacaacaatgtatgaaattaaggggtttcaaaactcttgaagaaccctaaattaggcaatgggaaatctctttgtacaatttcctgtatagtaagccgcttcttttgacttcccattattaaatatattttactgtatatgagaggctaaatttggttttaaattcatggccctcctttctttccttgttgattgatttttctaatggcatttaggtgtgagtttgttacagttaattgttatttcatcaatcaagatttctgggatattttgtaagcaaattgttggctgagtttcatcttcaccgaacaacgatcaacaatttgactg

SEQ ID NO: 21551 - DNA, 710 bp, Gossypium hirsutum
  Clone ID: GOSHI-09MAY01-C65609_1
cgaaaacgcgaacattgcgctcgagcaaatatcggaactcgcttcaccggacggcgatacgatgcaacgtattgccgcttatttcaccgaagcactagcggaccggatcctcaaaacgtggcccggtctgcataaggctattaattcgactagggttgtcgatttggtatcggaacaagctttggttcggaggttgtttttcgaggtgtttccgtttttgaaagcggcattcttgcttgttaaccaagctataatcgaagcgatggaaggggaaaaggtggtacatgtgattgatctcgacgcggcggagcctatgcaatggattgcactcattcgaggtttgagtgcaagaccagaaggtccgccgcatttgaggatttcggggatacatgtgcgaaaagaagtgctggatcaaatggggcatagattgtcggaagaagccgagaagttagatataccgtttcaatttaatccggttgttggcgacttagaggatctcgatgttgaaagactgcatgttaaaaccgggaagcggtagctattagctcggttctccggttgcattcccttttggcttatgatgacgaaccccttcggaagaaacttccgttagcattgaagaactcaaatggaatccacttacaaagagccttacaaatgagtcaaaacaccttagagagttactcgagaaagatacggttaacggatgc

SEQ ID NO: 21552 - DNA, 371 bp, Gossypium hirsutum
  Clone ID: GOSHI-09MAY01-C65349_1
ctttgaagtgctcaaatggctatgcataaggtgtttggtgcggttttatttgtgttcttaggtgtaggcatctgttctgcaactagagctctactcactctaaatgatgtaggttctcacctaccaggtattggtcatggtggtgccaccattggtgtatatggtggtgttgggctcggtggaggaggtggaggcggttcaggaggtggtcggtggttctgcggttgtaggaggaggtgctagtgctggatatggtggtggtggtggcagtggcgaagcgcgtggtgttgccctggccttgcagcccactagtccgctcaacatcattatccttccattgttaaaccatcctttcaccctaaaccaccaaa

SEQ ID NO: 21553 - DNA, 514 bp, Gossypium hirsutum
  Clone ID: GOSHI-09MAY01-C65319_1
catggctaaggtatctttgttgttgttttccttgttcattattgttgcttctgcaattatcaatgggtcagcagcagtggagaaggttgggatatatgagctgaagaaaggtgatctgagtgttaaattcaccaactggggtgcaactattgtttcagtcttcctccctgacaaatatggtaaaatgggtgatattgttctgggatatgattctgtcaatgactacaagaatgatacttcgtatattggttccattgttggaagggttgctaacagaataggaggggctcaatttactttgaatggagtccattataaattgatccctaatgaaggcaaaaacatgcttcatggtggccctattggatttagtgatgttgtatggaaagtgaacaagtataagaaagatggctattctccatccatttgttttgcctatgatagttatgatggtgaagaatgatttcctggtgcactcagagtaacagtgacctacaccctttacccaagcaac

SEQ ID NO: 21554 - DNA, 419 bp, Gossypium hirsutum
  Clone ID: GOSHI-09MAY01-C66989_1
cagaaatggatgcaacgatcagtcctggattataccctttgcaccgttgtaaaactcgccatctggtgaggcatgctcagggggttcataatgtagcaggggaaatagatcacgctgcttattcatctgaagaatatttcgatgcccatctcactcctctgggctggcaacaggttgatcatctgcgcaaccatgttcatgaaactggactttctaagaaagtggatttggtcattgtttcccctttgctcaggactatgcaaactgcggtgggagtctttggtggtgaggggtataaggatgggatagaagttcctccactaatggtggcaaatgcagggcaaagtgaccgtcctgagatttcaagcttgaattgcccaccatttgtagctggtgaactttgtcgagaacatttggga

SEQ ID NO: 21555 - DNA, 481 bp, Gossypium hirsutum
  Clone ID: GOSHI-09MAY01-C66979_1
gtggtggcataataatcacgtttgattttgacgaatggaacgtataataatattacggatttcattattccaccaagtcccttgttgcttttctttatattctctttccaacgacgtgcagatgggttagacgcaggccagaggagatccaaacctcttccttctgtttttttctcttcctccttttctgggttttaagctctaaattactaaagggaaagaatggatcatctcgcccatgtttctaaccaaccaaattctcagccccaatctcaaatttctcatttggctctcgacattgggaggttctttgatcaaattggtgtatttctgtagatatgatgatagttgtagagatgatgatgagctaagatcccaaaatgaaagccttggttccgaaagtgataacagccgacctgttcttggaggaaaacttcatttcgcaaagtttgaaactagcaagataaatgattgcttagag

SEQ ID NO: 21556 - DNA, 579 bp, Gossypium hirsutum
  Clone ID: GOSHI-09MAY01-C66609_1
gagaaacggaaaaaccctggagagagaaaagactggtagaaatggacgacggcaacaccaccgaggcggagcgatggctaactatagcggcgaagctactcgcttccggcgactttcacgggaccaggactttcgcgatccgagctcgagaatcggcacctgtcctcgccgaccaaatcttagctgtcaccgacactctcttaaccgctcaatctaaccctcgtgactggtacggtatcctccaactcgttcctttaactcaatccatggaagttgtggagagtcagtataggaaactcgcgattctcttgaaccctgtgaagaacacgttgtcttttgcggatcaagcgtttcggttcgtttctgaagcttggaatgtgctgtcgaatccttctaataagctcatttacgataatgagttgaggtttcttcaggttggtcatgtgagtcaactcgcgcagcaacattatcaacaagaacagccgcaagttcagcaaccgcaaccgctgacgcagacgctgtttatgcagcaaccaccaccgccgaaagaaacccaaacgctatttatgcaaacgccgt

SEQ ID NO: 21557 - DNA, 792 bp, Gossypium hirsutum
  Clone ID: GOSHI-09MAY01-C67999_1
cggcaacctctatacgaagctgaagcaaatgtcaggaccattgaagcctgttatggaatagttgagagaatggttaaagccttgattggacctattttcgagacgttctttgattccctttacgacctgttcaaatttgctgatgactggattggtgaatttgtgactaagattgatggtattctccctccagtcatcaagcaggcaatatccaaagtcgcctcggctgccaataatgctttaggactgactgttgatgtgcctactatggaggtccagagtactggagtgaaaggcacctcctctagattcctccagcagatctcatccggagccatcttggttgttgaaggtgtggctagtcaggccaagaattccggattgattcctgaagagctacaagtgctgaagtacttaaaatacttaaaatactttgtaaccgtgcaagctgcagttctccgtgcagtcaaattctactttgaagttaagaaaatgttgagaccattgaggcctgtcattgactttattgagcgagtggttgttagcgtgtatcagaagttttttgcgaaaatggttaagagcctatttagatgggtccttataaacttatttggtgtccctgctggagttttcgatataattgacaaggttggaggtgatttgagtaagcttggcgatttgagtaagctcggagatttgtgcatgcttggcgatttcagtacgcttggaggtttgagtaagctcggcgatttgagtaagattgatgatcttgttccatctggagccctctcg

SEQ ID NO: 21558 - DNA, 568 bp, Gossypium hirsutum
  Clone ID: GOSHI-09MAY01-C67949_1
gaatctcggaagtggttggtttgtttgttgcagaaaaagaaaatccaaatgggtttgaggaatattattggcaaaaggcttggccttggccttgtaaggaggaggaaacctttttcgactgctacttgcgatggcgatggcaatggcaacggcaacgccaaatccatcaacctttactccgccatcaatcaagcccttcatattgcgcttgaaactgataatcgcgcatttgttttcggagaagatgttagctttggcggggttttccgttgcactaccggactctctgaccgatttggtaaagctagggttttcaatacccctctctgtgaacagggcattgtcggatttggaattggcctagccgcaatgggaaatcgggccatagcggaaattcagtttgcagattacatataccctgcttttgatcagattgtaaatgaagctgccaagtttagataccggagtggcaaccaattcaattgcggaggtttgacaataagagccccttatggcgctgtgggtcatggtggacattaccactcacaatcacctgaaactttctttt

SEQ ID NO: 21559 - DNA, 841 bp, Gossypium hirsutum
  Clone ID: GOSHI-09MAY01-C67799_1
cttaaacttcatccgaagttgccaatttgggctgctgggattttactcgtcacctcatcttcacacctgcatagcttcgtaatccaacaagctcgaaccatggaccgacacttatcgaaatcattcgaaatcccaccagcaagtctgtccatctttggcatcctaacaacgctctcaggcctagtcttgtatgaacgcctcttcgttccgctcgcaagacggttcactggacacccttcgggcgtcacgtgtttacaacgaatgggaatcggttttgtcatcaacatcgtggccacgatcgtttcatcgttcatcgagatcaaaaggaaatccgtcgcagcccatcacaacttgctggatgatcccaaagccatagttcccatcagtgtgttctggttagtccctcaattctgcctccacggcatagccgaagttttcatgtcagttggacacttggagttcctgtacgaccagtcgccggaaagcatgcgaagcacggcggcagccctgtattggacagccatttccatggggaattacattgggacattgctggtttcgcttgttcataaatacacaggtgaaaacagtaactggttgccagataggaatctgaacaggggaaaacttgaatattattattggcttgttagtgggatccaagtcctgaatctcatttattacataatttgtgcttatctttatacttacaaaccattagaagaggttacagaggaagaagaagaagatggtgaattcaatggaaagaagatttcagaaaaaggagttgagcttactgtaaacgaaacagcttagttggctttgctattaagggaattat

SEQ ID NO: 21560 - DNA, 742 bp, Gossypium hirsutum
  Clone ID: GOSHI-09MAY01-C67709_1
cccacgcgtccgcccacgcgtccgcccacgcgtccgcccacgcgtccgcccacgcgtccgcccacgcgtccccagagtttttgacttctttgcaccactgttagtaatcaaatcaaaagagagaaaaaagaaatccccaaatctgaaccctaaaagatggcgaagatatggggaaagatgtgggctttgatgggtttgcttctttttaattcggtgtgtaatgtttcctccctttcggtgaatgtaaacaacatcgaatgtgtgtacgaatatgtgctttacgaaggagacacgatttccggcaactttgtcgtcgttgaccatgatattttctggggttccgaccaccctggcattgatttcactgtgagttctcctctgggtaatacagttcacgaattgaaggggacatctggggacaagtttgaagtcaaagccccaagaagcggaatgtacaaattttgttttcacaatccccactctgcaccagagaccgtctctttccatatccacgttggccatattcctactgagcatgatcttgccaaagacgaacatttggacccaattaatgttaaaattgccgaacttagagaagccttggaatccgttacagcagaacaaaagtacttgaaagcacgtgatactcggcatcgtcatacaaatgagagcacaaggaagcgagttataggatacacagttggagagtacattttgctaactctacttagtgcacttcaac

SEQ ID NO: 21561 - DNA, 549 bp, Gossypium hirsutum
  Clone ID: AW187122.1
caccagagtttttgacttctttgcaccactgttagtaatcaaatcaaaagagagaaaaaagaaatccccaaatctgaaccctaaaagatggcgaagatatggggaaagatgtgggctttgatgggtttgcttctttttaattcggtgtgtaatgtttcctccctttcggtgaatgtgaacaacatcgaatgtgtgtacgaatatgtgctttacgaaggagacacgatttccggcaactttgtcgtcgttgaccatgatattttctggggttccgaccaccctggcattgatttcactgtgacttctcctgcgggtaatacagttcacgaattgaaggggacatctggggacaagtttgaattcaaagccccaagaagcggaatgtacaaattttgttttcacaatccccactctgcaccagagaccgtctctttccttttcctgtctggccatgtcctcactgtgcattatcttgacctgtatgagcatttggacccaattaatgttaaaattgccgaacttagagaagccttggaatccgttacagca

SEQ ID NO: 21562 - DNA, 376 bp, Gossypium hirsutum
  Clone ID: GOSHI-09MAY01-C67699_1
cttcgctatacattcctgtttatgatttgtttccaatttgatatccatggcttccgaaacttgttccccttctaacaagttgagattcctcctaggaatggttttatttcttcttatgaatatggccactgtccagttgtcctctaccttttattcaacaacatgccctaaagcacttgccaccattaaatcagcagtcaactctgctgtgtccaatgaagctcgcatgggggcttctttgcttcgtcttcattcccacgactgctttgtcaatggatgcgatggatccatactgttggatgatacagcaaatttgacaggagaaataacagctgttccaatcagcaattcaatcaggggatttgaagttattgat

SEQ ID NO: 21563 - DNA, 882 bp, Gossypium hirsutum
  Clone ID: GOSHI-09MAY01-C67169_4
gcgttcgcgcagggttgttggaacgccggctctgacggtggttgaagggtggcgcaggggcttgcaatgacctagccatcttatgattcccactgataaaaaaaaaaagaagaaagttggcgtttttttttttttaccattaataacaatttctttcactgctatatatatatatatatattcctattggtttgacgtattgattatactgtgggccgtgtggggatgtatctgagctggttctgttttgggttgattgatttgaaccggtgggcttagaactggtttccacatttctttattctcgagcttttatctttttgggttggtgattcagttgattatatagagattggctttggtatgcttataaaagatgtcactgaagattatgatgcggccgcgcgtccgcccgcgcgtccgccctcgcgtccgatcaaagagaggtggagaaagcaagctttggcgaagccggacaaggtcccatgtcgttccggaccagccacaggaatctgccgagcaaagcccgtgggcgaatctgcccccggaattgctcttagatattatccacagagtggaagagagtgaaacagcttggcctgctcgagctgctgttgttttttgtgctgcagtttgtaggtcttggagggaaattacaaaggagattgtgaagactcccgagcaatgtgggaggctcacctttccaatctcattgaagcagcctggtcctcgcgagtctccgattcaatgctatattagaagggacagagcaacgtctacatatcttttgttctatggtctggtaccttctgagggagagggtgataaattgctattggcagcaagaaaggtcagaagggcaacatgcactgactttgttat

SEQ ID NO: 21564 - DNA, 980 bp, Gossypium hirsutum
  Clone ID: GOSHI-09MAY01-C67169_3
taaaaagagcaggagggagttagttttggcttctgatctgcggaataaaacggtgttgatggctgcggcggtgaccgggaggattgaacgtcggcgttaacgctgactgtatcggtcacaccggcgttaccaatgacgtggccatcttaagattccagccaaaaaaaagaaaagttggcgctttctttttctaatactgaaaaccttcttaattatttatttcattctgatctgatctttgtttttggtttgtggtgttggttgaactgtgggtccctaagagtgtgtggggggagtgcatctgagctggttcagttctgggttgatttgaaccggtttggcttagagctggtttcctccttttctcgcaatcctgctttcagcttttctgggttggtggttcagttgaatattgagagattggatttggcatgcttataaaagatgtcattgaagagtattatgcgagagttaaaggaaatgaaggaggggattgggagcatatcaaagagaggaggggaaagccaggtttggcgtagtaggactcgatcccatgctgctcctgatcgagcaccaactgaatctgaatccgtacaacaaagcccttgggcgaacctaccgcctgaattgctcttggatatcatccagagggttgaagagagcgagacagctcggcctgctcgagccgttgtagtattttgtgctgcagtttgtaggtcttggagaggggttacaaaggagattgtgcagactcctgagcaatgtggaaggctcacatttcccatttcgttgaagcagcctggtccccatgagtccccgattcaatgctatattagaagagacagagcgatttctacatatttttcgttttactggtttttgcctctttgcgttatgattgtaatctttctcaatattatttatattatattcttttatttattatattttaccttttcttttttattttcttaaatttt

SEQ ID NO: 21565 - DNA, 1287 bp, Gossypium hirsutum
  Clone ID: GOSHI-09MAY01-C67169_2
aagagcaggagggagttagttttggcttctgatctgcggagaaaaacggtgttgatggctgcggcggtgaccgggaggattgaacgtcggcgttaacgctgactgtatcggtcacaccggcgttaccaatgacgtggccatcttaagattccagccaaaaaaagaaaagttggcgctttctttttctaatactgaaaaccttcttaattatttatttcattctgatctgatctttgtttctggtttgtggtgttgattgaactgtgggtccctaaaatgttggaatgcatctgagctgattcagttctggctttgattagaatcggttggctttgagttgacctccacattttttttttcttcatcttggaatctcaagttttaagcttttccggtcgatgattcagttgaatattgagaaattggatttgatgtgcttataagaagatgtcactgaagagtattatgcgggagttaaaggaactgaaagatgggattgggaacatgctctccccccgccgggcaaagcaagctgtggcgtagccggactcgatcccatgttgctcctgatcgagcaccatcggaatctcaacccgcagaacaaagcccctgggccaacctaccgcctgaattgctcttggatatcatccagagggtcgaagagagcgagacagcttggcctgctcgagccgtcgttgtattttgtgctgcagtttgtaggtcttggagggagattacaaaggagattgtgcagactccagagcagtgtggacggctcacatttcccatctcgttgaagcagccgggtccccgtgagtccccgattcagtgctatattagaagggacagagccacttcgacatatcttttgttctatggtctggtgccttctgagggggagagtgataaattgctgttagcagcaaggaaggtcagaagggctacctgcacggattttgttatatctttggttgctgatgatttttctagggccagctatacatatgtcggtaaactaaggtctaatttttttggtactaagttcacaatacatgacagtcaacctccgtgtgactcaataatcccatcaagtacccgatcgagtcgaagattccactcgaagcaggtgtttccaaaactatcttcgtccaactacaatattggtaccattacctatgagctcaatgttctgcgaacacgaggaccaaggagaatgcattgtgttttgcactcgattcccatgtcttcgattcaggaaggaggcactgcaccaacaccattagcgtt

SEQ ID NO: 21566 - DNA, 1085 bp, Gossypium hirsutum
  Clone ID: GOSHI-09MAY01-C67169_1
tggggatgtatctgagctggttctgtttttgggttgattgatttgaaccggtgggcttagaactggtttccacatttctttattctcgagcttttatctttttgggttggtgattcagttgattatatagagattggctttggtatgcttataaaagatgtcactgaagattatgatgcgagagttgaaggaaatgaaagatgggattgggaacatatcaaagagaggtggagaaagcaagctttggcgaagccggacaagttcccatgtcgttccggaccagccacaggaatctgccgagcaaagcccgtgggcgaatctgcccccggaattgctcttagatattatccacagagtggaagagagtgaaacagcttggcctgctcgagctgtgttggttttgtgctgcagtttgtatgtcgcccacgcgtccgtccaaggagatggggagggcgcccgagcaatgtgggaggctcacctttccaatctcattgaagcagcctggtcctcgcgagtctccgattcaatgctatattagaagggacagagcaacgtctacatatcttttgttctatggtctggtaccttctgagggagagggcgataaatggctattggcagcaagaaaggtcagaagggcaacatgcactgactttgttatatctttggctgccgatgattttgctagggccagctatacgtatgttggtaaactaaggtctaactttttgggtaccaagttcaccgtatatgatagtcaacctccatgtgactccatgatcccattgaccacccaccgaagattccactctaagcaggtatctccgagattacctgcatgcaactacagcataggtaccattacctatgagctcaatgttctgcgaacccgaggacccaggagaatgcattgcgttttgcattcaattcctgtctctgctattcaggaaggaggcactgccccaacgccggtgggcattaccgcaatcctttgatgagcaactttctcctttacctagttcaaaaggaaagcaaccgctgatggacaccagctccccgagcccggcagtcacacctttatattc

SEQ ID NO: 21567 - DNA, 604 bp, Gossypium hirsutum
  unsure (1)..(604): unsure at all n locations
  Clone ID: AI055297.1
tcgcgcaggggttgttggaacgccggctcttacggtggttgaagggtggcgcaggggcttgcaatgacctagccatcttatgattcccactgataaaaaaaaaaagaagaaaagttggcgttttttttttttttaccattaataacaatttctttcactgctatatatatatatatatattcctattggtttgacgtattgattatactgtgggccgttgggngatgtatctgagctggttctgttttgggttgattgatttgaaccggtgggcttagaactggtttccacatttctttattctcgagcttttatcttttgggttgggaattcaattgatttatatagagattggctttggtatgcctataatagatgtcactgaagattatgaatgcgaaagtttgaaggaaatggaaaatgggattgggaacatttaaagaaaggtggaaaagcaagctttggcaacccggcaagttccatgtggttcggaccgtcccaggatctgccgacaaaacgtgggcgaatttccccggaatgtttagatttatccccagtgaagaaatgaaaagttggctgttaactgtgtgtttttgctgaatgg

SEQ ID NO: 21568 - DNA, 338 bp, Gossypium hirsutum
  Clone ID: uC-gsflmaxxa107b02b1
cctacgcgtccgcttaaaaagagcaggagggagttagttttggcttctgatctgcggagaaaaacggtgttgatggctgcggcggtggccgggaggattgaacgtcggcgttaacgctgattgtatcggtcgcaccggcgttacgaatgacgtggccatcttaagattccagccaataaaaagaaaaagtgtgtggggggagtgcatccgagctgttttagtcctgggttgatttgaaccgtttcgcttttaagtttgtttttttctttttttcgcaatcttgttttcatttttttctgttttgttggctctatacttattttttttttacttctttt

SEQ ID NO: 21569 - DNA, 540 bp, Gossypium hirsutum
  Clone ID: GOSHI-09MAY01-C67359_1
cacgactgtcacgagtgtggctgatatctacgaacttgactttcagatttttttattcttttaagaaatggactcttgaattgagcttgttgcttctttgtgcaatctgggtattaaagaaaatggcccgtttcgtggggttatcagcttctcataggcaattcttgtatcgcttctctctccctatctcttctcctgccttcattccatctccagctcattgaaaaaagcacgcgccggttcggagattgcttgtgcttcctattaagtgttcatcttcagggccgagtcaagacactgagtcacaagctggcacgacgtccgtgccatcctctccttctcttcctagctcattggcctcgagcaatcccacgtataattgccgtgctgggatcggtgccgcccggatcattcaaactgcttactcgacttacctcatgctctccggttccgatgccttttgccctcttggtggtggtagttgtggtgatgtcctcaacagtgattacgccttcttttttggcgttcctctttcgttac

SEQ ID NO: 21570 - DNA, 608 bp, Gossypium hirsutum
  Clone ID: GOSHI-09MAY01-C67379_1
ccccgcgtccgcccacgcgtccgcccacgcgtccgcccacgcgtccgcccccgcgtccgtttcatatttcttcaaagtaatccctttttcttcatacaaaacccgccattttcaatgggtaattccaggttcaagttatcagacatgttccccaatgtctggttctacaatctcaaagacatgaacaaacccatacaccatgaaaaaaaacaccaccacccatcatcatcaaaacatgaacaaccccattttaatcccagaaaatcctatcatttcactagagagcttgttcctattcatgtttccccagatcaaccactgagaaaatccaccaagaaacgaaatcccagaaggaatttccggtcaccgccgtcaaaggtgcttacttcttccgtctccgccggttgtagttgccgtgaaactatcaagaataaacccgattctccaccggaatactcagcatcttcttcatcttccttatcgtcttccggcgacagttctttaccgcaagaatcgttcgataacttggtgtggtcaagttccaaagccaacgacgatataatctccgatgcggacgttaagaaaatcgacgagttcttaccggaact

SEQ ID NO: 21571 - DNA, 595 bp, Gossypium hirsutum
  unsure (1)..(595): unsure at all n locations
  Clone ID: LIB3829-007-Q6-K6-D2
caanaattaaaaacacataattaagaacaagttaaatatttatcatacaacttcagaaaataataacaagattagtcttaggtttcattccccttaggtatttaggggatttatttcataactaaaaggaaaacatctcagaataataaagaatacaaaacataaagaaaacccaaaactcctgaaggggaaattgaggaaagatcttcagtcttgatggtgaactcggcttttgagatggatcaattggctttctttgagtaattccttactcactattctgtgtctcatttttcttcctcctctagggtgtatttataggctttggaatgcctaagagccctcaaaattatcctttttccgaattggactcaacttgggctcggcaaggacacgcccctgtgacacgctcgtgtgcgattgcttcaggccgtgctcgagcctgccaaattgacacggccgtgtggtctgcccatgtaaggacgtccaggccgtgttgattttgtactttggcctattttctccgattttggcccgttgctcgttcctttcgctctcctatactctcctaagtataaaacatgaaattaaagca

SEQ ID NO: 21572 - DNA, 392 bp, Gossypium hirsutum
  Clone ID: LIB3196-016-P1-M1-G7
catacaattcagaaaataataacaagattcgtcttaggtttcattccccttaggtatttaggggctttagtccataactaaaaaggaaaacatctcagaagaataatgaatacaaaacataaagaaaacccaaaactcctgaagggaaattgaggggaaatcttcagtcttgatggtgaattcggctttccttgagcagttccctacctctttttctccgtctcccttttcttcctcctctagggtgtatttataggctttggaatgcctaagaaccctcaaaattggccttttccgaattggacacaacttgggctcgggagggacacgcccgtgtgacacgcccgtgtgacacgcccgtgtgcgattattttaagctgtgctcgaaccta

SEQ ID NO: 21573 - DNA, 680 bp, Gossypium hirsutum
  Clone ID: GOSHI-09MAY01-C60549_1
tcgtccacgcgttcgcccacgcgttcgcccacgcgtctgcaggaaaacaaaatttcaagcttgaaattttgattcaaacacttttccttttcattctctcataaaactcaaatcccaagttcttatcaatgggtctctcagtcgagaattcggtaacacaatcccacacgcgaacccacaaaatcttcttaatcagcaattaccttctattgggagccgcctccagttgcatcttcctcaccctttccctccgcttattcccttccctgtgtggattcttccttatcctcctccatgtcatcaccatcgccgccgtcgtcttgggttgctccgtcgccatttcgggttccaacaaacgctacttggcttacatggtgtcgatggtgctgacatcaatattcgaaggctctgtttcggttcttatcatgacccgaacgtcggatttcttggggtacttgaggtcttatgtgagggaagatgatggtgttttgatattgaaactggctggcgggttatgcgtggctgttttcttcttgcagtgggtggttttggggctggcgtttgtgttgaggtactatgtcttggtggaaggccaccgggtgggcaatggcggttcattgaaacaggggaatgggaaagttgcacatgacgatttgaagacctggccttgggacttccac

SEQ ID NO: 21574 - DNA, 650 bp, Gossypium hirsutum
  Clone ID: GOSHI-09MAY01-C60449_1
cccacgcgtccgaaaaatcacagaagagtttgtaagagatagcagagcaatagggtaactttgaacaagatgcggctgaagatttactatcacagctgctgatcatcaaaatcccatttcccgggttttttttgtgttttgggttgatgaaactggtgctgaagagcaaactgatactgacaggaatatggcagtgatgtttgaaattttaaggagaaagagacaagtgaaacttgaaagttttatcttgaatagaagttcatttgcacagactgcggagaatttattttctctttcattcttagttaaagatggaagagtcgaaatagtggtgcatggatctggttctcatattgtctcacctaaaaaggcccctgctgcctcgtccatagcaagtggtgaggctgcttacagccattttgtgttcagattcgactttaaggactggaaggatttgcttcgaaattgaggaaatataagataaaatgtctagaagaaaatacgaatatgatgaagatgtttcagcaatcgcaacattcgccgtcatagtgtattgtataaatatttttatcattttaacttttaacatttttgtaaaaataatatgaattatattttatttattgataataatattattttattcattt

SEQ ID NO: 21575 - DNA, 683 bp, Gossypium hirsutum
  Clone ID: GOSHI-09MAY01-C60689_1
ggcagttttcttgggcaatccaactggaaaaagggaatgtgctggaactggcgttttcttgcctcgccgtattggtgcaccttctgaaccccgcaagaagccagcttgtcctactgttctgcttccagctagagtggttcaggccttgaacttaaatcttgatgaacttggtgctcaaccccagcttaatcctcggttgaacgctaatgtcaccgccgaaattgatgctgctttgaaacttggaagtggttggaaccagaagcaggggaatttcaggcaacatcaaggaataaaccatgaagttgcgttacctcaggaatggacatattgagcagctttgggtggttgggttttcatgatctctttttgggtagttgtaggagaaaaagatgttagtttgctatagtgatgaaattgtagtatagaagtatagggttaagaagatgaaatgaaatggttatttgggtgaaaataagaaggaagaatgtgtaggtagtaagcaggttttgttgaatgtgggtgggggctgagaaagggttattttgttttgtaaatctgggaattgggtcaataagtatttggcagaatatgagccctactattctacccacataggtggtctctctttctctactgaactattattgtttcacttcactgagcttgtacacatttatttactt

SEQ ID NO: 21576 - DNA, 699 bp, Gossypium hirsutum
  Clone ID: GOSHI-09MAY01-C60649_1
cccacgcgtccgttttttttctttgactgcgatttttcctcgcctattcctaaaaaaaaaaaaaaacttttcgtataatgtgagattaaatttcttgttttgaagtttgggttttgatcagtttttagctctcttgattgggtagttttctgttttttctttgtgtagaaaaaaaaaccaaaaaaagtctctttttttttttactatcaagagagatgaaggtgactgcgacggctgtgacggttgattccggttttggggaccaccaagtgtggccaccggggtttcggtttcacccaactgatgaagagccggttctttattatctaaagaggaagatctgtaaaaaaaggcttaagcttgatatcattagggaaactgatgtttacaagtcggatcctgaggaattacctgggaaatcggtactgaagaatggggatcgacagtggttctttttctgtccaagagacaggaaataccctaatggagcaaggtcaaacagggctaccatacatgggtattggaaggcaacgggaaaggatcgttctattacttgcaattctcgagttgttggaatcaagaaaactttagttttctacagagggcgagcacctaatggcgagcgaactgactgggtgatgcatgaatacacccttgatgaagaggaactaaagaggtgccagaacgtaaaggattata

SEQ ID NO: 21577 - DNA, 680 bp, Gossypium hirsutum
  Clone ID: GOSHI-09MAY01-C60639_2
atcaacggaaatcaaagatgtgtgtagtcaaagagctttccatttttgttctctttgttttgatttttggaaatgtaattcaagcccaaaattcaccttttccatctcctaaatccactccaaccacaactcctccctccaaatctacttcatcatcgcctcctgcgagttccccaacaacatcatcgccgcctgcagcatctccgactactcctcctcctccacagatccaaccaccggctgcgactccgccttcttcttctagcccatcgatttctcccccaactgcttctcctccggctgccactccttcaagctctccgccttcattgactccaactagttcgcctacttcaatgactccggccggggctccacctgtttcggctgatattccttcgagttcaacgacgccggccgaaagtcccggggttttcccgtcgagcagtagtccaccgagtcctactccgatcggttcgtcccctgagagtgcagcgggcccggctgctaatgatgattcgggttcaagatccggatacgaagtcgggttcgttctaagctttggtttggttattggggccccattggctatttagattttgatactttcttggatagtaatttttttgaaaattttattttctaaggcagccttcatttaattatttgggattttaatt

SEQ ID NO: 21578 - DNA, 631 bp, Gossypium hirsutum
  Clone ID: GOSHI-09MAY01-C60639_1
caaatagtgtgtagtcaaatagctttccatttttgttctctttgttttgatttttggaaatgtaattcaagcccaaaattcaccttctccatctcctaaatccactccaaccacatctcctccctccaaatctccttcatcatcgtcccctgcgagttctccaacaacatcatcgcctcccgcgagttctccaacaacatcatcgtcgcctgcaaaatctccgactactactcctcctccacagatccaaccaccggctgcgactccgccttcttcttctagcccatcgatttctcccccaactgcttctcctccggcgtcgactccttcaagttctccgccttcattgactccaactagttcacctccatcaatgactccggccggggctccacctgtttcggctgatattcctttcgagttcaaaaaccgccggcggaaagtcccgggattttcccgtcgagcagtagcccatcgagtcctactccaatcggttcgtcccctgagagcgcagcgggtccggctgctaatgatgattcgggttcaagatccggatacgaagtcgggttcgttctaagctttggtttggttattggggccgcattggctatttagattttgatattttttt

SEQ ID NO: 21579 - DNA, 300 bp, Gossypium hirsutum
  Clone ID: uC-gsronu33B081e03b1
ccttactaacattgaaacccctcctatggtgattgttggggttgctttctcctacacagagccaaccaccgaatgccactcctccttcttcttctagcccatcgattactcccgcaaatgctttttctccagcttccactccttcaagctctccgccttcattgactccaactagttcgcctccttcaatgactccgaccggggctccacctgtttcggctgatattccttttagttcaactacccctgccgaaagtcccgttgttattccttcaagcattttattaaccctacctattc

SEQ ID NO: 21580 - DNA, 385 bp, Gossypium hirsutum
  Clone ID: GOSHI-09MAY01-C60159_1
atggcacgattgactttttcgacattggataaaatctacaaatcagcccttgagttattcaatggtaactgacaactaaaatatttccctagaaaggaagatgaaaggagtggagtgtggtttggcagaacaactgcatttcacagcttttccagtcaaattggagcactgaacgttcagatgcataccaaattatgcatgggtcctaatcacacctataaggctggctaccagctttgacacagcactgttcatctggccaaacaactgtggttaaaaacacatgtaaaatgcttttaacagctgatactgtataagacaaagccaagatgcaaaattaggctttgattggcactttttgaaaaatatgcaacaaatatgggat

SEQ ID NO: 21581 - DNA, 368 bp, Gossypium hirsutum
  Clone ID: GOSHI-09MAY01-C60179_1
cttaacccattcaggtatagtctcagaaatacattagggtcttggcccatattagatacagaatgcagatacagtaaatcaaaatcctacccaccagcctctacacaccatctccgttcaaccctatacaccatgtggggattaaatcaacccacccatccctacacaccatgttataccgaaatgcggcacttaatcagaaggttacagctgagctgccagataacaagcttaatagcctttcagacacttcttccaaatatcaacccaccccgatgcaatgaaacatacaaaatatgtcatgtcattatgtaattaatagtacatacattcggatatcataagtcatggctcggtatagaaatcaa

SEQ ID NO: 21582 - DNA, 781 bp, Gossypium hirsutum
  Clone ID: GOSHI-09MAY01-C60109_1
atcaaaggtacagggtgagcttgatgaaatcgtcggaaaatcagggccgctgacggaaccaggcgttcaatcaatggtttacctacaggctgtgctgaaggaagttctgaggttgcacccacctggtccacttctatcatgggcccgtttgtcaatcatggacacaaccgttgatggacatcacgtgccagctgggaccacagccatggttaacatgtgggccataacaagggacccagatgtttgggtggacccactcaagttcatgcctgagagattcgtgtccaaggacagtggtgacgtggaagtagtgtcagtgttggggtctgacctcaggctggcgccattcggctcaggccgtagggcttgccctggaaagactctgggtctggcaaccgtgaccttttgggtggcctctttgttgcatcagtacgtgtgggtgcaatcagatgagaaccctgtcgttgatctctctgaaatgcttaggctctcatgcgaaatggctaacccacttaaggtcaaagtgcaccccaggctcagataaaaaagagcaggaccaaatcaataagtgaagagataatcataatatggtcgagataaaaatgtaaatttagccagctcgtggtctctaatctctatatattaatcttaatattgctcttttttttttctttttatctttgaccaacacatagctgttatatgaatgatctagcaataagctagagatagcagcaatgtttaaattgtagtaactattttgtttaaatgggtagacttg

SEQ ID NO: 21583 - DNA, 368 bp, Gossypium hirsutum
  Clone ID: LIB3196-034-P1-M1-A5
atcgggtgcatcggacctttagaaaaagctaggaggcaaagtcagtgacagatctcttgtcggacttgcttcatctgagcaccatcatcttcaagagaaggtagtatctgtgtagacattatctggaccttggttttcccaagcaaggtgtaaaaccagtgtgtgtagaaagaggggtgaggggtgattcgagagcagataatcttgaagatcccgtgtagctgtaatgttctttttgttcattacttaaatacttatttatgggctgttctcttattcttatataatcacatgtattttcctcattatttttctttctcgtcagagcccacttttgccctcacacttgtaaatagaagcatatacga

SEQ ID NO: 21584 - DNA, 366 bp, Gossypium hirsutum
  unsure (1)..(366): unsure at all n locations
  Clone ID: LIB3196-034-P1-M1-A4
atcgggtgcattgaacctttagaaaaggttagaaggcaaatttagtaacaaatctttgttagtaattttttaatttgagcaccatcattttaaaaagaggtagttctgggtaactttttgcccttgttttccaagagggtgtaaaccagtgtgtataaaaagaggtgtgaggggtgatttagagcacataatattgaagataccgtgtagctgtgatgtgctttttgttcattacttaaatactcatttatgggcggttgtcttattcttatataatcacatgtattttcctcattatttttctttctcgncagagcccacttttgccctcacacttctaaatagaagcatatacgagtttttttt

SEQ ID NO: 21585 - DNA, 350 bp, Gossypium hirsutum
  Clone ID: GOSHI-09MAY01-C61829_1
ctcttcggctccttcattaggcattggagctgccctaggactgggcattagtgacttcaatctgtgatactatggacctctgccctcatttcaattctagcaacgcaatatttcctctacagctctttctgtgggttactatctctgcgaggtgtcttgctactttttatgtctctacttgggtttaagcttgcttgcattttttttatcatattatggaataccattggattcctggttgtcattgactgcggctttatatgctttgtctggaactgagtttcattttcctagcaatgcttaatcctcctactaacataagttaaactgtggcttaccaagggtttttg

SEQ ID NO: 21586 - DNA, 384 bp, Gossypium hirsutum
  Clone ID: LIB3196-033-P1-M1-A1
atcgggtgggcggcatgtctgtggccggtggggagattcgtggagacacggcgggagaggacactgctgctcccggccggttcagcttcagcccggagcccacgcttgaggacattcgccgcctccatgccgagtttgctgcagaacgagactgggaacagttccatcagcctcggaacctcctcctggccttggtcggggaagtgggggagctcgcagaactctttcagtggaaaaccgatggggaacctggcccccaaggctggtcccccagggaacggttagcccttcaagaggagcttagtgacgtcctcatctacctggtggcattagcagcccgctgccgtgtggatctgccgctagcagtgctctccaaaatggaca

SEQ ID NO: 21587 - DNA, 311 bp, Gossypium hirsutum
  Clone ID: LIB3196-033-P1-M1-A2
ctcttggtctccttgattaggcattggagctgccctaggattgggcattagggacttcaatttttgatactatggacctctgccctaatttcaattttagcaacgcaatatttctctaacaagtcttttggcaggtacactatctcgtggaagcggctgctgccctttataggggaactgggggagctagcataacgctttcagtggaaaacagaaggggaacctggcccacaatgctggtcccccagggaacggttagaccttcaagaggagctcagagacgtcctcatctacctggtggcattagcagc

SEQ ID NO: 21588 - DNA, 372 bp, Gossypium hirsutum
  Clone ID: LIB3196-030-P1-M1-A7
atcgcggggatccctccctcccacccgttccctcccccccgcgccccgattccggccccagcgcgggggggaggtcttatgtatatggctgttatgtgattttaaatcgactctcgagcaattttttttaaaattgtaattagttcatttattttgcgaaagtggtagatttaattattatactctagtttaatcaattttaatctttatattttttgaattcggtcaattataatgtcaacctaaacaacatcagttaaattcaattactagtcatgtactatgcatataggtggagatctaacccatctttaacaattggatcattttaaatgccggtacttttttgaattttaaaaatttaggcttgat

SEQ ID NO: 21589 - DNA, 353 bp, Gossypium hirsutum
  Clone ID: LIB3196-030-P1-M1-A6
attttaagtttctttaatattgttttaaagaaatagagtgaaagtcgatactttattttatctatatggtttttatgtaattttaaatcgactctcgagcaattttttttaaaattttaattagttcatttattttgcgaaagttgtagatttaattattatactctagtttaatcaattttaatctttatattttttgaatttggtcaattttaatgttaacctaaacaacatcagttaaattcaattactagtcatgtactatgcatatagttgtagatttaacccatatttaacaattggatcattttaagtccgtgtacttttttgaattttaaaattttagtcttgat

SEQ ID NO: 21590 - DNA, 370 bp, Gossypium hirsutum
  Clone ID: GOSHI-09MAY01-C61539_1
caattgtggtccaaatgtatatttgaaactttaattttgatttaatcatacacatttaaagaaataaatacatcaatttatttttatattggataaatataattattcatgtatgcaatatatagacataaaatgatgttatatcaataattgcattaataatttacaagaattagatcaaatcaaaatttcatgtataaaattgcacaaaatcaaagttcatgtatacaattgcacattaaaccatagttaatgtataattttggtatgtatccctaattaattaatttaaaattaaaaaaatctaattttacttaaaagtcatgagataaatgattagattatatatgaattttattttggtacaatt

SEQ ID NO: 21591 - DNA, 679 bp, Gossypium hirsutum
  Clone ID: GOSHI-09MAY01-C61169_1
cggacgcgtgggcggacgcgtgggcaaagctggtaacagactttggatcactcgaactttcacccaccgatggtcgttccctgactgactttatgcatctaaggggactaaaaatgcagtctttgggtcgcgtggttgaacttgctgagaagctgcctcacatacaatcactttgcatacatgagatggttactcgagctttcaaacacgtgctcaaagcaatcgttgcatctgttgacaaatatcgaggaccttcccgctgctggggcttcgcccctcaatttcttactcggaaataatggatcagaagataatgctgaaaatgcaaatgatgactatttgctaaaattgaggtggttaaaaaggtttctttctgcaaaatttggttggaaactacgagatgaattccggcatttgagaaaactatccattcttcgagaaccttgccataagggtggtctagagttggttcctaaagactatgacatggaattgcaaagaacctttcaaaggttgcaatattattagcatttatcctgtttgtaagcatatagtatgcacttctgccgatggcaggacattgttagagtcatccaaagcggctcttgacaaaggaaaactagaggatgcggttaattatgggacaaaggcattagcaaagatgatagctgtatgtggt

SEQ ID NO: 21592 - DNA, 497 bp, Gossypium hirsutum
  Clone ID: GOSHI-09MAY01-C61109_1
atcgccagctccgtttggggaccagagccattcagaacctgagtcctggaatgcagcccagcactgccaacagggccggtcccaagggggctggggccaccggctggatggcttcccacctgggcggcctctctccagaaaatctgaaccaaatctgccttcctgaccgtcagcatgtggtatatggtccctggaacctaccacagtccggctactcccacctcactcgccagggtgagaccctcaatttcctggagattggatattcccgctgctgccactgccgcagccacacaaaccgcctagagtgtgccaaacttgtggggggggtggcccctggctgccgcggtgaccgggagtatgccgtgaagacccaccaccactcatgttgccgacaccctcccagccctattcgggatgagtgctttgcccgtctggctccgtaccccaactatgaccgggacatcttggccatcgacatcagccgagtcaccccc

SEQ ID NO: 21593 - DNA, 511 bp, Gossypium hirsutum
  Clone ID: GOSHI-09MAY01-C61129_1
ctaatacgtgtcactatagaacaagctggtacacatgagcgtgctggtaccggttctgagtttccgccataccggagcgtgtgtatgcagcctgtgcatttggaccatgcttgatctgatcgcagcagacacccgcttcgccttggtcctgttcctggccttgagtgagcacaatccggctggaaatatcttcatctctcccttcagcatttcatctgcgatggccatggtctttctggggaccagagggaacacggcagcacagctgtccaagacttttcatttcaacacggttgaagagattcattcaagattccagagtctgaacgctgagatcaacaaacctggagcgtcttatattctgaaacttgctaatagattatatggagagaaaacttacaatttcctccctgagttcttggcttcgactcagaaaacatatggtgctgacctggccagtgtggattttcagcatgccactgaagaggcaaggaagaccataaaccagtgg

SEQ ID NO: 21594 - DNA, 676 bp, Gossypium hirsutum
  Clone ID: GOSHI-09MAY01-C61319_1
atttcaactagaaatatacaagaggatgattctggaggctcatctctttatgataataacttacataaggatgccaattcctatcagcctcaaaggcatgcttttgagcatgatgaagccgaagatggttcttcatcggttgctgtgaatatgcagcaacttaatttgcataatgatgaccaggaggcatcatctgaagaggataatccatctgtgatcataccaaaccacctgctagtccacaccccggactgttcacatttgagttttggaagttttggacctgcaattggttctgccttttccggatcatttgcatcaaggcccttgaagaataatttggatgaagctcctgaatcagctgatatctcttctattgggcactccgagaatagaaatcccgagtattatggggacgaacatctcagaagtaatgcagagggaaatataatgattagaagtactgtcaacactggaaattatgaagctactgaagattctcaaccagcagtactgaaacaggatgcttctgaagctgcccaagggaaccaatatgcatttccttcatctgcatctggttatagctatgagaactctcaacagttaaatcctgcttttactcatcctcagacaagcactcaaatgcagaatctcactccgttctcaagcgtaatgc

SEQ ID NO: 21595 - DNA, 630 bp, Gossypium hirsutum
  Clone ID: GOSHI-09MAY01-C62939_1
atgccaaccaggccatagctaagcatttaactcaatttaattctcgccaaaaatagggtcaagtttagtgtaggggatttcaacagtggtgggttgtgagttaaagtggagggtaagcaaagaaatggcttgtcacgctcaatggtcttaactaggggttaatcatggaggtagtctttgcatggcatgagtgggttaatcgtaagtgccttaatcattttgacatatcaaatcaaatggtgtggtctcgacatgcataatcaagcaagttctagaataacagttcaatactgacgcactcaaagcaataataaaagtgagcatgaaaggattaatagatccgccgcgggcgcaaaaatctcacaaaaattatggctttttgatgtttaggctcatgaattccaattcaaagtaatacctagacttggggaaacaatctataattttcaattcttaaaaatcaacttatcatgcttgattctctaatgtcttaaagtttaaacaatcaatgcataaatccttatgttttaattcaagatatatcaatcaaaatcataaatcaattaaaatttatcctaaatatgatatgagagctttttcaagagaacaaggcaatcattcaaggatttt

SEQ ID NO: 21596 - DNA, 453 bp, Gossypium hirsutum
  Clone ID: GOSHI-09MAY01-C62539_1
atgcaaccacatcaagctgtcgggcagcaacccctacaccactgtcaccccgcagatcatcaactccaagtgggagaaggtgcagcagctggtgccaaaacgggaccacgccctcctggaggagcagagcaagcagcagtccaatgagcacctgcgccgccagtttgccagccaggccaacgtcgtgggcccctggatccagaccaagatggaggagatcgggcgcatctccattgagatgaacgggaccctggaggaccagctgagccacctgaagcagtatgaacgcagcatcgtggactacaagcccaacctggacctgctggagcagcagcaccagctcatccaggaggccctcatcttcgacaacaagcacaccaactacaccatggagcacattcgcgtgggctgggagcagctgctcaccaccattgcccgcaccatcaacgaggt

SEQ ID NO: 21597 - DNA, 731 bp, Gossypium hirsutum
  Clone ID: GOSHI-09MAY01-C62359_1
cccaatcttccaaactctatcccaggaatggcaacaccacctaagctatatcattataaacgatttcccctgaaatcaaatattggtaatccctaatcagtcagagatatcaattcttcgattttacctgcgattcttcaattgttttttttacttacaaggaaaagcttcagtgtttcagtttcctgcaaacttacataacccacacagagaagacgatgaaggtggccaaacattcggattctgttttttggtgaatcagtatttaagggttttcgatcctttcatttgtcttcatcgtcgtcaaggttcggcccatgtctttggatgcaacaaaaagatcgaaatagttctgttctgttgtggggttactgagttttgtgttcgtttggagaaatcagattgtgaggaaaaaagaaagaaaagaggttttgggagattggtagaatggggacaagagaagtatatgaggaaaagctaaggaatggaaatttgcaccacgatccaaccatcaaccctggcttaggttccgctcgttgtcctcgttgcctctctctcttaaaccctgattccgacaaagccgaatggacaattacttcagttttggaggatgccactgcagtggctggctctggtatcgggggaatgcttagtgcagtacatggctttaatactgggatccctcgcctttagaatcacatcaagggacctaagtggctcccttttgtact

SEQ ID NO: 21598 - DNA, 534 bp, Gossypium hirsutum
  Clone ID: uC-gsronu33B154g11b2
ccctcgcgtccggtttcttgcaaacttacatatcccacacagagaagacgatgaaggtggccaaacattcggattctgttttttggtgaatcagtatttaagggttttcgatcctttcatttgtcttcatcgtcgtcaaggttcggcccatgtctttggatgcaacaaaaagatcgaaatagttctgttctgttgtggggttactgagttttgtgttcgtttggagaaatcagattgtgagcaaaaaagaaagaaaagaggttttgggagattggtagaatggggacaagagaagtatatgaggaaaagctaaggaatggaaatttgcaccacgatccaaccatcaaccctggcttaggttccgctcgttgtcctcgttgcctctctctcttaaaccctgattgcgacaaagccgaatggacaattaattcagttttggaggatgccactgcagtgggatccctgtccttcagaatcacatcaagggacctaagtggctcccttttgaactgtgattcctctgctgttaatgtt

SEQ ID NO: 21599 - DNA, 914 bp, Gossypium hirsutum
  Clone ID: GOSHI-09MAY01-C62369_1
cggacgcgtgggctttcactgtacagccgatcccacacgcccttctctctctctctctctctctttgtttcttcgtcttttcatgctctcctttctcttctttttcttctttttttttaattttccccttttactttccgtttctctctctttcactgatacaaagtaagattttcctcagcgtctggcatgagctcaacaccgtatttctctccccaattcccctctctcgatgttttcgaaagaaaggaaagtgaagtattaccggtagaggggagtcaccggagctgggagactagaatcgacggtggtatggacttggactttcgccggcagccgcatgcggtggagttcgacgttgatttctggcccgttgaacatcctatggaaccacaagatgaagatcggcctgttaaatgcccaatgtcagctgcttcgtccatcaatgatggaaaagggcatgaagaaatggtagtcggagagagttcgcgtaagagatcagaacaaccacaaacggtgaacggaattggggtggcagcaatgatggagccactggtaagagcggtgcgtaaaaggcaacacacgctcacccgcgacaaccacataacggtggagcctcgtatcggaaaaccgtctctccctccgatcccgactccaactcttaccggttcccaaatgcttcaacaactagacaaagcttaactcatttaccaaaaaaaattacccatcttttttttttcaatgcatttggagagttgagaaaattgaaaattttcccttttatgcaggaaagggaaaatccaagaaaatttgtaacccaggctttcataatctagtgctagcatgttgagatcctttatgtacattattttaaatttgaagttttctttaatgaagaaaatctataatttctt

SEQ ID NO: 21600 - DNA, 385 bp, Gossypium hirsutum
  Clone ID: GOSHI-09MAY01-C62309_1
ttaatattttatttatcaaataatctaaaagattttgaattcttatgctttaggtagataagagttgttttttaattgttttcttaaattatttatgattatattagttgcaataatgaaaaaaataatttcatttatgtactagtaggttaaatggtaaattcttttatatagttgctttggctcgtaagcttacctggttatgtggtaacttgcacagattctagtttttctttttctgggaataggtagatcgttttacattagttaattatgtatgtccctgggtagttttaccttaatgatttggtttattggtattccattacttgaaatcagcttttgagctggttttcttattttcaggtcagcaacacggatcttg

SEQ ID NO: 21601 - DNA, 753 bp, Gossypium hirsutum
  Clone ID: GOSHI-09MAY01-C63909_1
atttcttcattttctctcttcacaaacccttcttcaaagccggaatttctaacctaacacttcaatctttccggccaagatcaaagttggcggagaatggtgttccctgaaaactccaattattggtctcacttcgattatgctaccttgatcgacgatatccctgtccctgatgatccttatgccggttttgcttggtctacgcagccaatcgacgccccttctaatgttgtcagtgtggaaattgatggctcatttggagattcagacggtctcaaggaatctggttcaaagaagagggttaggtccgaatcgtgcagtgcatctagctccaaagcatgtagggagaagttgcgtagagataggctaaatgacaagtacttgcatctcccttcttttgccttttctttgctttgcttttttccccttccaagcgtcaatgtttgcgtaataacaggtttatggagttgggttctattttgcaacctggaaggcctcccaaaactgataagtctgctattttgattgatgctgtccgaatggtgacccagttacgaggtgaagcccagaaattgaaggattcaaatactagtctacaggaaaggattaaagagttgaaggctgaaaagaatgagcttcgtgacgaaaagcaaaggctgaaggcagagaaagaaaggcaggagcagcaactcaaagcaatgaatgcacaacctagcttcatgccacccgcaccatcagcaatccctgctgcat

SEQ ID NO: 21602 - DNA, 471 bp, Gossypium hirsutum
  Clone ID: GOSHI-09MAY01-C63579_1
cccacgcgtccgctttttcttcagccgcacctctattttctccctcaaaaaagcaccagcccaccgcaaggtgcggtgaccgacgccccaagcttcgaagtatggcctattttggcctcagatcccccttctatctccgattacaacgaagtgataggggaccgacggcctagaagcgaggtacggaggaggacgtggaggcacgaggggcgctggggcgtacgagggtcgtgcgtgggagcttacggatgctggaggctgcggcgccaaggtggaaaccctagggtttctatggatagtctgatcttgggccatttggacccaatttattttatttggatattgggttatgggttttaaatgttgggtctagggtcatataaattgggcttgggtagttttgttttttgggctgtttaacattgtaaatggacttgaaatttggctatttggatttgtttcgttcttttt

SEQ ID NO: 21603 - DNA, 692 bp, Gossypium hirsutum
  Clone ID: GOSHI-09MAY01-C63109_1
aaagaatcaacaagcatcaccaataaaccaaaacaccattacattgaagacagggaaacggatcaataaaaaaaaagtgaaaatttttctcccagaaaacatgctcacgagcctgtagtggagctgattccgggataactgaagaaatgggtgttggtagattcagataaagtttcaagatttaacaaaaagacaaagaaaaatcatgctcacatgaaaaaagaaaaaaaactgatcattggcagtgaaatataacttcaaaaatgaaatatttaaagaagattaatggagacaatatgtaatttcttttttatttccccttaaaacaacagggaacaatgaaggggttactcctgattcggctcataataaactcctgagcaaaacccattgaagagaaaagagattttggtttcggtttttcttagcagtgttttttaacaaacaatagaaaaaaaaaacgataggcaaaggaatgaaagagagaaaccggtttatgtaaaggatgctatgttcatgaatattttgagtactgacagagaaagtaacaaataaacggagagtggtaagggagcgcgtgtggcgcgtggaatctcttttttttttcttcttctctctttcaatttcttaaccaaaagcaaacaattgatatccgaaatactacaatcttaacatcgaaaggcagagattcg

SEQ ID NO: 21604 - DNA, 425 bp, Gossypium hirsutum
  unsure (1)..(425): unsure at all n locations
  Clone ID: LIB3196-053-P1-M1-D8
acttcctttctccncnnnaaattaattnctacgtggggaagatattnaacccttactcgctctccatcctatcacacaattccttataactcccacacactcattaatttccctacccccctcctatcactcttttaactttccccatcactattctaacccccctcatatcccttcctnattctcttctacttcttccaaactctccagtctgtgacatggaatgtaaaggaaaaacattcttgaaccctagttgcttgtgaaacatgggattcttcaagtgacagcttgcttttacncnngaagatggagtgttattctgttacatgcttaattcatgtcaaaagtttcataagctaagacattatcaaaggtttaataacatccttttttccttaacgcgtttgttaaagttgttaagaata

SEQ ID NO: 21605 - DNA, 369 bp, Gossypium hirsutum
  unsure (1)..(369): unsure at all n locations
  Clone ID: LIB3196-053-P1-M1-D3
attgctggtgctggtcctcgaagaaaaaagtacggaaattgagagcgtttaaaccttttgaaagcaatgtaacaataattttatagctttaaatgtaataaattgggatctgcattttgtatgtttcttttattccatatttctctaatgattcgtttttattgtgttttataaaactatcagtctgtgacatggaatgtagaggaaaaacattcttgaaccctagttgcttgtgaaacatgggattctgcaagtgacagtttgtttttgctcttgaagttggagtgttattttgttacatggttaattcatgtcaaaagtatcataggctaagacattatcaaagttttaataacantcctttttctt

SEQ ID NO: 21606 - DNA, 1514 bp, Gossypium hirsutum
  Clone ID: GOSHI-09MAY01-C18979_1
ctgagttccaaaagtctgggaagtctttgctccgtgaagaggttactgatcttgatattgctgaaattgttagcaaatggaccggcatacctttatcaaacctccaacaatcagaaagggacaagctagtcttgctggaaaaggaacttcataagagagtaattggtcaagatattgcagtaaaatcggtagccgatgcaatcagacgctcgagggcaggattatctgacccaaatcgtccaatagctagtttcatgttcatgggccccactggtgttggcaaaactgagcttgcaaaggctttagctggtttccttttcaatacagaaaatgctctggtcagaattgatatgagtgtgttcatggaaaagcatgcagtttcacgcttggtaggggcaccaccgggctatgttggttatgaagagggcggacaactcactgaagttgttcgtagaaggccctattctgtagttctttttgatgaaattgagaaagctcatcatgacgtattcaatattttgctacagctattggatgatggaaggataactgactctcagggaaggactgttagttttacaaattgtgtagtaataatgacttcaaatatcggctctcactacattttggaaactctccagtcaacatatgacagcaaggatgctgtttacaatgtgatgaaaaaacaggtggttgagttggcaagacagactttccgcccggagttcatgaaccggattgatgagtatattgttttccagcctcttgactccaaagaaatcagtaaaatagttgagttacagatggtgcggttaaaagatagactgcgacagaagaaaatctatctgcactacacaaaggaagctgttgaacttctggggacactgggatttgaccctaactttggagcaaggccagttaagagggtgatacaacaattagtggagaacgaagttgcaatgggagtgatgagaggagatttcaaggaggaagactcgatcattgttgatgtggagtccttgccgtcggtgaaggaccttcccccccaagataagttatgcattaagaaattggagagcagttctccattagatgttatggttgcaaatgattagcgttgcctttaggaagatgtttatcattcgtacatatacaagcagtttagggttaataatgttatacttgatttgagttcctttccacatttcaagtcaaaaccagatattgtgatgaataggggtactcgaaccctttttatagcattccactttatatatataaaaaacctatagtctcatattattcatgtaattcatttttaaaaaaaaaaaaaactcgagggggccggtccaatcgccctatgtgaggttacatcaattgcggtttacacgggactggaaaacctggtaccactatgcctgagaatcccttcgcactgtaatcaaagcccacgagccttcacgtgcaccgatgcatgatttagtaattggatacggaattgaaccttttccagg

SEQ ID NO: 21607 - DNA, 411 bp, Gossypium hirsutum
  Clone ID: uC-gsronu33B143a08b1
gtagatgcggagtccttgccgtcagtgaagggcggtcttttttaagatatgtggtgcattaagaaattggagagcagttctccattagatgttatggttgcaaatgattagcgctgccttttggagatgtttatcattcgtacatatacaagcagttttaggttaaataatgttatacttgatttgagttcctttccacatttcaaagtcaaaacaaagatattgtgatgaatcaggggtactcgaaccctttttcatagcattccactttatttatatataaaaaaaaccttatagtttctcatatttattttcatgtaaatttcattttttaaattttggatcattttgaagtcttttcgggttcaaaaaaaaaaaaaaacaacatcttaataatacatctacaaaata

SEQ ID NO: 21608 - DNA, 1694 bp, Gossypium hirsutum
  Clone ID: GOSHI-09MAY01-C18899_1
atctcagggttcacagtgaggaaagataagatggggaagaaaggaaaatggttgtcttctttgaagaaagtgttcagcccagattccaaggaaaagaaaaaccagaaatcaaaacaacagttgttggagaagcaggtgcatttgggttccaatgattctggtgcagccactttagaaactgtcaacttgccccctcctccgccagaagaagttaaaccgattgaagcagaaagcaagcagacttaccctgtggcagttgccactgctgctgcttcacctcaggctgccgtagaggttgttcaacgtcagcttaatagagatgctctgttcgctggaaaatctgaggaggaagtggcagcaataaagattcaaacagctttccgagtttacctggctagaagggcattgcatgctttaaaaggattggtcaggctgaaatcattgatggaagggcctgtggtcaagaggcaagcagtgagtactcttcggtgcatgcaaacgctttctcgtctgcgagtgtcaggttcgaattaggagaaccaggatgactgaagaaaatcaggctcttcagaggcaactcttgcagaaacatgcaaaagagattgtgaacttgcagatgggggaagactgggatgacagcctgcagtcaaaggaacaaatcgaggcatgcttacttagcaagcacaaggcagctatgagaagagaaagggccatggcatattcatttactcatcagcaaacctggaagcatacttcaagatctatgaatccgttattcatggatccaaacaatccctcatggggatggagttggttggaacgatggatggcagcaccaccacaggagggtcgtggtacaacagaaaaggaacagaacgaccagtcatccataaggagtgcacgcagcaactttggaggagaaatcagcaaagcttatgctcgctaccaactcaatttggataagcaatccccaaagactggccaaaagccaaaccaaacttcaagtctcctatccgtttcaactcctaagacatcagcttcaatacccgcccgaaagctgaagtccgcaagccctagaagcagtgtggtcggtccacatgatgacggaagaagcatggtgagcattcagtcagaaagaaaccgtaggcatagcattgcaggctcctcagtgcatgacagtgagggcctaggaagctctccatcgcttccaagttacatggtaccgactgaatccacaagagctaagaccaagttgcaaagtccgttgggactagaagccaatggaacacctgagaagggaccaattgcgtctgccaagaaacgcctttcttatccaccttcaccagctaggccaaggcagcacttactaatacagaagttggtgtcatgaatggaaagggcagttagtcattttatgtcataaaaaatataatatcaaagaatgcaagcatctgtacgtgggtatggagaagtccaaaaggagcaaaaacaaaaggggggttggtgaggggaaggaagcaaggaggaactatagaaattgatttctatagcttttgattcattaatgcctgagtggtttttgtgggggtataattgtttgctgggatgcactgttatctaacagatccttttcaattcatacatctttgggttttttttgtttttttgatagattgatatttgtgattgagagc

SEQ ID NO: 21609 - DNA, 646 bp, Gossypium hirsutum
  unsure (1)..(646): unsure at all n locations
  Clone ID: AW187221.1
caaattttacacgctgctgtttcatttcctttcttcccctctttctcagtatcccattccttttcacaaggaactgatatcagtcgactgatatcactggtgtcaagaagatctcaatagtttcaatacccacccaaaagttgaagtctgcaagccctagaagcagtgtggtcggtccaaatgatgacgaaagaagcatggtgagcattcagtcagaaagaaacagtaggtatagcattgcaggctcctcagtgcataacaatgagggccaaggaagctctctatcgcttccaagttacatggtacggactgaagccacaagagttaagaccaagttgtaaagtccgttgggattagaagccaatagaacacctgagaagggaccaattgcgtctacaaataaacgcctttcttatccaccttcaccanctaggccaaggcaacacttactaatacaaaagttggtgccatgaatggaaagggcagttagtcattttatgtcataaaaaatataatattaaagaatgcaagcatctctacgtgggtatagagaagtccaaaatgagcaaaaacaaaaagggaggtggncaaggaaaactatantcatttgatttctanagtttttaattcattaatgcctgagtgc

SEQ ID NO: 21610 - DNA, 360 bp, Gossypium hirsutum
  Clone ID: LIB3196-055-P1-M1-A10
ctgtaagacattttccatcggctctttatccaggcaaatattacacgctgctgtctcatcaccttgcttgccgtctttctcagtatcccatgcctcttgacagggaactgatatcagccgactgatgtcactggtgtcaagaggcaaggcttcccttgccttagaggagctgaatggtttcagtacccccccaaacggggaagtctgaaagccctataagcagggtggtcggtccaaatgatgacgaaagaagcacggtgagcattcagccagaaagaaacagtaggtatagcattgcaggctcctcagcgcataacaatgagggccaaggaagctctctatcgctgccaagttacatgg

SEQ ID NO: 21611 - DNA, 721 bp, Gossypium hirsutum
  Clone ID: GOSHI-09MAY01-C18519_1
aggaagcaaaaagagacaaagaaggggggaaagcccagtcttttgaagcaaaaacagggcaaaggaacagagtgaagagaaagggaagggaaaaatatgggaattttgagggaagatgttgtagtgataagtccagcagagaaagctggggatcccactgtgatatcggtgaattgccctgataagactggattaggctgtgatttgtgtaggattgttttgcactttgggttaagcattgctagaggagatttctcaacagatggaaaatggtgctacatagtgctttgggtggatgggaaaacaaacacaaggtgggatttgcttgaaaaaagctattggaagtttgtccttcgtatttttcgacatctgggatagactattaccggcctgcaaatcagcaaccaaagcgactggatgtatatcttctgaagttttggtgttcttgtgttaggaaagaactgttacatgacataactctggtcctttttgacctggagcttacaataaagagagtgaaggtatccactactccagatggaaaagtgatggacctctttttcatcactgataccagggaacttcttcatacaaaaggaaccgcaggggggaaccattcttcacttggaaaccgcacttaggtgatatattggaaaggtgggaaaatgaattaacttgccaaggaattactggttggtcacaaagaacatcggttctttct

SEQ ID NO: 21612 - DNA, 542 bp, Gossypium hirsutum
  Clone ID: GOSHI-09MAY01-C18499_1
attggaaatggatggaaaacaaatcccagataatgaaaacgttgaaaaaaatgaattagagcaattattaccatctccagaggagttggcatatcaaattgaagcagaactctttaaattatttggaggtgtgaataaaaagtataaggagaagggtaggtctctattgtttaatttaaaggatcgtaacaaccctgaactcagggaaagagttgtgtctggcgaaattcccccagagcgattatgttcaatgagtgctgaggagctggcttctaaagagctttcacagtggcgacaagccaaagctgaagagcttgctcaaatggtaattttgccctgtggtagaagttgatattaggcggcctggtgaggaaaacacataagggtgaatttcaagtagaggttgaacaaactgacagttcttcagtggaagtttctgctggaacttcagttactcggcgacctaaaactgatgcaaaacaagctcctaggaataataaaactgttgcaaaggaacatgaatcaaatgccgtaggtgaaaa

SEQ ID NO: 21613 - DNA, 428 bp, Gossypium hirsutum
  Clone ID: GOSHI-09MAY01-C18469_1
gatggcatcaaagcaatcatattggaggacttaaagaatgcaaagtcgattgtgaactggatagcttgggcagaaccacaatatgactttaatccaatgatagatgaatggtgcaaagaagcccctaaagagcttgattttgatcatgaagctgagaatactagaactgtggctgcaaatcttggctgcaaaaagtcacctggtgagagctactcttccaaccgcgtgaatgttttgattccagaagttattcagtcaaccaaaagtgtcctcatcttagagtacatggatggaattcgtctgaatgacactgcatctttggaagcttttggtattgacaaacaaaagatagttgaagaaataactcgtgcatatgcccaccaaatatatgttgatggattttttaatggtgatccccatcctggaaa

SEQ ID NO: 21614 - DNA, 627 bp, Gossypium hirsutum
  Clone ID: GOSHI-09MAY01-C18439_1
caaaacgaaccaaagcgataaaaaacaaaaaggaaaatcttcctcttgttttgcttgaatggagatttgagccctgaaagtactgcatttgtgagctttctcctgaacttcgcgaaatgggaaaatcaccgggaaaatggattaaggctgtgctttttggaaagaagtcttccaaatctggttatcataaaggaagggagaatgttgccaatgtaaacgaggtgttggtttcagccagggcatcagaagctgaagtccctgtggctcctcccttcccttcacagcttaatcaatatgctaatgagagaaatgagagagatgaagggaaattagaactggaaaacaaggaggctgcaaatatctataacgatgacaggatatcactaccagtgagtcaaggcataggttctcacgaatccactcttcaagatttccaaaatgatcctgcaagtatgaagctaaagcaagcagcacccatcgttcacgctgcttttaggggttacctatctcgaacagcattcatggccctcaatagcattataacgctgcacgcacttattcgaggacacttggttagaagacaagctattgctactgtgtgctgtgagaaagggattgccaagctac

SEQ ID NO: 21615 - DNA, 331 bp, Gossypium hirsutum
  Clone ID: LIB3197-057-Q1-M1-C5
atacaagatcgtagcctcagcgaatcacaaaaacagctaggacaatctttctttcgctgtgcgtgcatgtgcacacgtgctctgaaagtactgcatgtgtgacgtatttgcagaatgttctgcccttcgcgatatgggaaaatcaccgggaaaatggattaaggctgtgctttttggaaagaaatcttccaaaactggttatcataaatgaacggagaatgttgccaacgtgaatgaggtgctggtttcatgccaggcatcagacgctgaagtccgtgtggctcctcctttcacttcacagcttaatcaatatgcttatgagagaattgag

SEQ ID NO: 21616 - DNA, 617 bp, Gossypium hirsutum
  Clone ID: GOSHI-09MAY01-C18779_1
ggggagaaccaaaatcatcaccaaaaacaagaagaagaagcacagcatagacaacatcaagatcagaatcatgaagaaaaagatcaacaaccacagaaacatgcagcacaagtggaagaacctgagcagaaaagccccacagtttcactatctccattaacccaaaaaaccactcagtcaccaccatcttattattcccctattgattctccgctctcatcttgtaattcttctctcagtcatggcttttctccaccaccaacaacgacaacggcagcagtatctcatccttctgaacccaactccaagccaccatctgcagtggtttccagggcggagctcacatctagagatcaatcaaccacaacaactactaccgttgaacttgaagaacagacacaaaaactgggttctggtagtggtaaaagattgaggcctgatttatctatattaagaagaaccaaaagagataagatgattaaaaaggctttattgggatttagaatttctgggtttgttttttgtttggtttctttctctgttttagctgctgataaaaatcaaggttgggctcttgattctttctaccgctacaaggaattcaggttttgtatggc

SEQ ID NO: 21617 - DNA, 371 bp, Gossypium hirsutum
  Clone ID: GOSHI-09MAY01-C18769_1
gcaaaacccagggatatgaataatataaccatacttgaaactgggttcaaaccatagtaatatgagtaatctttgtcaaagattggccagaaacctacaactctcatatcatacattattatgattcagaaaacgagtactttaccatcctcaaaatgatatgagcaccaactaaacaaaagtttcactaacttttaccaaacaaataatccgggaagaatactatgagaaatacatgaacaaacaacttcgaagctattctttctccatggttgatggctcaagcctacccttcaagcagcaacctgaccaaagagccacttgcggatctctggaagttttttattgaatgcaacattcaatcgtgcatc

SEQ ID NO: 21618 - DNA, 231 bp, Gossypium hirsutum
  Clone ID: GOSHI-09MAY01-C18709_1
gtttttgcttacttgctctcatgatttataaaggtgttgatagaaaagatgtttatgcaaacaaatgtatgtaaagaagatgaacattaaagcccaaaacttcattcatatcttaagcttgtttctgagtctataattagtgaacacttctgtattacaacttatatatatatatatttgttcaattctggtcgaaaaaaaaaaacgtgccgtttattctttaaaaataaa

SEQ ID NO: 21619 - DNA, 700 bp, Gossypium hirsutum
  Clone ID: GOSHI-09MAY01-C18739_1
gctgtgctaattcccatctgatattattcatatatgatataattacaaacataaggaaaaagaattaacaaatcgtattgtagttttaaatgtttatgtacgaacttcaactcctttacttctatttctacctttagttttaccatgaaacaaaggagaggaaaaaacaatgtgaaaaatctaaaaaaagcatactctcaaaagtcagcaaaggaaaccaacaaaagggtcaatgttgaacttgaacatcatctttttttcttgtgactcgaatgtaagcaaaaactgctgcgaaaaaaacggtgacaagtccaccaatgatgacaccaccagcagccatggagccatcatctgatgatgaatcatgctttcctagccggctgatccctggtgcttcagcctctctggtctctcgagacgactccgcaggacttggaacaggcacatctgcttctcttggaatcgcccaaccaggccggtcctccttatggaccttaatctcaggtggtttcacattcaccccaaaatcagattcctcacccactgcatggaccagcaatacctccacaagaaggagcaaagaaaacaaaacaagcttacccacagccatatgatatttaagccaaaacaagagaatattgtagcgttggagctgaatactgtgtttggactctccttattcctaggaggcaacacaggt

SEQ ID NO: 21620 - DNA, 608 bp, Gossypium hirsutum
  Clone ID: GOSHI-09MAY01-C18679_2
cccacgcgtccgcccacgcgtccgcccacgcgtccgcccacgcgtccgctcattctctgtatcatctatcatttccttatttctactgtttcctcgctttccggcttcacatccttctcaggtgaacggagatggcaggaaaaggtggaaaggggcttttggcggcaaaaacaaccgccgctaacaaggacaaggacaaagataaggacaagaagcgcccggtttctcgttcatctcgtgccggaattcagttcccagtgggccgaatccaccgtcacctaaagactaggacttccgcaaatgggagagttggtgccacagctgctgtttacttggcctccatccttgagtacctaactgcagaggttcttgaattggctgggaatgcaagcaaggatctgaaagtgaagagaatcaccccgagacatctgcagcttgctattaggggtgatgaagagcttgacactcttatcaagggtaccatttaatatgtcatatctgctctgcaactcagtatatatgttgtaactctcttaggagcttgggatctttgtttgttggatcgtttttaaccttggtttccctatatattgtatcctattctagct

SEQ ID NO: 21621 - DNA, 711 bp, Gossypium hirsutum
  Clone ID: GOSHI-09MAY01-C18679_1
ccctcgcttagtccgtaactcattctctgtatcctattctttcttgttttcagtttcttcactcactggcccaagtctctcaggtgaacggagatggcaggaaaaggtggaaaggggcttttggcggcgaaaacaaccgcagctaacaaggacaaggacaaggataaggacaagaagcgtccggtttctcgttcatctcgtgccggaattcagttcccagtgggtcgtatccaccgtcatctcaagtctagggcatctgcaaatgggagagttggggccacagccgccgtttacttggcctctattcttgaatacctgacagctgaggttcttgagttggctggaaacgcaagcaaggatctgaaagtgaaaagaatcaccccaaggcatctgcagctggctattaggggggatgaagagcttgataccctcatcaagggtaccattgctggaggtggtgtcatccctcacattcacaagtcccttatcaacaaaactaccaaggagtagtagcaatgtctgattttaaactagatattgactgttgtgtactttttatctgttatgtcagtgtgttatttgtaggctttgttttatctgtctagaacatctggtcattatataagtgtagtaacattctaggttcttgcctttgaacttatgatctttgtttagggtagggatgatgatgatgttttgttggatactttt

SEQ ID NO: 21622 - DNA, 488 bp, Gossypium hirsutum
  Clone ID: GOSHI-09MAY01-C18619_1
tgttcgtttgggagatctcttccttctcacccatatcagatattttctctaccacctcttacagtttttccccagcgaaaaccactcaaatctcaaaccaattttctttttcttttttcattattttatatgcactaatattgttttttagtgagttaaatcttagattaaatcagcaaaattttagcatctgataaacaaagcccagagaagaacagattttctgattattagttaaacagtaatcgacagtgagaggcagagacgactaatcatactggtgtaaatttccaatccttttaagagagaaagagagagagatgaaatatagtttctcttggtgattcaatactttttgtgttcttcaattgatatcacttacatatttgtgggaatccgtgggctgaaccggctggggatgttgaattatgaaatattgattcttgattggtagaggttgcagagtggaagctcacgttttggggggg

SEQ ID NO: 21623 - DNA, 962 bp, Gossypium hirsutum
  Clone ID: GOSHI-09MAY01-C18199_1
agtgggttctggcgcctcttcgtaaacgaaccataagcgccatatccaatacggcacgatggaaccccagtttgcacattcccagaaccagtgaaatccagggactgttccacttggtttacgtcacttggttgtggtttcgggccgattacattgcaccattaatccaagccttgtctaaattctgtgtagctctattccttatccaatctgcagaccgtatggtactttgcttaggctgcttttggattaaatacaagaagattaagccgagaattgaggggaatccattcaagtcaaatgatgtcgagggatctggttacgactaccccatggttcttgttcaaatcccaatgtgtaacgagagggaggtatatgagcagtctatctctgctgtctgccaacttgattggccaaaggaccgattattgattcaggttctggatgattcccatgatgaaagcatccagtgtttaattaaagcagaggttgctacatcgaaccaaaggggtatcaacataatttatagacatcggttaataagaactggttacaaggctgggaatcttaagtctgcaatgagctgcgagtatgtacaggcctatgagtttgtagcaatattcgatgctgatttccaacctaaccctgattttctaaagcaaacagttccacatttcaaggacaaccccgagttagggtgagttcaggctagatgggcttttgtgaacaaggatgagaatttgttgatacgactacagaacattaatttgtgtttcacttttgaagttgagcagcagttatggtgtgtttttaaattctttggattaatggacgctggtgtttggagaattaagctttgaggaactggagctgcttgaaagacaaccgtgagattggactagccattctgcactctcatggttgaaatcatctcctaagattaaagtccctattactttcat

SEQ ID NO: 21624 - DNA, 723 bp, Gossypium hirsutum
  Clone ID: GOSHI-09MAY01-C18049_1
ctaaactccattccccttaacctcactaaaaccctaaaccctttgaagcaaacctccccccatggcttcaatcaacttcaatcccttcgaaagttggttcaggaaacctcaaaacccaatccaacccatcaaccttctctcactcgctcactcattccgctccaaaacattctcttcctctcccaatttcgcttctataaacttctccagccccttcaacaaaaaacccaagaaacccgactcggattccgatacacccggaccgtacaagcagatgctggaccagttcttttgggaatgcgagaacctccctgattacaggcacactccggaggtcgaaaagattttggatgaggaccccgttttcgagaagaaagagaatccaacagaagaggacattaaagagaatgaagaatggtggcgtgatttcagggcaagtcccgtggttcagtttttggctagagctgaggaaattgctgacgagatcaatagaacggagcttaaagaaaatgaagagccgttcaggaaggaagataagaaactgtggcaagcgcttccacatgtgattgggttggatgggaggcctatgcctagaaaagctatcaagaccagagaagagagcgatgataagttttgggatttcacgaaacagttcttttttgggctttgggggttccgccagagaccttatccacctggtaaacccattgatgttgctcaagc

SEQ ID NO: 21625 - DNA, 737 bp, Gossypium hirsutum
  Clone ID: GOSHI-09MAY01-C118051_1
ccaaggcctaaacccttctcccacagaaaacgaccgccaaaagagagataaaaaaaggaaaaagcttttgttctctattaaaatctcttcatagctcacagtcttccattcccagattttagtggaagctgagagctgagatttttatgtgtgaaaaaactctaggcatggagagagtgtggtgtaaagtgggaaagtaaagtataaagggagaatctttactgtcttatggcatgccagagttacaaggagcattgcattgaacgaatttcttcaatttgcgatttcctttttgcctttcccttctgaggatcgagtcttaaagttggatcatttgattcttcttggaaagaaataataatagggccatgaaaagtttcggggtgcatctattcttcctgctctttcttgctgcgatcgcatctgtgaccgtgcaagcattcacgggaacgtatggcattaattatggaaggattgcaaataacatactttcacctgatgacgttgtgacacttcttagggcggcgaaaataaacaatgttcgaatttatgattctgatcagagtgtccttaaagcatttagtgggacagggctggaacttgcggttggactcccaaacgaaaatctgagagatgtgagtgccaatgcagatcatgctatgaattgtgtgaaggacaatgtattggcatatctttcccgatcacatattcgtgggatcgctataggggatgaagtc

SEQ ID NO: 21626 - DNA, 1596 bp, Gossypium hirsutum
  Clone ID: GOSHI-09MAY01-C18319_1
cggacgcgctaatttttcacttcactcccacactgcttcaacaatggcgacgcccacatttcgccggctagaccttacccttttaaccctttctttactcgccgtcgccgtcaatgctcacaacatcaccgccatactcgaaggtttccctgattactccgtttacaacgatttcctcactaaaaccaagctcgccgatgagatcaatactcgacaaaccatcacttgccttgttcttaataatggagctatgtctgctctcactgctaaacacccactttccgtcgttaaaaacatccttagccttcatgttcttttagattattatgacccacaaaaactccataaaatttccgatggtactacacttactactactctttaccaaaccaccggaaatgctcccggaaatttgggtttcgttaatatcaccgatctacaaggtgggaaagtcgggtttgggtcagccgttcctgggtctaaacttgattcgtcttatactaagtctgttaaacaggtaccgtataatatttctatactggagatcagtgcgccgattattgctcccggtgttttatcagctcctgcaccgtcggcttccggtgttaacattaccggcttacttgagaaagctggttgtaagacgtttgctaatttgcttaccagtagtggtgtgttgaagacttatgaagcggcgcttgataaagggttgactatttttgcgccgtccgatgaagcttttaaagccgacggtgtacctgatctgagtaagttgaccaatgccgatcaagtttcgctgttagaataccatgcctcgccggattataaaccaaaggggactttaaagacgacgaaagatccgattactacattggctactagaggtgccgggaagttcgatttgacggtcaccgccgccggtgattccgtcacgcttcatactggaatcagtccatctagagtcgctgaagcagtttttgactccccaccggtcgtgatattcaccgtcgacaatattttgttaccctctgagttgttcggaaagtcaccgtcgccagcacctgctcctgaaccagtttcttcaccttcaccgacaccttctccattatccgaagcaccatcgccattagccgcttcacccccagctccaccaaccgacactcccgccggatctccagctgattcgccggctggttcgtcggagaacagcacctccgataatgctgccggtcacgtgagtcccactgttatattcactgtgttggccattgtcggttattcactatgttaatttgttcttttttgggtttgctattttgcttattttcattacagtttgcttcttcttcttttttaaatgtatttgggtttcaatttatgggataaacggtgatagctcgacggcgccgcctccggcgaccatatgggtctgaagaagaatactggaaccttgttatttttttctcttttatttttgtttaattacattttcttagtgttcgtttatttatttatttttgatgttaaggatttttgaatctttatttataaattttgtaacgctttatttttatttaaattggatccagttttgtt

SEQ ID NO: 21627 - DNA, 384 bp, Gossypium hirsutum
  Clone ID: LIB3149-035-Q1-K1-H7
tctctttctaaaatgcgtacgtactcttatgtactactgtaagcttgactgcaatcgccttttaaagatgttgactgatttatttatttcatttctgggtttgactattttgcttattatctttaaagtttctttttttttaaatgtatatgggtttcaatttatgggataaacggtgatagctcgacggcgccttctcctgcgaccatatgggtctgaagaggggtgctggaaccttgatatttttttctctcttattcctgcctaattacattttcttagtgtgcgcccatttatatatttttgatgttaaggattttaggatctttatttataaacttttttaacgctatatttttattttaaaaagaatatcctcttttt

SEQ ID NO: 21628 - DNA, 585 bp, Gossypium hirsutum
  Clone ID: GOSHI-09MAY01-C18309_2
ttcggttctccctctcatttctccctcttttatcttccttttagattcttgaattatcccccgatttttatccgattccatcccatcgccgatctatcctctttacattttcatctacccaacgattttttcctgatctaaaaacctttgcttcggagaaaactacgccgaggaacagcatagcaaaatcggcggttgtcggttcgggaggaaggcaaaaagaatgtcggccgaacagaaagaacaagaacctaaccctaaccctaatggttgcagcaacggcaatgaaaatttgaacactgaaagtgaacatgaagaaagacaagaagacagacaagaacacgaacaggaacgagaacagccgccacgtcagtcttcgacaagaactcctttcactaatctcagtcaggttgatgctgacctggctcttgctcgaaccctacaagaacaggaaaggggcgtatatgatgcttaggatgaataatgatggtgggagtgattatggaagttgggaggctgggagctatgtgcatgatgatgacgatgatgatgattttggggattcccaggttcatgatattactg

SEQ ID NO: 21629 - DNA, 799 bp, Gossypium hirsutum
  Clone ID: GOSHI-09MAY01-C18309_1
gctctctccaatcattcggttctccctctcatttctccctcttttatcttccttttagattcttgaattatcccccgatttttatccgattccatcccatcgccgatctctcctctttacattttcatctacccgacgattttttcctgatctgaaaacctttgcttcggagaaaactacgccgaggaacagcatagcgaaatcggcggttgtcggttagggaggaaggcaaaaagaatgtcggccgaacagaaagaacaagaacctaaccctaaccctaaccctaatggtaacggcaacggcaatgaaaatttgaacactgaaagtgaacatgaagaaagacaagaagacaggcaagaacatgaacaggaacaggaacaggaacaggaacgagagcagccgccacgtcagtcttcgacaagaactcctttcactaatctcagtcaggttgatgctgacctggctcttgctcgaaccctacaagaacaggaaagggcgtatatgatgcttaggatgaataatgatggtgggagtgattacgggagttgggaggctgggagctatttgcatgatgatgacgatgatgatgattttgggagatccccatgatcatgatattactgacggcgatgatgaggatgaggatgatggtgagcaggaggatgaagatgaagaggaatatgatgggactgatgccgatgatgatgaggatgcgtttgatgtgcatgcacatgctgaggatggtgatgaggataacaaccctagtgctgaactcgacccactgctttttcgagtgatg

SEQ ID NO: 21630 - DNA, 489 bp, Gossypium hirsutum
  Clone ID: GOSHI-09MAY01-C18259_1
taacctaaagatactagcacatcaaacatgaaagaaagcgaaactgtggaaagcgattcggtcaggtttttcagcatctagagtttctgtcaatgttggagaagagtgctcgaaagctcgcggaggttggaggtcattggagcatcatcacactatcctctagctcattttgggtatatatagtaaaatcattttggtctaatgccatgtataggctagcttggccatagatggcttaaatatgtggtttgtaatctagccattggaatggctagtaatggttgtttttgatatacttgtaatgtcatactatggtggctaccttcaagttaaaagatgtgccaaattatgcctatcatatggaatataccaaggtcagattctaaacatgtatgcatgtaatgatatgccatgttgaatgatagagcttgcttaatttgaatgcttgaaatgggtggtatgtagattgaggttaagtgcagatcattg

SEQ ID NO: 21631 - DNA, 881 bp, Gossypium hirsutum
  Clone ID: GOSHI-09MAY01-C18249_1
caccagtaaggagtggatcagggccgtccatttctactctgccgttttccaagatctgatatccgagggtttgctctcgcctcactccaagtctctctgcgtggagactcccttgggacaggaagtgttcgcgttgaaagagatcggcgtggagaactccatcggtattttcaagaaagcggccaagcctttggtggttaaaggtgaggggcatcagataccgttcgatgataattcttttgacttcatattctccggcggagctcgcctcgacacatctgctcgcccggcggatttcgcgtcggaaatagctcggaccctgaaacccgaagggtttgtggtggtccacgtcaaggctaatgatacatacagtttcaactcattacttgatttgttcagttctttcaatttagttaaaacgatcgacatggctggtttcgattcatcaatgccttatattagagagattgtgttgagaaaagatactgtaattcgtaaccatgggggtagaaagattcccgatggtgtttccggtaataagtgctcggttccggggcacaaacgggaattggtccaaaaagcagagccgcttattgaggaagagccattgaagccatggattaccttgaaaaggaatattaacaacgtgaagtatttgccatcaatggttgatataagtttcaagaaccgatacgtgtatgttgatgttggggctaggagttacggttctagtattggaagctggttcaggaaacagtaccccaaacagaacaagacctttcatgtatatgccatcgaggccgacaagactttccatcagcagtatgaatcgaagaagaagacggtcacgctgttgccgtatgcagcatgggttaagaacg

SEQ ID NO: 21632 - DNA, 684 bp, Gossypium hirsutum
  Clone ID: GOSHI-09MAY01-C18269_1
acggaaattaagagtagcattgcagtttcctcaatattgtgttggcaacatcgccaaactttttcgtttactttcatcttcggtccctccgaagatctttaccaaacacaaaaaaaaaccctgaaattgaacttttgttttagctcaagttttgcatgaacttatcgatacttatctgaaatctgctttacttggattttattctttttcattctttaggcaaacgcagatgccaaaatttttcctttctgctgttttaaagagtgtttattggttacttcattttaattttttggtattgttgagtgtaaatggccaatgcatctgggtttttcacgccttcagttccaaggctgaggagcaagattcagccttcaataggcgtttctcgatctgggttttgcttctctgctggaatctcgaggagggtagtgtgctcaagtgccattgaaggtgcagagaagcatgtttccccttctgaatctcgaatgcccaagcttgtcagtaaaggctgtaagttagttggctgcgggtcagcagtgccatctctttcagtttccaatgatgatctttcgaaaatagttgatacatctgatgaatggatctctgtccgcactggaatacgaaatcgacgggtaatgtcaggaaaggaaagtttgaaaaagctagcagttgaagcggcac

SEQ ID NO: 21633 - DNA, 443 bp, Gossypium hirsutum
  Clone ID: GOSHI-09MAY01-C19959_1
tcgcgttttttttttttttttttttttccactcaacattatatattatagagatttcaagacacttgagatgagacagagccatagccatagccacatccggctcccatatggctctgcctctgtgcgaggcacgggagataacatactttgcaaaccgaaatcatcttcttcagcttcacattcactatcaaatttaacaataaatctactacctcaacaaccaataccagcaacagcaatcacaattttcacaacagctcaaactataggacaatagattagaagcaaaaaattaaaaagaaaaaggatagtattctttgctaacctgctcagccaaaatcttgaaactcctcctattgggagaatatgagagatagcaaagcttcttcaaatttgaaaaaacagcatggccccctatccttaaataagcttctaaccacc

SEQ ID NO: 21634 - DNA, 864 bp, Gossypium hirsutum
  Clone ID: GOSHI-09MAY01-C19939_1
gttttggtttttgtttttttttagtaaacgaattatatgagtctgattaccattggttgtgatgtcccccaaaggcccaatttctctccagcaaaaaagttacccacaggacataagtaaaagaaaaacaacaacaaaaatgaacttccacttctaccccaaaaaagacctctgcaatagcatcagccccaatttattacacccaaaatttagagtaaaaagaaagaaaccataaaacatttctggtaaaaccttttacctttcttcaattttccaacagaagaccactggtaaaactggaacctctgcaaaaaatatatagtcatgacctactaatctctgttcatatctcattaataaatattcccttatctctcctcctcctcctaggttgccgacctttgttttggaatgtactttgttttagcacccctttcaggcttctttctgtacttggctattgcagcccaacagtagaagcctcacaggcccctgccttgaccatccacttctctgatgaatcaatttcaacccctgagcaccctggaggcttagggttcgaggagagaaccaatgtcacatgttctcctgcaacagcctccttccacctctcagcaagaaaagccttggcagcattgccgtcaaactgcaagccacctggttgcacgctttccttgagtgttgaagaaagattcattcttactacaccatcgctaccatctactgcagatgaccttcgatagctttcattggatgaaatctggactccatcattttcagcaatcacttcaacttctttaataccattttggactggcagtgaatttttcgttcttgtcgactcactggcctccaaaatttaat

SEQ ID NO: 21635 - DNA, 620 bp, Gossypium hirsutum
  Clone ID: GOSHI-09MAY01-C19849_1
cttgcagccgcatctccttcgctgcagaaacctatcttctgtctatcttcctatcaagcccacaaacagtccaaaggagaagacacctaaaaaatcattgtccagaaaacatggcattggaaaagatagggaggttaaagatgtgggggtatcaaatggacaagaaaatacacatacatttcggagaatggctgatgtgctcttaagcagttctagttgcgagcagccagcatccacagctagtatggaagacaacctggtcacgaagagggtagatcctactagctgtgctgttgaaatgttgaactctattagtgattccaaagaaatgtccactgattctgaagtaagtgttagcaatgtcgacaaacaggctgagtctaacagcattcctcaaaaggatgctcatgtggtgtcaacttcagagatggcatttgattctcatcatgatgaccaagaagagcccacttctgagcccagtcgaaaactaccagaagctgatatgatgactgtaagtaaaaaagatgcggagacactttgtgacatgcaggttcttgaagctgcaaaagatgtgctcggccgttctggaacagagattcctaattccatttcacttagct

SEQ ID NO: 21636 - DNA, 529 bp, Gossypium hirsutum
  Clone ID: GOSHI-09MAY01-C19589_1
agaaaagaaaactttttattttcgttttttctctgcgagaagagaaatacgttggagggtggcatatcccatataacctggaactcaagcgatggaagggatggagcagtggaagggtcaattagagcagttgaagattcaattggagccatggaagattcaactggagcagtggttgcatcaagcaattgaatatttgcatcaaatacccccaattcaactctatgctgctattgctgtcttgttcatatctaccctcttgcttttctccatccgcttgttcaagcgcactaaatcaaataccatagtactcacaggccttactgggagcggtaaaacaggtcttttctatgtgcttcgtgatggttcctcacatcagggtactgtcacatccatggaaccaaatgagggcactgtcgtgctaaactccgaaagtgataagaagggcaaaattaagccgggtcatcttgttgatgttcctggtcattctcgtcttcgggccaaactggacgaattgttgcctcaagca

SEQ ID NO: 21637 - DNA, 549 bp, Gossypium hirsutum
  Clone ID: AW187130.1
ggcagtagtattttccttagttttcatatttcttcttgtttatgcatttaagaatttgaaatgtcattcttttatagtagcaaaagtgattaaacccctttctatgtatttattttttaaaagatgtatggatttttctaaattttatttcatgtgtgaattgttagatttttgaagttaataattgattatttatctaacaaatggttgttggatttggtcagttgctcaatgcataagcatttagattatcatcttgataaaaacctatttagactgatataaatatacaagatatattaccttgaagtttcttatcatgcttttaatttaatgaattcccatttagcattctatgagatttcctttttaggcaatattatgatataatcagtttcccatttggagttgagttatatttacttaccttttcctcactctttgttttgcagtccgcttgaactcctcactctttgttttgcagtctgcttgttcaagcgcactaaatcaaataccatagtactcacaggccttactgggagcggtaat

SEQ ID NO: 21638 - DNA, 1277 bp, Gossypium hirsutum
  Clone ID: GOSHI-09MAY01-C19559_1
gagcctggtgccttggttgaccctgaaggaaagggtctcagatcattgtcgagagcccagctggatgagattcttggaccagctgagtgcactatagtttcttcactatcaaactatcatttggactcctatgtcctttctgagtctagcctctttgtttatccatacaagatcatcatcaaaacctgcgggacaacaaagctacttctttcgatcccacccatcctgaagttggcgggtagcctttctcttaccgtaaaatctgttcggtacactcgtgggagttttatcttccctgctgctcagccatatcctcatcgttacttcactgaagaagttgttattcttgatagctattttggcaagcttggcgctggtagcaaagcttacgaaatgggtgggctggataaagagcaatggcatgtttactctgcttctgctgaatctgttaacaccaaagcccctacttacactttagagatgtgcatgactggtttggacactgaaaaggctacagttttttacaaagacgaatcgacctcggcagcttcgatgaccatgaagtctggcataaggaacatacttccaaactctgagatatgcgattttgagttcgaaccttgtggttattctatgaattcaatcgaaaccgatgctatttcgaccattcatgttacacccgaagacggttttagttatgcaagcttcgaagctgtgggctatgatctgaaagagttgaatctggagcagttggtgcaaagggttttagtttgcttcaaaccaagtaatttctctgttgccgtgcatgtggatgttgattgtcactcatttgaacagacctgtctgctggctgttgaaggataccattgccgggagagtagcatcgaagagcttggttcaggcggttccatcatttaccagagcttcaacggcattgggggatgtggatcacctagatcaactctgagttgcctctgggaagaggaggaagagtattattataattaaaacggcttattttcttatgttataactattaaataaattgctacccaggcattgcctggtgataaagcatggtgtgtgtttctattctagtactttttttgtcttttatcaagtcaattgctatgccagcaaacctgaacttgttactgccatttgtacggcagaatgtggagcttctccatttttttattattatattacatgaaataatatgcggcctctattatacctataaattgttggttctttttgctgtcatatatatattt

SEQ ID NO: 21639 - DNA, 811 bp, Gossypium hirsutum
  Clone ID: GOSHI-09MAY01-C19569_2
gaaaaaaaatgtggatcttgcttctggtgacatgccttaattggatggcatggtttcccctcgcgtccgcccacgcggccgggatgggggcggaagtatacggagggaaagtgaaggggagtgcaagccaacaaaaattgtacgacgagggagtgcgtgcgggtgcgttgggtctaatgataaactccatagtgttggcgttcgcgtcgttggggttagagcctgtgagccggttgataggtggagtgaagaacatgtggggggtggtgaacttgatattggcagcatgcttggcggcgacggtgtggatcaccaaggtggcggaggcatggaggggtgaacatggaccacaaatcttgacccctccaccaaccagaatcaaaacctctgccttggctttgtttgggttgttgggtattccacttgcggtaacatttagcattccattcgcattggcatccatctattgctctgaagaaggtggcggtcaaggtctgtctttgggagtactaaacttgtctatagttatcccacagatgattatatcagtgattagtggaccgatagatgcagcatttggtggcggaaacttaccagcctttgtattggggtctattttggctgccattagtgctttattggcaatatttgcacttcccaatcccaaaacacaactctctctcaactcaaccggaatggctggagcccattgaccactgtcatggaagaaagtgagatactatatgttcctttttctttaatttctgggatctactctcttgtcagaatttcttaattactgactgatgta

SEQ ID NO: 21640 - DNA, 537 bp, Gossypium hirsutum
  Clone ID: LIB3585-026-P1-K1-F5
cccacgcgtccgatcaaagagcaaattaatctttttattaaattttttatctatttttactgttaaaaactagtcatcatatgtcagtaaaaggtacacgtgacatgtcacacttcactgtctgcttattctgtcaatcacaccagttgttaacaatacaaagagatgaattttttaaaagaaaatatcaatttgctctttaatctaatttacaagaattaattttttattttttgaattgaaaaactcttaccataaaaaaaattctatggtacatttaccggagagaggaagagttagaaacttaccacatgactcattttttaaactatacgctaagaatatgtaattaccattttaattaaattgaataatgagacatgtattctacctactaaatttgatggtgatccaaaaattgtaggtctgtctttgggagtactaaacttgtctatagttatcccacagatgattatatcagtgattagtggaccgatagatgcaacatttggtggcggaaacttaccagcctttgta

SEQ ID NO: 21641 - DNA, 668 bp, Gossypium hirsutum
  Clone ID: GOSHI-09MAY01-C19509_1
ctccctaaaatccacatgtaatacgacactctcccatggattatgagaaccagatatgacggtcgaataccgatccggttttttttaacattgcactctccatctttctcatacacaaaaatatacatcacattttccctaaattaaatgttcatgcctctccatttccaacatgctatactcgtactatatatattatacacaaaccaatttccaggcaatcaaaataaatgtatgttgtttgtttgcgtcgtgctcgaataaatggagtaatcgaactcaaaattccttctggatcattttttatctgttgttatgccgaccacgacgttgctcaccaattttccactctcatcgactgacatggggggctcaaccacaactgtttggcttgttgaagtagatggcatggtccctgcagaagctatttgattaggtcggttaaagcaaaatggagcccttgcattgcccgtaccaacattagtcccactcattgacagatagcacatttgacagatggagctccatatggatacattaatgttgtccggcagtgcccgcaattgatatgagctatctggttgggtgctggtgcaaggttaagggtgtgacagcaagaacatctcacactgttccccccccccgcatacattagcaagttcgacaac

SEQ ID NO: 21642 - DNA, 759 bp, Gossypium hirsutum
  Clone ID: GOSHI-09MAY01-C19499_1
gatttgctttcgcaagtacttgctggtggtggtgtcgggtggcatgaatcatcagaggaatcagattgtggatgctgggggtattgctaggattctcggcgctgctttggttgttcctgtcttgcaagtcaatatcatctggggtgatgagagtgaattttctgatatattccatttgggtcatttcaagaaagttctagccgatgatgtacgtatactatcctcattgccttctacacttgtaatgacaaggccagtagaggagaaacgtactccacttcatgtctcacctcaatggattcgttcacggtatctcaagcgcataaacaaggaacgagttttgcttttacgaggtctggattctaggctttctaaagatctttctcctgatcttcaaaagcttcgctgcaaggtggcatttcaagcattaagatttgctccgccgatcctggaactcggtaacaagctcgctcggagaatgcagagcaagggaccatattttgctcttcatcttcgaatcgagaaggatgtatgggtgagaactggttgtcttccaggcttgagtaacgaatatgatgagatagtccacaatgaaaggagaaggcaccctgaatttcttactgcaaaatcaaacctgagctaccatgaaagaaaacttgcagggctatgccccttgaatgctttcgaagtgactaggctgcttaaagctctgggggcgcccaggagtgctagaatatactgggctggagggcaaccact

SEQ ID NO: 21643 - DNA, 474 bp, Gossypium hirsutum
  Clone ID: GOSHI-09MAY01-C119481_1
atagggaaagctggctcgccgggcgggtccggaccggcagggtcgacccgacccacgcgttcgcttacgcgtccgcccacgcgtccgcccacgcgggcggcccaacaactaaataaataagaccaaatacctaaacccaaagcctaaaacaacaacctacaggcccaaactaaaacaccagcctagcccagaaatttaacactttctgaggaaccctagggttccccctttgcaccgcttcgctcacccacgtgacgtctgacaactttcaaccaccctgtggccccttcccatcacttccaaagacctgcaaatagaagaaaaggaaacagagcagagcaaggcagctggcaacagtagtgaaaacaatagtaaaatagggacttgttaatcggctataaaaccgaaagaaaacaatgtaaaagggggatttttctttttgaaataaaaaacagaggaaatcggttcaagttt

SEQ ID NO: 21644 - DNA, 889 bp, Gossypium hirsutum
  Clone ID: GOSHI-09MAY01-C119741_1
gccctccagcggggctgcccggttgcgaaaagttgtgaaagagaggaagaagaaaaacaaaggaaaaaatgttgagaagaacgaaaaggctgatattacggttgcagaagagaaaaagacagaggataaggtgattgtggaggtggagaaggttaacgttgacaaagttaatgataaagaggttgtgaaaacaattgaggaagagaagaaacctcttaaggaagaaaaagtgattaccaagcctgtgaaattggtgcttggagaggatattaggtgggcacaaatgcctgtgaattgtaatattaagtttttgagggatgttgctaaagataggttccccggattgaagggtgtccttgtgaaatacagggatccagagggtgatttggttacaatcaccaccactgatgaacttaggttggccgaatcatctactggtgttgccggtggatcacttaggttctatattgctgaaattaatcctgacagggaaccggcttatgaaggaatgaataaagaggaggcgatcaagagtgaggggaaattgagtatcggtgttgatgataatggtaatgcaggctgtggtgtaggagctattaagggaacatgtgtggaggattgtgattgtccagtttgcgcggttgttcaagaactatgtcggatttgattctgattcatacttggatcttcatgaactcgggatgaaactgtatgcggaagcaatggaggagactgtgaccagtgaagatgcccaggaacttttcgaaattgctgcggataagttccaagagatggcagctctggcattgttcaattggggaaatgttcatatgtcaagggcaaggaagcatgtctatacagatgatggttcaaaggaatccaaattagc

SEQ ID NO: 21645 - DNA, 561 bp, Gossypium hirsutum
  Clone ID: GOSHI-09MAY01-C19679_1
atccgatccatccatcatccccttcaaatatcaaatgcactttctctttcacccatctgtctcttttttctcttctctcgctgttatcaatggagccgtttctcgacgacttagccgacgatctacagagcttaagcttcacctccacttccactgctacaattaaccgcagcaccagctcagggtctgcctccaactccggctcttcctctcttgctccctcggctcacggctccttctcttccaaaaccacccgttccggctccccctccctagccgacctccgcttctctatccgcctcggctccggcgatataggctccgtctacttagccgaactcaagtctcaacccacgccttccgacaccaatgccgccaatgctaacaacaacagcaacaaaggcagcaaaagcggtgtcgtttttgcagccaaagggatggacaagaaagagctagcgtcgaggagtaaagaagggagagctaggaccgaaatggaaatactcgaattgttagacccatccattttaccttcgctttacgccgttatcgattcccctaaat

SEQ ID NO: 21646 - DNA, 657 bp, Gossypium hirsutum
  unsure (1)..(657): unsure at all n locations
  Clone ID: AI055719.1
gcttctcaactcattacactaatggaaaccctcagcaacttttgtaccacgagttgtcgtgggttgcatcaactaataggctggatgcctaatgaagaaggtcagagcgttttgatgatgaagttgaagttaccacacctaatgaagaagaaaggtttcaaattctcaagctttatacaaaaaaggttcctttggatcctagtgttgactagcaagttgtagctgcattttccaatggatatgctggagctgatgtggaagctcctaatatgccagcataattaagagataaataattgttaaagaaaagatttaattttatcgaacaacataattaagttcagtacttaaatgtattaatatactacacacacttttaatattaaatcaggtcctttaaattattaaaccagaaccttgcctcctattagacctatgtgagtacagaaagccttatggtagcaataaacagcttcgtngtcagacatggggaaaatctcagagatagcggatgcttccacaaagaacttgacggtatagggtgctggtctattcataattcctgaatcagtggtgcagagctatactgtatagaaagaccgttagcagtcacagcatcattatgaagttccatgttgtcttgaacaaagcctaatc

SEQ ID NO: 21647 - DNA, 490 bp, Gossypium hirsutum
  Clone ID: uC-gsflnu33B081b11b1
tcggattgtttaagtcataaagctttgttgtcattgttttcagctttatacaaaaaaggttcctttggatcctagtgttgactagcaagttgtagctgcattttccaatggatatgctggagctgatgtggaagctcctaatatgccagcataattaagagataaataattgttaaagaaaagatttaattttatcgaacaacataattaagttcagtacttaaatttattaatatactacacaactttctaatataaattcagtactttcaatttatcaaacagcaccttgtctcctaatagacctatgtgagtacagaaagccttatggtagcaataaacagcttcgttgtcagacatgggtaaaatctcagagatagcggatgcttgcacaaagaacttggtacttgcctgcagagttgagattttattttagtatgtatgatatgttaacattttgccttttggcctcactacttcattctcatgc

SEQ ID NO: 21648 - DNA, 928 bp, Gossypium hirsutum
  Clone ID: GOSHI-09MAY01-C19609_1
gtgatagtcttgcagttcaactagtagatgaaaaacactgggaagatcgcttcatcattattgctgtggtaagttcacggcagaaggaaacaagtagcacctctggaatgcgtgagagtgttgaaacaagttcgcttttacagcatagggcaaaggaagttgttccgaaacgcacaatacagatggaagaagccatacaaaaccgtgattttgcatcttttgcaaaattagcctgtgctgatagtaaccaattccatgcagtctgcttggatacgttgccacccatattctacatgaatgatacatctcacaggataatcagctatgttgagaagtgcaatcgttctgaaggaacccctcaggtggcatatacatttgacgctgggccgaatgcagttttaattgcacgagatagaaaggcagctgctcaattaattcagcggctgctattctacttccctccaaagtctgatactgatctggacagctaccttctcggtgataagacgatacttaaagatgctggactcgagggattgaaggatgtggaagctttgtccccacctcctgaaaatggttcagctcagaaataccctggggatgtcagttacttcatctgtacaagacctgggaaaggccctattctgctttcaaatgacaaactggctcttcttgacccagaaactggacttcccaagtaagaagtgccatactttctctccgcaacattggtaaaacttatcttcaaggagagctgaatgtctttgagctgcaaaagtgtcagataggttatttcttcagcttgttttcgttttatttatgtatttgtagttttctttttttgcccttatgtccaattgaggtttgaatcctcaccatgattgaaacaataatgaataaattggttgctttattgaccctctaaaaa

SEQ ID NO: 21649 - DNA, 608 bp, Gossypium hirsutum
  Clone ID: GOSHI-09MAY01-C19199_2
aggaaaaaggccttttcagcttttcaagtctcccacctgcggacgcgtgggacacgaagaaaggaaaatccaagtctctctctctctaaccatgagtctcttcggtctgggcagaaatcaccgaacattccgtccaaaaaaaagtgcaccttcaggaagtaagggtgcacagcttaaaaagcacatcgatgccaccttaggcagtggaaacttaagggaagcagttagactacctccaggggaggatttaaatgaatggctcgcagtcaatactgtggatttcttcaatcaagtgaatctgctctatggtaccctcactgagttttgtactcctgagaattgccccacaatgactgcaggacctaagtatgaatatagatgggctgatggtgtgcacatcaataaacctatcgaggtttccgccccgaaatatgttgaatatttaatggactggatcgaatcacagcttgatgatgaatccatatttcctcaaaagcttggtgtagcatttccttccaacttcaacgaagtcgtgaagacaatattcaaaaaacggtccgagtatatgcccacatctatcactcacacttccagaatattgtgatgct

SEQ ID NO: 21650 - DNA, 973 bp, Gossypium hirsutum
  Clone ID: GOSHI-09MAY01-C19199_1
gagataattagattatagtactcgtaagaaaataggaggaggaaaagaggggtgaaaggaaaagaaaagaggctttttcatttttcccacctgaagaaacgaaaatcaaacagtcttttttctcaatccctctctaacaatgagtctcttcggtcttggaagaaatcagagaacattccgccccaaaaaaagtgcaccttctggaagtaagggcgcacagcttaaaaagcacattgatgctaccctgggcagtggaaacctaagggaagcagtgaggctacctcctggggaagatttaaatgaatggctcgcagtcaacactgtggatttcttcaatcaggtgaatctgctctatggtaccctgactgagttttgtactcctgagaactgtcctacaatgactgcaggccctaagtatgaatatagatgggcagatggcgtgcaaatcaagaaacctatcgaggtttctgccccaaaatatgtcgaatatctaatggactggatcgaaacacaacttgatgatgaatcgatatttcctcaaaaactgggtgcaccatttcctccaaacttcaaagatgtagtgaagacaatattcaaaagactgttccgagtatatgcccacatctatcactctcactttcagaaaattgtgagccttaaagaggaagcccatttgaacacatgctttaagcatttcatactttttacttgtgagtttgggctgattgacaagaaagagctagctccacttcaagagctcattgaatccatcatagtcccctactaattacaggactggactttggatatcctgatgatgtttctttcttcttctttttttctttttttttttctttattttagggatgcaaagtcaaataaattaagagactgttattgcagacgacttaagaaacaagcgtctctaatttatatctctgcgttataaatgcacgttcatatgtcatgttcc

SEQ ID NO: 21651 - DNA, 518 bp, Gossypium hirsutum
  Clone ID: LIB3543-031-Q1-K6-E7
cccagcgtccgttaaaaacacattgatgctaccttgggcagtggaaacctaagggaagcagtaaggttaccccccagggggaggatttacatgaatggctcgcagtcaatagtatatcttgctccctctctttctttctaactcacaccctgcacgcacatgcaaagaatcagaataattccttatttatttaaacttgtgtataatttatccatgaatattcgacttttggtgtggccatgctgtaagttactttcatgagctcatttatttttattgaatttattagctgatttttgatagaatgtttttgtacattttctttcctatttctaggttactacctaatttcattggaactcattgcttaaatttaactgttggatcattttcagctgtggatttcttcaatcaagtgaatctgctctatggcacccttacagagttttgtactcctgagaactgtcctacaatgactgcaggccctaagtatgaatatagatgggcagatggtgtgc

SEQ ID NO: 21652 - DNA, 331 bp, Gossypium hirsutum
  unsure (1)..(331): unsure at all n locations
  Clone ID: LIB3083-012-Q1-L1-D5
aactacgattaaaagctatgcggtacggatggttntcgtgaatgaagatgttagaaagaaatcagcgaacattccgcccaaaaaaaagtgcaccctcaggaagtaagggtgcacagcttaaaaagcacattgatgctaccttgggcagtggaaacctaagggaagcagtaaggctacccccaggggaggatttacatgaatggctcgcagtcaatactgtggatttcttcaatcaagtgaatctgctctatggcacccttacagagttttgtactcctgagaactgtcctacaatgactgcangccctaagtatgaatatagatgggcaga

SEQ ID NO: 21653 - DNA, 454 bp, Gossypium hirsutum
  Clone ID: GOSHI-09MAY01-C19189_1
ggtctctgttttcgtttcttcttccttaaccgttgctgcagctgcagccgcttcttctccttttccttttccttcttttttttcttcttctttgctgcagcagactctgcaggttcatcctcaccttctttctcacctgtggcatcagcagcgataactggctccggctctggctctggctctggctgaacctgggctttctcctcctggggaggggctgctgttgtgggttttgttacggcaggcccctcaccaagttcagcaagaattttatccaaatcttcctcctcttgtgcagtccttccactcttattcttcttcttgttcctcttcttgttcttcgaggtttccacagcctcttcccccttgtccccggttttagaatcaacagcttcaacatttctagttcctaaacttgatagttcggttttcaccatgtctgaacttcactttg

SEQ ID NO: 21654 - DNA, 728 bp, Gossypium hirsutum
  Clone ID: GOSHI-09MAY01-C19159_1
tttcattttccaattgcttttgaagctgtaatattgcaggttgaagttcgttctttgtatcctgatgtgttctattgagcaggttattctcctccattagtgaagaaatctgagactgaaatctctgcccttcagaagctatttgctgagttaaatcttctatagccttctttgaagagtgaaggtgatcagcagtttcatccttctctgccagggcagcagcccagtttgccctccaaatcactgagttttgactcgtatgtggcgagttcctcagtcagctccaaattttcctcggccagcccttccactctccttttcaaagtgagatgacttggtttgcagctcctcaacaaggctttccagctgctttagttttacaagagtctcttccgcctcaacttctcgagatacagcaatttcggaagcttcgtgagtttgttcttcataagttttaatttggttttcaagcacattcaacttttcaatcaggtcattggcttctgattctttcttggtgtatttctcaatagcttcatgtaaacgtgcttctgcttccacaattcgggattcggcttgatctcgatgttctaaagcctttgtatgctgattcgataattctctaattgtgtacacatgagaagctatttgttgagcaggtacttccttctccgcaacggcggcattaaaccattcttgaaggtctccttcccgggcgtaatcctttc

SEQ ID NO: 21655 - DNA, 438 bp, Gossypium hirsutum
  Clone ID: LIB3083-011-Q1-L1-G12
ttatgatgttccaattgctcttgaagctgtgatattgcagattgaagttcgtgctttgaatcctgatgtgttttattgagcaggttattctccttcattagtgaagaaatctgagactgaaatctctgcccttcagaatctatctgctgagttaaatcttactatagccttctttgaagagtgaagttgatcagcattttcatccttctctgccaggtcagtttccagtttgcccttcatatcacttgagttttgactcgtattgttgctatgttctcatttagcttcatattttttttttttatttttttatttttcttttttttttttgttattttttttgcatctttttatttatgtcttttttttttttttttttttattatttttttatatttttttttcttttttttttcactttttttttagttttttttt

SEQ ID NO: 21656 - DNA, 342 bp, Gossypium hirsutum
  Clone ID: LIB3083-012-Q1-L1-A4
gtctcgagttttttttttttacattctgcttaccattacgtcccagccttatctccctctttttcatgcttctatactaaccaaccggatcttcctttgacaaaatagagagaaaatagagaggcctttcgatcgtttcttcggggatatcggcggcgatagcagcagcttttatggtgaggcgaaggagcggactattgaggagttttacaatgcgatcgaaataatctatgaaccagagtagggagctgtgaaaaaaatgagttttcgaaaaaaaattggtcgattggtttgatgcttgctttttgttttacagattctgatcgcattatataggacatg

SEQ ID NO: 21657 - DNA, 296 bp, Gossypium hirsutum
  Clone ID: uC-gsflmaxxa005d05b1
atcgtcctctttttcatgcttctatacttaccaacccgatctccctttgacaaaatagagagaaaatagagaggcctttcgatcgtttcttcggcgatatcggcggcgatagcagcagcttttatggtgaggcgaaggagcggcctattgaggagttttacaatgcgatcgagataatctatgaaccagtggcatgacatggagagtcccgattccgagagagtagccgatattattcggccgcagattagcgctaagctactccatggatgcattgcttcgtattacccgtcctt

SEQ ID NO: 21658 - DNA, 581 bp, Gossypium hirsutum
  Clone ID: GOSHI-09MAY01-C119131_1
tgttgatgaaaagggtaagaaaaaagttgggtcttttttatggaagaaatgaaggtggaaattttaaattttacaggaattatttgaaagctagtgaatttggagtttactgatagattgaaggaaagggcagcaaaaagagttgttttttttctttctattatttttttaggaaaaaaagcgaagaaacagatcaaatcaaaaaaagtagaagcaacatagaggaatggcgatgcttgtagagccaccaaatggggagaagccaagagggaagcactactattcaatgtggcagacccttttcgagattgacacaaagtacgttccaatcaagccaatagggagaggagcatacggggtcgtttgctcatccatcaacaaggaaaccaacgaaaaagtggctataaagaagatcaacaatgtattcgacagtcgtgttgatgcgttgagaactttgagggagttgaaacttctcagacacattcgacatgacaatgtgatcgctttgaaggatgtcatgatgccaactcacagaaccagttttaaggatgtttatttggtttatgagcttatggacacgg

SEQ ID NO: 21659 - DNA, 918 bp, Gossypium hirsutum
  Clone ID: GOSHI-09MAY01-C19109_1
gagaaaacctttggtgatgaaaacaagtccgaaggtaaaggatctgaatgtggtagctcgtgtactggtgatgaaaacaagtcagatttgaaggccgatgaaggtaaacattccgaaactggtagttacttgaacaccccgcgcggccgagcaaatgatcacgacactggatcatcaaactctgagcatatctctcctcaaaacacaacagacacaaccgagctcattgtccaagcaagcaataactctacggaagagagtaaagaaaccaacaacttggctgcaaaagaaattccgggttcactgcaaaacgggacttctgctttagatacaacaggaggtggtagggttattgaagaaatatataaagaaaaagccaatgagaccgtagtagatgcaagcaagatcgagaacgtagtaaatgtaacaaccgaaggtaaaggttttgaatcttccacgactaaggagactactgataatgagaaacaaggtgacaatgaatcaaatggaaaagatgaaaacgaagacacttcttcctctaatgagactgtggatggaaatcataacgaccccattgatacttccgacaattcggtttcacaagaagagaaaggtactgaaatagatttgagtacattgccagatactacaacggagggggcggaaaatgaagatagtgtagctgaataaaagttctggttatataaatggtttgttcagtttttgtgaactgctttaaagctggtaatgtttttttagagagctttgtttctactttatttaaatatcaaactatgtttagagaatacggtttcttctttaaaaatcaaaatgtgtagactattatattatgttgttagtggatgcaatctgtataatttgtggcaagttcttttatgtgaatattatttttctttt

SEQ ID NO: 21660 - DNA, 608 bp, Gossypium hirsutum
  Clone ID: AI055295.1
gttacgttcaacgagcccgatttccaggtcaagtatggttaccgtttaggtacattcccaccgtcgcgatgttctaggcctttcggaaattgtacctatggtgattcggagaaggagccgtttatagcagcccataatattatcttagcacatatagcagctgttcatgtttatagaaccaaataccaggaatcacaaagaggtagcattggaatcgtgttgcattgcatgtggtatgaaccgatcagcaactctgtagccgacaagctagcagccgaacgagctcaatccttctctatcaattggtttctagagccaatcatatacggacgatatcctcgcgaaatgcaaaacattctcggattcattttacccgaattcacaacatccgagaagcagaaactaaacccaggacttgatttattggagttaaccactttcaagttctatgtcaagattgattgtttcctctgttatccagattagggaccttgaaaccaaagaattgggttaaagtctataaaattggctcctttgtgaaacttccgattaatttgtttgacgttattccctggaatggcaatacgtactatcttaacccatacctt

SEQ ID NO: 21661 - DNA, 388 bp, Gossypium hirsutum
  Clone ID: LIB3083-010-Q1-L1-H7
gtttatagaaccaaataccaggaatcacaaagaggtagcatcggaatcgtgtggcattgcatgtggtatgaaccgatcagcaactctgtagccgacaagctagcatccgaacgagctcaatccttctctatcaattggtttctagagccaatcatatactgacgatatcctcgcgaaatgcataacattctaggatccattttacccgaattcacaacatccgagaagcagaaactaaaccaaaggcttgatttcatcggagtcaaccactatacaagtttctatgtcaaggattgcatgttctacgtgtgtgaaccaagatcagggaacctaaaaaccgaatgattttgggcttcaagcttacagaaaaatggcattcctaatagag

SEQ ID NO: 21662 - DNA, 582 bp, Gossypium hirsutum
  Clone ID: GOSHI-09MAY01-C19069_1
gcccagagtcgcatgacgtaactgacttctgcagcttctacacgcttccctcgtctattcttggcaaccagaactattcgttggttgaaagcagcctactcagactacaatgtgtccactaagactccattgcttcagctgatgaatgatgctttaatcgttgctaagcagaaggattttgacgttttcaatgcgcttgatgtcatgcataatgagtcattcctcaaagaattgaaattcggaccaggtgatgggcaacttcactactacctctataattatcggatacgaaatgctttgagaccatcagaacttggtcttgtactcttatagttcaatatgttccagctttgttcgtgcagttttgtttccaatttgttgcatcatattaattgttccgctgccatccacagccaaggattcggtgtgcagtgcaagcaagagtagcctttgctgcgtttctgagcttgaattgcctacgcagattacaatattgcctgttgacaatgcacattgttcaatggacatcaatattgttgagctttttaataaaaaacagtgttcttaaaaaactctaggggg

SEQ ID NO: 21663 - DNA, 430 bp, Gossypium hirsutum
  Clone ID: GOSHI-09MAY01-C19399_1
agattctgaagccacttagagagccaggaaattcgtatgctaagatatgttttagcaacagaagttttggcttggatgcagcaaatgttgctgcacccctcttgtcatccgttaagcaacaattaactgaggtagacctttcagattttattgctggaaggccagagtctgaagcacttgaagtcatgaatcttttttcttctgtcctggaaggttgtcagttaaggtacctgaacctttcaaacaatgccttgggtgaaaagggtgttcgggcatttggggctctcctgaagtcacagaataatttggaggagctttatttgactaatgatggcatttcagaagaagctgcacaagcagtttctgagctaattccttctaccaaaaagctgaaagttcttcattttcacaataacatgacaggggatga

SEQ ID NO: 21664 - DNA, 622 bp, Gossypium hirsutum
  Clone ID: GOSHI-09MAY01-C19369_1
ctatgccacttgattgagtaaaactagaaatgcatgaccatgctcgaataagttcatatgagatatcatacttatttgtttttcatagtctactcaggacatcaaaaaacattagatgggctatgcaagtgtgactattccatgacttgtgtccattctagatataaagaacaaaaggatttataatacatgaaaggttaatcacaaagaggttatgtcgaatcatgacttcttgtaacttaggtagaaatgatgcattgctagatgtcactcatagtttgtaatattagaatcgttctagtattactgctaacattataagaacctacaaggtcacaccctatggttgaaacgaactaaatccaaatatagttggtattgagtttagttatctcatgaattaaattgattatagaattaattcaattgggcagttaaatatcacagaaattatatgtgtaagtatgttgtacacataccataaaatatggttaaattaatatacgaatttgattcatataaaatttaactaaaaataatttaccaaaattcttgttataattattgcaattataatttaggatcaaatataatataattactataattgaattcttttggc

SEQ ID NO: 21665 - DNA, 721 bp, Gossypium hirsutum
  Clone ID: GOSHI-09MAY01-C19309_1
attcaacaaagtcctgactatgcggaagagccagattttgaagctggattacaagactttacaacccggttagctaattacgaaaaggtttatgaaccagttgatgaagggtcttacatcaaaatgattgatatggctagtgggcatggtggacaaatacaagttaacaacatgagtggctatcttccaggacgaatcgtcttcttcttggttaatacacatttgacacctcgcccaatactacttaccaggcatggagagagtcgtgataatgttagaggcagaattggtggtgacagtgtattgagtgataccggagaaatttatatgaagaaactcgcaaactttgttgagaagcgactgaaatctgaaaggactgcttctatatggaccagcacccttcagagaacgattctgacagcaagtccaattgttggatttccaaagatacaatggcgtgcactagatgagataaatgctggagtatgtgatggaatgacttatgaagaaataaagaagaatatgccagaggaatatgaatctcgcaggaaagacaagcttagatatcggtttcctcgtggagaatcttacctggatgttattccaaggcttgaacctgtaattattgagcttgaacgacaaagagcacccgttgtagtgatatctcaccaggcccggttgagagcattatatgcttattttgctgataggcccctcaaag

SEQ ID NO: 21666 - DNA, 411 bp, Gossypium hirsutum
  Clone ID: LIB3148-053-Q1-K1-F11
gagaaatttatatgaagaaactcgcaaactttgttgagaagcgactgaaatctgaaaggactggttctatatggaccagcacccttcagagaacgattctgacagcaagtccaattgttggatttccaaagaggtataattcttcacacttttgatagatacaatggcgtgcactagatgagataaatgctggagtatgtgatggaatgacttatgaataaataaagaagaatatgccagaggaatatgaatctcgcaagaaagacaagcttagatatcggtatcctcgtggagaatcttacctggatgttattcaaaggcttgaacctgtaattattgagcttgaacgacaaagagcacccgttgtagtgatatcttaccaagccgtgttgagagcattatatgcttatt

SEQ ID NO: 21667 - DNA, 989 bp, Gossypium hirsutum
  Clone ID: GOSHI-09MAY01-C119271_1
gttgggggaaaatatccatgaaagatttttgatgacaaacaactcaaatcaaaacccatcgaaaaataaggaaaaaagattcatcctttttccctcctccttctctgaaactaaaaaacactttcctgcaaatgcttcaatctctcctttccctttcttctccttcccctctctctctccctcccttccataacccatcttgctccccactcctccaaaaacccacttttttctcccctttatttccccattccaatgtccatcttcgcccattattagctctacctcgagaagaacctttcactacccccatagctgaagaaaaagaagaagaagaagaggttccaattgagttaccaccatcttattcttccctttcttcttcttctcctctccaaactgccaccaccgttttgctctccggtgccattgccgccttcttgtttcgatccattaaacgccgtgctaagcgtgctaaagagtttagattgaggtcgaaatcattgaaggaaaagtcattgaataggttgaaagcaatggggtccgcttcgattaaaaacaaaaaattatccacaccatcacctgttgatgcattgttgggaagcttaattgctggtgttattgctgtttttctgtataagttcactactactattgaggctgctcttaatcgccaaacagtctctgataatttctcggttcgtcagataacaataactatcaggacaattgtgaatggattgtgctaccttgcaacatttgtttatggcttcaattctattggcttattcctttattctggtcaacttgccttaaatccaatcatggaaggttccatgatgagtgccaatatgattatagatgatgataatgtgcggtcagtaagtccagtaaaacaaaatgctagtgaattgagcaagattgactacgtattttttcacttatgggttattcgtgttttactagctttctatagtgttcagattatt

SEQ ID NO: 21668 - DNA, 1238 bp, Gossypium hirsutum
  Clone ID: GOSHI-09MAY01-C19249_1
cccacgcgtccgcccacgcgtccgcccacgcgtccgattccattttactcataagatggggtctgctgagagaacaaagaagaaagtacagctatggaagaaagctattgttcacttctctttatgttttgtcatggggtttttcacaggctttgctccaactggtaaggattccattttttctagccttgctgttgctacacacaataaatcacatatttcacaaccgcctgtgaaccaatcagtaacaccagcggtacatagcagtaatgttaaccagagtttgagagccgaaactccggttccagttccagttccggcaaagtctaatgagctagaaagtccgaaacaagtggatggtactgttgttcatgaagtcaagctgccatccaggagacttgtgattgttgttacaccaaccagcacaaaagatcagtttcaaggtgtgttcttgaggaggctagcgaatactattcggctggttcctcaaccattgttgtggatcgtcgtggaagggcaatcggattcgaacgagctatccgaaatacttaggaaaacaggcattatgtataggcatttggtgttcaaggagaatttcacagatcctgaagcagagctaaatcatcaacgaaatgttgcattgaagcacattgagcaacacaagctgagtgggatagttcatttcgctggacttaccaatgtttacgatcttgatttcttcaaagaacttagacaaattgaggtgtttggcacttggccaatggccctgctatcagcaaacgagagacgggttgtgattgaaggacctgtttgtgattcatcacaagttataggatggcacctaaggaagatgaataaccagacagatgcagaaacagatgctgatacgaaacctcctattcatatatcaagttttgcatttaacagttcaatcctttgggaccctgagagatggggacgtctcacatcggtccaaggcacttcacagaactcactgaaatttgtgaaacaaattgtaatggaagatgagggcaagttaaagggtatcccaccggaagagtgctcccaaataatgctatggcgtcttcatttccccattggagttgtgcctagaaatcttgtcaaaacatcctcattgcttgatgtaattactcaattgtaaaaaaataaaataaaagagaggaaatatgtgcatctcttagaggacaaaatctatatgatactaagagcataatctc

SEQ ID NO: 21669 - DNA, 529 bp, Gossypium hirsutum
  Clone ID: GOSHI-09MAY01-C19239_1
gaatctatctctgctccctttatattcaacaaaaaaaaaagaactttcaggtttatacgttcaggttcttaaaaagtatgtaagcattcattaaataacactttaacaagtgacagcattgaaaggaattacatcgattaaacaaaatttctcatcctgcatggatccaacaccttcagtgtctgcataaaattttctaggtatgtctagttctcatcactcatcaacttcaacacctgacattggaattcctccactagttttgctcctttcccttaacataatccacaccaaagtcataattatcatcatcatcatccatagcatcatcccctgaggttaatttatttttggcttttttccttctcttattctcagctcttttcatctttgtgttcagcatgccttctactgcatacagcttctcattttgcctgcttgtggcagattttgactttgccttttcagcatcttcttcttcagaagccatctgctcatcattaccaccattaccagatgtatcttcttg

SEQ ID NO: 21670 - DNA, 576 bp, Gossypium hirsutum
  Clone ID: GOSHI-09MAY01-C19229_1
cccagcgtccgccccgcgtccgtctcgctctcgctctcgctcagttcactatctcatttcattcacacgttcagtgaaggaaccatgaaggacctcaacttcgacgcggacaaagctgtcgccaaagattcatctcaaacttcgcagacgcaaatggcgacgcaaaatatatggacatccttcaagagtcgcgaatcgtaaaattaaagcagtacagatcgatctcgaggacctatttaactataaagacttggatgaggaatttttggagcgggttactgagaacactcgaagatacattgaaattttcgcaggtgccattgacgagcttttaccggagcctactgaggcatttcatgatgatgatcatgatatattgatgacacagagagccgaggacgctaccaataatacagatgggtctgatccgcgtcagaagatgcctccagagattaaacgttactatgaagtttatatcagagcaccttcaaaggggaggccgtttaccattagggaggtgaaggcttcgtatattggccagcttgtacgaatatctggtattgtgactcgttgttc

SEQ ID NO: 21671 - DNA, 546 bp, Gossypium hirsutum
  Clone ID: GOSHI-09MAY01-C114981_1
gtccgtcctttcgtccgcccacgcgttcgcccacgttaaacaaaaatggaagttcatgacaatctttttttagttttttcacaaggatgcaacatgggaatggtgatgctagcttgcatgtttatttcatggatctttgtttacagattgaaccagaggaacaaaaatggccccaaaacatggccactcatcggagcagcgttcgaacaattaattaactatgatcgaatgcacgattggctcgtcgaatacctgtccgcatcgaaaactgttgtagttccaatgcctttcacaacttatacttacattgctgatcctgctaatgttgaacatgtacttaagaccaaatttgccaattaccccaagggtgaaacgtaccattcatatttggaagtgctgcttggagatgggattttcaacgtagatggtgagctatggaagaagcaaaggaaaacagctagttttgagtttgcatcaaagaatttgagggatttcagcactgtagtcttcagggaatatagtctacaactccattctattctaact

SEQ ID NO: 21672 - DNA, 718 bp, Gossypium hirsutum
  Clone ID: GOSHI-09MAY01-C14579_1
cggacgcgtgggaaggcatggcatgggccgcccttaggcactagagacatagttactagccacctttcttcattgccttatctccacggattttccggtcgactttgtttgaagttgctccattttgggggtgacgaaagctggattccattttttttattgtctttaaatatattttggtggctggaaaatagtttcatgcgctgactcagttgctgcataaaaggcattttttccagggtgtaattgtagttgggaaaaatcaactctttgttcggagggggactcatcaattcatctgccaataacactggcattatgaaggttcctgggatttgggttttcttctttgtgatcgggacagctttgttcgtctttgccttcagcagctcctccattcctggtatggatttgcagcatgttgatggtacgagtatgagtgaaacaagtagaaagctgaaggggagtggatacagtctcaagcaatgaaaagaggagcaatgtggatgtggatgattacgatcctattgatccagttccaagctccaaagcatccataaaacctggtcctattgagcatggtactcctcttattccctacatcccaaaaccctcacctccagatcatcccaaaattggtggttccacttagccatccaaaaaaatcttctgaagaacatgccaatgtaatatctgtatcgtacctcatgttttaacc

SEQ ID NO: 21673 - DNA, 442 bp, Gossypium hirsutum
  Clone ID: GOSHI-09MAY01-C14539_1
agaaactgttcacgaaagagttcgtacacggattataacggatacgatgaaagcttcctgtgatggattcttgcttgttttacttgctggaggtccttctcgtgctttctctcgacaggattctcaaattatagaggatgatttcaaagcccttaaagatctgttctgggccaacggagatggtttgcctgctgacctcatagataagttttcatctacagtgagaggtgtccttcccctcttcagaaccgattctgagagcttaattgagcggttcagacgtgtgaccttggagacatatggctcatccgcaaggtccaggcttccactacctccaacatcagggcagtggaatcctactgaaccaaacacgctcctgcgggtgttgtgttacccgaatgatgaggcagcttcaaggttgcttaagaagacttacaatcta

SEQ ID NO: 21674 - DNA, 558 bp, Gossypium hirsutum
  Clone ID: GOSHI-09MAY01-C14499_1
ccgaggctacgacctcacgcgtacagtttgattatttagcagcaaaaagcctctttctcccaaaacatctttaactgttccttcacctactttcagtttgcttgtgcttcagcttttcgcatctctttccttttctttctctgtctgtaactctcaccatttccactcctaaacttccaattgtggccaccccgaccaactacgccaccactaaaacatggtctctcccaccgccaccaccaccctatgatcaccaccccaccaacatgttaggcctccataacatcttccttatagctccaccaccacaggaaaaccaacaacaacaagccccaccaccgccgccgccaccaccacaaccctttaaccaaaactacaacttgactgacacaaatctttggacttcaaagagaagcaccgcccaagaatcaataccagttttccaaaagaaagatggaaccttgaataatgttgaagaagaagatgatgatgaaagtggtgctgctggtggttgcttcaaggtgtgtagaggatgtgggaaataggcaaagaaggagt

SEQ ID NO: 21675 - DNA, 896 bp, Gossypium hirsutum
  Clone ID: GOSHI-09MAY01-C14469_1
ctttaaccctaaaattggagattttgggttggctaaactttttccagctaacatcactcatatgagtaccaggatagcaggaacaactggttatttggccccgggatatgctttgggtggtcagttaaccatgaaggctgacgtttatagtttcggtgtacttgtgctcgaaataattagtggacgaagtagctcaaagacaaactggggaggcacgatgaagttacttttggaatgggcatggcagctccatgaagaaggcaagctcatagaaatcgtggatcctgagctcggagaattcccggaggaagaagtccttaggtacatgaaaatagcctttttctgcacgcaagcagcagccaatcgaaggcctttaatgagtcaggttattgaaatgctgggaagaaacgttcggctgaatgagaaagaactcatggcaccaggattctttcaagatggagaggcatcttcgagtaaaaagtcgcttgaatcatctgccgcgaccagctatcagatgagttctgttccagtcactattactgaggtgattcccaggtgaaagattcaagtgctatttttaattgttattttctggttatgaaggcttgagagcataacaagagagcataaagtttactctgttttcttcccccttttttgacattgaaaaatgacgttgaagggcctgatgttggcgcaatatatcccattagttttaacgaagttgaagggcctgatggtggtgcaatatatcccattagttttagactagttttgcaattttttttgttatactttgttaatgattattattaaattaatacagaatacaggaatttttattggcagggttctatcttttttgttataaaagggtgaaaattatatatattgag

SEQ ID NO: 21676 - DNA, 652 bp, Gossypium hirsutum
  Clone ID: GOSHI-09MAY01-C14719_1
cttaatgctaccgtggaagagaataaatcccttaacgggaaactttctgaggtttcaaatgagtttcagcaggcacagggcagaatacaacagctcatggctgaattgagtcagtcaaaggaggaactagttgagaaagaaagggaacttttgacactcaaagagttgcatgatatgcatgggagtcaatcatctgctcagataaaagaattagaggcacatgtaacaagcttggaacttgagttggaatcattgcaagcaactaacagagatatggcggagcagctagagaacaaagcaagtgaagcagaacagctgggagaacaaaatataggactccaatcccgcatttcagaactcgagatgatgttagaaaagagagaagaagaagtttttattctcacgaagaaacttgaggatgataacagagaatcattgtctggaatggagaacttgactgctcaggtaaataatctgctatcggagatggagtcgttgcaagctgaaaaggctctgttggaagaaaatttagcgtttaaaggtgatgaagcatcaaatcaagtacagagcttaatggatgaggtaaacacattgcaacaacagctgaaatcccttatagccagaaggcagaatcggaattgcagcttgagag

SEQ ID NO: 21677 - DNA, 591 bp, Gossypium hirsutum
  Clone ID: GOSHI-09MAY01-C14729_1
cccacgcgtccgcggacgcgtgggtttagaaaggatgtttcttaattttgactttcccttttattacatgtcttccatgtctctatctatgtctgaaaatctttagaagtttagcaagaacctccactagtttatcctttttgttgctctttggatttgcttcgcttcttcataaaaatatcactttccttttcaatatatatataaactaataagcatacttcagcaatccagcaattgttccagttttgggaacatgcaaaagttcgaacttttcagccactgttactctcttaccagggtttgattaagaagaagttagggtttggtgtaaaatgttggttttaagcttgaattccaaacggcaaaggcggcctaatgttaggttaggggaaataggggatgcgtctgctgcttttgcatgtggattttctcaaaaaactaaggaaaatttagtacataaaagatggaaacctgattttctcaactctcaagtgaatgaacctgttactggtgatgagttttctaaagggaaatcaccagatttcttgaacttggaccccggtttttttgccggccgatttgcaacag

SEQ ID NO: 21678 - DNA, 448 bp, Gossypium hirsutum
  Clone ID: GOSHI-09MAY01-C14699_1
catgatgtttcacgggaaaatgcatggtgaccacttggtcgagctcctacgtccttttgttcagcaatggagtcaggctgactgttggatgcaattgtatgaccggtggtcttctgttgacgatctcggttccctagctgttgtacaccatatgttggctaatgaccccggaaagagccttctatggttcagacagtctctcctccttttaaggttaaattgccaaaaggctgcaatgcgtagtctacggttggctagaaaccattctacctcggatcatgaaaggctcgtctatgaaggatggatattgtacgacaccggccactgcgaagaagcactagctaaagctgaggaatcaatctccatccgggatcatttgaagctttcttcctcaaagcatatgctttagcagatacaagtctcgatcaagagtcctcggcatatgtta

SEQ ID NO: 21679 - DNA, 915 bp, Gossypium hirsutum
  Clone ID: GOSHI-09MAY01-C14619_1
ggtaagtggtgaaaggagagaaaaaggtaatttaaaactctaatcggagaaggaaatcgttaagagaattgaaatgttgaagaagaataacaagaattttaggaaaagaagcatccaagaagacgaaggagatgaccccgcctccaaatcggacgatgaagaagacagacggttggcgttagaggaagtgaaattcctgcagaaacagagggagaggaaatcaggaatacctgcaattccttcggtgcaaacaggaggcatcgtcgccaaagttactgaaaaggccgaagctgatggagaaaaggaggagcttgttcttcaggacaccttcgcccaagaaaccgccgtcctagttgaggatccaaacatgataaaatatgtagagcaagaattggcgaagaaaaggggaaggaacatggatctgaaaaatgaagttgagaatgatttaacacgagctgaagatgaattgtataaaattcctgagcatcttaaagtgaaaaaacggaattccgaagaaagttctactcaatggactaccgggattgccgaagttcagctccctattgaatacaagttaagaaatatagaggaaacagaggctgctaaaaagctactacaggaaaaacggctcatgggacgggcaaaatcagaagttagcatcccatcaagttacagtgctgattacttccagcgaggcagggattacgctgaaaaacttagaagagaacatcctgagctgtacaaggaccgaggttcacaggatgacaatgctggctccaaaccaactgacgcaagcaatgatgctgcaggaagtaggcaagctgcaacaaatcagtttatgctagagcgcttccgaaagcgagaacgccaacgagtaatgcggagataacacagttacaagagcagcatatcaaa

SEQ ID NO: 21680 - DNA, 684 bp, Gossypium hirsutum
  Clone ID: GOSHI-09MAY01-C14639_1
cccacgcgtccggttttctaggtttactcttggcactgttgcacctcagtttactggagtaagtattattgaagatgaagctgatagcgttacaatggagttggaaatgcagtgggacgcaaattcaaatatagtacttgctatcaagacttatcttggtgtatcactacctgtgcaggtgaaagatattggattcactggagttttcaggttgatatttaaacccctggtgaatgagtttccttgctttggagctgtttgttattctctgagaaaaaagaaaaagttggatttcaccctgaaagtcattggtggtgacatatcaactattcctggcctttctgatgctattgagagcacgatacgggatgctattgaagattctatcatgtggcctgtcagaaaaattattccgattttgcctggtgactacagtgatttggagttaaagccggttggaatgctagaggtgaagcttgtccaggctcgggacttgacaaacaaagatattattgggaaatcggatccctatgctgtattatttgtacgccctttacctggcagaacaaaaaaaagtaaatcaattaacaatgagctgaatcctatatggaatgaacactatgaattgtcattgaggatgctacaactcagcacctggtggtaagaatctatgatgatgagggg

SEQ ID NO: 21681 - DNA, 587 bp, Gossypium hirsutum
  Clone ID: GOSHI-09MAY01-C14139_1
atcatcgactgtgaccggattcttgtacttgatgctggtcagctatttggtttcttcaaggcagaattgactccattctaacacaaaactccaaaggaactgctagttaacagagaaagcgcattctcgaaaatggttcagtgtacagggcctgcaaatgccaaatacttacgtagcttagttcttgaaggtgaggaaaaagggttcagtaaggaacatgccatgcggttagatggtcagaagagagggcaagcttcaccccactggattgctgatgcacagtctgccctgcctgttagtctcacttcttctctaaatgatattcaaagacttgatactggagatagagaaaatcacatatgatgacttcggtgagttcactaaagccagagcccaagctcaagctcaagcccagaaagaagttgatgttggagctgtagttaccaatgatcttaagttgtaacacgaaccaatagtttctatccgaatgagtcacaatcattgttaggtgtccacacttgcggccatgattttctcgtatatgctacacgaatatatttgatttgaattacccttcaattgatgac

SEQ ID NO: 21682 - DNA, 444 bp, Gossypium hirsutum
  Clone ID: LIB3189-027-P1-K1-G5
ctccattctgtgagtgacttggcaaatatttaccatctatataatttactgtgcttgattaagttgcctttggattggggaataaaaacgaaggtactcattactggtaactagataacttctgatgttgctctttcaggttctagaacacaaaactccaaaggaactgctagttaacagagaaagcgcattctcgaaaatggttcagtgtacagggcctgcaaatgccaaatacttacgtagcttagttcttgaaggtgaggaaaaagggttcagtaaggaacatgccatgcggttagatggtcagaagagagggcaagcttcaccccactggattgctgatgcacagtctgccctgcctgttagtctcacttcttctctaaatgatattcaaagacttgatactggagatagagaaaatcacctatgatgactttcggtgag

SEQ ID NO: 21683 - DNA, 741 bp, Gossypium hirsutum
  Clone ID: GOSHI-09MAY01-C14099_1
ccggcaacgcttattttcctccataaagatgcaagaaaaaaaggcagaaaccgcaaataaaaacgcgaagaaggcgaatctattggatcacggctccatcaaacacatcctcgatgaatccgtcactgagattgttaagagtcgcggatatgtagaagatgtgaggatgagcaatatcagattattgcttggaactattattattgtaatcgctcttgttgctcaattttacaaaaagaagttccccgaaaaccgtgatttcctcatcggttgcatcgtattatatatagttttcaatggagtactccagctggtcatatacactaaggaaaagaatgcaattctctttacttatcctcctgctggatccgtcaccagcactggtttggtggtctcgtcaaagttaccaagattctctgatctttatacacttacgatagcaagtgcagatcccaagtcgatatctgcagggaaaccggttgagttgaccaaaagtgttactcaatggttcactaaggacggagtattggttgagggcctattctggaaagatgttgaaacactaataaatgattatgcgacagaaccaaagaaaaagaagtgattgtagatagtaagccttaccttgttaggttattggttagaccgtgaaatctgtcccgtgctgcaacctttggttagagtatgttcaccacaatcattggtttgaagaatttaaactaaaaacagaaaatgaacttt

SEQ ID NO: 21684 - DNA, 536 bp, Gossypium hirsutum
  Clone ID: uC-gsronu33B004a06b1
cggtttctttttcagacgcgtgcgccgtattgttgggtgcgctaagttaaagaatgctggggggtatacttatccttcttgtggatccgtcaccagcactggtttggtggtctcgtcaaagttaccaagattctctgatctttatacacttacgatagcaagtgcagattccaagtcgatatttgcagggaaaccggttgagttgaccaaaagtgttactcaatggttcactaaggaccggattttttgttttgggcttattttgtgaatgtttttgaatctctaataaatgtttatgctgtcaggaaccaaagaaaaagaagtgattgttgatagtaagccttaccttgttaggttattggttagacccggaaattttttcgttgttgctacctggtttagagtatgttaacaccaatcttgggttgaagattttaactaaaaccagaaatgaactttgcccagggtttttttattattttattattataatacatcgtttttttgttattgaaaagatttgtttttttagttta

SEQ ID NO: 21685 - DNA, 356 bp, Gossypium hirsutum
  Clone ID: LIB3493-026-P1-M1-C9
ctctgatctttatacacttacgatagcaagtgcagatcccaagtcgatgtctgcatggaaaccggttgagtttaccaaaattattactcaatggttcacttaggacggagtttttgttgatgttttatttttttatgattttctttctaagatatttttacttttcttttaattttattatatatatgtaatatattattttgtcttttattgttgaatttttatttatttttatttcaatgcgtaatgtttctttattttttctaattttcttttctattttttttttatattattatttattttttattattatttgaattattattatttataatttactcatgtttatttat

SEQ ID NO: 21686 - DNA, 440 bp, Gossypium hirsutum
  Clone ID: GOSHI-09MAY01-C14049_1
ctcttgccgcggtattctattggacaattgtattgggttggactgaaacgtgcaaatgagattattggtgtcaccactgaggaactcgtgctgaaggcaagacagggttctatttcagcttaatgctatgctacctcggtgaggatggtgagtggaggatatacatgtatgaacctgagccacgtggtaatgaggttatcagaaccctaaaatccttgcttcatatcatgtgacatgggaactgggatgtgggtgggaagacgtggtccagcaagcagctatgcagttgtgcatattgttgattttaatgtgtgtgtgtatttccttatctcaatttgaggggttcattttctggcatctatgtgctgtacattatattttggggtatgtggcatgttgcagcttcatgaaaattgctatcttcgtttctcgcggccatt

SEQ ID NO: 21687 - DNA, 178 bp, Gossypium hirsutum
  Clone ID: LIB3189-024-P1-K1-C2
cccggtcgaccacgcgtccggttatcagaaccctaaaatccttgcttcatatcatgtgacatgggaactgggatgtgggtgaggaggcgcgattcaatttctaacgcttcacttcatcagtggaaagaagtgattttaacgcgctttttttattggtgacctctgatattctatgttg

SEQ ID NO: 21688 - DNA, 538 bp, Gossypium hirsutum
  Clone ID: GOSHI-09MAY01-C14069_1
agtcatttgctagtctgtcatatatccatcagcctgctacataatgcttggaaggcttctcctattttgcattattaggaaagtctgggttagtcaaatgaaatcaaatccagtaataaggaaaactgaaaaattataacaatgggaagtgtttgctcctgttaagaccaaaaaaaaagaaaaagtgtttgctacacgcttggaatacttcctagtccctacgaacaaacttgcccatgatatggagaactgcaacaaaagcaatgaaaccaatgctcattacaagcaccacatttggagagatcttgagtcctggagcatcatcggtgtagaactgaagcatagtaccagcagcccctcccgaggcacccccaccgcttgttgttctcctcctgcgcaggcttgctgctgctgctgcacttcctcttggtggagctgttcccgttgccatctctgagtggagtcggaattcagatcccgtaagttttaggagacgcctacctgtactgccctgtttaatatatccttgactaaagct

SEQ ID NO: 21689 - DNA, 870 bp, Gossypium hirsutum
  Clone ID: GOSHI-09MAY01-C114031_1
tattggagttgaactatcaacagataatgtcattgctgaatatttctttgacaggttcgatctcaaactccacacagccggaattattgctgctacctttggtatggcaaacattgttgctcgacccttcggtggttatgcttcggacaaagcagcccagttgtttgggatgagaggcaggctgtgggtcctatggatcctgcaaacatgggaggtgtcttctgcatctggctaggccgtgccgatacacttcccgttgctgtcttggcaatgatcctcttctccattggagctcaagctgcgtgcggagccacttttgggatcatcccattcatttcacgacgatctttgggaatcatttcaggtctaacaggtgcaggtggaaacttcgggtccggactgacgcagctaatattcttctcaacctcaagattttccacagcggcaggtcttacttggatgggagccatgatcgtggcttgcactcttcccgtgagcctggttcatttcccccagtggggtagcatgtttcttccgccttcaaaagatgaaaacaaatccaccgaagaacattactactcctcagagtggaacgaggacgaaaagaaacagggcaagcactccgcaagtctcaagtttgccgagaacagccggtctgagcgtggaaagcgcgtggcctcagcaccaaccccgcccaatgcaacaccgtcccaggtttaacctatccaggcgtggaacactagattttacaaattaatctttcttgttgaataatgggaagggtttattgtcccgtgttgtattctggatctgaacctttgccttttcatctcttttgcttcttgggaagcccttcttggttcatttttt

SEQ ID NO: 21690 - DNA, 634 bp, Gossypium hirsutum
  Clone ID: GOSHI-09MAY01-C14399_1
gcgtttggtttgatccaagtctcgagactgaacccgattttgatttggatatcaaagaagagttcaagaagaatgttcaaaattcggaaaattgaagcatatatatgtggacaggaatagtgctggttttgtatacttacgatttgaagatgcgcaaggcgcaataaatgcgcaacggaacttacatggaagatggttcgccggaaaaatgatcacggcaacatacatgatacctcaaacctacgaggcaaagtttccagatagtaacagataattgaatggtgtttagtaaacctaaactgttgaaatcaagagggtctaattcccctttgaaatatatatatatctatgtcatacgcgcgcgcgcgtgctcacatatatatattactgagatacatcagcaggttgggacttgtatggggaaattaaaaaaatatttggaattagatgggtactgtttctactaattttatattcccatgtttggttaatgtactagtggttgccttttgcctttgtttagttggagaagttataaagtatcaatgtattgttattttttttaattgtaataagcacaatacaattaaagtataaatacaagtccgaatttctataagtattgcattattcc

SEQ ID NO: 21691 - DNA, 711 bp, Gossypium hirsutum
  Clone ID: GOSHI-09MAY01-C14359_1
gaaaagaatcaatagcaaatgggggggagtctaattgatttgatcctgttaaattcctattagcctcgtcaatagaaattaaaaaattccctcaaaatttttttgatggtcctgcttcaaccatccaatcaagcaaatagatcgatcttaaatttgctgtctttggggggttatcgatttattattattattattattttctaaatggattctagcaggcgagcggtggaatcgtactggagatcgcggatgatcgatggggcaacctcggatgaagataaagtaacgcccgtttataagttagaagagatctgcgagctcttgagatcgtcgcatgttagtattgtcaaagaagtttctgagtttatcttgaaacgactcgatcacaaaagccctatcgtcaagcagaaggctttgaggctgataaagtatgcagttggaaagtctggtgtggagtttaggagagagatgcagaggaactcagtggctgttcgtcagttaattcattacaagggacagctggatcccttgaaaggggatgcacttaataaggccgtgcgggaaacagctcgtgaggctatttctgctatatttgcagaggacaataataccagtaagccttctccagcagacgactttaacaaaagaatagaaggatttggcaacacaaacttcgaaatgccatcaaatgagaagaaatcatttctaagt

SEQ ID NO: 21692 - DNA, 442 bp, Gossypium hirsutum
  Clone ID: GOSHI-09MAY01-C14299_1
ggatagtgcacactatctatctccttatgctgtgaaggttcagtctctaagtgttaaattgcctgcttctggaattgaatcctatacaaaactggagaacacaaagattcatggttcagaaaatcaaatatggcccttatcagaatgttccttcattctccggcccacccatagcaggtcattttgcaagctacttaccctttgctgtcgctcatgaattggtgagagagatagaaatttcccattggggtaatgtgcaagtcactgagcattacaagctcatacatggtggtgcccagagcaagggtgaattttccaggcttgatttccaggccagacccaacgttcgtggtgcatcggcctttaagtatcttgttgcaaacttgccaccaaaggcacattctgtttattacagggatgaaattggcaatatattaacatc

SEQ ID NO: 21693 - DNA, 562 bp, Gossypium hirsutum
  unsure (1)..(562): unsure at all n locations
  Clone ID: uC-gsflnu33B063h07b1
ttatgttcccgagttacctaagccagagttgcccaagcctgaattacccaaagctcccgagtttccaaaacttgaatcaccaaaagttcctgagttaccaaaatcagaattgcctaaagttcctgaggtgcctaagccggaattgcccaaagctcctgaattgccaaaaattcctgaggtaccaaaaccagaattgcccaaagcgactgagttgccaaaacctgaattgccaaaagctcctgaattaccaaaacctcaattacctaaaattcccgagttaacaaaaccagaattgcctaaagttccagaggtaccgaaaccagaattgcccaaaactcctgagctgccaaaacctgaattacctaaagttcctgaattgcctaacatgccgaaacccgaagaacccaaagttccagagctacccaaaccagaactacctaagttacccaatctaccaaagccagaaacacctatacaagaantgccttaagtgcctgatttgcctaccgtgctaaaaccttgaatcattgtactatgttttccctcgacaaataacatatga

SEQ ID NO: 21694 - DNA, 505 bp, Gossypium hirsutum
  unsure (1)..(505): unsure at all n locations
  Clone ID: uC-gsronu33B159e12b1
tgtttgtaccaaaaccagaattgcccaaagtgactgagttgccaaaacctgaattaccaaaagttccagaggtgcctaagccagaattgccaaaagctcctgaattaccataacctcaattacctaaaattcccgggttaacaaaaccagaattgcctaaagttccagagctacccaaaccagaactacctaagttacccaatctaccaaagccggaaacacctaaacaagaactgccttaagttgcctgatttgcctatcgtgccaaaaccttgaatcatggtactatgtttgttttccctcgacaataaacatatgatttttagatattcttcttataagagtgtgttgattagcatatttaaattcatttcatggattacttgtagaccagattatttatatatgtttggtttgagtgattttattgttatcatctatatattatacatgtatactttctaaataaatttatagttatacacannagtttggtttttctttt

SEQ ID NO: 21695 - DNA, 737 bp, Gossypium hirsutum
  Clone ID: GOSHI-09MAY01-C114241_1
ttacaataaggtttcaaaggaatacattaagcaactggtggacgatccaaggatcaaccgggtaccaggaatcggtcttttgtactcggagttggttcaaggcatacctcccatatttcctcatttcatttctagcattccttccatgcattcagttctagtctttgtctccattaagaaacttccaatcagtaaagtaagaccagaggagcgttttctcttcagacatgtcgaaccaagagagtatcgaatgttccgttgtgttgtaagatatggttataaggatttcatgggagcacctgtagagttcgagcaacaactggttgagaagctgaaggaattcattcgtcatgaatatttcatggctgaaggagaggccgcagctgtagagaacccgccccagagctccaatattctagcaaatcaaggtaaagataaaggaagtagtagaagggctgtttttgtggaggaaacactgaaccagctcaaccaatctcatagttcctcagcctccatccagtcattcaatgtggccaaatcaaataactcgacgagtgggatcatatcagcagcaccacccatactgggggctgaagaagagattcagtttgttcagaaagcaaaggatgaaggaattatttacctcctaggagaagctgaagtgatggctaaacccaattctttctacacaaagaggatgattgtggattatggctataattttctgaggagaaact

SEQ ID NO: 21696 - DNA, 902 bp, Gossypium hirsutum
  Clone ID: GOSHI-09MAY01-C14269_1
taagtcctttaaaggcaaccactcaagaaacgaatggtaagaagccccaagactggagggttgatattgcttctcctcttgctgctactgtgccaggggctcgtgagaatggttttaaggagaggaggaataatgagaatgcgagatctgcaaagtctgaaataaggcggtcccttttcagtaataagaattccgatgacaagacgcacaaaatcagtggttcaaagtctggctctcgtgttgctccttgtcaagaggaaatcccagaatccactgttgtggttagtaatgcctctgaaaatctcagctcaaaccacaaggactgcgaggatttatctttgatccgcacccaactggttcagatagaaaagcagcaatctagcctactagatcttctgcagagattcatatgcagctcacagaatgggatgaattcactggagacacgcgtgcatggtctagaattggctttggatgagatctcatatgacttggctgtatcaactggaaggatgtctacttccagccggaccacttgttgcctactacctgctgcaggttttctgagatccaagttctggagtaaaaaagggatgaacacaaatggtacctctaggttttctacatccagttgcaccccatccgctgctgccacacattttagagcttaatagaaattgctatgaaacatttgagaaccatatggtacgacctcaaggaggtggtggatttatttcgtatccattggcagaaattcggtgaccaccagaagctgcaagtattggacattgcattttaccttttgtcttttaatcccattttcatttaaaccttgataaatgtaatagattctacctgttgtgtcagtacaacaactataagatgttccttcaaattcatgc

SEQ ID NO: 21697 - DNA, 475 bp, Gossypium hirsutum
  Clone ID: uC-gsronu33B098g05b1
gtagctcacagaatgggatgaattcactggagacacgtgggcatggtctagaattggctttggatgagatctcgtatgacttggctgtatcaactggaaggatgtctacttccagccggaccacttgttgcctactacctgctgcaggttttctgagatccaagttctggaggaaaacagggatgaacacaaatggtacctctacgttttctacatccagttgcaccccatccgctgctgccacacattatagagcttatagaaattgcaatgaaacatttgagaaccataggttacgacttcaaggaggtggcggatttattacgaatccattggcagaaattcagtgaccaccagaagctgcaggcttgctgcatgactgggactcggaagtcactcaaatttcagtcatttgtgactacacatatgatgatcaacttatatatatattatgctctattacgaagttttctat

SEQ ID NO: 21698 - DNA, 648 bp, Gossypium hirsutum
  unsure (1)..(648): unsure at all n locations
  Clone ID: AI055515.1
cttcagtttttcagccatcatgttcttttcttcttgcattgcccatcctctaatctcaccaaagattagtcactttgggcagccaggtaatcttcatcgtaatgtggaagtggaccaaagattcacttctgctctcaaaatcaggaccacagatcatcccagccagcaagcaagaattggagctggcttacttgatgaatggagttttgctagaggaacaagacttgttattagacaaaaagtttctacatttattccctttagaaaaagctttgaagtacaagcttcatggttgccaacttcacaaattgccagcagcgtatttaccttgggaaccgcagcggttcttccattctatactcttatggtttttgctccgaaatctgaattgactaaaaagtctatggaaagtagcgtcccttttattgtgctcgggcttctgtatgcatatctgctgtacctgtcatggacgcctgatacattaaagctgatgnttgctagtaaatactggctgccagagctatctggtatggccaaaatgttctccagtgaaatgacattagcttctgcatggattcatttatgggctgtagatctctttgctgcaggcanngttttcacgatggactgcaaaccaaatcgagactn

SEQ ID NO: 21699 - DNA, 533 bp, Gossypium hirsutum
  Clone ID: uC-gsronu33B158d06b2
cgccacaccattaccaatttcatcatttttatttttcatgtcattttttttgttttttaatctcatcactctttttagagtccttgttgtatacgctttaattaccaactattaggcaatagggtattacataaagctcatgaagaagacattactgttgattttgttaaaggtcacttcagtttttcagccatcatgttcttttcttcttgcattgcccatcctctaatctcaccaaagggttgccaacttcacaaattgctagcagcgtatttaccttgggaaccgcagcggttcttccattctatactcttatggtttttgctccgaaatctgaattgactaaaaagtctatggaaagtagcgtcccttttattgtgctcgggcttctgtatgcatatctgctgtacctgtcatggacgcctgatacattaaagctgatgtttgctagtaaatactggctgccagagctatctggtatggccaaaatgttctccagtgaaatgacattagcttctgcatggattcattta

SEQ ID NO: 21700 - DNA, 417 bp, Gossypium hirsutum
  Clone ID: GOSHI-09MAY01-C14219_1
ccctcgcgtccgcagctttgtttcatcggcacactgaaacctttagaatctccaaagctacgtcgtttctgaagtcatgggacaaatcctagaaaaaatccatgggaaggaatggagaaagagacagattaggaaaatcagtgataaggtttttgagcgtgtcaaaaatcaatcaggaagagctactttgacatttgaagatctatatatcgctgtcttgctggtgtataatgatattaataagcgtttgcctgggccgcactttgatccaccctctaaggaccaaatcagatcaatgatgcaggagtgtgacttgaaccttgacggacaaatcaaccatgatgaatttgtgaaattcattcagaagcttacaaccgacacgttggttgtcgttagtcagggactgcttgtcacttt

SEQ ID NO: 21701 - DNA, 655 bp, Gossypium hirsutum
  Clone ID: GOSHI-09MAY01-C14209_1
cccacgcgtccgctctaatttaaaaggggaaaggctgagccaaacaatctccgatatgagcatcaatatattcccgattttattctgttcgataattgctttgtgttgtttaatccaaatggctgaatctacagacgcaacgaaatcatcttcggcggcggcggcggcggcgggtgggacggatgcggcggtccacatcgtttacaccgagaggcctcaggatgagcagcctgaagcctaccatatccggaccctctccaacgtcctcggcagcgaagaagctgctaaggaagccctgatctacagttacaagacggctgccagtggcttctccgccaagcttactccccaacaggttgccgaaatatcaaaacaacttggtgttcttcaagttgtcccgagcaggacactccagctacattctggaccaggcaagctgcactaaggctcaagaaactcttttaccctactaaaaacaaaatcctatggaacaatagtctcattgtataaatatgtttgacacactctgtgctatggggtgtgctacattatactatttgaatctacgttacatagacttatttgcttatagatataaatatgatgggtttaagataataacagggtactgaatatatcagtacaattttttcac

SEQ ID NO: 21702 - DNA, 726 bp, Gossypium hirsutum
  Clone ID: GOSHI-09MAY01-C15989_1
cccacgcgtccgcccacgcgtccgcccacgcgttcgcacacgtccttttgctgttggttttcagtaatcttgcgtttctccgtcgggtttccaagtttcagggcggagctcaacatcgaggaaatctcacgacacaacatccatccagtaacttgttttggttactggagacaatggacttctggttcaagggaatcagtgaggacacatctgcgtgctcatttaatgagacagacattcagaaatgtccatttcttaagaacattaacaaacccaccgacttttcattcccttcaatgagttttcccatgcctgtacagggagctagaggtcctttatttgaggatggtccaaactttgatatggcatttaagctttttcatgggaaggatggcattgtacctctctcagggaggtctgatgttccctgtgacagagacaaacaggagcctaccatccaatttaacccattagcaggaaaagctgcaacaattagcctttcagcttttagctcaggagggcccttcagctttggtcccttctcagataaaaggaagaaccagaaaaagaaatccgactcatctaacaaacaagaaccctcttctcagaaaggaaattcatcaaatcatgatgcaatggggaacgagtggttacaaaatgggaattgcccaattgcaaaatcttacagagcagtgagtcgtgtcctaccacttgtggcgacacctg

SEQ ID NO: 21703 - DNA, 459 bp, Gossypium hirsutum
  Clone ID: LIB3197-016-P1-M1-B4
aaaaaaaagaaaaaaacccttagagaaaatgaaaaactgatattctccgaaaattgtctatttatgtagaaaaatataaggaaaataaaagtaaaaattttgcaactggactgaaaggatatgtcgtcgaaggggaagggaaaggagaaggaggtggtttatgggaaacggaaggtcagcgccggaagaagcggtggtggagcggaggagaaccgtcggaagcggaagaatcggggagttcttcagttctttgaagacgctgctgatgttgatgacaatgaagccagcgatgacagcgattttgatgattattttatggaagaagaaccagatcttaatgcaaataataatccttggaaaacccataaccttccatttgtccccaaggaagaggtgatcgaggaggagtttgataaaatgatggaggagaggtacaaggatggtgctaggtttatgtca

SEQ ID NO: 21704 - DNA, 404 bp, Gossypium hirsutum
  Clone ID: LIB3149-018-Q1-K1-E6
tcacactctatttcaaagaaaaaaaaaagataaaaacccttagagaaaatgaaaaactgatattctccgaaaattttctatttatgtagaaaaatataaggaaaataaaagtaaaaattttgcaactggactgaaaggatatgtcgtcgaaggggaagggaaaggagaaggaggtggtttatgggaaacggaaggtcagcgccggaagaagcggtggtggagcggaggagaaccgtcggaagcggaagaatcggggagttcttcagttctttgaagacgctgctgatgttgatgacaatgaagccagcgatgacagcgattttgatgattattttatggaagaagcgacggtgtagggggctcggttttgaagaagaagaagaaggaagaagaagaagaagaag

SEQ ID NO: 21705 - DNA, 458 bp, Gossypium hirsutum
  Clone ID: GOSHI-09MAY01-C15849_1
tctagatcgcgaggccgcccttttttcttctgtcttttttacttaaaactgaacactttttgttctctcatccaggatacaacttttatgcatttcaagattgaagacaactcacggcttttctaactaatgaattggaatgatagatatttacatgtacactctcacattacaccaacggttgaaccactctatatggcagcacattcttcttatttctccttcatctctaggcttctttttctatataaacaagtttgttcacagttcacgggcaagggaagggatgctttagaaacttctatccacttcctataacaacctacaaggcctcgtatttataagtttgaggggctatcttcagctttttgatagtttttggcctgcaacactgatattttccaggctgctacaaaaatcctgaatttctttttccttttaacttcttcgtaattaaa

SEQ ID NO: 21706 - DNA, 692 bp, Gossypium hirsutum
  Clone ID: GOSHI-09MAY01-C15839_1
tacattctgcttctttcttcttgtttttcttcaagtgttgctgtcgtaattaagggtaagagaaatcggaacatctctgcgaaccttaatgaaataggagtataggaaagggaaaggcctagcaggtattggaggaagcaatggcagcaaggtactggtgttatcagtgttctcaagtggttactcccatcatggaagctgagattaaatgcccattttgtcgaggtgggtttattgaagaaatgggcaatggtacaagagacagtgctccaggcatggattcccatatccaatctgatcgagcactctcactatgggctcccatcttgttaggtatgctgggtaatcctcgtcgccgcagaagacttagacgtatcgagtttgaagaagaggatgctgagaattctgatggcgaagctcgccatggaggcgatactgacttggaccgagaacttgaatccatcattaggaatagaagaaggaactctgcatcgatcgtgcagctgcttcaaggtgttagagagagaatggcatctgaaggcgagaattctgagaatgatagggatagggacggagtaattttcatcaatcctttcaatcagactatcattgtccagggctcttatgattccaatccgggtggtcgaaaccgaaactccgaccgcataggttctataggtgattatttcatc

SEQ ID NO: 21707 - DNA, 359 bp, Gossypium hirsutum
  unsure (1)..(359): unsure at all n locations
  Clone ID: LIB3197-014-P1-M1-D6
aataccttcttcttctttcttgttggggntcttcaagtgttgctgtcgtaattcaagaaccttaatgaaataggagtataggaaagggaaaggcctatcatgtttttgannnnnctatggcagcaaggtactggtgttatcagtgttctcaagtggggactggtattatggaagctgagtgttaaatgcccattttgtcggggtgggtttattgaagaaatgagcaatggtacgacagacagtgctccagacatggattnccatatncaatctgatcgagcactctcactatgggcacccatcttgttaggtatgctgggtaatccttgtcgccgcagaagacttagacgtatcgagtt

SEQ ID NO: 21708 - DNA, 575 bp, Gossypium hirsutum
  Clone ID: GOSHI-09MAY01-C15599_1
cccacgcgtccgatgaggtagatgctagggattagggagggggcttagaggtggaagaactggggtaccttctctttctttttatgctgctgattcatacgctgcttcttcttttctctctcttgagataaaccagatttaataggctctagaagattcgtcggtcactcttcccggtcggtcaccgaatcgtgatcgctggagactagacgagttagagtgtttctttatctttgtttgttagtgtaagaggaaagtgtgcgtgtttggattgataagaggaaaagagaaaatgaatgggaatagcaatggatttgggagtgccggtgcggtggcggcgactgagtttttaaggagacgtcatcgacatgagactggagagaatcagtgtagttctgccgtcgtcaagcggatcaaagctcctgttcctctcgtttggtctctggtgaggcgatttgaccagcctcaaaagtataaaccctttgtcagccggtgtgttgcacaaggaagccttgaaattgggagtcttagagaagttgatgtcaagtcagggctaccagctactacaagcactg

SEQ ID NO: 21709 - DNA, 1538 bp, Gossypium hirsutum
  Clone ID: GOSHI-09MAY01-C15539_1
cccactcgtccggccgtagccacgagaagcgacttttggacctcaatctctgtctttgtgtttctctgttttgtattattttttcctttgtgtcatcaatggcgagcagatactgggtggtgtctcttccggttcagaactcagcctccacttggtatatctttcaggatcaattctccatgcattccttcgtctctcctctctaccgattcattttacccaatctccgtgttggtactcctgattcccttcttgctctcagcgttgacctcttgtattccaatacctttatcgaaggagtttcccacaagatcaggaggcagatcgaggaactggagagggcatctggcttggaagccaatgctctcactgtggatggagtgcccgttgattcttatctaaccaggtttgtttgggatgaagcaaagtacccaactatgtcccctttgagggaaattgttgatggtattcacactcaagtggcaaagattgaggatgatctcaaggttcgtgttgctgagtataacaatgtgcgcggccagcttaatgccatcaaccgaaagcaaagtggaagcttggctgttcgtgacctgtctaatctagtgaagcctgaggatatcattacttctgaacacctagtgactctcctcgcagttattcccaagtattcacagaaggattggctttcaagctacgaaacattgactacctatgtggtccctaggtcctccaagaagttgtatgaagataatgaatatgctctttacactgtcacgttatttggtcgcgtcgctgacaatttcagaactagtgcacgggaacgaggcttccaaattcgtgattttgaatatagtccagaagcacaagaaagtcgtaagcaggaactagagaaattggtacaagaccaagatagcttgcgaagctcacttttgcaatggtgttacactagttatggggaggttttcaactcctggatgcatttttgtgctgtacgtatctttgcagagagcattctaagatacggtctgccgccgtctttcctggcatgcgttttgtccccatctacaaagggtgagaagaaagtgcggtccatccttgaaggattatgtgatagcacaaacagcacatactggaagactgaagatgaaggcggagcaatggctggtttaggaggtgatgccgacacctatccctatgtctccttcacaatcaacattgcttttgatgaatgcaattgctagctcttgattctgagcatctctttcatcaagacgacaaatgataataacgtaaagtgtaggagatgctcggtatattgattctttagttaatttcatggcacatccctcacccttagaggagcaggtgtctgaaactttttggtattctagaatttgagcgctttaacccttaggtttctatttctgacaatctgcaatagttgagagctccacctctctgcccttctatatatatttcagtaactttgatcacttcatatgtctatatatataatatttctgtaagcctatttgaac

SEQ ID NO: 21710 - DNA, 663 bp, Gossypium hirsutum
  Clone ID: GOSHI-09MAY01-C15529_1
cggccgcgtcgaccttttttccttcaccagtttagcttttgaatggcttctacagttaaacccattttcatcctccttgtattcatttcattccatttctcaccgttagcatcgaaacccaatgacccaacaccatcaacatggcctcttcaattccactccgttctcttcatgaacaacagtggcactctccagaaagttgatctctggtacgactggcctaatggccgcaatttcaacattattcagaaccagctcggtaagctcctttacgaccttgaatgggacaatggcacttcgtttatctacactctggattccaacaaagaatgcagaatcttgcactttgatgtcggtattctccgtcctaattggcttgatggagctaattacttgggacaacaacaaaaagatgggttcctttgcaatgtttgggagaaagtcgacttcatttggtactatgaagatgtcgtcactaagagacctgttttctgggctttctacactgggtacactgctcatgtaatgacatttgaagtgggagctgttcttgaggattctaaatggcaagcgcctgtttattgttttcaggaagctgatggaaaaagaatcaactttgaatgaatctttgggatcaaatgatcttctcatgggaagctgaag

SEQ ID NO: 21711 - DNA, 575 bp, Gossypium hirsutum
  Clone ID: GOSHI-09MAY01-C115401_1
gtttgtggaagcataaaaaagaatcctccctggggggctcactggaagttacttaagttcgcaactctcgaggtctctttctaaaccatcatagatacacagttcggtaatgagatcaaacacattagagacaacaagcaataaaacccatcatctttcttcgctaataatttaagcaaactttatctttttgctgggtgatggatccaccagctatgatgagcgatggggggtacaatctagcagagatctggcagtatcccgtgagtgaatctgggttaaggaggggtcagtttgggaatgtgccgccgcctcattacgaccaccccaatccagaggtatcgggtggtatgaggagaaggcgtgatggagaagatgaggcagctaaggttgtctccaccagtagtggcaatggcgtgagttttggtgatggaaagagacttaaagcatcaggatgcagagaggagaatgatgattctaaagttgaagcagcagaacccagttcaggcaagccagtggaacatacagcttaaccacagagccacctaaacaagactacatcatgtgcgagctag

SEQ ID NO: 21712 - DNA, 657 bp, Gossypium hirsutum
  Clone ID: GOSHI-09MAY01-C15769_5
aagtaaacagttgattttaatttacacaacatccatggaaaatagacagaaaaccaaggggttggaaattttttccattaagtccccccatagtttttgctcaacttcaaattttcctggacctgaaaatatcaatgtacaacacacaattttttctctaggaaaaaaagggtaatcttatgttggcttaaggatcgggttttccggcgatttcctcatcatcagaggcagcatattcatcttcactcagctcttcgtcgctcgacttctcttccgcctttgctccaatgtcttcgggtttggcatatttctcacgatactctttaactccttgttcataggcagcacgtgctcgcatcattagtgcagcagcttctccattctatggatccgatgggttggcatatatatgaagttgaggaaccccctcttcaaagacatttaccaggtcgcacatagggctccaagtctgattgatgacatccaaacaagctgaaccacacatttcatctacattcgggtgatagatcgtgtttataaagccaattgatggagatttataaggataagcatctgggagttcctctttactcccccatacttctaaataacaccccccgtcttttggtccattgaattaaacataaaatcggaggc

SEQ ID NO: 21713 - DNA, 403 bp, Gossypium hirsutum
  Clone ID: GOSHI-09MAY01-C15769_4
cggacgcgtgggctcagcagtggataaatatttaaattattgaacaacaatggattaatttacacaaacatccatgaaaagtaatgaaaaaatgaggtaagtaggaatttttccacatgttccccggttctgtcgtgttcgaattttcttagagctgaaaatcatgtacaacacaagacaatttttgtagcgagtatgcagggcataatatgtgcctaaagatctatttttccagcggtttcctcatcctccgaggcagcatattcatcttcacttagttttttgtcacttgacttcacttcttctgctcctacaacatcttcaggcttgacatatttccccccgcctccgggtccccggtccgtgttcctaccttgctcctttacatacgccttgtttgttt

SEQ ID NO: 21714 - DNA, 1040 bp, Gossypium hirsutum
  Clone ID: GOSHI-09MAY01-C15769_1
ggattggaatagcgttctttcaccaaccgaaagagaaattttaaggcctaagagaaggtggtggagagaacaatgaaatatatcccattgtagttgttattgtgggaaacccaggcatccttagtaaaggggcccaatagaacctttattctttagccaatgtgggcaagcaagccatgacccttaatgaacgaacgcccttggtgcttttgggtgttttgcttttcaaagtctcagcagtggataaatatttgaattattgaacagtggattaatttacacaaacatccatggaaagtaatgacaaaaaggggtaagtaggaatttttccacatgttccccagttttgttgtgttcgaattttcctggagctgaacatcatgtacaacacaagacgattttcgtagcgagtatgcagggcataatatgtgcctaaagatctggttttccggcgatttcctcatcatccgaggcagcatattcatcttcactcagttcttcgtcacttgacttcacttcttctgctcctgcaacatcgtcaggtttggcatatttctcacggtattctttcactttttcttcataagcagtacgatcacgcatcataagagcagcagcttctccattcaatgggtctgatggattgggatacaaaaggagttgaggaagaaacacttcaaagacattaacaagatcgaacatagggctccaagtttgattgatgacatccaaacaaactgagcccgacatttcatcaacatttgggtggtaaatcttgttcacaaatccaattgatggagatttataaggataagcatctgggagctctacccttatcctccacacaccaccatggtaaggactgtcttttggtccgttgaattcaacataaaattcttgcacgccatcattcatcatccccacttttgtagtcactcatcaccagtttcatcaagtccatctctcgccgtttacttggagaagacatttttttttccttacggaatttctccccgcgcgtccgcggaagagataggaaa

SEQ ID NO: 21715 - DNA, 489 bp, Gossypium hirsutum
  unsure (1)..(489): unsure at all n locations
  Clone ID: LIB3825-015-Q1-K6-A12
ctcttttcgtgtaccanaatactgtgagaaatatgtcaagcctgaagagttgtaggagcagaagaagtgaagtcaagtgacaaaaaactaagtgaagatgaatatgctgcctcggaggatgaggaaaccgctgngaaaaatagatctttaggcacatattatgccctgcatactcgctacaaaaattgtcttgtgttgtacatgattttcagctctaagaaaattcgaacacgacagaaccggggacatgagggtaaagtaggcaatctttcctcatgttctcattacttgtcgtggatgtttgtgagaagtgctccattgggggcaccccactgaacgatttatgcgcgcgcctgcagctgcatacccgcgccgactgtgcgtttgtccagcgggccagccttcccccgcggcggaacagacttcttggcttcgtcgtcagcaccttgacgttggtggctgagcccctgtagcctcagcggctggcct

SEQ ID NO: 21716 - DNA, 584 bp, Gossypium hirsutum
  unsure (1)..(584): unsure at all n locations
  Clone ID: LIB3582-041-P1-K1-D6
cccacgcgtccgcccacgcgtccgcccacgcgtccgatttttactaggatgatgagtgactacaaggtggagatgatcaatgatggcatgcaagaattttatgttgaattcaatggaccaaaagacagtccttatcatggtggtgtatggaagattagggtggaactcccagatgcttatccttataaatctccatcaattggctttataaacaagatctatcacccgaatgttgatgaaatgtctggttcagtttgtttggatgtcatcaatcagacttggagccctatgttcgatctggtaaatgtctttgaagtgtttcttcctcaacttcttttatatcccaacccatcggatccattgaatggagaagctgctgctcttatgatgcgtgatcgtgctgcctatgaacaaagagttaaagagtattgtgagaaatatgccaaacctgaagacattggagcaaaggcggaaagagaagtcaagcgacgaagagctgagtgaagatgaatatgctgcctncgatgatgaggaaaatcgcggaaaacccgatccttaagccaacatagataccctttttttct

SEQ ID NO: 21717 - DNA, 466 bp, Gossypium hirsutum
  Clone ID: LIB3147-036-Q1-K1-A5
cgacccacgcgtgcggagaatgagaatacgatctttcgatagaatttgcgtctgggtgttcgatatggaaatatagcaggtccttatcatggtggtgtatggaagatcagggtggaactcccagatgcttatccttataaatctccatcaattggctttataaacaagatctatcacccgaatgttgatgaaatgtaaggttctctgaatgttgaaatgctctatatttggcttttaaatgctccgctattgtttaatatgtctttgaactatgagtatcacgtctggtacagtttgtttggatgtcatcaatcacacttggagccctatgtgcgacctgaaaaatgtcttcgaagagcttcttcctcaactactttgatatgccaaccgatcggatccattgaatgcagaagctgctgctcttatgatgcgtgatcgtgctgcctatgaacacagagttaaagag

SEQ ID NO: 21718 - DNA, 654 bp, Gossypium hirsutum
  Clone ID: GOSHI-09MAY01-C15719_1
gaccttagcaagcatctccactcaagaacgttcatagttgtccctcacggtgctcgtagcagtgagagaagtggggatggcgagggagggagaaaagaagaaaaaatcatctccaatttctcttcaacaattcatctccaatatcacccctttaattgatttggaaaaggaagctgagatatcagcttcaataagttcaggagcaacaagaaatttggatactgctcaaaagaggggctccacgattctaaatttgaagtgtgttcacgctcagacagggcttatggggaaaactctacttgagttccaatcgaccaaaggagatgttcttcctgctcacaagtttggaacccatgatgtagttgtcctaaaaccaaacaaggctgatttaggttctcctgctcttggacaaggtgtagtttaccagttgaaggattcctcaatcacagttgcttttgatgatgtacctgaagatggtttaaataatcctttgcgtctagaaaaagtggcaaatgaggtgacatatcgtaggatgaaggatgccctgatacaactgagtaaaggtgtgctgaagggtccagctgcagatcaagttcctgtactgtttggagagagacagccaacagtctcaaagaaggcactgtcacattcacc

SEQ ID NO: 21719 - DNA, 722 bp, Gossypium hirsutum
  Clone ID: GOSHI-09MAY01-C115701_1
ttgccatctgcaattacaagcagtccccttcttcctctgccattaaaataaaataaaaacctaaccctagaaatccaaaacaacaagagtcccaacaagtaaaggattaagaagatatcgtgggagtgggatactgaagccgtcgatgcttagttttggtggagtagaagaggatcagagagggggtgcttccaataaatgctctctctgtatctccccttcgaagttgcttcctttttcatgtcttcttcaatcacaccctctttattctttgcttcattcagggtcttctcaatccctaggctttcatctttgctctatacctttccttaactctcaatcttctcctttgtataaaacatgactgattctaaggttttcgtttttgggtccttcactgaagatgaaaccaggtcattgctgtcaaagcagtcatctgggaattctgaagagcctgtagcaactaaggaacttgcattttgggtctttcaattttgcagctggaggatctgggcccatgtcatgggtaatttagcacagagccaggttcccatggaccttggattttatcctaactttttaattaagatggaagttaaaaccccccggtttatcttgagcgcttaaattctaaggacttgattccatggttcacagtatggactctatatgtgaagccctgatcaaagcctgtgtactagtactaacatatgactcatccc

SEQ ID NO: 21720 - DNA, 856 bp, Gossypium hirsutum
  Clone ID: GOSHI-09MAY01-C15199_1
cccagcgtccgaatgtttctgtgtgataaatcgtcagaaggtatacctttgtactcttttagcatggacaagcgagctacggtagctccttcagcagcttctgatactcctttgccttggatggatccaattagtaaatcattcagcctggctagttcagttccaacacctaagcttgtttcaggctcctttggtataactgccggttctaaacagttctacagagttgtgcatgaaccagaaagtcgggaaaatgatcaaatagccaatgttaatagtaagtttcaagacatgggattatccagtacagtgaaaggaagttctgttagaatggaagatgcttctacttcaactgattttactggactaccctctttttctcggtcttcatcaattccagattcaggttggaggcctcgtggggtgttggttgcacatctgcaggagcaccgatctgctgtcaataatattgcagtttcaaatgatcacagtttctttgtgagtgcatctgatgattccactgtcaaagtgtgggattcaagaaagttggagaaggatatatcatttaggtcgaggctgacttatcacttggaaggaagccgagcactatgcactgcaatgctccgaaactctgcccaagttgttgttggagcttgcgatgggacaatacatatgttttctgttgatcatatttctaaaggtctaggaaatgttgttgaaaagtattcaggtatcgctgatataaaaaagaaggatgtgaaggaaggtgcaatacttacccttttgaactaccccatagataactgtggcattcaaacgtttatgtacagcacccaaaattggggtattcatcttt

SEQ ID NO: 21721 - DNA, 965 bp, Gossypium hirsutum
  Clone ID: GOSHI-09MAY01-C15189_1
cccacgcgtccgatttcaagctttgttatagagaccgaccgaaaagaagactaatagaagattttagattcttctttcttacactttactttctgtttcgcattgattttctctggaaatatacaaatcttattcctccattctttttttccagatccaaattccaatatcaatttcgtagtttttaagatattggaaaaagatggaggcatcgtcgacgagtcaacctgagtttgactatttgtttaagttgttactaataggggattcgggtgtggggaagagtactctgctcttgagttttacttccgatacctttgaggaactcaatcctaccattggtgtggattttaaggtaaagcacgttaccattggagggaaaaagttgaagcttgccatctgggacactgctggacaggaaagatttaaaacgctaacaagctcatactacagaggagcacaagggataattatggtttatgatgtaactcggcgagacacatttacagatttatctgacgtatgggctaaagaaatcgatctgtactcaacaaatcaggactgcatcaagatgcttgttggcaataaagttgataaggaaagtgaaagagtggtcagcaaaaaagagggcatcgactttgctcgggaatacggatgccttttcattgagtgcagtgcaaaaacacgagtaaatgtggaacaatgcttcgaggagcttgtcttaaagatattggaaaccccaagcctcgtggctgagggatcatctggagtgaaaaagaacatcttcaaacagaatccgcctcaaagcggtgccgcaaccagcggttgttgctcgtggtgatttggtgatttttatcgttgaacgcttcgtttactttaacagcttcaaacctgtttattttagctggggcatgtgggtgtcattaatcctgaacttaatagttttgaataagatcatgttcctg

SEQ ID NO: 21722 - DNA, 469 bp, Gossypium hirsutum
  Clone ID: uC-gsflmaxxa009b01b1
cgctttttccatatctagcctcttgcagaaaactagaacattgtaataattctccaagtttcaactattcacattcattcataaaactacaaaaccatttcccacttccatgtttgtcaaacaagccacccattaaatccatctgaaaacaacttcccaacactgcgtttgttttgctctgtctcactttttttttttccttccatgcaacgaaaacaatgaagctaatccttttttcattgtttttttgggcatcattggtggtgagtgtgagctcagatctagcttccgacagggcagccttgttggctcttcgtgcagctgttggtggacgcatccgtttgtggaatctttcaagcagcccatgtagttggactggtgtaaattgtgtccaaaacagagtcgtcgagttaaggctccctggaatgggactgtcaggtcagcttcccattgccattggtaacttaac

SEQ ID NO: 21723 - DNA, 335 bp, Gossypium hirsutum
  Clone ID: uC-gsflmaxxa009c09b1
ttttccataacttccctttcccagaaaactagaacattttaataattctccaagtttcaactattcacattcattcataaaactacaaaaccatttcccacttccatgtttgtcaaacaagccacccattaaatccatctgaaaacaacttcccaacactgcgttaggattgctctgcctcaccaagtcgatttactagaaggcttggatttcaaagacacttcagagtcattcaatgaaaaaggtggacttactgccggaagtggaccatgtaattggggatttgaaccggcgaattttggcctggaaaataagcctgggttctattttttttc

SEQ ID NO: 21724 - DNA, 459 bp, Gossypium hirsutum
  Clone ID: GOSHI-09MAY01-C15159_1
ctcatttcctttttttagccgcaacctatattttctcttcaaagacaccagcccaccgcaaggtacggtgaccggcgctcacaggcttcgaagcatggctcctttcagtcaccgacttccctctgaacttcgatttcgacgaagtgaaagggaatcgacggcctaaactcaaaggaagtgccatttttctttctttttttttttgaatgtaaatgatgaaaaatcggaggaaataaaaaatagagccgaaaatggagatcaccttcttaagaaattactttttttttttcaatctatgtgtattgcgtctgtattgctttctcttggggtgcgtaaccttacaactgatgaaatcccttggctttacagccgaaggggtaaaatgattgaaaaataaatcaaaatacaatattctttggggttttttttgggttggttgctgcgcgttcgttctttttt

SEQ ID NO: 21725 - DNA, 580 bp, Gossypium hirsutum
  Clone ID: GOSHI-09MAY01-C15179_3
cccaagcatttgctaaagctgataagctggtgaacttgttaaagaagcaagcggaatcaatcaaaccctatggagctatatgtgcatctccagctttggtgctggagcctcatggtttactcaagcgcccacgcgccacagcttaccctgcaatgtgcgacaagctatcagatcaaagtcatattgacaacagagtagtggtggatggcaacctcattacaagcaggggccctggaactgccatggagtttgcactaggaatcgtggagaagtttttcgggcgcccgaaagccttggagctagcaaaaggactgcttgttggacgccagtagatgaactagtatgagtgtttggtcctgcccatgttaccctatagcctgctatgagacgatctatgagaatataaaaggtgagtaagcattcactctgcggttttttatgtacgataagtttgttccttgttgataaataaatgagtgttggaacaagctgagcaaaatgaacacctttggttcatctgtgatggcatcctttgtcaaataatagtggttttaattcttcagcaatttaaaaaaacacc

SEQ ID NO: 21726 - DNA, 809 bp, Gossypium hirsutum
  Clone ID: GOSHI-09MAY01-C15179_2
gcttaaatcctatggaatggaaatgcaataatattccccagatccttgtaccaattgctgatggctcagaagaaatggaggcagttatgataattgatatcctgcgtcgagcaaaggcaaatgttgtggtggcctccgttggtgacaatcttgaaattctggcttctaggaaagtaaaattagtggcagatatgcttcttgatgaagctgctaaactttcatatgacctcatagtcttgccaggaggacttggtggtgcccaagcatttgccaactctgataagctggtgaacatgctaaagaagcaggcggaatcaaacaaaccctatggagctatttgcgcatctccagctttggtcttggagccccatggcttactgaagggcaaaaaaagccacagctttccctgcaatgtgcaacaaactatcagatcagagtttcatcgacaaccgagttgtggtggatggcaacctcattacaagcaggggtcctggaacttccatggagtttgcactaggaattgttgagaagtttttcggacgcccgaaagccttagagctagcaaaggtgatgctttttgtacactaatagatcaactagtatgaatgattgtcctcggttcttgctaccatagaacattctatgagatgatacatgggaagatcaaaggtgagtttgcatttgactacagattcactttgcggtttatataccatagttggttgataaataaatgagactaggaacagttgagcaataagaacacccgggtttagctatgatgctttctttttaacttattatattta

SEQ ID NO: 21727 - DNA, 1710 bp, Gossypium hirsutum
  Clone ID: GOSHI-09MAY01-C15179_1
aattgatctgtttaataatagaggaactaatttgattcggcgacttcccaggcgctttaaccaaagtaagtagtcattaaaagcacgtggcaaaatgaaaaccgctgatcgaaacgatctcatccattaccgccatattcgaaacgctactgaaatccaggccctcccagcagagccagggagccgagccgatccctctagaaaaacccctgaaagtaatggcattattacacttacgccacctaactcatcactctcttctttcaacttccaaactccatcatcatttccgtttctctcctctcaaatcccctcgcttctcctgctcagcctctgcttcaaccacaatggctaaacaagttttggtgccgatcgcgaacgggacggagccgatggaagcggtgattacgatcgacgtgattaggagatcgggagctgacgtcacggtggcttccgtcgagaaagagcttcgcgttgacgcttgccacggtgttaaaattgttgctgatgctctcgtcgctgattgtaagaacaccgttttcgatcttatcgcgcttcctggaggcatgcctggtgctagcaactttaaagattgtggagttcttgaaagtcttgtgaaaaagcaggctgcagatgggcggctttatgctgccgtgtgtgcttcacctgctgttgcgcttggttcatggggtctattgaagggactgaaagctacctgttacccatcatttatggagcaactgcaatcatgtgcaacagctgttgaatcaagagttcagcaggatggcaaagttgtgacaagtcgtggacctggcactaccatggagtttgctgtaacactggttgagcaattgtatggaaaagagaaagctgatgaagtttctgggccattggtgatgcgtcctaaccatggtgatgagtatacaataacagagctgaatcctctggaatggaaatgcaataatgttccgcaggttcttgtaccaattgctgatggctcagaagaaatggaagcagttatgatcattgacattctgcgtcgagcaaaggcaaatgttgtggtggcctctgttggagacaatcttgaaattctggcttctaggaaagttaaattagtggcagatatgcttcttgatgaagctgctaaacttacatatgaccttatagtcttgccaggaggacttggtggtgcccaagcatttgctaaatctgataagctggtgaacttgttaaagaagcaagcggaatcaaacaaaccctatggagctatatgtgcatctccagcttggtgctggagcctcatggtttactcaagggcaaaaaggccacagcttaccctgcaatgtgcgacaagctatcagatcaagtcatattgacaacagagtagtggtggatggcaaccttattacaagcaggggacctggaactgccatggattgcactagaatgggaagttttcggcgcccgaagcctaactgcaaagactgctgtgacgccatgatgactatataatgtggtcttgcctgtacctatagctgtatggacgattatagattaagtgagtaacttcacttgcggttatgacgatagtgtctgtgataatatgagtgacagctgcaatgaacttggcatgatgatctataatacgttatctaataaaaaaatcggggcgtcattccttagtaatattaatcatgctatattatgaag

SEQ ID NO: 21728 - DNA, 253 bp, Gossypium hirsutum
  Clone ID: LIB3146-038-P1-K1-A11
accacgcgttcgcccacgcgtacgggcctgcccatgttaccgtatagcctgctatgagactatcaatgagaatataaaagctgcctaagcactctgcgggtacatggacgagaggtttggtccttgttgaggggaataagcgcgatgaaacaagctgagcgaaatgaacacctttggatcatgtgtgatggcgtgcctcaagaaatcatagaggtgttaattctgcaggaattgatctctgatttccaagaat

SEQ ID NO: 21729 - DNA, 842 bp, Gossypium hirsutum
  Clone ID: GOSHI-09MAY01-C15129_5
atcttctgcgtcctgctgagctctgttctctccagcacctcccaacccactagtgcccggttcttttgctccaccaggaacaagccatcatgtctcgccagtcaagtgtgtccttccggagtgggggcagtcgtagcttcagcaccgcctctgccatcaccccgtctgtctcccgcaccagcttcacctctgtgtcccggtccgggggtggcggtggtggctttggcagggtcagccttgggggtgcttgtggagtgggtggctatggcagccggagcctctacaatctggggggctccaaaaggatatccatcagcactagtggtggcagcttcaggaaccgatttggtgctggtgctggaggcggctatggctttggaggtggtgccggtagtggatttggtttccgcgggggagctggtggtggctttgggctcggtgccagagctggctttggaggtggcttcggaggccctggctttcctgtctgcccccctggaggcatccaagaggtcaccgtcaaccagagcctcctgactcccctcagccggcaaatcgaccccaccatccatcgagtgcgggccgaggagcgtgaacagatcaagaccctcaacaacaagttcgcctccttcattgtcatggttcggttcatggatctgtataacaaggttttggtgactatgtggaccttgttgtgtttgcattcaccattaccgtgaagcagaacctggagccattgttcggctttacttcaacatccttaggaggcaatttgacagcatcgttggggaacggggccgtctggactcggagcttaaaagcatgcagacctggtggaggac

SEQ ID NO: 21730 - DNA, 1028 bp, Gossypium hirsutum
  Clone ID: GOSHI-09MAY01-C15129_4
aggcgtggtacccgcgtccggatcttccctctcacctccagcctctcacgctctcctcagctctctcatctcctggaaccatggccagcacatccaccaccatcaggagccacagcagcagccgcaggggcttcagtgccggctcagccaggctccctggggtcagccgctctggcttcagcagcgtctccgtgtcccgctccaggggcagtggtggcctgggtggcgcatgtggaggagctggctttggcagccgcagcctgtatggcctggggggctccaagaggatctccattggagggggcagctgtgccatcggtggcggctatggcagcagagccggaggcagctatggctttggtggcgccgggagtggatttggtttcggtggtggagccggcattggctttggtctgggtggtggagccggccttgctggtggctttgggggccctggcttccctgtgtgcccccctggaggcatccaagaggtcaccgtcaaccagagtctcctgactcccctcaacctgcaaatcgaccccaccatccagcgggtgcgggccgaggagcgtgagcagatcaagaccctcaacaacaagttcgcctccttcatcgacaaggtgcggttcctggagcagcagaacaaggttctggaaaccaagtggaccctgctgcaggagcagggcaccaagaccgtgaggcagaacctggagccgttgttcgagcagtacatcaacaacctcaggaggcagctggacagcatcgttggggaacggggccgcctggactcggagctcagaggcatgcaggacctggtggaggacttcaagaacaagtatgaggatgaaatcaacaagcgcaccgctgccgagaatgagtttgtgatgctgaagaaggatgtagatgctgcctacatgaacaaggtggagctagaggccagggtcgatgcactgatggatgagattaatttcatgaagatgttctttgatgcggagctgtcccagatgcagacgcacgtctctgacacc

SEQ ID NO: 21731 - DNA, 1151 bp, Gossypium hirsutum
  Clone ID: GOSHI-09MAY01-C15129_3
atgggccctcttgcttctctgatagctcccagcttactctctgcagccatgattgccagacagcagtgtgtccgaggcgggtctcggggcttcagctgtggctcagccatcgtaggcagtggcaagagaggtgccttcagctcagtctccgtgtctggaggtgctggccgatgctcttctgggggctttggcagcaggagcctctacaacctcggggggaacaagagcatctccatgagcgtggctgggtcacgacaaggcgcctgctttggaggtgctggaggcttcggcactggtggctttggcggtggatttgggggctccttcagcggtaagggtggccctggcttccctgtctgccctgctgggggaattcaggaggtcactatcaaccagagcttgctgacccccctccacgtggagattgaccctgagatccaaaaagtccggacagaggagcgagaacagatcaagctcctcaacaacaagtttgcctccttcatcgacaaggtgcggttcttagagcaacagaataaggtcctggagaccaaatggaagctgctccagcagcagacgaccagcacctccagcaaaaaccttgagcccctctttgagacctacctcagtgtcctgaggaagcaactagataccttggtcaatgacaaagggcgcctgcagtctgagctgaagaccatgcaggacagcgtggaggacttcaagaccaaatatgaagaggagatcaacaaacgcacagcagctgagaatgactttgtggtcctcaagaaggacgtggatgctgcctatatgaacaaggtggagctggaggccaaggtggacagtcttaatgatgagatcaacttcctgaaggtcctctatgatgcggagctgtcccagatgcagacccacgtctccgacacctccgtggtcctctccatggacaacaaccgcaacctggacctggacagcatcatcgccgaggtcaaggcccagtatgaggagatcgccaaccgcagccggaccgaagctgagtcttggtaccagaccaagtatgaggagctgcagcagacagctggccggcatggcgatgacctccgcaacaccaagcatgagatctctgagatgaacccgatgatccagaggctgagagctga

SEQ ID NO: 21732 - DNA, 1239 bp, Gossypium hirsutum
  Clone ID: GOSHI-09MAY01-C15129_2
cgctggagcgggttggtgccccgccgcaatttccgggattgggcctactggagcagcaaaacatggttctggacaccaaatggaccctgctgcatgagcagggctccaagtccgtgtggcagaacctggagccgttgttcgagcagtacatcaacaacctcaggaggcagctggacagcatcgttggggaacggggccgcctggactcagagctgagaaacatgcaggacctggtggaggacttcaagaacaaatatgaggatgaaatcaacaagcgcacagcagccgagaatgagtttgtgatgctgaagaaggacgtggatgctgcctacatgaacaaggtggagctggaggccaaggtggacagtcttaatgatgagatcaacttcctgaaggtcctctatgatgcggagctgtcccagatgcagacccacgtcagcgacatgtccgtggtcctctccatggacaacaaccgcaacctggacctggacagcattattgctgaggtccgtgcccagtacgaggagattgcccagaggagcaaggctgaggccgaggccctgtaccagaccaaggtccagcagctccagatctcagttgaccaacatggtgacaacctgaagaacaccaagagtgaaatcgcagagctcaacaggatgatccagaggctgcgggcagagatcgagaacatcaagaagcagtgccagactcttcaggcatccgtggctgatgcagagcagcgtggtgagaatgcccttaaagatgcccacagcaagcgcatagagctggagactgccctgcagcaggccaaggaggagctggcacgaatgctgcgtgagtaccaggagctcatgagtgtgaagctggccctggacatcgagatcgccacctaccgcaaactcctggagggcgaggagtgcagaatgtctggagaatgccagagtgccgtgagcatctctgtggttggaggtagcaccagcactggaggcatcagtggaggattaggaagtggctctgggtttggcctgagtagtggctttggctccggctctggaagtggctttgggtttggtggcagtgtctctggcagttccagtagcaagatcatgtctaccaccaccctgaacaagagacgatagaagaaatgaggtcccttgagcttactgtgtcccgctgggcccagcactggtatctctgggcttacttcaatttaacttcaatcttcctcttttgggcctg

SEQ ID NO: 21733 - DNA, 1181 bp, Gossypium hirsutum
  Clone ID: GOSHI-09MAY01-C15129_1
accctgtaggaccagaaaggccagctagagtcaccgctgccgccgctccccagctgagaatgaatttgtgactctgaagaaggacgtggatgctgcctacatgaacaaggttgaactgcaagccaaggcagacactctcacagacgagatcaatttcctgagagccttgtatgaagcagagctgtcccagatgcagacccacatctcagacacatccgtggtgctgtccatggacaacaaccgcaacctggacctggacagcatcatcgccgaggtcaaggcccaatatgaggagattgctcagaggagccgggctgaggccgagtcctggtaccagaccaagtacgaggagctgcagatcacagcgggcagacatggggatgacctgcgcaacaccaagcaggagattgctgagatcaaccgcatgatccagaggctgagatctgagatcgaccacgtcaagaagcagtgtgccagcctgcaggccgccattgctgatgctgagcagcgtggggaaatggcactcaaggatgccaagaacaagctggaagggctggaggatgccctgcagaaggccaagcaggacctggcccggctgctgaaggagtaccaggagttgatgaacgtgaagctggccctggacgtggagattgccacctaccgcaagctgctggagggcgaggagtgcaggctgaatggcgaaggcgttggacaagtcaacatctctgtggtacaatccaccgtctccagtggctatggcggtgccagtggtgtcggcagtggcttaggcctgggtggaggaagcagctactcctatggcagtggtcttggcgttggaggtggcttcagttccagcagcggcagagccattggaggtggcctcagctctgttggaggcggcagttccaccatcaagtacaccaccacctcctcctccagcaggaagagctacaagcactgaagtgctgccaccagctctcggtcccacagttctcaggcccctctctggctgcagagccctctcctcaggctgcctgtcctctcgtggcctccagtctcccctgctctcccaggtagagccggggatggatgcttagtgccctcacctttttctctctgtctataccagccccatttgagcacccattgctcaccatcagatcaacctctgattttacatc

SEQ ID NO: 21734 - DNA, 377 bp, Gossypium hirsutum
  Clone ID: LIB3196-041-P1-M1-D5
cagaatttgagaacttctctaagtggctgggtgtgtctcagtaattctagtctttgatttacatattcggtgcagacaatgttttcagctttgttatggtgtcgtccttttaattatttcggtgtttttagttgcgggtggaaggaaaattactgaaatatcatgctttgatacgcttctgttttgtcctgctcccctgttttcgcattctatggctagtcgaatactttctatattctgagaacacgagattgatcagcttgccctggacatcgagatcgccacctaccgcaaactcctggagggcgaggagtgcagaatgtctggagaatgccagaatgccgtgagcatctctgtggttggaggtagcaccagca

SEQ ID NO: 21735 - DNA, 419 bp, Gossypium hirsutum
  Clone ID: LIB3197-021-Q1-M1-E7
atgtggctctgtgtcatcactcacctgggagaggagaatcagtagggagactagaaggtgggtagattgggaagctgcgctcaggtaactccagattgttggctctttccccaggacgtggatgctgcctacatgaacaaggttgaactgcaagccaaggcagacactctcacagacgagatcaacttcctgagagccttgtatgaagcagagctgtcccagatgcagacccacatctcagacacatccgtggtgctgtccatggacaacaaccgcaacctggacctggacagcatcatcgctgaggtcaaggcccaatatgaggagattgctcagaggagccgggctgaggccgagtcttggtaccagagcaagtacgaggagctgcagatcacagcgggcagacatggggacgacct

SEQ ID NO: 21736 - DNA, 413 bp, Gossypium hirsutum
  Clone ID: LIB3196-020-P1-M1-A2
acacgcgatgtcttccgtgatctaatagcctgaaaatggaccgcaccatacaacgagtgcgtaccgaggaacatgaacagatcaagaccctcaacaacaagttcgcctccttcatcgacaaggagcagggcaccaagaccgtgaggcagaacctggagccattgttcgagcagtacatcaacaacctcaggaggcagctggacagcatcgttggggaacggggccgcctggactcggagctcagaggcatgcaggacctggtggaggacttcaagaacaaatatgaggatgaaatcaacaagcgcacagcagcagagaatgaatttgtgactctgaagaaggacgtggatgctgcctacatgaacaaggttgaactgcaagccaaggcagacactctcacagacgagatcaat

SEQ ID NO: 21737 - DNA, 363 bp, Gossypium hirsutum
  Clone ID: LIB3196-034-P1-M1-G3
atcagagcttgctgacccccctgcacgtggagattgaccctgagatccagaaagtccggacagaggagcgagaacagaaaaagataacacggatcgaattagtctactttgtcttcgaggagcggctcttacagtatcagagtacggttctggtgaccaaatggaagctggtccatgagcaaacaaacaggacgttctgcaaagaccttgagcgcatctttgagacctacctgagtgtcctgaggaagcaactagataccttggtcaatgacaaaaggcgcctgcagtctgagctgaagaccatgcacgacagcgtggaggacttcaagaccaaatatgaagaggagatcaacaaacgcacag

SEQ ID NO: 21738 - DNA, 302 bp, Gossypium hirsutum
  Clone ID: LIB3196-006-P1-M1-B1
caagtgtgaacgaagaagcacgctggtgccgggccggaatttccgggatgcagcacagccggaggcagatatggctttggtggcgccgtgagtggatttggtttcggtggtggaaccgccattggctgttggactgggtggaggagccggccttgctgatggctttgggggccctggcttccctgtgtgccccactggaggcattcaagaggtcaccgtgaaccagagtcttctgactcccctcaacctgcaaattgaccccaccatccagctgagttgcgtgccgtggagcgtgaacagat

SEQ ID NO: 21739 - DNA, 640 bp, Gossypium hirsutum
  Clone ID: AW587445.1
cacacacacagaggagctctgtatttctctctatcaacagcgtgatctcgatctagagcttcttcttgtttaattcttattttcaaagatgccactcagacttgaaattaagaggaaacttgctcaaagatcagagagagtaaaatccgtagatctccatcctactgaaccatggattctagcaagtttgtattctggaactgtctgcatctggaactaccagtcacagaccatggctaagtcgtttgaggtcactgagttgccagttaggtcagcaaagtttgttgcacgcaagcaatgggttgtcgctggagctgatgacatgtttattcgtgtatacaattacaacaccatggataaggtcaaagtatttgaggcacataccgattacattagatgtgtccgctgtacatcctactcttccatacgttttgtcatcatctgatgatatgctcataaaactttgggactgggagaagggttgggtgtgtactcagatatttgagggacattcccattatgtcatgcaagtgacctttaatcccaaaagatacaacactttttgccagtgcatctcttgaccgaccataaagatttggaaccttggttcccccgacccaaatttacttttggatgccca

SEQ ID NO: 21740 - DNA, 476 bp, Gossypium hirsutum
  unsure (1)..(476): unsure at all n locations
  Clone ID: uC-gsflnu33B062b10b1
cccacgcgtccgcccacgcgtccggccttttcaaatttattacaagaaattatttcagctttcaaacatatttctcttttgccgcaaaaaccaacttcaacaaaatgcctctcagactcgaaattaagaggaaacttgctcaaaggtcagagagagtaaaatccgtagatctccatccaacggaaccatggattctagcaagtttgtattctggaactgtgtgcatctggaactatcagtcacagaccatggctaagtcatttgaagtcactgagttgccagttaggtcagccaagtttgttgcacgcaaacaatggngttgttgctggagctgatgacatgtttattcgagtatacaattacaacacaatggataaggtcaaagtatttgaggcacacaccgattacattagatgtgtcgctgtccatcctactcttcttatgtgtggcatcatctgatgatatgctcataaagc

SEQ ID NO: 21741 - DNA, 490 bp, Gossypium hirsutum
  unsure (1)..(490): unsure at all n locations
  Clone ID: LIB3189-052-P1-K1-H1
gcgacgaaacaggggcgagctctctgtctctattatttttacattgcaccaatcaaagaacacctcttgctgtgttaaaaccacgggctcgagcgcaggcttcttctttaattagtcttcgaaaatgcctctcagactcgaaattaagagaaaacttgctcaaagatcagagagagtgaaatccgtagatctccatccaacagaaccatggattctagcaagtttgtattctggaactgtgtgcatctggaactaccagtcacagaccatggctaagtcatttgaagtcactgagttgccagttaggtcagccaagttcgttgcacgcaaacaatgggttgttgctggagctgatgacatggttattcgagtatacaattacaacacaatggataaggtcaaagtatttgaggcacataccgattacattagatgtggcggtgtccatcctactcttncttatgtggtggcttcatctgatgatatgctc

SEQ ID NO: 21742 - DNA, 429 bp, Gossypium hirsutum
  Clone ID: LIB3149-033-Q1-K1-E4
gagactaataagcaaataggagccttaattatggaaccaattatccatgtgcattcctccagcaccttggataattggttccataattaaggtgctggaggaatgcacatggttgatccacttttccagcggatgcttgtcaatgagtgtcggcactgtagaattccagtaatctttgatgaggtttttactggtttctggcgtttaggagtagagtctgcagcagaactgcttggttgtgtaccagatatagcttgctttgcaaagctaatgactggagggatcatcccattagctgccacaatggcaaccgatgctatatttgattcattcaccggagattcaaagcttaaagctcttttgcacggacattcatattctgcacatgcaatggggtgcacagcagctgccaaatctattaaatggttc

SEQ ID NO: 21743 - DNA, 377 bp, Gossypium hirsutum
  Clone ID: LIB3189-051-P1-K1-E6
gtgtttatgcataatggcaaatggactgtttcacttcctgaagtgtttcattctgcaactctgaaaccagaagatactaccttcaggtctcgtgatgaaatatttcttaagagcagggacgaatcaaatcttgctggcttgtactcattgtatgtttctcagcaattatctcagtattcaacattatctgagactaataagcaaataggagccttaattatggaaccaattatccaaggtgctggaggaatgcacatggttgatccacttttccagcggatgcttgtcaatgagtgtcggcactgtagaattccagtaatctttgatgagggttttactggtttctggcgtttaggagtagagtctgcagcataact

SEQ ID NO: 21744 - DNA, 978 bp, Gossypium hirsutum
  Clone ID: GOSHI-09MAY01-C15049_1
gattcacttccttttgctttagctttagagccagagccaggggaaaacaatggcggagattagtcaggctgacgagggtcctcccaatatgacactatacatcaacaatctcaacgagaagatcaaaatcgaccaggtgaagaagtcgttgcacgctgtcttttcacaattcgggaagatactggatgtgttagcattcaagactctgaaacacaaaggtcaagcttggggggttttcgaggatgttaactccgctaccaatgctcttaggcgaatgcagggctttcctttttacgacaaggaaatgagaatacaatatgcaaagactaaatctgacataatagcaaaagcagatggcacttttgtcccccgagagaagcgaaagaggcatgacgaaaagggagggaaaaaacggaaagaacaacttgatcctaatcaagctgcagcaggtttgaatccatcttatgcgggtgcttacggtgcaacacctcctctatcacaaataccctacctgggtgctagacctatagtcccagaagcacctgcaccaccaaataacattctatttgttcagaatcttcctcatgatgcaaccgcgatgatgctgcaaatgctcttcaaccaataccccggtttaaaggatgtcagaacggtggaaacaaaaccaggtatagcctttgtcgagtatgaaaatgagatgcaatcaaccgtcgctatgcaggcactgcaaggtttcaagatacagcaaaaccagatgctgattacttacgcgaagaagtagatggataaagacccaaagggtcctttcccgttcctacccacacggcaactagaccttgtgtatgggtggtagattagctgaaatcaaatctaatagctgttttgtgatatatcttttttaactagatcttcagagctgtgttgtagattatagtccaaatgtttattgatgcttatctatttattaactgttagttc

SEQ ID NO: 21745 - DNA, 562 bp, Gossypium hirsutum
  unsure (1)..(562): unsure at all n locations
  Clone ID: LIB3543-033-Q1-K1-G10
agagcactatctccaatttctatttcaggntgattccagccccatcgcatgggattgctctgcctgggtacgtacatatgctttgtttttggaagagagacttgaatgctttaggattctgaagtatgacattgaagctgagcgcctcccaagaccttcccagggcaggataaggttggaatatttgttctgtagaattacactggtgtttgattttaccattgtgggttcatgttctgctgcaaattttgttctcttaaatgggcagggttacagcagaacgagggatttgggcagcgaagaattgttggagcagttgcctgctctgcagcaattgcttcatcgtctcattggctgccggccagaaggtgctgctataggaaactacgttatacagtatgctttggctctggtattaaaggagagcttcaaaatatattgtgctattaatgatggaattatcaatcttgttgacaagttttttgagatgccaagacatgaagctgtcaaagcacttgatgtatacaagcgagctggtcagcagtttgcaaaggattggaac

SEQ ID NO: 21746 - DNA, 462 bp, Gossypium hirsutum
  Clone ID: LIB3197-005-P1-M1-C4
gcattctccaaatttctaatttcaaggacgattcgagccctattgcatgggattgctctgcgtgggtacgtacatacgcattgtttttggaagaaagactcgagtgctatagtattctgaagtatgacatagagccgagcgtctcccgagacctgtcctggggcaggataaggattacagtagaaccacagagttggacagcgaagaattgttagagcaactacctgctctgcagcaattgctttatcgtctcattggttgccggccagaaggtgctgctgtagcgaactatgtcatacaatatgctttggctctggtattgaaggagagcttcaaaatatattgtgctatcaatggtggaatcatcaatcttgtggacaagttttttgaaatgccgagacatgaagctgtcaaagctcttgatatatacaggcgtagccgtcagcatgttatgatatatgc

SEQ ID NO: 21747 - DNA, 1485 bp, Gossypium hirsutum
  Clone ID: GOSHI-09MAY01-C15299_1
gcgttttggcatggcaggtgaagagtggatctttcttcatcctcgagacatgaatctcaacaaccaatccctcttctaaccaatggccacacagtttctggagaaattgctactccagacaatcgatccgtgcgaacaacatcaggtcctttgggcccttctgagaagaatggcagttcttctccttatgttgacccaaggcaaccagtcccggtgagaattgtggacccaacgaaggacttgaattcttatggccttgggaatgttgattggaaggaaagggttgaaagttggaaactcaaacaggagaaaaatgtgatgcatatgaacaataggtaccctgaaggaaagggagatatagaaggaactggttcaaatggggaggaattgcaaatggctgatgatgctcgtcaacctttgagtcgtgtggtgcctatttcttcgtctcacctgaccccttatcgtgttgtcatcattctccgtctcatcattttgggctttttcttgcaatatcgtgccacacatcccgtgaaagatgcatatccattgtggctaacatctgttatctgtgagatttggtttgctttatcttggcttctagatcagtttccaaaatggtatcccattaaccgtgagacctaccttgacaggctagctttgagatatgaccgggatggggaaccatcacagctatcccctgtagatgtttttgtcagtacagtggatccactcaaagagcctccacttgtcacagcaaacactgtcttgtcaatccttgcagtggattacccagtggacaaagtagcttgctatgtttctgatgatggttcagctatgctgacttttgaagcccgctctgaaactgctgagtttgctaggaagtgggtgcctttctgcaagaagcacagtatagagcctagagctcctgagttttattttgctcaaaagattgattatctaaaggacaagataaagccttcttttgtcaaggagcgtcgtgcaatgaagagagaatatgaagaattcaaggtgcggatcaatgcccttgttgccaaagctcagaaaatgcctgaagaaggttggacaatgcaggatggaacgccatggcctggaaacaacccaagagatcatccaggaatgatacaggtgtttctaggtcatagtggggggcttgatactgatggaaatgagctacctcgccttatctatgtttctcgtgagaagcgacctggcttccaacaccacatgaaagctggtgccatgaatgctttgatccgagtttcagctgttcctaccaatggggcatatttgttgtatgtccattgtgatcactactttaataacagtaaagctctaaaagaagcaatgtgtttcatgatggaccctgcctattgaatgaatgcattcttatttcattttttttaatgtttttatgtctttaatttcttcttttattctttacttattattttttattattttcta

SEQ ID NO: 21748 - DNA, 424 bp, Gossypium hirsutum
  Clone ID: GOSHI-09MAY01-C15289_2
cacgcccgtccggacctttccaactccaaatttcaaatcccttgattcctttttgtcaaccaagcatcccacccggactgttagttcgccgtttcatcaatttcccaaccttccctttttctttaatttcctaccccaattttcgccacaaatctaatccaaaatgagctggtggtgggctggtgccattggagctgctaagaagaaatttgaggaagatgaagcaccgagaagcttccagagcgttggtctgatcattggagccaccggcatagtcggcaacagcttggctgaaatcctcccgttatccgacacccccggtggcccatggaaagtatacggggtggctcgtcggcccagacccaactggaacgtcgaccatccaatcgagtacattcagtgcgacgtatccgacccgaatgac

SEQ ID NO: 21749 - DNA, 635 bp, Gossypium hirsutum
  Clone ID: GOSHI-09MAY01-C15289_1
tttccaatccaatatttcaaatccctttaatcttcttgatcaataaaaccaccccacccagattgttggtttgctatcccatcaaatcatctatcatcaattgcctaacgtttcctttttggtttattgccgtctcccacaaatctaatctaagttgttttaaagaaagaaaatgagctggtggtgggctggtgctatcggagctgctaagaagaaatttgaggaagatgaagcaccgaaaagcctcaagagcgttgggctgatcattggagtcaccggcatagttggcaatagcttggctgaaatcctccctttatccgacactcccggcggcccatggaaagtatacggggtggctcgtcggcccagacccaactggaacgccaaccatccaatccagtacattcaatgcgatgtatccgacccgaatgataccgaatcgaagctctctcaacttaccgacgtcacccatatcttctacgtcagctggaccaaccgaacatccgaagccgagaattgtgagatcaacggttccatgcttcgcaatgttttgcgttccgtgatcccaaacgcacccaatctccgccacatctgtctacatacaggagccacacattatcttggacccgttcgag

SEQ ID NO: 21750 - DNA, 474 bp, Gossypium hirsutum
  unsure (1)..(474): unsure at all n locations
  Clone ID: AW186802.2
gcttttaggtagttcagcattgtgcgttttgaatcattttattggttaaggagagtaggagaaaattaaagtgtataaataactttcatttttaagcggtgctattgaatttgcattgttttgttcattttgaagcttgtttttggaagtggattttattttatcttctttaaaggttgtagttttgtttattctgtttttggagaaatgggttcttctcatttgttcattttgcgtaaaatgttgttaaagaaatgtgatttgattaaactggatgatttgcattgaatattgggtttcagtgtagttatcagctttgtcccccttttttttctcaggaaaatgggtaattgattattcattcggttgaatgctggtgaggaaatgggatttttggtgaagtgtgaataattggtcctttactttttgttttcttnnnnnanaaanaaaaaaaataaaaaaataaaaaaaaaa

SEQ ID NO: 21751 - DNA, 391 bp, Gossypium hirsutum
  Clone ID: LIB3197-003-P1-M1-C1
tagttatcagctttgtcccccttttttttctcaggaaaatgggtaattgattattcattcggttgaatgctggtgaggaaatgggatttttggtgaagttggattaatgaaatatgagatttagatttagtttgagcttttaagctttttgtgtatggtgggattggatgagtataaaaatattggaaaagtaaaaatttcttgaacgaatgaaggggtagtgattgattgtaagaacagaagaaggttttatcgaggtgtggattatcatgggttgcatttgttgtaagccatctgctattgaagatagtaagcagagtcctacgagtaaggtctcattagatgttagggtatcaatggcaacttcttcaggagggaggattcacagaga

SEQ ID NO: 21752 - DNA, 1288 bp, Gossypium hirsutum
  Clone ID: GOSHI-09MAY01-C15219_1
gaggaagtgaaaatgagtggggcgagactatgcacattacttgcggatttgggatacgaaggggcagagaaattggaccccgatagcttcgaatggcctttccaatacgacgacacccgcaccattcttgactggatctgctcctccctctgcccttccaatgtcctctccctctctcaactctccctgtatgagcaaatcgtacaagaaggcgagctgttggagggggaagacttggactttgcttatgatagcatttcggccttctcgtcgaggagggacaaccaggaggcggtttttggagctgaagaaggattgaaagatattagggatgcaactggagcatataaaagctgaagctttagagctacagaaacaacttaggcatttgcagtctcagtttgacatgcttacaggtcaggcttcagctttgatccaaggcagacgagcacgggttgcagcaacatctgctgctaatgcccacccgtccgccctcgcggccggtctctcgggaaggaacttgcagatgaacgaagttcttggaaaaatagcatctacagcacaagagctggcgcattaccattctggagatgaggaaggcatctacttagcttattctgacttccatccgtacttggttggagattcatcctgcataatggagttaaatcagtggtttgctaagcaactagacacggttccttttcgattggttgctgaagagggtaaatcaaaatgctcctgggttagtcttgatgatgtctcaaacagcttagtaagagcagatctagaaaagtcccatcatcaacgtgtatctgaattgcagaggcttcgctccatattcggaacaagtgaaagacaatgggtagaagcccaggttgagaatgccaagcagcaagccattctcatggcgcttaaatctcaaatatcatcagatgaagctcatattcatcttgatcttcattcccttagaagaaagcacgctgaattggtgggagagggtttcatacctttatcacatagaagagaagtttttaactgagactattccagatctttgctgggagctggcgcaactccaggacacatacattttgcagggtgattatgatctaagggttgtgcggcaagagttctatattagcagacaaaaggcgtttatcaatcatctgatcaatcatcttgcaaggcatcagctcttaaaaatagcttgtcaattggaaaagaagaatatgcttggagcatattcattgcttaagttatcgagtcagagcttcaggcatacctg

SEQ ID NO: 21753 - DNA, 562 bp, Gossypium hirsutum
  Clone ID: uC-gsronu33B032g09b1
cgcagaaattgttgaaacaggatttacgacactactccggaccctactcacgtctctctccaaaccctaaccatcaaaacgtcgtcggtttacccgtctattacccccgccataacgatgactgccgttgccttcgtcactgtgtcggctatacctacgtgattgtacttttatcttgagtcctggtgttgatttaccggttcgatccaactctagaactggtccgtcttcaactgaaccacgtaggagtgaacacgttggccaaactcacactcgacctctgatgttctttgaccattagggtgcgcagcaggggctttgtttcattggacaatggtatgcgtagtgcagaggcttggctcgtggggggggcacagtgacagcaatgtgtagaaggccaggttgagaatgccaaggcagaagccattctcatggcgcttaaatcttagatatgattagatgaagctcatattcatcttgatcttcattcccttagaagaagcacgctgaattggtgggagaggtttatacctttatacaaagaaagaagttttactggact

SEQ ID NO: 21754 - DNA, 591 bp, Gossypium hirsutum
  unsure (1)..(591): unsure at all n locations
  Clone ID: AI729132.1
gaggaagtgaaaatgagtggggcgagactatgcacattacttgcggatttgggatacgaaggggcagagaaattggaccccgatagcttcgaatggcctttccaatacgacgacacccgcaccattcttgactggatctgctcctccctccgcccttccaatgtcctctccctctctcaactctccctgtatgagcaaatcgtacaagaagggaagctgttgganggggaannattnnantttgnttntaatnncttttcngtcttctcttctaagatggaccaccaccacgcggtttttggagctgaacagggattgaaacatcttgcggatgcgactgtggcatgtggagctgagccttgtgagctacagaaacaacttgggcgtatgcggtctcagttgtacatgctctcggtcacgatgcatcttatttggctcgaagaacaatttatgttgcacctgccgagagggaactcgtggtggtgtcaccgacgtttattatctgggaccgaatggctggaataagctctcaggcgatgaggttggagaacttccctctggataccttccggttatgcctacctcggtatc

SEQ ID NO: 21755 - DNA, 302 bp, Gossypium hirsutum
  Clone ID: uC-gsronu33B032f07b1
ctgcgcgtttttcttgaaaaaaaaaggatcagagttgctttctgctcgcgatatatgcggggcttggtaaaataccatccaccgcacaagatctggcgcattacctttctggagattaggtaggcatcttacttagtcttatattgacttcctttctcactttgtttttagttttatctctgtatatcggagttaaatcagtggtctgttaagcaactagacacggctccttttcgattggttgctgaagagggtaaatcaaaatgctcctgggtttagtcttgatgacgttttcaatcagc

SEQ ID NO: 21756 - DNA, 665 bp, Gossypium hirsutum
  Clone ID: GOSHI-09MAY01-C16909_1
ttgacgcgtgggcggacgcgtgggcggacgcgtggtgtcgggggcgccgcggttctgctatcgaatcggtctgttgatcggaggcgcagtaagtataagcttgttcatgtggttaggacacattgtggggcaaatgacaaggcattcaactgtgtccgccaagaacaggatgatattgggaaaacaggtgtttcgttgtctaaagatttgatggcgattgctggtggtgcactcaagtccaacatcactacgttgggtccccttgttcttcctataagtgaacaaatcttgttctttgtaacattagttgccaagaaattgttcaatgcgaaaatcaagccttatatcccggatttcaagctcgcgttcgatcatttctgtattcatgccggtgggagggccgtaattgatgagcttgagaagaatttgcagcttcttccggtacatgctgaggcttcccgtatgactcttcaccgattcggcaacacttcttcgagttcgatctggtatgaacttgcctatacagaagcaaaaggccggatgcggaagggaaaccgtgtttggcagattgcattcgggagtggtttcaagtgtaacagcacggtttgggttgcgctccggaatgtgaagccatctcctaataatccatgggaagattgcattca

SEQ ID NO: 21757 - DNA, 435 bp, Gossypium hirsutum
  Clone ID: GOSHI-09MAY01-C16939_1
caatcttgtaacggtctttgcctgatatcatatcaagaacgaagggcaaagggcgcggcggcttcggtcggagtagttgcttatctgcgactgagctttctcgacgctccaccatcatcacaaaccgccatgggtctactatccctctcatcttctctaaccccttccttcccctctcttcatctcaaacctaaacataaactctctcttactttcccaaacccttcctttgcgtgctccgcacccacatccaaacccctctcctcatctctcaaactgaaacctactgcgaattccctcaacttttcatcccctcagagccccgccaccgccatgcgaggggccgaggccgacgctgtggcgttgttgctcagggagcgaatcgtctttctaggtaacaacattgatgactttgcggccgatgccattataagt

SEQ ID NO: 21758 - DNA, 742 bp, Gossypium hirsutum
  Clone ID: GOSHI-09MAY01-C16929_1
gtaaactcagtgagtcaaatcacaaatcgctgatccaccgccattcttaacttttggtattcgtcccctcgatcacagctataaattccaatcaatttccctgattaaatccctattaccctcaaaataatgaagcttcaattttttctccgatccccaagtcaccaaaccctgaccgtaaccctagaatccacccaatccctaacccttcgtcaactcaaatcctctctccttccgaacccacaatccttctcctccttctacttcaccctcaatggaaaacccctctctgattccacccttctcccaaatccccaaatttcccatctttcaaccctttttctcctcccccgcgtctccggtggcggaggcgatggcggcgccactggagccgagtcccgcgactgttatctcaagatgtacgctgtcaaaaagcccgataaagtcgaccccaatgagaaaaggcttggtaagtggctcaattgtgccttatctaatgaacctctaagagaaccttgtgtgattgataaattagggaatattttcaataaggaagctcttgttgaagctttgttgggtaagaaattgcccaaagagtttagacatgtaaagggtttgaaagatatgattaatgttaagttgtcgatgattcccggcaagcaatcagatgctgctgatggtgctacgtttccatgccccataaccgggctcgaattcaatgggaagtataagttttttgcgt

SEQ ID NO: 21759 - DNA, 603 bp, Gossypium hirsutum
  unsure (1)..(603): unsure at all n locations
  Clone ID: LIB3828-007-Q1-K6-C9
aaaaaagaaggnagaataaacaaaanaaatggccggccgacatttgtagaagtagaagaactaaagaagtgaagctttgaagaaaatggcggagctagggcttcaagatcgaaacacagtgagatcaggctacagagctggagctgcgagccctgactccgttatatttactttggaatcgaacttcagcctcttctcgtcggcttccgctagtgttgatcgttgctcttttgcttccgatgctcatgaccgcgattccattgcttccgaactctctttacatatggcaggacaagaaagtggagatcagaatgagagttcgagtggaccagatccagatccagatccaaacaaagctataacagtccccaagcacattcgtctctccagaaaaggagaaaaagtgaaagtaaaaacggaagaaagcggtccagctcatacagaggacgaaacgcaactcagagattcagcaagaaactcgttttccctagctcttaaagagtgtcaggacaggaagacgagatctgacgctttgttgaagaatcctgataggcgaagaccagcttcattagatctaaataatatctctggtttgtctccacg

SEQ ID NO: 21760 - DNA, 428 bp, Gossypium hirsutum
  unsure (1)..(428): unsure at all n locations
  Clone ID: LIB3197-033-Q1-M1-B11
ccgtccgagtaacactactaaannaaaaaaannagagggagagatgagacgaaaagaaaaatgggcgcggcgcgacgatttnngtagaaatagaactaaagggagtgaagctttgaagaaaaaaatggcggagcttagggcttcaagaatcgaaacacnnagtgagatctaggctttacagagctggnnagctgcgagccctgacttccgttatatttaactctggaatcgaacttcagcctcttctcgtcggcttccgctagtgttgatcgttgctcttttgcttccgatgctcatgaccgcgattccatcgcttccgaactctctttacatatggcaggacaagaaagtggagatcagaatgagagttttggtggaccagatccagatccagatccaaacaaagctataacagtccccaagcacat

SEQ ID NO: 21761 - DNA, 637 bp, Gossypium hirsutum
  Clone ID: GOSHI-09MAY01-C16859_1
gaacttgtattcctactacaactcatactctttggttggttgattccattatttagatctgaatgcataatcagctttgttggaattttcaacgcttcttgatcaatctcgatcccctggttgaaacggtaaatgcagcttcaaatttgtaaaagttgaagtgggtattagcccaaggagaaaaaacaaaaattattcgtccagaatttgtttggtttagtggatttgggattgacagaaaagtagaagtaaatggtgttttgggaaggatatgtgagtgatgaagcaatggggacagttgccccggttgttgtatattggttgtatgctgggttttatcaactcttaccacctttggataagtaccgtttacatactagaaaagaggaggaagagaagaatgccgtgcctttcgtttcagttgttaggggtgttctatttcaacagcttgttcaagcaactgttgctaaattgctctttctgttgacatcaacggcagatgcatctgggaccacaatccagccttcagttcctgttcaacttgcgcaatttattgttgcaatgcttgtcatggatgcatggcagtactttgttcaccgtttcatgcatcaaaacaaatttttgtaccgtcatgtcc

SEQ ID NO: 21762 - DNA, 377 bp, Gossypium hirsutum
  unsure (1)..(377): unsure at all n locations
  Clone ID: LIB3145-017-Q1-K1-F7
ggaaaacccggccggacccacgcgtccgcccacgcgtccgagnagaagaaaaaggngttnngggaaggatatgngagggaggaagcgagggggacaagagccccgggggcngnatataggntgtatgctgggttttatcaactcttaccacctttggataagtaccgtttacatactagaaaagaggaggaagagaagaatgccgtgcctttcgtttcagttgttaagggtgttctatttcaacagcttgttcaagcaactgttgctaaattgctctttctgttgacatcaacggcagatgcatctgggaccacaatccagccttcagttcctgttcaacttgcgcaatatattgttgcaatgcttgtcatggattg

SEQ ID NO: 21763 - DNA, 903 bp, Gossypium hirsutum
  Clone ID: GOSHI-09MAY01-C16849_1
aaacaaagagaacaatggtgtgcatacgcaaggcgaccatggacgacctactggctatgcaagcttgcaacttgctttgccttcccgagaattaccagatgaaatactatttctaccacatcctctcttggcctcagcttctttacgtcgccgaggactacaacggccgcatcgtcggttacgtcctcgctaagatggaggacgaaagcaacgagtgccacggccacattacctctctcgccgtcctccgcactcaccgcaagcttggcctcgccactaagctcatgaacgccgcccaagccgccatggagcaggtgtttggagcagagtatgtgtcgctgcatgtgaggaagagtaacagggcagcgtttaatttgtatacccagacgttgggatataagattcatgatgtggaggccaagtattatgcagatggggaggatgcatatgacatgaggaagcagttgaaaggaaagacgaaccatcatcatggtcatcatcatcaccaccaccaccaccatcatcatggtggtggatgttgttcaggtgatgcaagaagtggagaagcagctcatacacgaggagactcgaaatcagagtcaaaagctagcacaaaatctgattccaaaactggatgattacctggaggtaaacacaagtatatggagaactatgcgtggtatttgtggctcatggtatttttagtttgtttattgaagtaataatctgactggagatttcaaaactatttggcttgctacatgggatttagtatgaacactgctgatgcaatggtgtctgtactgtctgtgttttacaagcttttttgtccggattctggtcagatgtttcttgttccaccttgcgttttaaacaatagaaatagctctttgcatttcactt

SEQ ID NO: 21764 - DNA, 775 bp, Gossypium hirsutum
  Clone ID: GOSHI-09MAY01-C16559_1
cccacgcgtccgcccacgcgtccgcgaggagagttagctggtcagcactcaacaagcacgatggttcttagaaacagtacctaaaaactacaacaaaatcagaatcttaattcaaacattaaaaaaaaagccttcaccagctgtttcctatggacgtatttacaatcgtttatattaatccactttagccatttccttcaatcgtctctatttccccccctttatccttttttgtctttcttcattttcttttcactccaaaactgtgtaattgatgagatatcattggatgaggaaaatagagttgtgggggaaatattgattgtttcatgggcaatacatgccgtggatctttaaaggggaaacttcataagggcgacaatcagcccaaagaccattgttctagccgcaacaacacttcttccggccgttcaaccaccgccaccgattattccccttcaactttaaactctcaacaactgattgctcaagaattctccaaagaaaccaaccaaaaagaaacccatttgcctgtcattaaccctaccaagaaagacaacaacaataacaccatgagacgtggtattgatcaccaggcttactatgttttgggtcataaaacacccaacatccgtgacctttacactttaggtcgtaagttaggacaaggacagtttgggactacttacttgtgtactgagatctctacaggcactgagtatgcctgtaagtctatatccaaaaggaagtgatctccatggaggatgtggagatg

SEQ ID NO: 21765 - DNA, 696 bp, Gossypium hirsutum
  Clone ID: GOSHI-09MAY01-C16569_1
aaacggagcagtttacggaagggactcttaaaacccagccaaaccacatacagttcctcctcagaattcacctactctatacgttgaataaaacaagatggggggtgggtttagagtgcttcatcttgtaagaccgtttctttcatttctgcctgaagttcagagtgctgacaagaaagttcccttcagagagaaggtcatatacactgtgatctctcttttcatcttcttggtttgtagccagctccctctgtatggcatacattctactactggtgcagatccattctattggatgcgtgttattcttgcctcaaatcgtgggactgtcatggaacttggaatcactcccattgtgacgtctggactggtgatacaacttcttgctggttctaaaatcattgaagtggacaacaatgtccgcgaagatcgtgcccttctaaatggtgcccaaaaattgttgggtatcttgatagctattggtgaggcagttgcctatgttctctctgggatgtatggtagccgcgccagcttggagtaggaaatgccattctcatcatccttcagctttgctttgctggtatcatcgtcatatgtctggatgaacttcttcagaaaggatatggtctcggttctggaatttccctcttcatagcaacaaatatctgtgaaaacataatctggaaggcatttagc

SEQ ID NO: 21766 - DNA, 418 bp, Gossypium hirsutum
  Clone ID: GOSHI-09MAY01-C16539_1
cccacgcgtccggtaatcttctttttcaagcctaagcttgttctgatttgactccctcctaacgctgccttctacagatcacagtacctgaagaaaacccctttttcccctcctattctcttctactatttaaccctcttacaattaccatctgcctacccaagtttctttaattatttctttttggctcttatcaaaggagaatcttggattggaggcattggttctccatgggtgaagccccggcattctgttttgacaatctacaaaatggatttggtttaaaacccaaaggcttggagacctctgccgacgttggtgacaaaacgtttgtaattggtggggcagacaatgattccacatcatatattggggttaagatttatgacacatctacaggcaaatgggtgatccctac

SEQ ID NO: 21767 - DNA, 566 bp, Gossypium hirsutum
  Clone ID: GOSHI-09MAY01-C16499_1
ggagcgggaaaaggaaataaacagcactacacatctagtaaggatttgcttgtcttgagggagatctccgcactatttcggtatctacaaacagtttactctcgtgtatcagtgcccacaattcggttccatcaagaaccgcaacaatctccttcctcgtgcaccctttcaggtattctcactagtatcatgcccctctagattgtcattgaagaaaaaagacagaaatgatatcatgctcaccttagggaaaattgttcatatattttccaagtttcaactattattctagctgtaataaaacacttgatgtttcttttatttcattagaagcaaacaagaacaaatgcctgaaaagtatattatagcaaagacactatggcttttatgtgttatctacattggaagtattgttctcttcgagtccttcgaggctttggttcgaaccaaggatcatttttcgcaacataaatattaagtactggctgagctaagtttgtaatttactgttaagaaaaatggatgttgctatgattaaaaatttaacatgggctatgttgttaatc

SEQ ID NO: 21768 - DNA, 595 bp, Gossypium hirsutum
  Clone ID: GOSHI-09MAY01-C16489_1
accctctcctcgtctctcccgcctgaccatcccttatcctttcaatttcatcttcttcttaaaccctctccttcactttcctccagcttccctttcttcaatcaatgaaaatgtcttctataaccaaatccatatccatggcggactcatgttgcctcgtttgtatcccttcactcttcaccacttgttccaaatccccatccctcctctcctttcccccaaaaccaatcaatcttttcctctcatcttcccattcttcaacctctttgaccctcaaaaccagaacccatttctcttctctagtttcctttgttgcccaaacatcagattgggctcaacaaggggaagaaaatgacaccaccatcaccatcgatgaggatgaaagtgaaactgaagggggggaatcgaaatgggaaaacgatgaaagtgatggagctgaagcaatttggggaactgaaggtgaggatgctggctttgaagaacaaagtggtgattcagaagaagagggttctgaaccctctgaggaagctaaattgtttggtgggaaattgcctttcgatgttgatagtcaaagtctagctatgctttttgagaa

SEQ ID NO: 21769 - DNA, 430 bp, Gossypium hirsutum
  Clone ID: LIB3197-026-Q1-M1-E6
cttatcctctcaatttcacttaaaccctctgcttcactctcccccatcatccctttcttcaatcaattaaaatgtcttcaataaccaaacccatatccatggcggactcatgttgcctcgtttgtatcccttcactattcaccacttgttccaaatccccatctatcctctcctttcccccaaaacgcatcaatcttttgctctcatcttcccattcttcaacctctttgaccctcaaaaccaaaacccatttctcttctctagtttcctttgttgcccaaacatcagattgggctcaacaagaggaagaaaatgacgccaccatcaccatcgatgacgaggaaagtggcattgaagcgaaatgggaaaacgatgaaagtgatggacctgaaggcgaggattctgtttttgaagagcaaagtggggattc

SEQ ID NO: 21770 - DNA, 644 bp, Gossypium hirsutum
  Clone ID: GOSHI-09MAY01-C16419_1
gaaaaattatgagagagaagatggggagggggaatttgttgataaaatgatgagaaatatttttatggaagggaagggaggtttgcaatgggtagtgttattggattatctttcgatatcgccaaccactgctattcgataccgttgaaacgtcactgctttcagttgggatccagaggttgttgttgttgatatcgagtcaataccatcctcctcggcaacagtggagttcgcttctccttatctgcgcttcttcaagcgcacttcatgaccatgatcctttgtcctcaattttctcttgggtctcgctcgcagatccaccgccaccgccaccgccactacaaccaaaaccgatttcctaccttccgtttctcttctcgatggatcccacttctcgccccgctgtcgtcatcgacaacggcactggatatactaagatgggatttgcgggtaatgtagagccgtgttttattcaacaaacagtagtagcagttaacgaatctcttctaaatcaatctagagcttcttccaaatctaattggttagctcagtattcagctggggcaatggcagatcttgatttcttctattggagatgaagcactcacgcgatcacgatccaataataactataacattaccca

SEQ ID NO: 21771 - DNA, 698 bp, Gossypium hirsutum
  Clone ID: AW587510.1
gttgtctttctttctattgtttgattgctaagaaaagtatcaatcaagagaaagaacaaagaagaaggaatttggagtctttgattgataaactcgatgagaattcagttttgaaatggttagtcttacttgagtttgggatatcgcctaaccaacaactcttgtttcaagaagctataccgttgaaacgtcacttgcttttggttggggatccaagtttgctgttggtatcgactcagtactgccatcggggggagcttgcttctccttatttgcgcttcttcaagcgcgcttcatgaccatgatctcttgccccctactctcttttggatctcgctcgcagatccacgacaacacccaaccaattgccagcttccgttttgattctcgatggacccaacttctcgccccgctgtcgtcattgacaacggtactggatatactaagatgggatttgcgggtaatgtagaaccgtgttttattcagccaacagtagtagctgttaacgagtcgttcctaaatcaatctagaacttcttccaagtcaaattggtcagctcagtattcagctggggtaatggcggatcttgattttttcattggagatgaagcactgacgaaatcaagatcgagtaatgcttataccttacatatcctattagaaatggcaaagttataactgggatgctatggacgggt

SEQ ID NO: 21772 - DNA, 381 bp, Gossypium hirsutum
  Clone ID: GOSHI-09MAY01-C16789_2
atcaactctctctagattcctggagacagccaaaggtttcagtcaaaaaattgtcggcttctttggattattttgagttctggtcacttggatccattcaggttggggttttacggtcgttgaatctgatcaaatcggtttacgttgatagggtacatgttttttttttaatcactttagaattaaagtcttatgtacttaagcatctgttgctttcataaactctaaataaatcactctgatttttctttggagcctacataattttgtgttcgcagaaaacattgtagaacaaggactggagatgataacgtatgtttcggaatacgaggtcattgcgcaggaaaaattgcccaagatggtttatgattactatgcatc

SEQ ID NO: 21773 - DNA, 650 bp, Gossypium hirsutum
  unsure (1)..(650): unsure at all n locations
  Clone ID: LIB3543-011-Q1-K6-G3
ccccgcgtccgccccgcgtccgcaactctctctagattcctgngaacagccaaagtaattttgtgtttgcagaaaacattgtagaaaaagaaaggagatgataacgaatgtttcggaatacgaggtcattgcaaaggaaaaattgcccaagatggtttatgattactatgcattgggtgccgaggatcagtggactcttaaggagaatcgcaatgccttttcgaggatcttgtttcgacctcgcattctaatcgatgttagcaagatcaacatgatgaccaccattttggggttcaggatttcgatgccaatcatggttgctccgactgctatgcagaaaatgggtcaccctgaaggagaatgtgcaacagctagggcagcttcagatgctggaacaatcatgacactatcgacatatgcaaattctantgtggaagaggtcgnttttaccanatctggcattcggttttttcaactttatgtacacaaagacaggaacctggttgctcatcttgtgagaagagctgaaagggctggtttcaaggngattgccctaacggaagatactccaagactaggncgcagggaactgatattaaaaatagatttaatttgncaccatattttgacattgaaaaacttaaaggttt

SEQ ID NO: 21774 - DNA, 434 bp, Gossypium hirsutum
  Clone ID: GOSHI-09MAY01-C116741_1
tcttgcaggttcatgtatgtgacgatacttgtcgagaagtcattttggatcccaacaatgagcttttggtctgcacaatttcaggccactgttttgataggttactgtcaccatccgaaatggaattggatgctgaacagcagcaagctggtggcacagatgaagcagaaccattcttgggatctggtcgctttgcacgagcttacttattaggatacaactgcgaggatgaaaaggagctggaagctgctttgaggttttgttgatccaaatcttttattactttcttttaggtgggtattagtaaatgtctcagtttgagattgatatgtggatgctcttaagttttccttttattgattctatagttgtcccaggttgataattatagtggataatgtatttactatcatgtaaaaaaaaaaaaaaaaaaa

SEQ ID NO: 21775 - DNA, 933 bp, Gossypium hirsutum
  Clone ID: GOSHI-09MAY01-C16769_1
gtaaccagagacaatgcattgcaattgatggaagctgaatttcaggttctttcacctttggttcctattcgtcaaattcaattcatccggttctgcaagcagcattccgacagtgtgtgggccatcgctgatgtttctattaatctgagcaatgctgcaaatgcactgatgtttgcaaattgcaggaggcttccttctggatgtgttatccaagatatggacaacaagtactccaaggttacatgggttgaacactcggaatatgatgagagcacagtccaccatctctttcgccccttactcagttctggttttggctttggtgcacaaaggtggattgccactctccgaagacagtacagcagcttggcacaactaatgtcccctgacatccacggtgaagacattaatacagtggggaagaaaagcatgttaaagcttgcacagcgcatggcatacaacttcagtgctggaattggtgcttcaagtgtgaataaatgggacaaacttaatgttggtaatgtgggtgaagatgtaacggtgatgactcggaagaatgtaaatgatcctggtgagcctctaaggatggttttgagtgctgctacttctgtttggatgccgataacacagcaaacgctgtttggtttcttgaggaacgaacggatgcgtaatcaatgggacattttgtctagtggtagaccaatgcaggcgatgttcagtgtcgccaagggtccagacaaggcaactgtgtctctatccttcgtggtgctgcagttaacggcagtgacaccaacatgctaattttacaagaaacatggaccgatgcttgtggtgcattgatagtgtatgcacctgttgacgcctcatcaatcaaagtggtgatgaatggtggtgattcatcgcatgtggcactgttaccatcaggatttgcaa

SEQ ID NO: 21776 - DNA, 432 bp, Gossypium hirsutum
  Clone ID: GOSHI-09MAY01-C16719_1
cagaaatacaaaatctaagaaacctcaaaaatgggaagctatagattctccttcactttcctcaccatttccaccatcctggccgtccacgtggcgctctcgtcttcttctcccactctcgacgtcgtcggcggcctttttctcccgattaaatcggaatgccgcggatccatcgccgagtgcctgatgctaagcggggaggagtcttcggacttcgatgctgagttcgccatggactccgagatcagcaggcgcattttagccaggactcgatacattagctacggtgcgttgaggaggaacacggtgccatgctcgcgacgtggcgcgtcctactataactgccggccgggagctcagctaatccttactcacgcgggtgcagtagaattacgcgctgtcgcgttagatttattactattttgtaaaata

SEQ ID NO: 21777 - DNA, 700 bp, Gossypium hirsutum
  Clone ID: GOSHI-09MAY01-C16669_4
caaaaacctaaaagaagtttgcttcgaatttgagcaaatttaagcttattaagagagtaagatggcatccactttcacagccatgtcatcagttggctcattcgttgcacctaatggtctggtcatggataagaagcttccatcttcttccaacagattgtcatctttagcttccatttcttcatcttcatttgttagtagacgaaatgttgttcttagaagatctcgtctgcccaagatttctgcagcaaaagagctacatttcaataaggacgggtcagccataaagagattacaaactggtgtgaacaagcttgctgatttggttggagtcactcttggaccaaaaggtaggaatgtcgttctagagagcaaatatggctctcccaaaatcgttaatgatggtgtgacagtggctaaggaggttgagttggaggacccagttgagaacattggggctaagttagtaagacaggcagctgctaaaactaatgacttggctggtgatggaacgacgacttccgttgttcttgcgcaaggtttgattgctgaaggtgtcaaggtggtggcagcccgtgcaaatcctgtcttatcccctaggggcattgagaagacctcaagggctttagtatctgagcttaaggctatttcaaaagaagttgaagacagtgaacttgctgatgttgctgctgttagtgcc

SEQ ID NO: 21778 - DNA, 709 bp, Gossypium hirsutum
  Clone ID: GOSHI-09MAY01-C16669_3
tgtggcacttaagatccttgataaagacaaggttctcaagcacaaaatggctgaacagattaagcaggaaatagcaacaatgaagctgataaagcacccaaatgtcatccgtttacatgaggcattagtgataataagatatattattatcacttaaatcttagaggaagtgtttttgccagaaggctgactaggctaccttcaattcctaagaatgaagcaaagttcagtttattaagagagtaagatggcatccactttcacagccatgtcattagttggctcattcgttgcatctaatgttttggtcatggataagaagctttcatcttcttccaacagattgtcatctttagcatccatttcttcatcttcatttcttattagacgaaatggtgttcttaaaagatctcatttgcccaagatttctacagcaaaagagctacatttcaataaggatgggtcaaccataaagaaattacaagttagtctgtgtttcaaatgctaaaaagtgccctaactggttaagtattcaactgaacttcaaagcctttgtatgtttgctctagcttacttcatgttgttgtagactggtgttaacaagcttgctgatttggttggaggcactccttggaccgaaaggcatgaatgtcctttttcccttcgaaatctaacataattagtaagggaaccctatgttgtggtttct

SEQ ID NO: 21779 - DNA, 653 bp, Gossypium hirsutum
  unsure (1)..(653): unsure at all n locations
  Clone ID: LIB3543-001-Q1-K1-B12
atacctctgtacttttgaggttcttagcaaaaaatctattgagtgttaattgaacaggttttcagagcttgcaaaagtgaagtaaagatataagagaaatgagtcaatctaaaattaagcggcgcgtgggtaaatatgagataggaaggacaattggggaaggaacatttgctaaagtgaagtttgcaagaaatacagagactggagaacctgtggcacttaagatccttgataaagagaaggttctcaagcacaagatggctgaacagatcaagagggaaatagcaacaatgaagttgataaagcatccaaatgttgtccgtttatacgagataatgggaagcaagacaaagatatttattgttttggagtatgtcaccgggggagagctctttgacaaaattgtaaacaacggaaggatgagagaagatgaggcacgaagatatttccaccagctcattaatgttgttgattactgccatagcagaggcgtctaccatagggatcttaagcctgaaaattgctgttggatgcatatggtaacctcaaagtttctgactttgggttgagtgcactatctaagcaagtcagggatgatggtctccttcaactacctgtggaacaccaaatacgttgcntcctgagtccttgat

SEQ ID NO: 21780 - DNA, 587 bp, Gossypium hirsutum
  unsure (1)..(587): unsure at all n locations
  Clone ID: LIB3543-047-Q6-K6-H1
cggncgcgtggngaaaaatttaattgtttttattatgatgtattttttaataccaacaaagaattcgtggttgtaagcaaggggcaaaagatctagggggaacaggttttaagagcttgcaaaagtgaagtaaagatataagagaaatgagtcaacctaaaattaagcggcgcgtgggtaaatatgagatgggaaggacaattggggaaggaacatttgctaaagtgaagtttgcaagaaatacagagactggagaacctgtggcacttaagatccttgataaagagaaggttctcaagcacaagatggctgaacagatcaagagggaaatagcaacaatgaagttgataaagcatccaaatgttgtccgtttatacgaggtaatgggaagcaagacaaagatatttattgttttggagtatgtcaccgggggagagctctttgacaaaattgtaaacaacggaaggatgagagaagatgaggcacgaagatatttccaccagctcattaatgctgttgattactgccatagcagtagcgtctaccatagggatcttaagcctgaaaatttgctgttggatgcatat

SEQ ID NO: 21781 - DNA, 549 bp, Gossypium hirsutum
  Clone ID: LIB3825-034-Q6-N6-B2
aaagttgcaatgttaaaaatattctcttttacaattatagtattagttaatgttaaaaaactaactaatacaataatgctttaaaaaactaactaatacaataatgctttgatatgcataacatacaaaagtaaatagatatatcaacctattggcactaattcagcaataatatttcctctctagaacgacattcctgccttttggtccaagagtgactccaaccaaaacagcaagcttgttcacaccagtttgtaatttccttatggctgacccatccttattgaaatgtagctcttttacagcagaaatcttgggcagacgagatcttctacaacaacatttcgtctactaagaaatgaagatgaagaaatggatgctaaagatgacaatctgttggaagaagatgaaagcttcttatccatgaccagaccattaggtgcaacgaatgagccaactgatgacatggctgtgaaagtggatgccatcttactcttttaataagcttaaatttgctcaaattcgaagcaaaattctcaacattgccct

SEQ ID NO: 21782 - DNA, 403 bp, Gossypium hirsutum
  Clone ID: LIB3197-028-Q1-M1-H1
aataagcatattccttattcttttctctctttctcaggtttttttgtagcagaagaagattatatagttaaagaggaatgagtcaacctaaaatcaagcgtcgtgtgggtaaatatgaggtgggaaggacaattggggaggggacatttgctaaagtgaagtttgcaagaaattctgagacaggggaagctgtggcacttaagatccttgataaagagaaggttctcaagcacaagatggctgaacagatcaagcgggaaatagcaacaatgaagttgatacagcatccaaatgttgttcgtttatacgaggtgatgggaagcaagacaaaaatatttattgttcctggagtttgttacccgggggagagctctttgataaaattgtaaacaatggacggatg

SEQ ID NO: 21783 - DNA, 1095 bp, Gossypium hirsutum
  Clone ID: GOSHI-09MAY01-C16619_2
cggccgcgtgggcggacgcgtgggcgggcgcgtgggcggacgcgtgggcggacgcgtgggctgccgcaaaatccatctcaactacgaccccctagggtttatctagggtttcctattttctaccgttcctctctttgtattccgccaatggcgaagccgacgagaggccgccgttctccttctgtctccggctccggttcctcttcccgttctcgttcacggtctaggtctcgctcccgctcttattccggttcagactccaagtccagttctcgctctcgctcagtgtcccgctccagatctgcttccccgtctagctctcgttctcgctccagatctttatcctcttctccttctcgtagcggtagctctcgaagtcgcagtcctcctcagcgtcgaagtgcgactgatgcatctaggcgaggtcgttcccctcctccgcaatctaaaaaatcatctcctgctccgaggaagacttcccccatccgtgagtctctggttctttacgtcgactcactgagcaggaatgttaatgaaggtcatctaagagaaatattcggtaatttcggtgaagttgtaaatgtggatcttgcaatggaccgtgctcttaatcttccaagaggatttggatatgttgaattcaagacaagagcagatgctgaaaaagctctactttacatggatggtgcccagattgatggcaatgtagtaagagcaaaattcacacttcctccacgaccaaaagcttctccgccaccaaagccaattgcttctgctactactaaaagagatgctcccaaatctgataatgttaatgctgataccgagaaagatgggccaaaacgaccacgggaaccttctcctcaacggaaacccccgccttcaccacgaaagagatctcctgtgggtcgaagaggtggatctcctagacgaccaccagagtctcctcgtcggcgacctgattctccggttcgtcgtcgtggtgaaacacctactaggcgccgacctgcctctcctgctagaaggtcgtctccattgtctcctccacggcgtcttcgatctccagcaaggacctctccgcgtaggatgcgtggc

SEQ ID NO: 21784 - DNA, 757 bp, Gossypium hirsutum
  Clone ID: GOSHI-09MAY01-C16619_1
cggacgcgtgggcggacgcgtggccggacgcgtgggcggacgcgtgggggcgacctgattctccggttcgtcgtcgtggtgaaacacctcctaggcgccgacctgcctctcctgctagaggtcgttctccattgtctcctccacggcgtcttcgatctccagcaaggacctctccgcgtaggatgcgtggcagtccaatccgaaggcgttctccacccccaaggcgccgttcacctcccagacgacctcgtagccctccaagaaggtctcccttcaatcgtagacgtagcccttctccaattcgtaggcggagccgttctccaattcgcaggcctcttcgttctcgttcaaggtcaatctcaccaccaagaggcagaggacctgcagcacggcgtgggaggtcatcatcctattcccgatcacccagtccccgaaaggcaggacgaagggtttcaaggagtcgcagtcctaggaggccattgagaggaagaagaagcagcagccacagcagcagcagtagttcgcctcctcggaagccgtagattccctcagctgattctctatttgttgtgtgaatgatgtaataggagagtcagtatcgagttgcttgagaataatacttacacattgcatctgtgatgatactttaactgccttttaacaaagtcttgatgatgagtttgtgagtattgatagtgagtacattatgtatgaaagagtttgtttccgtaaacctttagttactcataatcttttt

SEQ ID NO: 21785 - DNA, 262 bp, Gossypium hirsutum
  unsure (1)..(262): unsure at all n locations
  Clone ID: LIB3135-058-Q1-K1-E3
tcccgttcttcgttcacggtctaagtctcgctcccgctcttattccggttcagactccaagtccagttctcgctctcgctcagtgtcccgctccacatctgctttcccgtctagctctcgttctcgctccacatctttatactcttctccttcntcgagcggagctctcgagtcgcagcctcctagcgtcaagtggactgagcattaggcaggcgtccctctcgaattaaaatattctgtcgagagacttcatcgagtttgt

SEQ ID NO: 21786 - DNA, 542 bp, Gossypium hirsutum
  Clone ID: GOSHI-09MAY01-C16639_1
aaatcaccaaataaaatcaacccaaaaaatagagaaaaaatctttctccgagtttcgcctttctcggtcgtcttgttttcgtaagcttgtttacctctcaatttcatagctatgactgttatggcccctgcgccctatcgatcaacaagaagatgaggaaatgctcgtcccacagtctgatttgaccgacaatcaccagcccatggaagttgtagcgcaacccgaagctgcaaatactgtggaaaatcaaccagttgaggatcctccttcatcaagattcacttggaggattgaaaacttctctaggttaaacgctaagaagcattattctgaagtcttcgttgtcggtggttataaatggcgaatactgctatttccaaagggaaacaatgtggatcatttgtctatgtatttggatggtgctgactcagcaagcttaccctatgggtggagtagatatgcccagttcagtttggcagtagttaatcaaattcataataaatattctatcagaaaagacacacagcaccagttcaatgcac

SEQ ID NO: 21787 - DNA, 656 bp, Gossypium hirsutum
  Clone ID: GOSHI-09MAY01-C16199_2
cggggcgacccaagccgtcggccaacccttccgccaacgcgtccggttaactggaaatcaaaatatgaggctgctgggatatggtatgaacaccgtctcattgatgatatggtggcatatgctctaaagagtgaaggtggttatgtttgggcatgcaagaactatgatggtgatgtccagagtgatttcttagcccaaggttttggatctcttggattgatgacatctgtgctggtttgcccagatgggaaaacaatagaagcagatgctgctcatggtactgttacacggcatttcagagttcaccaaaagggtggtgagaccagcacgaacagcatagcatctatctttgcttggacacgtgggcttgcacacagggcaaaattggatgacaatcctaaactcttagatttcattgagaaactagaggcagcttgtattgcaactgtggaatctggaaagatgaccaaagatcttgcactaatcattcacggctctaagcttgctagggacaagtacctgaatactgaagagttcattgatgctgttgcagcagatctaaaagcaagactttgttaagtataaatttgaacatggtaactactcctaaccatcaaagttcgttgtgcttgttttgcccccttcaccttgtatag

SEQ ID NO: 21788 - DNA, 1637 bp, Gossypium hirsutum
  Clone ID: GOSHI-09MAY01-C16199_1
ccttctctttcgcccacgcgtccgcacggcatccgcagtggctgctcatttttcatttttcatctaaatctctgatccgaaacaaaaaacgtcaaatcggtgggaatagcaatgggttttgagaagatcaaggtcgccaatcccatcgttgagatggacggagatgaaatgaccagagttatttggaaatcaattaaggataagctcattcttccctttgtggagttggacataaagtactttgaccttggtcttccacatcgtgatgctaccgatgacaaagttacaattgaaagtgcagaagctactcttaagtacaatgtcgccatcaagtgtgctactattactccagatgaagctcgtgttaaggagtttgacttgaagcagatgtggaagagtcctaatgggactattaggaatattttgaacggcactgtctttagagaaccaattatttgcaaaaatgtccctcgacttgtcccaggttgacaaagcctatatgcattggaaggcatgccttcggtgatcagtaccgagcaactgatgctggcattaaaggagctgggaaacttaaacttgtttttgttccagagggacagggtgagaagactgaatatgaagttttcaacttcactggtgaaggaggagtttcactggccatgtataacacagatgagtctattcgtgcttttgccgaggcttccatgaacactgcttatcagaagaagtggcctctttatcttagtacgaagaatactattcttaagaagtatgatggaagatttaaggatatctttcaagaggtttatgaggctaactggaaatcaaaatatgaggctgctgggatatggtatgaacaccgtctcattgatgatatggtggcatatgctctaaagagtgaaggtggttatgtttgggcatgcaagaactatgatggtgatgtccagagtgatttcttagcccaaggttttggatctcttggattgatgacatctgtgctggtttgcccagatgggaagacaatagaagcagaagctgctcatggtactgttacacggcatttcagagttcaccaaaagggtggtgagaccagcacgaacagcatagcatctatctttgcttggacgcgtgggcttgcacacagggcaaaattggatgacaatcctaaactcttggatttcactgagaaactagaggcagcttgtattggaactgtggaatctggaaagatgaccaaagatcttgcactaatcattcacggctctaagcttgctagggacaagtacctgaatactgaggagttcattgatgctgttgcagcagatctaaaagcaagactttcttaagcataaatttgaaaatggtcgaaaatggaagggggtggttttgcgggtttgcaggaaaaataataataaaaagcgtcagtggaggtggcgtggatgaggtgaggatggcggttgtcaatagatgaatttaatcaccattttatgagatacagagacgagcactctctcacttgattcatctcatttttatgttttcaagggtttcgatttttaatggtaacattatatttaaggatttggattttggttaaattcccgtcgtaaaaaaaaaaaaaaaagtcgacgcggccg

SEQ ID NO: 21789 - DNA, 409 bp, Gossypium hirsutum
  Clone ID: LIB3584-029-P1-K1-C2
cccacgcgtacgcccacgcgtccgggcagcttgtattgcaactgcggaatctggaaagatgaccaaagatcttgcactaatcattcacggctctaagcttgctagggacaagtacctgaatactgaggagttcattgatgctgttgcagcagatctaaaagcaagactttgttaagtataaatttgaacatggttgaaaatggaaggggatggttttgtgggtttgcaggaaaaataataataataaaaagcgtcagtggaggtggcgtggattaagtgaggagggcggtggggatggatgttgccaatagatgaatttaatcaccattttatgaaatacagagacgagtactctctcacttgatacatcttatttttatgttttcaagggttttggattattaatgta

SEQ ID NO: 21790 - DNA, 352 bp, Gossypium hirsutum
  Clone ID: uC-gsflmaxxa070c04b1
caaaattgtatgacaatcctaaactcttagatttcattgagaaactagaggcagcttgtattgcaactgtggaatctggaaagatgaccaaagatcttgcactaatcattcacggctctaagcttgctagggacacgtacctgaatactgaggagttcattgatgctgttgcagcagatctaaaagcaagactttgttaagtataaatttgaacatggctgaaaatggaaggggatgggtttgtggtctcgcaggcaatatctttataatccatagcccggacgcggcggcgacggcaacctataggagtccttaaacctctccggtgcctcgggaaggagtatcttttcct

SEQ ID NO: 21791 - DNA, 625 bp, Gossypium hirsutum
  Clone ID: LIB3829-016-Q1-K6-C2
caaatcagcagaacttttggattagaagcttttcaaaatagcactttcaaatgcataataagaaagaagcgtgcagaaactttcagcgcggcagctgtcagtatggtgaaaggtgcaaatttcttcatgtgattcagcaacagccaaagtctaatgcatttggatttggcacacaagctatctcacaccaacaacaaaagccgaacccattcggttttggtgtccagaacaatgctcagtcaaaaggggtcaatgattttggaaataaacagagccagttcaagaatacatggacccgatcttctgcaagcagtggtgccccttcattgcggcagcctgacaatcagcctcaggcaacaaaccatagatgcaatgatcctgagtcctgcaaacgtattattgctgaagattttgagcacgagagacccttgtggaagcttacatgctacagccattggaaaaattccccttgcgatattgtcggtgatgtcagctatgaagaattgcgggcagcagcttatgatgatgcaaaacgtgggttaagcttgcaatctattattgagcgagagaggaatttactgaattcaaagttagttgagtttgaaaactttcttcgtaatcccta

SEQ ID NO: 21792 - DNA, 410 bp, Gossypium hirsutum
  unsure (1)..(410): unsure at all n locations
  Clone ID: LIB3197-020-Q1-M1-H12
cggacgcgtgggcaagcagaagcttttggaattagaagctatttcaaaatagcactttcaaatgcataataagaaagaagcgtgcagaaactttcagcgcggcagctgtcaatatggtgaaaggtgcaagcagtggtgccccttcattgcggcagcctgacaatcagcctcaggcaacaaaccatagatgcaatgatcctgagtcctgcaaacgtattattgctgaagattttgagcacgagagacccttgtggaagcttacatgctacagccattggaaaaattccccttgcgatattgtcggtgatgtcagctatgaagaattgcgggcagcagcttatgatgatgcaaaacgtgggttaagcttgcaatctattattgagcgagagaggaanttactgaattcaaag

SEQ ID NO: 21793 - DNA, 607 bp, Gossypium hirsutum
  Clone ID: GOSHI-09MAY01-C16089_1
gcggagtcctagctgcagggacagaaaaggagcgtttgatatcaggagaagatgcggcttgttgcatttgcttggctaactacgtggacgacgatgagctgagagagctgccatgtgaccatgtcttccatgtggagtgtgtagataagtggttgaaaatcaatgcctcttgtccgctgtgttaaagcgagattggtgagagcagcgctgcttcaccattggctagagattcgaattaacaaaagcatgggaagaggatgggcaaggaaaaccggttggagatgggacaatgtgtttaatgcttttggtgctcggctcctgctgcagtttatgcgtgtgtttaacattacattacatgcaaaatccttgaagagctttactttgttctacaaattcttgcattttttagctcaattcgagcttcatacgtcggcagagtgagtctctcccatgcgttcgacgcggtgagtatatatcatccaacaaggtttgtagtcccttgttcacatttctttttccttccaaatgcgttattggcttacccaaaaaaccattaccatcttgtagttaaaacttaatgtccttaatttatttggaatttttgggg

SEQ ID NO: 21794 - DNA, 596 bp, Gossypium hirsutum
  Clone ID: GOSHI-09MAY01-C16019_1
cggacgcgtgggtccaacgtgaaaatactgaggcaaaatcacgagtggaagcgatgtgggagcaaatgaataaggggatacctaaggatgccttgagacaattttcaagcaataaagcttcagccacaaataaaacttcgcacaaagcttccaataattggatgaagtatctgcaaatgagaccagcagtgcctgctggcgatacggtgcaagaaagatggacagagtcaaaggctccaagtgccaccaaagaaactgaagcgcttaataaagataaagcagtgaaggaagctacttgtggtgcagaacaatgtcagtgatgaggcaaaagaagcttgcagctgcttgccctgtcagcagtgaaaagatgctgcagctgctgcagcagctgcgtcaaatagagggaaaattgagattactgaggtacgagactttgctggtcaagaaattgaaataaaaaagcgaatccatgctgattcaaaagaggcagctgaaaagtccaaagcttatgcaccttctgcagtagatgctgttcttgaacaaatcaagaagaagccaaagctcagtgtgcttgacaagacgaaaaaagattgggg

SEQ ID NO: 21795 - DNA, 351 bp, Gossypium hirsutum
  Clone ID: GOSHI-09MAY01-C16359_3
gcttgcgcctcgtttccaactgcccagttctggactttagcggcagagagagaaatctcgccgccaccgccgccgccatgggtcgcctgcacagccgcggcaagggtatttctgcctcagctctaccttataagagaactcctccaagctggctcaagatctcttctcaagatgtcgaggagaacatttgcaaatttgcaaaaaagggcttgaccccatctcagatcggtgtcattcttcgtgactctcatggcattgctcaggttaacagcgttactggaagcaaaatcttgcgtatcctcaaggctcacggtcttgcccctgaaattcccgaggatttgtaccacctta

SEQ ID NO: 21796 - DNA, 855 bp, Gossypium hirsutum
  Clone ID: GOSHI-09MAY01-C16359_1
cccacgcgtccgcccacgcgtccgcccacgcgtccgcccacgcgtccgcccacgcgtccgctgccttgtacgtagtaacagtagcgggaaagagagaagcctcaccgccgctgccgcagccaccatgggtcgtatgcacagtcgcggtaagggtatttcagcctcagctctgccttacaagaggaccccgccaagctggctcaagatctcgtctcaagatgttgaggaaaacatttgcaagtttgcaaagaagggcttgaccccatctcagattggtgtcattctccgtgattctcatggtattgctcaagttaggagcgttactggcagcaagatcttgcgtatcctcaaggctcacggtctggcccctgaaattccggaggatttgtatcaccttatcaagaaggcggttgccatccgaaagcatttggagagaaacaggaaggataaggattccaagttcaggttgatccttgttgagagccggattcacaggcttgctcgctactacaagaaaacaaagaagcttccccctgtctggaaatacgaatctacaacagccagcactctcgttgcttaagctaggcatgtggggtggtgcaattttgggggaatccgggttcgatgtggatgctacgatggaagctagattgtgttttgttgttctagtgagatgtcctgatataagactttaattatagctgttaaaatttttgttatgcttggaaaaggaagtcgaaaacttgttttacttacgagattctacttgttatcttttcgtccatttgaaattttaagcaagaaatctttgaattttgaaaccctagcccacccttttccttttccgcttcccga

SEQ ID NO: 21797 - DNA, 369 bp, Gossypium hirsutum
  Clone ID: LIB3149-032-Q1-K1-D3
gaaatttgttgtctgaaaagagagttaagagctcatttttcagacaacaaatttcttaaaacatccattaatgaagtcttgcaacaggacaactcaacagaacagaaaaagaaacacaatctaactcgctcggagcatctgcattgaaccaccgagttaccccgaactgcactatccacatgcaaaatctaagcaacgagggtgctggcagtcgtagactcatatttccagacaggtggaagcttctttgttttcttgtagtaacgagcaagcctgtgaatcctgctctcaacaagaatcaaccgaaacttggaatccttatccttcctgtttctctccaaatgcttgcggatcgcgccaagatgatcg

SEQ ID NO: 21798 - DNA, 1267 bp, Gossypium hirsutum
  Clone ID: GOSHI-09MAY01-C16379_1
ctcacgtgtccggtgatgacggtggagatggaggtgctggctgcggaaatggaggaaagcctttcggttcggtttcgtgctcgatttgcctcgaaacggctactgataatggggatcggtcgtgggctaagcttcaatgcgggcatcagtttcatttggattgtattggttcagccttcaatgtaaagggcgcgatgcaatgcccaaattgcagaaaaattgagaaaggtcaatggctttatgccaatggttgccgttcgtatccagagtttaatgtggatgattggacacatgatgaggacctttatgacctaagtttctctgaaatgtcatttggagttcactggtgtccatttggaagcttagcacgacttccttcattcgaggtaggagagttttcatcaacctcatatcatgagttactgggacagcaagccatctttgctgaacattcagcatctgctggtcatccatgtccgtatgtagcttactttggaccaacggttcatccctcatcctcaaattccggtggaaagtgtttcagatagttctagtttcaacggtcactggaatggtccatcagtgcctagtgagatgcctacatcttatgcttttcctgcgatggatctccattatcatagttgggagcatcagtcccctccattctccacatctagcagccgaattggtagttctgatcaaccttcaaatcctcctgtcagtcaaaggtctgccaggagtggttctgatatgccaagatcaggatcttttatgcgcccgtatgttgttggccacagttctggtgctagagcagggagttcagtggcatcctcattgattcctccttaccctggtagcaatgctcgagcacgtgatagagttcaagccctccaggcattctatcatcaacatcatccgagcacttcgccgtcaataaggacacccgttatttctggctcccgttggtcaagctctcacagaaattcatgctcaagtagggccagtggcttcatcatctgaccaggtgggtggcttctatttctttccatcgggtactccagtccgtaactttcaagaggctgaaaatcctctatcaactcggttccatgcttgggaaagagatcatttgccttcgttttcaataaaccaggtcgacagagactcagtatggggtgccttccatcagtctgctggtgcaccagatcctggcataagatccggcagcttccgccaaaggcatggatctgagaggatgtcttcacataat

SEQ ID NO: 21799 - DNA, 556 bp, Gossypium hirsutum
  unsure (1)..(556): unsure at all n locations
  Clone ID: LIB3829-007-Q6-K6-E6
gttcagccttcatgtaagggcgcngagcaatacaatccaaatgaaactgatgaccgcattgaagcttagcccatgaccgatccccattatcagtttcatttggattgtattggttcagccttcaatgtaaagggcgcgatgcaatgcccaaattgtagaaaaattgagaaaggtcaatggctttatgccaatggttgccgttcgtatccggagtttaatgtggatgattgggcacatgatgaggacctttatgacctaagtttctcagaaatgtcatttggagttcactggtgtccatttggaagcttagcacgacttcctacattcgaggaaggagagttatcatcaaccacatatcatgaattactgggacagaatgccatcttttctgaacattcagcacctgctgctcatccatgcccatatgtagcttactttgggcccacagttcatccatcatcctcaaattccagtggnaagtgtttcagatagttctagttacaataatcactggaatggtccatcagtgcctggtgaggtacctgcatcatatgct

SEQ ID NO: 21800 - DNA, 343 bp, Gossypium hirsutum
  Clone ID: uC-gsflnu33B092c09b1
tttgctccaccgcacttactcataaaacaggacacccgtgatttttgagtccggaaggtgaaggaggcacacaattcatgctcaagacgggccagcggcttcataatctgaccaggtgggcggcttacattcctttacatcgggtactccagaccggaactctgaagaggctgacaatcctctatcaactcgggtccatgcttgggaaagagatcatttgccttcgttttcaataaaccaggtcgacagagactcagcatggggtgcctttcatcaagctgctggtgcaccagatcctggcataagaaccggcagctttcgccaaaggcatggatctgctagg

SEQ ID NO: 21801 - DNA, 354 bp, Gossypium hirsutum
  Clone ID: LIB3197-024-Q1-M1-F5
cggacgcgtgggttctgatacaccaagatcagcatcttttatgcatccgtttgctgttggccacagttctggtgcaagagcagggagtttatttgctccgtgattgatccccccttacccaacgtagcaatgctcgggcccgagatagagttaaggctctccaggcgtactatgaacaacatccgagaacttagccaaccatacggacacccattgcttatggctccagaagagggagcggtcatagaagacatgctcaagctggacccgtagcctgataatctgaccaagtgggtggcttctattttattccgcctggtacattaggtcgaaactttcaagaggcataaaatc

SEQ ID NO: 21802 - DNA, 674 bp, Gossypium hirsutum
  Clone ID: GOSHI-09MAY01-C16369_1
cctcactttctttaaaatacctattttctttctcactggtctccacacttacgtccaccttggaaaagcaggcagcgccaacaatgctttctctggtcttagagctcgctactcgtagaccttcctctggttcaggttctcaacttgatgatcaccattatttgtcatcaatacccaatggggatctcaaaaagaggaacaaatgtaaagtcaagttcgagttcgatgagaacaatgcccagatctttaggctgaaactcgaagacggtcatcttcaaacaaggctctttttcaatgagtatcgaaattctttcgttttctcctttctgggcatttcatgtttgtgtctttcaaagtgtttaggtgactctgagccgggttctagggttctcataaatgggaacttaataccggttatttttggatttatgggtttacccaaaccgtttttggccacttgcaaagatatcctttgagaactcctcctcctagagatcggggaaccaatttagtaatggcgtcttggggtttcttgtagggattatgttttgttctggaattggaccacctgttttcgatttccatttcgattcagttgaagggtcttggaggattcttcttgctgttttgatgggatcccttgctacttttttgtatatgcctgccgggaggag

SEQ ID NO: 21803 - DNA, 1219 bp, Gossypium hirsutum
  Clone ID: GOSHI-09MAY01-C16299_1
cccacgcggccgattcattcctaccactccaagctgcctaaccaactttctttttttcttaatatcaaattttcttttattatagtcttgccctttccttggccaccccccctaatattccaaaaaatccacttttccacaacaaactatttcatacgatatggataccaacggagccaccacgagctccgccgctggtggtggttcaacttctaaatcttccagcaaaaagcattccagaaaacccgtatattctaggttcacgcagcaagagcttcctgcttgcaaacctattcttacacctggattggtcattgcaacatttaccatcataggaatcatcttcatcccattgggacttgtctcattgtctgcttcagaaaaggtggtggaaatcgtcgatcgttatgatgaaagttgtgttccttctgattattccaatgataagcttaaatttatccaaaacccatcaattaacaaatcttgtgttaggactttgacggttcctaagctgatgaaaagccctgtttttatctattatcagcttgataactactaccaaaaccatcgccgttatgtaaaaagtcggagtgataaacaattgaggagcgtgtcagatgagaaatccacaaaagattgtagccctgaagacaaaacggtggatggtccaattgttccctgtggtctagtcgcatggagtttgttcaatgacacatacgggttttcggtgaatagtaagacaatagaagtaaataaacatgacatagcatggaagagtgacaaagagcataaattcggatcgaatgtatatccgaaaaatttccagagtggaggcttgatcggaggtgcaaaactgaattcctctgtacctttaagtaaacaagaggatctgatggtatggatgcggactgcggcactgccgacattcaggaaactgtatgggaagatagagcaagacctccaagcgaatgagaaaatacaggtcgtaatccagaacaattacaacacctacagtttttcggggaagaagaagttggtactttcaaccacaagttggatacgtgggaaaaatgatttcctgcgaattgcatacattattgtacgagggctgtgcttgtttttaacagtctgcttcatacttctttatgttatcaagccaaggccacttggtgatccgtcctacttgtcttggaacaaaagtccagctggccatcccgtt

SEQ ID NO: 21804 - DNA, 527 bp, Gossypium hirsutum
  Clone ID: LIB3829-033-Q1-K6-D8
cttattgatcatgggacctggtgcttgtcaaggtgtttatgattactcaaccaattgaaccaacccatgttggctctaattccccatttttattctctccatctgatatgattgaatcaaattataattggtggttgcatcagagcatttttgtgtcaatttcctggtttgactaaatttattgtccttgataaagatggggaatgtggccaaagcttatgatttgaagtttgtggtgaatattagcgagcttggtgaggacgatccactcatgcagaacgtgaccaggctctctcccttattgaatgtcccctggtataccactggaggttctaaacatgatggatttggttgctttctccatcaggtcaaactaccccgtgggagaatgttagatattctcagtttgaatactgcttcattgcaggacacagtggttgtgggatcaccgagtggcaagaggggcaatttgtcaaattggctgacaaggacattaaaagcaaccacaagtgactggcgcatggtag

SEQ ID NO: 21805 - DNA, 423 bp, Gossypium hirsutum
  Clone ID: LIB3197-022-Q1-M1-B5
actttggtgtagttttcattcatggagagggggacagatcacactcccggagtggcacgcactaagatcatagagttcgatttcaagtgattgttgtaagtacatttcaagatgctttccggctgaaatttggctttccaaccttcacgaattaccctttcaacttgttcttatcaactagtagagaaggatccatggctttcgtcacacaaaccggttgtttaaccctgtatgttgttcggtgaccatgctgatgagtggataggttggcgttaatattagctagcttggagaggacgatccactcatacagaacgtgaccagactctctgcattattgaatgtcccctggtataccactggaggttctaaacatgatggattccgttgctttctacatcatgtcaaactaccccatgggag

SEQ ID NO: 21806 - DNA, 729 bp, Gossypium hirsutum
  Clone ID: GOSHI-09MAY01-C17989_1
tcactttcttcctcttcctctcatctcatctgtcggtgctgccattgcggtttatactttataatttttctttacttttgtctattcctcttttaatcaagatgagcatgtatgggagagatccctggggagggccgctggagataaacgcggctgattccgccactgatgatgacaggagtaggaatctgcaagacctggacagggctgcgctctctcgccctttggacgagacgcagcagagctggctgcttggccccagcgagcagaagaagaagaagaagtacgttgatctcgggtgcatcattgtcagccgcaagatctttgtctggacggttgggaccttggtcgtctcagccgtccttgccggattaatcaccttaatcgtcaagaccgttccacgtcatcaccacggcaagcctcctcctgataactacactctcgcacttcacaaagccctcatgttcttcaatgctcagcgttccgggaagttacccaagcataataacgtgtcctggagaggaaactcgtgcctccgagatggaaagtccgatcccggcactacaatgaaggatctggtcggcggttactacgacgctggagatgctatcaagttcaacttccctgcgtcttttgccccgaccatgttgagctggagcgtcattgagtacagtgctaaatatgaggctgccggtgaacttaatcatgttaaggagattatcaaatggg

SEQ ID NO: 21807 - DNA, 301 bp, Gossypium hirsutum
  Clone ID: uC-gsronu33B061g02b1
gtgacagggcgggcacgggtacacttacactgggtcaatgatgaccccatcacaactacaattacactgcttagtggagatatgcaggtggccttatattagataatatcttttatgaatattattttgtggtgctacacatagaagattgacatcataatccagttattgtggtgagtctacatctgttaataaagatagggatgtaccgagagatccctggggagggccgatggagataaacgcggttgattccgccactgattgatgacaggagtaggaatctgcatgacctggactg

SEQ ID NO: 21808 - DNA, 828 bp, Gossypium hirsutum
  Clone ID: GOSHI-09MAY01-C17969_1
ttttcacgcgtccgggaaaaaaaaattctttttccctcgcgcccccaaagttcttatttttatgtttttggtcattttctgtctgggatttccagcttttaagtgcagtctcggtttaattatgaaaactcaaacgaagaaaggaaaaatagggactttgattaattagaaaacgcatcttcttccccttcgctttcgactttcttttaggggttttaaacaaagaacacgagaatccacacggcaaattatggttgacagaagctatcaatgcaaaggtgtgctaatcttagcttatcagagttttggtgtactctttggtgacctaagtatttcaccactttatgtctttaaaagcacattctctgggaatttgagtaattatcaatctgaagatgtcatctttggggccctatctttgattttttggactttgacacttctttccttgttcaaacatgtcattattttgttaaatgccgatgattatggtgaagggggaatttttgttttgtattagttcctttgatggttctccagttttttttgttcctacattaaacattcatttagtgacttttattttaaaatttccctctttaccctatctcctattctgccagccatgcgcctcttactacacggtaaactcctctttcttcttctcttcttcccctttcccttcttttcctccttccttttcgttttttttttattactcatatgtatttttataattagttattatattatatttccataaccgccccaccccccctaccacccccttcttttttctttattattttttcaatctttttttatttt

SEQ ID NO: 21809 - DNA, 643 bp, Gossypium hirsutum
  Clone ID: LIB3543-060-Q6-K6-E2
gctaatcttagcttatcagagttttggtgtactctttggtgacctaagtatttcaccactttatgtctttaaaagcacattctctgggaatttgagtaattatcaatctgaagatgtcatctttggggccctatctttgattttttggactttgacacttctttccttgttcaaacatgtcattattttgttaaatgccgatgataatggtgaaggaggaatttttgctttgtattcgctcctttgtaggcacgccaagttttctctgcttcccaatcatcaaacagcagatgaagagctttctacgtatcacaatccccgttactcgtacagaaatccgcagtctctgacagtcaaaaggtttgctgagaggcataaaaaggcaaaaactgctttgcttcttctagttttgtttggtacttgcctgcttatttgtgttggctttctcacgccggcaatttccattcgttcggccattgaaggggtcaaagttcgatcaagcgaactgcattatggtgtggtgcttatcatagcctgtattttgttggttggcctctttgttttgcaacaccgtggcacctatagagtggccttcatgtttgcccccattgtgattttatggtcattgtccattgcggctatt

SEQ ID NO: 21810 - DNA, 697 bp, Gossypium hirsutum
  Clone ID: GOSHI-09MAY01-C17859_1
ggtacggagagctgtcaaacataaatgggtcatttcattgtgaggtatcactcatataagatagcttttatgcgttctgcaatagtatttgtgcttataatgtcacattttttgagacaatttaaatttcatgcagacttttagtggctttcacagaatggatattttttggcctttgatgaaccttttacagcgtcaaagaaaccctgtttcaagcaagattgaacgatgaaaacctattaatctgtgtactgtaggaatgttgctagcgattgtatcagtcagaccgggctgcttgcatgcatgcaagcaagggtacagttgaacatttgtgcgacgtggctgttggcttggtggataatcaacccaagcccttgttcagagcttaagttgatctttagaatgtgaattattattgttgtttcacgaatttactccgatttctccttttttttttttttttttttttttgctaagactcaaattcgtgctttgttgaaacaagaaattataatcttgagttgaaggtattggaagttgacaaccatggcattgatattcttatcatcaagcagtattaaccacgaataatccaatttgggttcacccaatcactatggacttgttcttgttgcttaaccttcccttatggaagcctgtaagaggatcacaaacggtgacaattttcaacccaaga

SEQ ID NO: 21811 - DNA, 392 bp, Gossypium hirsutum
  Clone ID: LIB3197-049-Q1-M1-E8
aatcttgaagggtgttacggagagctgttcaaacaatacatgggctcatttcattgtggagacttctagtggctttcacagactggatattttctggcctttgatgaaccttttacagcgtcaaagaaaccctgtttcaagcaagagtgaacgatgaaaacctattaatctgtgtactgtaggaatgttgcaagcgattgtatcagtcaaaccatgctccttgcgtgcatgcaagcaagggtacgagttgaatatttgtgcgacgtggctgttggcttggtggataatcaacccaagcccttgtcaaagcttaagttgatctctagaatttgaataattatggttgtttaacgaatctactccaatttctccccttttgggttttttttttg

SEQ ID NO: 21812 - DNA, 826 bp, Gossypium hirsutum
  Clone ID: GOSHI-09MAY01-C17499_2
cccacgcgtcgctccgatgccaaaggggacataggaccatctgatcgagatcttgctgccaatataaacgaagacacacaggctgacgatgcatctaaaaaggtgaggctgccaaaagaattgacttttcaggatatgtaccacaatcaagatgcatttgatgatgatgatgaggatgacagtgattgggagcctgtacaaaagcacatagagattttgaagtggttttgtaccaactgcacgatggtcaaccttgatgatgttttcctctgtgatatttgtggggaacataaagaatctggcatcctaaggcatggattttatgcatctcctttctcacctgaggtagaacttgttcaggttgaatcagaagccacaggaagagagaaagaaatttggtccgaggcttcagcttcaaactgttctacggcagttggttttgatgaaagaatgttgctgcactcagaggttgaaataaaatcacatccacatccagaaagaccagatcgtcttcgagctattgctgctagcctttctgctgctggtatattccctggaaagtgctgcttaattcctgctacagaaatcactctggaggagcttcaaatggtccattcctcggagcatattgaagttgctgaacttacccgccaaatgttttctagttattttactcctgacgcgtatgctaatgagcattcagcacatgctgctagacttgctgctggtttatgggcagatcttgcttcatcaatatctttctggacgcgtaaaaagtgggtttgatgtggcttgactacctgaccatcatgctgctgtcataaca

SEQ ID NO: 21813 - DNA, 1948 bp, Gossypium hirsutum
  Clone ID: GOSHI-09MAY01-C17499_1
tttcctactccaaatgtatccatgcatagaaattgtgaagtgcgtgtattatcttcgtagaaaaaataacacttttgctctttcttcaattatcttccatttacgggtggcttgaaagcacttccctgagaaggggtgtgggagtgatagcaaaggcggacggtcattaaaacccaaagtttttgtaaattttaattatacccaaaagattttaattaggcctcccaaaatttttgaaaattctcattaaacctttgaaaaattttaaaaatttcagttagactcttcaaaagcttttgtaaaattttattaaacctctaaaatttttgaaaattctctttaaaaccctcaaaatattttaaaattttagtttgaatcccccaaaatttaatgccaagatccgccactgaagtgatagggtatcaatgtatgtgttgtgtgtcaaaatctaggctctatgtcaatttctcgagtgatgctaaaatgaaacacaatctgacttgatgggttgttttttactggcagttattttactcctgacacgtatgctaatgagcattcagcacatgctgctaaacttgctgctggtttatgtgcagatcttgcttcagcaatattttctggacgcgtaagaaatgggtttgctctggttcgaaccactggccatcatgctggtgtcacacaagcaatggggttctgcctccacaacaatgcagcagttgctgcattagcagcacaggctgcaggggcgaagaaggtgctcattgttgattgggatgttcatcatggaaatggtacacaagagatatttgaccaaaataaatcggtattgtacatatccttacatagacatgaaggaggaaagttctaccctggtactgggtcagcttttgaggttggtaccaagggtgcagaaggatattgcgtgaatattccatggagtcgtggtggagttggagataatgattacatttttgcatttcaacacgttgtgcttccaatagcttccaagtttgctcccgactttactataatatcagctggatttgatgctgctcgtggtgatcctttaagatgctgtgatgtgactcctgctggttatacacagatgacacacatgttgagtaccctctcgggtggaaagttgctagttgtacttgagggcggctacaacctccgttcgatatcatcttctgctactgcagtgattaaggtacttttgggtgaaagttgcgagtgtgaaccagagaacatcgttccttctaaagctggcctgcttacggtgttggaagtcctgaagattcagatgaagtactggccaaatctaagttcaagcttcgaaaaactgcagttgcaacgggcaatgtattctgtggagaagaaacgtaagcaactgttcttgaacttctctcgtagtccagccgtccttataattagaactaaaggcatgcatggaagagggcttctttcgtgttttttcccattgtctcgggttcaaacttatcacatagtgcgaggatggtttcctattattttacattaattacttgtttatttattgcagaaaaacaagttaaacggagacgggtgttcgagccaccgttatggtggaggtggggcagaaaacaactattgtttcatatccttacaggacattttcatctaaaatgaaagcagtgctcaaaattttgagactttatcctcattccatccctttttgtcgtgtaactgtgcattatagacaagttatatcacggacaagaaatctagataaatattttcggatttagggtttagtgttgaaagactttacggactttatggaagtgttttagtggactttatggaacaacatatgcaacatatgttatcctaaggctaaagcttttgagatactatatccaaattaaatgtcgtaaatgaacatttgccctttttttttcctcct

SEQ ID NO: 21814 - DNA, 437 bp, Gossypium hirsutum
  Clone ID: GOSHI-09MAY01-C17459_1
aaagaaaataaacccaaaagcttcccaattttgctttttggttctttgatttcataattatcatccatcaatcaatcatgaccggaaaagccaagcccaagaagcacacggccaaggaactcgccgccaaggtcgacgctgccaccaccaaccgtggtggcggcaaagccggattagctgaccgttctgggtttgagaaaggaggacatgccaaatacgagtgtcctcattgcaaaacaaccgctcccgatgtgaaatcgatgcagatccatcatgatgccaaacatcccaaaattccttttgaagaatctaagcttattaatcgtcatgctgttcatgtcgctgagccatctaagcctcgtcctggtgttaggggtagccttagaaaataataaaataacaaaaaaaaaaaataagggcggccctcgcgatctaga

SEQ ID NO: 21815 - DNA, 621 bp, Gossypium hirsutum
  Clone ID: GOSHI-09MAY01-C17449_1
cctcacacattgccctctcccattcgcagctctctcaagtctcaaccaccacggaattcccatatttcattttaaacaaacaaaactgagagagcttctcccctgccaattcttcatttcttcatttatacacttgctctaatctctcaaacaatggattcttcatcatcatcatcatcttcaggtccctcacctctcgatctcatgtcggctttagtcaaggccaaaatggacccttccaacgcttcctccgactctgctgctcaagtaaccaccgtccttttcgagaacagagagttcgttatgattttaactacctccattgctgtgctcatcggctgcgtcgtcattttgatctggcgtagatccgcttctcaaaagcctaaacaaatccagcttcctcttaagccttcgatcattaaagaaccagaacttgaagttgacgatggaaagaaaaaagtcaccatcctcttcggtactcaaaccggcaccgccgaaggcttcgctaaggctctagtcgaggaggcaaaagcacgctatgaaaaggcgacttttaatattgtagatttggatgattatgcggcagatgatgaagaatacgaggagaagatgaagaaagat

SEQ ID NO: 21816 - DNA, 334 bp, Gossypium hirsutum
  Clone ID: LIB3197-044-Q1-M1-A11
cacaattgccctctcccattcgcagctctctcaagtctcaaccaccaccgaattcccaattcttcatttcttcatttatacacttgctctaatctctcaaacaatggattcttcatcatcatcatcatcttcaggtccctcacctctcgatctcatgtcggctttaatcaaggccaaaatggacccttccaacgcttcctccgattctgctgctcaagtaaccaccgtccttttcgggaacagagagttcattatggttttaactacctccatcgctgtgctcatcggctgcgtcgtcattttgatctggcgtaaatcatcttctcaaaagcct

SEQ ID NO: 21817 - DNA, 602 bp, Gossypium hirsutum
  Clone ID: GOSHI-09MAY01-C17469_1
aacagaagccagcttgaaactcactgatgatggcatcgcatccccacttcatatcgtatttatttctttgataatcactttcgatttgcctagataagatcaaaactcgcatttaaagcagatctctcttacactctctcttgttcaatttctttatatgatttaacttcacaacacacttgtcactcaaaaatcacaaaaactcagtgaactcagtgaagttactttataaaaaaaaatcatgcccatgtttgattatgttgaatttagtgtgtagtgtgaaggtgattgtggcttgaaaacagtattcataaaaggaacaaaaaaaaaaagatggggagggcaccatgttgtgacaagaaggggttaaagaaagggccatgggcacctgaagaagatgagatccttacaaattatatcaagaaacgtggccatggaagctggcgatcgcttcctaaacttgcaggtcttcttcggtgcggcaagagttgcaggcttcgatggacgaactatttaagaccagacataaaacggggtccctttacccttgaagaggagaagcttgtcattcagcttcatgccattcttggaaataggtgggc

SEQ ID NO: 21818 - DNA, 734 bp, Gossypium hirsutum
  Clone ID: GOSHI-09MAY01-C117451_1
tctacgcgtccgttctctaaaaccaaacaaattccctctattgttgggttgtcgtccttgtttttctttttccatgtctgacaaacaagctcaccttaatggggcctactacggcccttcaatcccaccacctacaagaaactaccaccgtcccggccgtggctccggctgtggctgtggctgctgtcttctcaaatgccttttcaacatcatcatcaccgccatcgtcatcatcggcctagccgttttcatcttttggctcatcttccgtcccaacagggtcaagttccatgtcaccgacgtccaactcacccaattcaaccctcacttcccacaacactttgcattacaaccttgctcttaacatgacaatacgtaatccaaccgtagatcggcatatctacgatcgtatcgaggctaaagcttactcgaggatcaagattcataccgtaacgttaccccgtttatcaggacataagacactagttacttaaccctgtttcgtaggcagcaatttgtaggcttggtgctgatgaaactcgagttaatgaagacgggttaacgggtttatgatatcatgtgaatggatttgaggattgtttaagcttggaggtcaaaactgtagttaacctgaatcatggaattgaggtcttgaacacgggatggaccttgtggacgtaaacccctatggatgatttagataaccgataagcttgtcatcggatcacttattg

SEQ ID NO: 21819 - DNA, 610 bp, Gossypium hirsutum
  Clone ID: GOSHI-09MAY01-C17419_1
cccaacacaatccttcacgcattgtctatttgtgccttctaagaaacttcaaattcgaatattttctttgttttctcggcctaattgttcgaaaactccatggaagacgatttcgagttcccaacagccagcaacatggaggaagacgagatggacattccagaagatgacccagttagcccaatcctaaaagtcggtggagaaaaagagattgggaaaaatgggttgaagaagaaactggttaaggaaggtgaaggttgggagaatcctagcagtggtgatgaagttgaagtgcattatactggaactttgcttgatggaaccaagtttgattcaagccgtgatagagggactccattcaagttcaagcttggccaaggacaagttatcaagggctgggatgagggtatcaagacaatgaagaaaggtgaaaatgcaattttcaccatacctgctgagttggcgtatggcggatccgggtcacctccaactattcctcctaatgcaacccttcaattcgatgtggagttgctttcttggacgagcgtcaaggacatatgcaaaggtggaggaatcttcaagaaaatacttgttgaaggggagaaatggg

SEQ ID NO: 21820 - DNA, 535 bp, Gossypium hirsutum
  Clone ID: GOSHI-09MAY01-C17439_1
atggctacttgtgcttggttactctccctttgctttactctcgttttctgtctgtgtaatgcctctcgtacgccacccatttccccatcccttgatggatttttgaccaatggtaacttcgagcaagcacccaagaaagagaacctcaacaaaacagtgatactggggaaatactcgcttccaggatgggaaatcgatggcacggtggagttcatgtcagggggacctcaacctggtgggttttacttccccattccacgtggtgcccatgctgtgaggctgggcaacgaggcgtccatctctcagaatgtgaatgtcaagcctggcttcatttactccataacatttggtaccacaaggacttgcgcccaagatgaggtgctcaggatctctgtccctgctcagaccactgacatctccattcagaccctttacagcacggatggtggtgacaccatggctatgctttaaagcttccgttaagtagtcaagtcaccttcataaccctgggttcaagaagtaccacatgtggcct

SEQ ID NO: 21821 - DNA, 1540 bp, Gossypium hirsutum
  Clone ID: GOSHI-09MAY01-C17429_1
ggaaattcataatatattattatattataaacatttcttaccattcaactccctctttgtaacggcagcaaccaatccaaaagctttaatttattcctcgtcacaattttgctagcgttaccggcggtcggatacaacccactctaacccaacccttctggatcaatggctacgcttacacgtgtcccattggtattttccagcaacagggttgcaccagctccagctgcttcattaaatcacaaatgtaattgcgtggcgtcatcatcacccttaacaagaaaacttccacattgttctactccctcttctcttagcttcaaccctttttcatcttcattcccttctttctcaacgcgacaaaacaagggttttaggagaacatctctggtagtagcttccatggctgatctcagcactgtgctcgtcactggagccgctggcagaacaggtcagatagtttacaagaagctgaaagagaggtcggatcagtttgtcgtgagaggactcgttagaactccagaaagcaaggagacaatcggtggagcagatgatgtgtttgttggggatatcagggataccacctctctggttcctgccatgcaaggaattgatgcactcataattcttactagtgctgttcctagaatgaaacctgggtttgatccgacgaaaggcggaaggcctgagttctattttgaagatggagcatatcctgagcaagttgactggattggtcagaaaaaccaaatagatgttgctgaggaggctggagtgaagcaaattgtgttggttgggtccatgggtggaacaaaccctaaccatcccttgaacagcttgggcaatgggaacattttggtctggaagaaaaaggctgagcagtatttggctgactctggtgtcccatacacaattatcagggctggaggactgcaaaataaagatggtggcatcagaaaactacttgtcgggaaggatgatgagcttcttcagactgaaacaaaagcaattgccagacctgatgtagcagaagtctgcattcaggcactgaaatttgaggaggccaaatttaaggcgtctgacttagcctcgaaacctgagggagttggcaacccaacaaaggattttaaggctcttttttcccagatcactactcgtttctaattctcaagttccataacttccgtcttagactttgagtgatgttatgctcctaaagactttttatcagtatctcgaacttctaaaaccatgctatgatctgcagagaggtctacaaacaagcaactctcagctggtctactaaggtgatggtgtgatgatattatcaaagaattagcattcctagtgttatttttgtctgacattgctatggaactcgatattttagtaatatttgctctcatctctgtcttttgatttgctttgaaagccatacatttttaggaacatgagatatgatatggagactgttgtaaaaggagcagccaaaacatcatgtaataaagttgtttgagaaaaggaaattgtttgcattaag

SEQ ID NO: 21822 - DNA, 367 bp, Gossypium hirsutum
  Clone ID: LIB3145-016-Q1-K1-F8
cgcgttcgtctatcgcttcgcttactaacttcaaaatatttgggaacacttgtggaactgatgatggggctgtaactgtttctgagggtcacgtctgatagaaacagggagcgataagctggtgtgcacggatatctgaaacatatgctgttcctagaatgaaacctgtgtttgatccgacgaaaggcggaaggcctgagttctattttgaagatggagcatattctgagcaagttgactggattggtcagaaaaaccaaataaatgttgctgatgaggctggagtgaaacaaattgtgttggttgggtccatgggtggaacaaaccctaaccatcccttgaacagcttgggcaatgggaacatttt

SEQ ID NO: 21823 - DNA, 565 bp, Gossypium hirsutum
  Clone ID: GOSHI-09MAY01-C17699_1
cactgagaagcagggattgaagatgctagtaactgcaggtccacgtgctcagaaaatggtggggatatggctttttggttctgctgcatgggtttttagtatggtggtactaagtggtgtcacacgattaacccgatctggcctttcaatgactgattggaaattcgccgggaaccttcctcccctatctgatgacgagtggcagcaagagtttgagaaatacaagcagtcaccagagtacaagcgagtaaacaaagggatgagtattgaagagtttaaatttatatactggatggaatatgcccatcgaatgtgggggagagccctaggcgtcatgtttgcattgccgttctcgtattttcttcgtaagggatatattaccatgcgccttggactaagactctctgctctatttgctcttggtgctggtcagggtttaattggttggtggatggttaaaagtggattagaggaaccagcttcggaatatgttgagccccgagtgagcccttatagacttgctgctcatcttacttctgcattcgttatttatagtggcctgttt

SEQ ID NO: 21824 - DNA, 809 bp, Gossypium hirsutum
  Clone ID: GOSHI-09MAY01-C17689_2
ttccacttgaagcttttgtggcagcaggttagctgtgtgttgcagctcttcaccaaactccaaaagtcttacatctaaacaaacaattcaaacacaacaacaacagtcagactgttagggttgtatgccctgaatttctctctttatttaactgttatgtcctgtttcagttattctgcatgttgattcaaatttatagaatcttttccgagaaaaagtgaaaaacagctatactctcatctatcatatattatttgtgaacttcttttaatttcactttctcatgctttgagtttgtgtttactgcaggccaagaggcggagggggagaactcctactccaggaagatatttggggttgagaacttctcgtgctcgtcatcgatctcgaagcaactcacctcgtcgatctccaaggtattcctcttattcaagaagtcagagtcggtctcctcgttattcatctggcaagggtaggagtagatcttactcccctcggcacaggtcgtactcccgttctccctccccttacagtggatcgtcagaagactgctactatagaagatgggaccgttcctactctcctgatgatcgatattacagaaggcgtgatagatcttacactcccaaggactgttactaccgcaggtggaaccgttcctactcacctgatgatggatactatagaaggccggggccgttcttatacacctgatgaacgatactatagaagggcggatcgttcctactcacctgacgatcgatactacagaaggccgggactgttcctaactaacctgatgatcgata

SEQ ID NO: 21825 - DNA, 616 bp, Gossypium hirsutum
  unsure (1)..(616): unsure at all n locations
  Clone ID: LIB3825-021-Q1-K6-F5
nnncgtccgagnaaaccctcgctattaagaaagaatacgatagatctaaacactccatcctctacctttaactgttcatttgtttaagatgtcctactctaggaggtcaagctattctccttctccttccccatacaagaggtacaggaggtctgtctcgagatctttgtcaaggtcaaggagtcgctcaaggagtgttgaaaatcctgggaacaatttgtatgtgacaggcttgtcacatcggatcaccaagagagagctggagaagcatttttccagtgagggaaaggtggttgatgttcatcttgtggttgatccgtggacaagggaatctcgtggctttggattcgttacaatgtcgactatagaagaagctgaacgttgcattaagtatttgaaccgctctgttcttgaaggacgtgtcattacagtggagaagcttttgtggcagcaggttagctgtgtgttgcagctcttcaccaaactccaaaagtcttacatctaaacaaacaattcaaacacaacaacaacagtcagactgttagggttgccaagaggcggagggggagaactcctactccaggaagatatttggggttgagaacttctcgtgcta

SEQ ID NO: 21826 - DNA, 764 bp, Gossypium hirsutum
  Clone ID: GOSHI-09MAY01-C17189_1
cccacgcgtccgaaaaaaaggcctctcaaactgtacaaagtccaaggttgcatggatttctcagctaataattttcattagagaagtagtgcaactttgttctcgagattcatcttgtgttgtattcggtttaggcgcgtaaaagacgtgcttcagataattgatccaagagagttgtgctcttagtcatggattctttgtggaagcttttgtatttgcttgagcctgccccactgactctcatacttacagcagtggctgtgacatttggatctgcatttcgtgctctgaattatgggaaagaaatggagcggaaccgtgacttgtcggaagcatcaattactctagatcggtcccaagcattaatgatcccaataatgagctcctgcagcttgcttttgatgttttaccttttttcttctgtttcacaacctcttgactgcattcacagctattgcctctgtttcatccttaattcttctgtctatccccccacgttgcctatttgaaatcacaccttggttgggctgacccatttgtgtctcggtgctgttcaaagtcatttaccaaaatacaaggcttattgttattggcatgcatacttatggttgcagcttggcttgtttcagggcattggattttgaacaatttgttaggtatttccatatgtattgcatttgtcagtcatgtgcgccttccaaacatcaaaatatgtgcaatgcttctagtgtgcttgttcgtgtatgacatattctgggttttct

SEQ ID NO: 21827 - DNA, 431 bp, Gossypium hirsutum
  Clone ID: GOSHI-09MAY01-C17129_1
cggacgcgtgggctttttttttttttttgaaggcccaaaacaataggggggggtataaagaaatgaaggtcaatgaaaatagcatcattaagaacaaatgaacaatttcttgaaaccctctacaagtgggaaatccatccacatatacagcaatatatctactttcaaaactatccacgtagggagacaaaaggataaaaactacatacacgttgctactcacccaaatatgcatgaggagcgtgcaatacaagaagcttatcccatgtttggaaaaattccagagaagtttgggatcttgtcaacgtgcttcagggcgcgctccgcaatctgccgggttctgtagtccgcatggtggaaggcatccaccagtgcagtgctcaccttttgatctccagaaacttcataggctatatcatcattcctttaaa

SEQ ID NO: 21828 - DNA, 628 bp, Gossypium hirsutum
  Clone ID: GOSHI-09MAY01-C17059_1
ccgatatggatgcacctaaagaaatctttcttaaggactacaagtcccctgactactactttgacacggtggatttgagatgggcggggggtgaggagaaaacaattgttgcttcaaaaataactgtgttcccccgtgttgaaggttcttctgctccattggttttggatggggtagatctgaagctaatttcaatcaaggttgatggcaaggaactgaaggagggagattatcatttagactcacgacatttgacacttccatcaccaccacaaggcaaatttactttggaaattgatactgagatacaacctcagaacaacacttcattggaggggctctacaagtcatctgggaatttctgtacacaatgtgaagctgaaggcttcaggaaaattacattttatcaagaccgtcctgatataatggcaaaatacacatgccgtatcgaagctgataagttactgtatcctgtgttgttatctaatggaaatctcataaagcaaggaacctttgaaggtggcaaacattatgctgtatgggaagatccctttaagaaaccatgttacttgtgtgccttagtaccggccaattggagagcagagatgacacattgttacccgctctg

SEQ ID NO: 21829 - DNA, 1492 bp, Gossypium hirsutum
  Clone ID: GOSHI-09MAY01-C17079_1
ggcctctcgttggtactgcctcttttttgttctatttgtcctgattggggtctactttgtcacaaatttgatccttgctgttgtatatgatagcttcaaaagcgagaatgttgggttcctaaacaaagagcaatgcattcatctgtttgaagaactgaataagtacaggtctttgccaaaaataacaagggaagaatttgagttaatatttgatgagctggaatgatagtcatgacttcaagatcaacttggatgaatttactgatctttgcaatgccattggtctaagatttcaaaaggaggatgttccatctttgtttgaaagatttcaaatctatcgttcgcctttctctgaaaatttgaaagcctttgttcggggtcccaaatttggatacataatatccttcattctcatattgaatctgtttgcagttatcattgagacaacgcttgatattgcaaacaactctggtcagaaggtgtggcaggaggttgagtttgtctttggctggatatatgtactggaaatggcactgaaagtatattcatttggctttgaaaattattggagggatggtcagaatcgcttcgattttcttatcacatggataatagttataggagaaactgtaacttttgcatctcctgatgaattttactttttctcaaatggagaatggattcgctaccttcttcttgccagactgctacgattgataaggcttctcatgcatgtccgaagttatagagctttcgttgccacattcttaaccctaataccaagtttaatgccatatcttgggaccatattttgtgtcctatgcatctattgctcaattggtgtacagatctttggtgggatcgtcaatgctgggaatcctgctctagaagcaacagaactcactgatgatgactatttgctcttcaattttaatgattatccaaatggaatggtaacactttttaacttgctggtgatgggaaattggcaagtgtggatgcagagctacaaagaattaactggaacttcttggagcctagtatattttatcagcttctacctagttcctgttctgttacttctgaatttggtcgtagcttttgtcttggaggcattctttgctgaaatggatcttgaggcctcagggaatagtgaagaagatcacaaggatgctggctcaggaaaaggtcgaaaaagccttgctggcacaaagcctcgtagtcaaagagttgatctccttccacctcacatgttgagtgcggagctggataaaagccactcctccgcctcctccgacgcctacacttgaccccttctctctcttctggcgcctcacttgtttcaagtgtctccacttggccgatgcacccccaagtccgctcgcaaagcctttcttttagatcgaacccaaggttgtgtattaagctctgagattgtgatagtgatataaatattattatatgattgataaataaaattgcccctcctccc

SEQ ID NO: 21830 - DNA, 375 bp, Gossypium hirsutum
  Clone ID: GOSHI-09MAY01-C17029_1
agaagagctctctctactccgaggacatctcagagatgccagcctatttaactccattgcttcaaaccggtagctgtgacgaccgaaactgagcctggtagcttcaatctacgtcaagccccgccaatgggtccgaacaataaccaccacccgtcctccacctccacctccaccttcactccgcctaactcggcgcatgactgcccttttctcaccctccacccattttagcaattcccttcttcccaaaaaaaacctacttcctcttgtgagatttgcctttcccaactgcttctcttcctcagcaaacaataaaggagctatcaacgggtcgggtcccggatcggaccgcattcttgcagatatggatcccga

SEQ ID NO: 21831 - DNA, 334 bp, Gossypium hirsutum
  Clone ID: LIB3197-034-Q1-M1-G1
gctcaacactcggaggacatctcagagatgcgaagctctttaactccataaattaaacgccccaaaatgtcaggactgaaactgagcctggtagcttcaatctacgtcaagccccgccaatgggtccgaacaataaccaccacccgcccttcaccttcaccttcactccgcctaactcggcgcatgactgcccttttctcaccctccacccattttagcaattcccttcttcccaaaaaaaacctacttcctcttgtgagatttgcctttcccaactggtttctcttcctcagcaaacaataaaggagctatcaacggatcgggtcccggatcg

SEQ ID NO: 21832 - DNA, 1562 bp, Gossypium hirsutum
  Clone ID: GOSHI-09MAY01-C17399_1
ggaaggttggccgctcgcgcggtcacgcggcccgaaattccggtctagaccacacgcagaatctgaaaccccccccctgattatttgatcactctctaaaaccccagccaaacgagtctttccaaacccaatggattctgtgtttgcctccattgttcaagctcctgaagatcccattcttggggtgacagttgcttataacaaggatccaagcccaaacaagttgaatttaggtgttggtgcttacagaactgaggaaggaaaacctctagttctaaatgttgttcgaaaagcagaacagcttcttgttaatgacctgtcgagagtcaaggagtatcttcctattcttggtctcgcagagttcaataaattgagtgctaagctcattcttggtgatgacagtcctgctattcaagagaacagagtggctactgctcagtgcttgtctggtactggttccttgagggttggagctgagtttttagcaaagcattaccaccaacgtactatatacattccacagccatcatggggaaaccatgtgaaagttttcacgatggcagggttgtcggtgaagaattaccgctactatgatccaacaactcgtgggcttaatttccaaggtttgctagaagatcttggcgcagcaccagctggagctatagtgcttcttcatgcctgtgctcataatccaactggtgttgatccaactggttgagcaatgggaacagatcagacagtcgatgagatctaaagggttattgcctttctttgacagtgcttaccagggatttgcaagtggtagcttagatgcagatgcacaacctgttcgcatgtttgttgcagatggcggggaatgctttatagctcaaagttatgcaaaaaacatgggactttatggggagcgtgttggtgctctcagcattgtctgtaaggcggctgatgttgcaagcagggttgagagccagttgaagcttctgattaggcctatgtattccaatccaccaattcatggtgcctcaattgcaatgactatcctcaaaaatagtgatatgtataacgagtggaagattgaactgaaagctatggcagaccgaattattagcatgcggaaacaactatttgatgctttaagtgctaaaggtactccaggtgactggagtcacattataaagcagattggaatgtttactttcacaggattggacagtgatcaagttgctttcatgatcaaggagtaccacatctacatgacatctgatgggaggattagtatggcaggtcttagctccaagactgtgcctcatcttgctgatgctatacatgctgcagtgacccgtggctgttagaaagcaaattttaaagttctgtagcaagtactttttgggttttagccccatccatggcatgactgttttcttcttaacttttcaagcacatattatttccataataactgttgggtctggattggaaccaaattttgatattcgaatttcatgttaaacagtacatgtccttttaaacttcatcgtaatggcatgcttgctattggtatcaat

SEQ ID NO: 21833 - DNA, 885 bp, Gossypium hirsutum
  Clone ID: GOSHI-09MAY01-C17359_1
attaaaaaccggataaaccaccttttcattgttcactttcatttttccctttaaataataaaacccagacaagggacagccaacggtaccttccaaagaaatcgaaattttgacttatgattctcatatacatacccccagcccccaatatctcccacaaccttccatttacgtcttaactgttgaatgatcaatttccatttattcttttggtttttgaatttttgagtttttagggcgaaaaaaacaatggcgaatttgcaactggaaagagagactagcattgggatgcaagtggaagatctatgggatgttcaagaatcaaagcttaatcctacgcagaaacttaacgcttgctttgaaaacatccctgtctctgctttccctcatactcctcaagggatcgagataaaatcggatgcgagtttggccgaggctgttcaaatacttgcccaaaacaagattcttagtgcaccagttgtcaatgttgatgcacctgaggatgcaagttggattgatagatatcttggcattgtagagtttgcaggcattgctgtatggattctccaacagtcagaaccaccttcacctacaaaccattttgcctaccggagctgaatctgcagtagcttctgctaacggaatgccctcttctgccgagctcaggactttaggctctgaagatgcttcaataactgctggagacttttttgaggctctaacatttctccgagttcatagaaaagcaatggtcgggaattcaggatcagttccgctgggcaccgttccatgctttcagcaactcaaaactcgtttttgaccatgctgttactgctttcaagatcaaaagtgaagagattccaatgttaggcttggtgctgaaaa

SEQ ID NO: 21834 - DNA, 739 bp, Gossypium hirsutum
  Clone ID: GOSHI-09MAY01-C17349_1
cccacgcgtccgcccacgcgtccgtgttattcttggctcaagatttagggatgctttccaagatcctggtgcctttcttgcgatagaacctctctttgagaaagaaagatatatagtgacttacaatccttcaaagggaaaagtatatgcactgctcaaggatcaagcgaagtcagatgacattctaaaagcagcattccatgcacatgtgctcttgcatttcattcattctgccgataatagtctatcatctagaagccagcatgaacatctcatgccagcagctactgattttgagcttcatattgctgaatcatgtaagatggtttcaacatcatatagacatttcaagaacaatgctgcagaacagggttggaggatgtcagactcgcttcttaatccgggtcgggctcgactgcattgatgggctaaatgggatgaacaagtttgaactctactgtttacccaaaattggttgttgagatccaatttctgaccatacattgcacttatatacagcagcggaacgcgcatatacatgacacaaggggttctgaagtcagttagccctataccaatggaaggatgcgtctttgtgcaagccctcgattttctacactcgggcctttatttgtggaaaatgcattttcatagaatttatatatggtgtaattccatggtgtttaatattgtcagatttaaaataaattaatttctaatgcattgcatattatttaca

SEQ ID NO: 21835 - DNA, 551 bp, Gossypium hirsutum
  Clone ID: GOSHI-09MAY01-C17379_1
gtgaataagtgggtgcaccattagctccttctaagccagagccaaagcagcagagaagaggaaaggaagatagaaaaatgggcgcaacagccaccggcaaatctctccatttttgctcttcacaggaccccctttcatttctctccctaacaaagacaaaatcaaaagcagaaaccctaaacctcaacttcagattctccaaacccccattaacccccaattctcgtcgccttcgtctttccattagagcttcttcaccctcctccaccgccctcaatgacccgcctcttccctctctcaccaattccgatcttcaacttcgagttcgaatcctctctgaatcactcccctacattcagaaatttaggggaaaaaccattgtcgtcaaatacggaggcgccgccatgaaatctgcggagctcaaggcctctgttgtcagggacctcgtcctcctctcctgcgttggcctccgtcccgtcctcgtccatggcggtggtcctgaaatcaacgtccttctcaatcagctcaatatccccgctcagttccgcgat

SEQ ID NO: 21836 - DNA, 556 bp, Gossypium hirsutum
  Clone ID: GOSHI-09MAY01-C17319_2
cggacgcgtgggccgtaaacggagaggggaaaccggagtgaagaacttacttggatgccaagacttttccccccatatctcttactatcagcctcgacgtagatctagaagactgttggttaaacgccgcatcaaaataaatagccacagttgctctctggtcatcttgtttaggtcccttgtttgcttccaagattatccaaagtctgcaacaaaagagacaacactgcttgacggtcccttgactaaacacccagaattggtagtgggggtattaaaaagataaataccagagccagaaggaagtcccattgaagcaagaagaagtaaattactaatcatagttaacatgcaagaacattgacagggcattttgcatacctctgggagctttacctcgtctaccaccgtatcttcctgctcctacgttgaagcttttagctaaagtttcagtactcaaagaggaggttgttcggctcgaagagcaggtcatacactttatgcaggacttgtatcgagaagttgtctggtaatcattgttgaaatggaaaatgga

SEQ ID NO: 21837 - DNA, 623 bp, Gossypium hirsutum
  Clone ID: GOSHI-09MAY01-C17319_1
ttcttttgcaacaaaatgggcgcatatgttttctaactttgggatataatgaaatctaagttcttgaaaatgattatttatgctttgaatatatcgggtgattgctctgataatcgatctgtcgcattctgtgttttggcactttgttgttaccattcttgagtcacccaatatatctagaacattaaaacccatagaaattcctcttgtggcttgatatcctgcatgtgcctccgccgtaaacggagaggggacaccggagtgaagaacttacttggatgccaagacttggccccccatatctcttactatcagcctcgacgtagatctagaagactgttggttaaacgccgcatcaaaataaatagccacagttgctctctggtcatcttggttaggtcccttgtctgcttccaagattatccaaagtctgcaacaaaagagacaacactgcttgacggtcccttgactaaacacccagtctctacttgatcgggagggagcattgaagtatgtcggttttctaatggaaagtgctaactttttctttttgttaaaaggtctgaatgactcaatctgtcaccctctgctctttaggacttctttgttttgcattcaactta

SEQ ID NO: 21838 - DNA, 567 bp, Gossypium hirsutum
  Clone ID: GOSHI-09MAY01-C117291_1
cttatttcaaatcatcaatggcgtatttgaaagtggcttttggcttcctagtaacagctttcctgtcagccgcagtttctctggctcaccctggtttgggtttcggctggggaggtgttggtgcgccaggtggtcaatctggtgcaccttcatatggccttttcccacagttctatcagttttcatgcctctcaagctgaggacatcgtcatgtcagttctagagatggccctagctcatgagcctaggatggctgcctctttgctaaggctctcatttccaccattgtttcgtgcagggctgtgatgcatccatattgttggacaacagtgcgaccatcgttagtgaaaagaattcactaccaaacaggaactccgttagaggctttgaagtgattgatgagatcaaagctaaactagaagaagcatgtccccaaactgtttcttgtgctgacatactcgcaatggctgctcgtggttccactgtcttgagcggcggaccatcttgggagcttccacttgaagaagggattcaaagacagtgagcctgagcatttaaacaacaaca

SEQ ID NO: 21839 - DNA, 1086 bp, Gossypium hirsutum
  Clone ID: GOSHI-09MAY01-C10979_1
ccaaaggacggatttcttctccttgactccgaattcaacgttaaagggaggtgggagaaaccggggcatagtcctatgttcggctacgatttttggtaccaacctcgacataaaacaatgatcagctcatcatggggtgctcctgttgccttcaccaaaggtttcgatcttcagcatgtcacggatggtctgtatgggagacatctgcatgtgtatagttggccctgatggtgaacttaaacaaacgggggatctaggtgacaccggtctcatacccttagagacaagattcctgcatgatccttctaaagatacagggtacgttgggtgcgccttaacaagtaacatggttcggtttttcaaaaccaaagacggatcatggagtcatgaggtggcaatctcagtgaaaccattgaaggtgcaaaactggattcttcccgaaatgcccggacttataaccgacttcctaatctctctcgatgatcgttttctgtatttcgccaactggctgcacggagatgtccgacaatacaacatcgaggaccccaaaaacccggtcttggtcggccaagtatgggttggaggattgatccaaaagggaagccctgtagtggctatgactgaagatggtaaaacatggcaatccgatgttccggaaatccagggacatcgcctaagaggaggaccacagatgatccaattgagcctagacggtaaacgattttacatgacgaactctctattcagcgcatgggatcgacaattctatccagaactcttggagaaaggttcccacatgttgcagatcgatgtcaacaccgaggaaggcggtcttaaaacaaacccaaacttctttgtcgtttttggagccgaccctgatggcccttccctggctcctgagatgagttatcccggtggtgcctgcccttccgatatttggactttaccctctccaaaccccgtttcccccctgaagaaaatctcccttctaattttgtaggacaaaaattaaaatcagtgccatttgtttgtgagccattttgatagataatgtaatgttaaggggttaatttagcaatatatctt

SEQ ID NO: 21840 - DNA, 466 bp, Gossypium hirsutum
  Clone ID: GOSHI-09MAY01-C10939_6
gaccacgcgtcgcccacgcgtcgctcccacctgcctaacacagccagaggcgaggagccagataagaaaaactaaaggaaaattgttttctggttcaaaaccacagccctatcccacatgcggttcggatccggattctctaagatccgattgacattcatcgctttaattttcattctgatctgatcccaaacgaatctattcggccgtgaaaaatgactcgtcgctgctcacattgcagccacaacggccacaactctcggacatgtcccaaccgaggggtcaaactcttcggagtccgcttgactgacgggtcgattcggaagagcgccagtatgggcaacttaagccaatattccgggtcgaattctggcgcgcataacgggaacgggtcgggttcgcccggtgagggtccggatcacaccgatggttatgcttctgtggatttcgtccccgggtcgtcttc

SEQ ID NO: 21841 - DNA, 618 bp, Gossypium hirsutum
  Clone ID: GOSHI-09MAY01-C10939_5
cccacgcgtccgatttttctctcctataaataacacagccgcagtgaggaaccgaatggcggggaaaaataacctggtcctttttttttttgttcaaaagcgaagccctaactcgcatgctgttcggatcttaatcgtcgaagatccgattcatatctatctctgatctgatccaaaacgaaaccacccggcctctgagaaatgacgcgtcgctgctcgcattgcagccacaacgggcacaactccagaacctgcccgaatcgtggtgtcaagttgttcggagttcggttgactgacgggttggttcggaagagtgccagtatgagtaacttatcccaattcgccgggtccaattctgccgggcataacgggaatgggtcgggttcgcccggtgaaggtccggatcacgccgatggttatgcttccgaggattttgtccctggatcgtcttcgagtcgtgataggaaaaaaggtgttccttggactgaagaggagcatcggatgtttctccttggtctgcagaagcttgggaaaggtgattggcgtggaatctcacgcaattatgttatatcaaggactcctactcaagtggctagccatgctcagaaatatttcatc

SEQ ID NO: 21842 - DNA, 938 bp, Gossypium hirsutum
  Clone ID: GOSHI-09MAY01-C10939_1
cgccatatataatgtttctaattaataaagtcccactactacatagaaagcgacatctagtatacgaagaaattaaatatacgtagtagatatagcttcgcacgcccatcctagctatccctaagtatatataaaataacaattctagcgacgatgggggcaaaaagtgaccaaatagttgccgcgggtgcaagtagcaatgctggttggatcatcgtatgcataggaatatgctttgggacaagctgccttgaaaatcttcgaatacgctgttggcttgcatgactgggggttcccaaaggtcccagtgcagcaatacctcggcgagttgaaagcaaagcaagcacttttacaagccaccactcgcttgttatccttcgatctcacttgtaaaccaacggggcacattaagttcaagtcactcacacacccagcgtagctacatttgcctgagcctttgaatggggttattgacattgctatgttgtagccatccaccaagctcacgtcgtagaaatcttggtcctggccgagggtgatttcggctagcgtagcaggcggggcaccgccgaggccgttacagaagagggatccgccgcagtcaccagtagcgcaacggccgcgtccggatgcgtcgaaggagcagccgtgacggccccagaaacgaccggaccagaggggagggagacgcatggagtaggccttgttgggtcgaagtttaaagccaccgcgagctaaaagtggcttcccagcgctgggttggatacctggccacactgggtgagggcacttgttgtagagtgtaattgttgttgcagaaacgtaggagaaaagaagcgtgaagagtgtgaaagttagcagagatctcagcattgtcgccatggctgaaaccttgggtaccaaggagcatgtaagaggggaaaaggaaaggaaaggac

SEQ ID NO: 21843 - DNA, 576 bp, Gossypium hirsutum
  unsure (1)..(576): unsure at all n locations
  Clone ID: LIB3582-007-P1-K1-F5
gtccggctgcttggtacccaaggtttcagccatggcgacaatgctgagatctctgctaactttcacactcttcacgcttcttttctcctacgtttctggtactctcttacacttggaagtttttaacttggttatatgtacggtctttataacatttgcttctttttgttttcaacagcaacaacaattacactctacaacaagtgccctcacccagtgtggccaggtatccaacccagcgctgggaagccacttttagctcgcggtggctttaaacttcgacccaacaaggcctactccatgcgtctccctcccctctggtccggtcgtttctggggccgtcacggctgctccttcgacgcatccggacgcggccgttgcgctactggtgactgcggcggatccctcttctgtaacggcctcggcggtgccccgcctgctacgctagccgaaatcaccctcggccaggaccaagatttctacgacgtgagctnggtggatggctacaacatagcaatgtcaataaccccattcaaaggctcaggcaaatgtagctacgctgggtgtgtgagtgac

SEQ ID NO: 21844 - DNA, 575 bp, Gossypium hirsutum
  Clone ID: LIB3829-006-Q6-N6-F2
cttgcagatttttcattctattatatatcaattctaatctgatgtccttaatagtcatttttcattctcatctcaccgttacagctgcgtttaaattcaaacacacactccactattgtttctaatctcaccgctacagtaactaatctcaccgccaccgctatttttaacctcaccggaggtaaacacaccgcccatccaaattagcccgcccatccaaactaaccctaaatatatataaaataacaattctagcgacgatgggggcaaaaagtgaccaaataattgccgcgggtgcaagtagcaatgctggttggatcatcgtatgcataggaatatgctttgggacaagctgccttgaaaatcttcgaatacgctgttggcttgcatgactgggggttcccgaaggtcccagtgcagcaatacctcggcgagttgaaagcaaagcaagcacttttacaaaacctggtcctttttatttgtttcaaaagcgaagccctaactcgcatgctgtttggatcttaatcgtcaaagatccgattcatatctatctctgatctgatccaaaacgaaac

SEQ ID NO: 21845 - DNA, 536 bp, Gossypium hirsutum
  Clone ID: LIB3829-013-Q6-N6-H11
cttgcagatttttcattctattatatatcaattctaatctgatgtccttaatagttatttttcattctcatctcaccgttacagctgcgtttaaattcaaacacacactccactattgtttctaatctcaccgctacagtaactaatttcaccgccaccgctatttttaacctcaccagaggtgaacacaccgcctatccaaattagcacgcccatccaaactaaccctaaatatatataaaataacaattctagcgacgatgggggcaaaaagtgaccaaataattgccgcgggtgcaagtagcaatgctggttggatcatcgtatgcataggaatatgctttgggacaagctgccttgaaaatcttcgaatacgctgttggcttgcatgactgggggttcccgaaggtcccagtgcagcaatacctcggcgagttgaaagcaaagcaagcacttttacaagctaccactcgcttgttatccttcgatctcacttgtaaaccaagtgggcacattaagttcaagtcactcacaca

SEQ ID NO: 21846 - DNA, 299 bp, Gossypium hirsutum
  Clone ID: uC-gsflnu33B073a09b1
atgttcacgcgtccgtgctgtaggcttgcatgactgggggttcccgaagattttcaaggtagcttgtcccaaagcatattcttatgcatacgatgatccaaccagcattgctacttgcacccgcggcaattatttggtcactttttgtccccatcgatgctagaattgttattttatatatatttagggttagtttggatgggcggtctaatttggatgggcggtgtgtattacctcccgtgaggttaaaaatagcggtggcggtgtgaatagatacagtagctgtgatatttgaaaca

SEQ ID NO: 21847 - DNA, 650 bp, Gossypium hirsutum
  Clone ID: GOSHI-09MAY01-C10819_1
tgtttccttgaaccccataagagaaaaaaaacctagacatcctaaaacatatatttgcatatatcattgttgtctttgtcattgtttttccaagaaagcacaatgaatgtagacgaggaggtggagagactcaaggaagaaatccaaagactaggccagatccaatcagatggttcttacaaggtcacattcggggtgctatttaatgatgatcgctgtgcaaacatctttgaagcactagttgggacactaagagcagcaaagaaacgaaaagttgttgcatatgatggtgaactactgctgcaaggagttcatgacaatgtggaaatcattctcaaagctacaacaccagcagcagcccagagtagcaactaatgcagttctaaacaaataattgcaattatagttttgcagcaaaagtttgatgatattctatgtaatttttcaatgtttatcatgtttgaaagcttgcttcagcataagtgcataaccgtatttttgaatactcttttatgaaattttccagagtgtactacacccagatttgtatatgttttcttttggttatgttcaaactttgatgtcttcatctattatttgctttttatggcataaactacacaggattggataaaaaaaaaaaaaaaaaa

SEQ ID NO: 21848 - DNA, 313 bp, Gossypium hirsutum
  Clone ID: LIB3147-010-Q1-K1-G4
cacccagatttgtatatgttttcttttggttaaaagcttgcttcagcataagtgcataacggtatttgtgaatactctattatgaaattttccagagtgtactacacccagatttgtatatgttttcttttggttaaaaaaaaaaaaaaaaaaaaaaaaaaaaaaaaaaaaaaaaaaaaaaaaaaaaaaaaaaaaaaaaaaaaaaaaaaaaaaaaaaaaaaacaaaaagaaacagaaaatcaacaagagtgaaataaaagaacccaccaataggcaacgtgagctgagattaaaacaattcaaaaacaggagg

SEQ ID NO: 21849 - DNA, 462 bp, Gossypium hirsutum
  Clone ID: GOSHI-09MAY01-C10549_1
gtgatttttaatttatcaaataagttacaaagtcccaggtataatataatctaaccatatgacgcaacttgtcgtccattcactctcctcggctccatctggttggtgctaatctcgcgaaggagtagatcgtgagtggaagacgcccctgccccactatgaattactccctgattacggctctttggatgcactcacccacacgcatctctccgttcgtttgaccggaggccactctccaccgttcacgtgtacgttaaacatagaggtcgaaaacaagatccagtgattaaacgaacagagaaagaccgacgaagatctgaaatcgaacgaacgaagatttggggtgttttggcgttggattggcgtcttaaactcgggggcagtctcgacccattggagagggtgacaacaaccaccactgtggtgaagcaccggctcaggctaagtggagctgggggc

SEQ ID NO: 21850 - DNA, 756 bp, Gossypium hirsutum
  Clone ID: GOSHI-09MAY01-C10509_1
caaaatacaaaaaaattggaagcaattcttgtgtcctgggaaaaggaagaggacgcccgatgaattttttgagggtatgcagttgatgcacatgacaatctgtttggcctcaaggaagcaagggctttgcaggtccaacttggctgaagagacgagtcttaatcggacttaacttttggaggcgttaccttcattcgaagataaagtgcatgaagtgtcttggtaaatctgagcggtatgagaggatgatggatctaactgttgagattgatggggacactcggaagtctggaggaggcacttgcacagtttacagctagagaaatcttggatggagagaacaaatatcattgcattaggtgcaaatcttatgtaaaagcaagcaagaagttgacggtattagagtcacctaatattcttaccattgttttaaagaggttccagtctggtaattttgggaagttaaataagtcagttcaatttcctgaggtccttgatttggccccatatatgagcggatcaagttcgaaggcggtcatatacaatctctatgctgtggttgttcacttggatgttatggatactgccttttcaggccattacgtatgttacgtgaagagtttccgaggggaatggttcaggattgatgacagcacgcgcgatttgtaggtaataccagtgtcattggagagggtcttgctcgaaagggcgtacatgctcctctatgcgaggcgctccccaatggcaccagctttg

SEQ ID NO: 21851 - DNA, 374 bp, Gossypium hirsutum
  Clone ID: LIB3272-038-P1-K1-D8
gaaaacaaatatcattgcattaggtgcaaatcttatgtaaaagcaagaaagaagtggacggtattagagtcacctaatattcttaccattgttttaaagaggttccagtctggtaattttgggaagttaaataagtcagttcaatttcctgaggtccttgatttggccccatatatgagcggatcaagttcgaaggcggtcatatacaatctctatgctgtggttgttcacttggatgttatggatcctgccctttcaggccattacgtatgttacgtgaagagtttccgaggggaatgtttaaggattgattaacagcacggtaataccaatgtcattggagagggttttgttcgaaagggcgtacatgctct

SEQ ID NO: 21852 - DNA, 441 bp, Gossypium hirsutum
  Clone ID: GOSHI-09MAY01-C10499_1
cccacgcgtccgtttgctcacgtttctggtgtctagttctctgctatttctttgaaaattttcaggatgcaacaagcaattccatacaaatcctggcctctgccatgcatcgacgcaacttcccatcgtgcccgttcaacaacaacacttggccacaacggacgcgggaaagacgtgcttaatatagtgtcggagaacgcggtgatagtgttggccaggaagggttgttgtatgagccatgtagtgaggcgtttgctgctgacactgggcgtaaaccctgcggttcatgagattgatgaggaggatgaggctggtgttttgaatgaattggggacgatttgcaaaggtaccgaaaacaataaaatggttcagcttccggctgtgtttataggtgggaggttgttggggggattggataaagcatggctacgcatattaacg

SEQ ID NO: 21853 - DNA, 533 bp, Gossypium hirsutum
  Clone ID: LIB3829-005-Q6-K6-G8
cggccgcgtgggttttagggttccctcaaccctttgagcaccgccgctcccctttgcgccaaggctccgattgcgacggagatggccatgactcggcgggttcggcgtatgggtgttcgtggagagaaacgcgtgcgtggaggagagatcagcccgagacgtgcggcgcttggacgcttgctgaaggcgttgggggctgttgctggtggcttgctgcttagagctaggtttttttgctttttgtttttttttcgctgtattgggcttgtttaatgctttgggcccgggcatatttgggtttgtacatatccgattctgtatgtgagtatatgtcaaatctataactgaaaacgtgtccattatttatgtatatctgtttgtgggtcgggtcacacgcaggggcttctagctcacttgtttgtttaaaaaaaaaaaaacaaaaaaaaaaaaaaaaaaaaaaaaaaaaaaaaaaaaaaaaaaaaataaaaaaaaaaaaaaaaaaatacaaaaaaataaggggggggccgttttaa

SEQ ID NO: 21854 - DNA, 386 bp, Gossypium hirsutum
  Clone ID: LIB3166-026-P1-K1-F1
aaattttctagggttccctcaaccctttgagcgccgccgctccgattgcgacggagatggccacgactcggcgggttcgacgtaaaggtaagttttttccttccttttctttatattttgagccaaaaaaacataaaaacaagacaaataacttacagaacgatgaacaccaaaacaaaataaacgagggaaatcacctttattcaaagaaaattttctatttctctttaatctttttctctgtatttttgtatctttttctcttaccgaattccccccccctttttgagtacatggaatagggcttttatagcctaaaaataatagaaagaagaagaaaaaaaaactattctctattcgaaatctgttatttttccttctttttg

SEQ ID NO: 21855 - DNA, 571 bp, Gossypium hirsutum
  Clone ID: LIB3583-044-Q6-K1-F1
accaattcccttcaaaattttcagttcccgtaaaaaagaaaaaaaaattgaaaagacaagaaatcacacaaaaccagtaatcacaggcgaaccggaacatcacaaaatggccctttctacttcacctccactctgagccgcctccaatcccctggttgttgcaaaggttaaagagaaaccggagaactggagcgagtagaggactgaagcatcgactatgggaacgactacgactacgactagccttgatgcgggaggcgaagaccgggttatggcggcggctcagcagatagtgaagagtctcaacactgcaaaagaggttcgtgaagatatgcttttgattttctcgagcttcgataaccgcttatccaacatcaccaatttaataaaaaaagactctgacagtaccggcgtccggtttgacgccgccgagaaagtgatcctccggtgggattcttcctcatctaaccctgacgcttcccgtcactctctttcttgggaagactctccccatgaagccgccgagttcctctcagcggttgacgaaatccttaaattgggtgttgatgtg

SEQ ID NO: 21856 - DNA, 351 bp, Gossypium hirsutum
  Clone ID: LIB3166-026-P1-K1-C12
aaaaaaaagacaaaaaaattttttaaacaacaaaacaaaaaaaccagggccgccaaattggaccttttcacttcactcccactctgagccgcctccaatcccctggttgttacaaatgttaaacataaaccggagaactggatcgagtagaggactgaagcatctactatggtaacgactaccactactactagccttgatgcggtaggccaataccgggttatggcttcggctcaacagatagtgaatagtctcaacactgcaaaataggttcgtgaagatatgcttttgattttctcgagcttcgataacactcttattcaacatcaccaatttaataaaaaaatactc

SEQ ID NO: 21857 - DNA, 528 bp, Gossypium hirsutum
  Clone ID: GOSHI-09MAY01-C110461_2
tttacgcgtccgcccacgcgtccggaggaaaaaatgttttctgctagggtttttaatcccagcccccactgccgccgttctcaaacgaaccaacctccggcgttcgaaggcgcttcgggtctcagcccttcgccaggctcccgatttggagcgatgcgagtgtaggtttcaacggggaagcctctgagtccgcgattgcaggagttcgtggagtgtacgacgcgaggaaaaggggtggttccgcaacgtgcgccgatcagatctgctggagcgcgtcgtaggggctgttgcggcgctgaggcgaatgcatctagggtttcggtgttttggggttttgggtaattgggcctaggctagtagctttgctgtattgggccatgtcctgttttgtgcgggcttgggttatttttgtttgtttttattattttaaaagctcgggcaaaagggctattacaagcctgattctaaatatatttttttttacacagagaaacaagcaatcaaacgaaaaaaaaaagaacaaaaagc

SEQ ID NO: 21858 - DNA, 541 bp, Gossypium hirsutum
  Clone ID: uC-gsronu33B016f09b1
cccattccccactgtcgccgttctcaaacgaaccaacctccggcgttcgaaggcgcttcgggtcttagcctttcgccagcctcccgatttggagcggtgcgagtgtaggtttcaacggggaagcttcaaaggttcggtggccgtggagtgcgcccgtacgtggaggccgaaacgtgctgcgattgggcgttgggcgctgcgtgggtgctgttgcggcgctgaggcagatgcggctctccttactgcttagggttttttctgtgtaattttgatgtgttgggctgttagctgctaggtttaggggttattgggccacttatttgttgggccttagacgagtttaggcctgctgaaattgcctgctttgtttttgtttgggcccaggcaatttgggcttgtacacaggcaattaaaattcaagacacgtactagataaatctgtgataagtttaatacttctagatccaaatattccatgaactaaacaatctaatgttttaagggctgcatgggaaaaaaaaaaaaaaaaaagaaaagggcg

SEQ ID NO: 21859 - DNA, 629 bp, Gossypium hirsutum
  Clone ID: GOSHI-09MAY01-C10469_1
gtcggagctggtgcggggactggtatatctgcaaaatttgaggaggctggtggggttgatttgatagttttgtacaattcacgacgctttcgtatggctggaaggggttctttggcaggactattgccatttgctgatgcaaatgcgatagtgcttgagatggcgaatgaagtactgccagtaagttgtggtaaaggcagtgcctgatctagctggagtatgtggaactgatccttttcggcgaatggattacttcctaaagcaattggaatcaattggattctctggagtacaaaattttccaactgttggattatttgatggtaactttagacaaaatctgggagagactggaatgggatatgggccggaggttcaaatgattgcaaaagcacataaaatgggattcttgacaactccgtatgctttcaacactaatgaagctgcggaaatggcaaaagctggtgccaatataatattagcccatatgggactcactacatcatggttctataggtgccaaaacagctgtctcattggaagaaagtgttcttcgtgttcaagctattgccgatgctgctcatgccatcaatcctaatgtcatcgtgttatgtcatggaggtccaata

SEQ ID NO: 21860 - DNA, 463 bp, Gossypium hirsutum
  Clone ID: GOSHI-09MAY01-C10419_1
gctaacccaaaacttgaagtctcttttgttcagttgacggccataactgatcagcctacaatggaatccctccacgaaaacgccatccgaaaacctctgtttcattcacaaatttcggatccgaaatccgagtctgcaagttcggagcgtggaggatgttttgtcggacggtaactcttccttgttggagcgttggggaaaagcgacatgtatcgaatcgaaactccttttccacttggcagcgccggctgtcattgtttatatgatcaactatctcatgtctatgtccacccaaatcttctccggtcatctcggtaatcttgaactcgccgccgcctccctcggaaacactggcatccaagtctttgcttatggcctcatgttaggaatggggagtgcagtggaaacgctttgcgggcaagcctttggagcacacaatacgacatgctaggcatatatcttc

SEQ ID NO: 21861 - DNA, 700 bp, Gossypium hirsutum
  Clone ID: GOSHI-09MAY01-C10789_1
cttggaactgatctttaagaacatgtttaaaagaccaaggtcgggtttgggagtgaaaggatcgaggctacaatgatcccttgcttgcatttctaacttcttccgtcgatcgtagggctccttgagctggtttcgggctccttttcccccccttgatttcttctcctttttataaattgatttggggcttttcatcactgtgtgctgttctctccatctcatggagtggatttagtttctcacgccttttgtctgggatctcttgcttgggttttctgctagttggggttctctcctttgctcaggctttctaccaattctgctcttcctctcttgctccggtcgggtttttgttaccgttttgtagcctgtggtgtttggcttgtcttgggcttttggaattctggttcagtgttggtttctggaggcttgttccgggcttctcatcggttccattttctgctccaattcaggaggttcagtgggtctcgttttttgttggttggtctgagggcgccgatatttgtgtcgtggcctcgtgggtagcgcgtttttccgactcgatctcgctcgtgcactcggagctttgtgcggactctgttttggccttttgttttcgagggctcgactgagtttgtttgtacagcaagccggagtcaggaataaagaaagccgtttggtttcaaggaagtttggcagg

SEQ ID NO: 21862 - DNA, 606 bp, Gossypium hirsutum
  Clone ID: GOSHI-09MAY01-C10709_1
agctcaaagccgaggattgcttttttgtttatagaatggtggtggtactgtgtagaagggaatgtggcagtcgtacagacaaattgcctctgggaggtgatgtgggcagatcaggcagccattagggctgggatcgggaagcccgcctggagttggataagacaaagagccccccctacagacgatctattactgcatgccattgcagcttcggtgttgcagaagaggaaattgatcattgagaattatggcagcacagatgacattattacagagtgcaatagcatgtcgggccagctcgatgtatggaaactcctaaacgatgcacacgatttggtggtaactcttcacgacaagatagaatcaaccttttgactgttaccgataaatttatgtgcttcgagttctttcttggacctcagtgctgttagtatttcaatcctcctgctgagattttttttttttttttgcttcaaagccagttgcaattgcttatttaacagacaatatgaagaccattattacctacacgaaatgttacgtgaatcccttgcttttaagcggtagatttcgatttctaaataaaaataaaaaataaataaaatt

SEQ ID NO: 21863 - DNA, 1758 bp, Gossypium hirsutum
  Clone ID: GOSHI-09MAY01-C10659_1
tctcgctagccttccaaatgtgactgagaagggcttctgggttatgggtaatggtcatgggctacagaaattgaagtctttcactgttaaagcctgccgtggagtgacagatttgggacttgaagctattggcaagggttgcccgaatttgaagcagttctgcctccgcaagtgtgccttcttatctgataatgggttggtgtcttttgccaaagcagcaggttcactagagagcttggaactggaggagtgccactgggtcacccaatttgggttttttggttctcttattaactgtggtgcaaagttcaaatctatctctcttgtgaactgcttggggatcaaggacctaaatgtaggattgcctcctctaccaccttgtgagtcccttcgatcgctgtctatccgtaactgccgggggtttggtgatgctagcttggctgcgttggggaagttgtgccctcaactgcagaatgtggagttgagtgggcttcatggaataacagatgttgggtttttcccattgctcgagagttgtgaggccggtttggtgaaggttaatctcagcggttgtcccaatttgggtaacaaagttgtttgtaagatggctgatttgcatggtcggactctagagatgctgaatcttgatggatgcaagatcagtgatgctggcttggttgcaattgcagagaactgtcagttgctcagtgatctcgatgtctccaagtgcacaataaccgactctggaattgcagctcttgctcgttctaatctgatcaatctgcagatcctatctgtgtctggttgcaatctggtctccgacaaaagcctgccatcacttggaaaattgggtcagaccctcttggggttaaatctacagcagtgcaaggcaatcagcagtggtgcagttgacctgctagtggagcagctatggaggtgtgatatccttttctaaacgatgttgcagtatgggattgtcaacaactcgggttttgacccttcgagaagcttcagaatagcctttgttagtattagcagtttgtgtagtttttgggtccatcatctatgggtcttccattgtccagtactcagtccccttttccagggaatacggccattttccttgtttcttttttgcaggtctctttacatcagagatctgttaccaggttttgaatcccaataatgggtgtttgtttcttcatggccggagttccctgagaatatagtcgctgctgggttccggattttagggaatcttttcttccttcctcgtaaaggttttagtctgctgggtttctggtgtttttgctgagcaatgttcatttctgcttgagctaagctttttgttatttgttactgtctttcgtccatcatagttggttttaccgagtctcccacgtttttgaactcaaatgttctacacgtgatggttgggtctttttcttttcttacagtggcggattgaagatctcgagtcattgtagttatggttcgcttttggcagttcaaagtgtggtgtctagctttcacgggctttggccatggcagcagtttatgtagtctgccatgacaactcttggagttgtttttgttttatttttaccaagccctagttttgctggtctcacttgctccgaactgcagtttgtaacctttctgaaacaatgtaaggagtagcattaaatctgccattggaggtcatgcatgtatgtttctgtgccataattaataaaagtgatcgaagtttatgtatgt

SEQ ID NO: 21864 - DNA, 713 bp, Gossypium hirsutum
  Clone ID: GOSHI-09MAY01-C10619_1
cccacgcgtccgcccacgcgtccgctctaatggctcttctattcttgaggcatgctttgtacctaacgagtggagaagaggacgatgatttatctcgttttatctctcttttcctgctccgagctgccggttttcttctcccctgttacattgtggcctgggctatcagcatattgcagcgccgtaggcagcgacaggaagctgcagctatcacagcggctgatgttgcagtaatgatacaggcaacacgacctcggtccatacattacagtatagcagcgggaccttcagtgactcaccaacaagagcaacctcagtccatacactacagcgtagctccgggaccttccacggctcctcaaccagagcaacctctgaccatacattacagtatagcagcaccgggaccttcggcaattcctcaacaggaacaacctcaggccatgcattacagtgtagcagcatcaggaccttccatgactcctcaacaggaccaacctcttaccatacattacagtataacagcaccgggaccttccgcgactactcaacaggagccagcagttcaatagtgtgacggtagttttcactggcaagagacttcaatggtgacaaagactatttttccagactccggataatacttgtctaaccgtattcaattttctttgtaaaagtttttttcatatatatgaaggatcattctcctatat

SEQ ID NO: 21865 - DNA, 757 bp, Gossypium hirsutum
  Clone ID: GOSHI-09MAY01-C10159_1
gaccaagccttccgaacaagataaaaagtattttgctttgcctaatttgtaagctttgaggttgactgaaaaaactatggcggaagagggacaagtaatcgcctgccacactgttgattcatggaaccagcagctcgagatgggaaaccagtccaagaaactggtggtggtggatttcacagcatcatggtgcgggccatgccgttttatatcaccaatcctggtggatcttgctaagaagctgcccaacgtcatattcttgaaggtggacgtggatgaactgaatactgtggctcaggagtgggctattgaggcgatgccaacttttgtgtttctgaaaggaggcaccataattgacaagcttgtgggtgcaaggaaagaagaattgcagcagaaaattgcctttcattcatctaacccggtgcagacagcatgaatcaacatttaaatgtacttgatgtctggagttgtttatgaaactaggatcttatgaatgtctgacagacagaccctaaataatgtgtggttgtatttatatttggctactctctctgcctgttgtccttgtttctatttcagatcttatcttatatttaaattagtgtatgctttctataagttatctatgtttttatacttgtttatcccatattattcttttgaatttcaccctagttagcatggctttcttggaaccactcttaaccttaaacacctacataaatttgtatcagtaatccagaaacttccatattta

SEQ ID NO: 21866 - DNA, 484 bp, Gossypium hirsutum
  Clone ID: uC-gsflmaxxa090d07b1
tccttggtcttcccacgcgtccgttttataaacaggataacgctttgcctaaaaagtttggttttttttagactgtttggggttattgcccaagagggacaagtaatcgcctgccacactgttgattcatggaaccagcagctcgagatgggaaaccagtccaagaaactggtggaggtggatttcacagcatcatggtgcgggccatgccgttttatatcaccaatcctggaggatcttgctaagaagctgcccaaacgcatattcttgaaggtggacgtggatgaactgaatactgtggctcaagagtgggctattgaggcgatgccaacttttgtgtttctgaaagaaggcaccataattgacaaggttgtgggtgcaaggaaagaagaattgcaccagaaaattgcctttcattcatctaacccggtgcagacagcatgaatcaacatttaaatgtacttgatgtctggaggtggttatg

SEQ ID NO: 21867 - DNA, 389 bp, Gossypium hirsutum
  Clone ID: LIB3165-060-Q1-K1-H12
cccacacgtgtccggagacgtgctaatgggcgtccgatatattgctttgcctaatttgtaagctttgaggttaagtgaaaaaactatggctgaagagggacaagtaattgcctgccacactgttgagtcatggcagcagcagctccagatgggaaacgagtccaacaaactggtggtggtggatttcacagcatcatggtgcgggccatgccgttttatatcaccaatcctggtggatcttgctaagaagctgcccaacgtcatattcttgaaggtggacgtggatgaactgaaatctgtcgctcagtcgtgggctattgaggcgatgccaacttttgtgtttctgaaaggaggcaccataattgacaagcttgtgggtgcaaggaaag

SEQ ID NO: 21868 - DNA, 714 bp, Gossypium hirsutum
  Clone ID: GOSHI-09MAY01-C10179_1
cccagcgtccgaaacacataaaacacccaaacgaatttgtaatagaacaaagcaaagaaaacgaagaaaacccagagaaaggcataaaggaataattgtctactccagaacataaaaatataagtttgtgtaaggcggtggtagagaaaagagctaaatgataagcaaagcaaaggtgggaagtgaagagttgaactcgtgctttgagaagctgctgatggttgctgctggaaatagtggcgtgggagttaggatggagggagcggtgatcactgagtggaaagatattcctatggagctgctgttgagaattgtgcctcttgtcgatgatcggactgctattgttgcttccggtgtttgttgtgggtggagggatgctatttgcttcggcctcacacaactcagtctctcatggtgcagaaagaatatgaacaacttggttctctctcttgctcctaaattcaccagattgcaaactctaatactgcgtcaagagtatccgcagctcgaggacaatgctgttgaggctattgcaaacttttgtcatgatatacaggagctggacctaagcaaaagtttcaagcttagtgatcactctttgtatgcattggcccgtggttgtcctaacattacgaagcttaatatcagtggctgcacatctttcagtgatggagctcttgaataattgactaacttttgtcaaaaactaaaaat

SEQ ID NO: 21869 - DNA, 799 bp, Gossypium hirsutum
  Clone ID: GOSHI-09MAY01-C10169_1
ttcttgaatcaacctctgcttgtttaagaaaagaaggaaaacttgtgcgccaagaagaccaagaagagaagagcaaaaaagtgaaatatgtacgtgagagcggtgccaacgacagatctgaacaagaatacggagtggttcacgtacccaggggtttggaccacttatatcttgatggttttcatttcatggctcctcgttttatctctctttggcacctctgctggaaccgcttggacaattgttcatctcgcgcatttctttgtcacatatcacttctttcactggaagaagggaacaccgtttgctgatgaccaaggtatctacaacggtttgacttggtgggagcaaatagacaatggcaagcaactgacacggaacaggaagtttttgactgttgtacctgttgtgctgtaccttatcgcctcacatacaacagattatcaaaacccaatgctcttcttcaatacgttggccgtatttgtgctggtggttgcaaagttccccaacatgcacaaggtccgcttattcggaatcaatggtgagcattgaacacctgccaaggaattcatgtctggtttttacaagtactaagtttcattattctggggtgatcccaatttccaaatataaatgtaatatccctgtacagataatgaaaactgaaaagggcattctcatttctctttaatcaggttaagaaaatataccttcccttcctttaagccagggaaaaatacattcatatatactatttactttctctctttgcaagctatatagatcatcttcttgcctt

SEQ ID NO: 21870 - DNA, 1295 bp, Gossypium hirsutum
  Clone ID: GOSHI-09MAY01-C10119_1
attagcttctctttttgcccccttgccttctctgtttatttacggatatagcattcaggttatgatagcttttagtgaccggaaacctgagagccgccgcaccgctcccgctctcggtttccctcgcgttaggttcttccgtttccggcgcttgacgcaatcgtcgactccgctccacccgtattcccaacaagaaaaaaaaaacggagaagagaagttcatttattacttttttttttattttcttctttatatttctcgtttgaattattgtataatatgacacttggaatatgccgaattccaaaaataatcgtaaggagcaggagaagaaccggaagggtaagttatctgaaaaggcgtcgtcgtttcacgggaaattcccgacggtggctccgtctgatctgaggcggccgaagacgctgcccgacctattctcagagaggactacttccgtcttaccggatgcgaggccgaagttgacgaagctgctgttgaacgtgaccattcaagggagtctcggagctgtacaagtagtgctgtcgccggaaaacactgtcggtgacttaataaccgccgccgttcgtcagtactcgaagggaggtcgccgtccgatcttaccgtcaacggacgcctcgctgttggacctccattattctcaatttagcttagagagtttagaaaggggagagaagctgatggcgctgggatcgcgaaatttcttcttgtgcaccaaaaaggcggcgtcgaaggacggcgacaatccaacgtcgtcgtgctccaaagaagcggagaaggttacaaagagcgtaataataccttggctcaaattcatgaatttctagttaaaataaaaatgtaaattttttgttgctttccatcattttcgaatttcatttttgtaaaattatgataattaagatagttgtgtatttagattatgaacatgatatacgtgcgaaattggggtaaatttgcatgttgaatgatgtttatttgtttaaattagttaatggaaaatctgtatagttttttctaaaaaactacaaaatacaaaaaaaagatggcacaataataaaaaaaaagatgaaagcgtaggttcaaagactattggcattaatgtctgacgagtttaggactgaaggcgtcctgcattgaagatgcaagatggggagttctatcagaacataacagccagctattatcctccttgtccgtggccagatttgacgatgggcctgcaatctcattctgatataggtgccataacgcttctaattcacgacaatgttggt

SEQ ID NO: 21871 - DNA, 459 bp, Gossypium hirsutum
  unsure (1)..(459): unsure at all n locations
  Clone ID: LIB3135-039-Q1-K1-F3
tcgnccacgcgttcgnccacgcgtnncgccacgcgtncggatagcttttagtgaccggaaacctgagaggcgncgcaccgctcccgctctcgggtttcctcgcgttaggttcttccgtttccggcgcttgacgtaatcgtcgactccgctccacccgtattcccaacaagaaaaaaaaaacggagaagagaagttcatttattacttttttttttattttcttctttatatttctcggttgaattattgtataatatgacacttggaatatgccgaattccaaaaataatcgtaaggagcaggagaagaaccggaaggaaacgtcggaggccgatcacactatcaaagaaataactcggtataattagacgttttgctttgtgtatggcatgtatagaaacttagctacttttgggataatatgaataatgagtgatgtgtaagtacgtgatgatgtat

SEQ ID NO: 21872 - DNA, 384 bp, Gossypium hirsutum
  Clone ID: LIB3166-022-P1-K1-C4
ctttttgcccccttgccttctctgtttatttacggatatagcattcaagttatgatagcgttttagtgaccggaaacctgagagccgccgcaccgctcccgctctcggtttccctcgcgttaggttcttccgtttccggcgcttgaggcaatcgtcgactccgctccacccgtattcccaacaagaaaaaaaaaacggagaagagaagttcatttattacttttttttttattttcttctttatatttctcgtttgaattattgtataatatgacacttggaatatgccgaagttgacgaagctgctgttgaacgtgaccattcaagggagtctcggagctgtacaagtagtgctgtcgccggaaaacactgtcggtgacttaa

SEQ ID NO: 21873 - DNA, 375 bp, Gossypium hirsutum
  Clone ID: LIB3135-034-Q1-K1-D8
cccacgcgtccggggcagagaaggaaggaaagaaagaaagaaagaaagaaaaagaaaaagggaaatttaaggttttaaggttccaagctcaattgatcaagaagaacgaaattcgggagtagatcggggaaaagaaaaagtaaaggactaaattgtaaagtttagtcacattttgtatcaagtacttatctagccacttggggatcgaaggaaacgtcggaggccgatcacactatcaaagaaataactcggtataattagacgttttgttttgtgtatggcatgtatagaaacttagctacttttggtataatatgaacaatgagtgatgtgtaagtagttgatgaagtattgttattaaaatgattaaggatg

SEQ ID NO: 21874 - DNA, 908 bp, Gossypium hirsutum
  Clone ID: GOSHI-09MAY01-C10109_1
tcaagttcaaggattacaattgtaccgttgagtactaccgatctcctttccttgttgtacaaagcaggccgcctgccgggtctccgcaaaacatcaagacaacccttaagttggatcgaatggattggaattcatttaggtggaaagatgccgatttgttggtcttcaacaccggccattggtggaactacgagaagaccgttagagggggatgttactttcaagtcggggaaaaaatcgaaaccaagatgaccatagaacatgcgtatcagaggtctttggagactgtgatgcagtggctacgcaacgaggtgaatatgagtaagaccaaggtctacttccgcactttcgctcccgtacatttcagaggaggggattggagaaccgggggaagctgccacctcgagactttgccggagctgggaacaacattagtgccatcggaaacttgggagcttctcgaaatagtaaaggatgtgttatcacctcactcaaacacatcccatggaataaaattcgacatattaaacatcactcaaatgacagcaccaaggaaagacgggcacgcgtcgctatactatttaggtcccaaggaaagcccggctccgattcatcggcaagactgcagtcactggtgcttacccggagtgcccgacgcatggaacgagctactctatgctgtgttcctcaagcaatccaccaatcacacattcaactcatcatcaacattatgaagcaacaaaggcgtgtgattctccattgttgaaacctcttaatttaaatacaccatcatcacctatacagaaagatagaagaaatttttacaatgaattttggaataggatcacaggttgttggtccatcattttggcagtgttagaaaatgtaatatttgattgaaggacgct

SEQ ID NO: 21875 - DNA, 1006 bp, Gossypium hirsutum
  Clone ID: GOSHI-09MAY01-C10099_1
cggttcggaaattccgggttggaccaacccgtccggaaattctcaaatccatttctctgactaagaattctagaatgtcgacaaccattatagcaaattcaatgataattatggattgattgaaaaaattatgaaaagaacccatgtttaagtgcgtattaaaacattatttgaaatatatatatatagtgtcgaaatatcatgaataaacccacccgtccgccctcgcgtccgtgctattttctgtctagattccatgcccatggcttctacaaccagtaccaatctcccactcaaagaccgagttgctatagtaactgggtcatctcgtggtattggccgagttatagccactcacctggccggactcggtgctaaactcgttattaactacacttccagtgcagaccaagccgatctcgtagctacccagatcaattctctgtatcctggtgactccccgcgagctgtgactgtcaaagccgatgtttcggaccctgcccaggtcaagcttctgtttgattcggccgagcaggcgtttggatcaccgattcacatcctggttaactctgctggagttctggatcctaagtatcctaaaattgctgatactgccttggaggactttgaccgtattttcagtgtaaacacaagaggggcattcttgtgtgccaaggaagcagcaaacaggctgaagcgtggcagtggaggtcggatcatactgctgtcatcatcaatggctgctgcactgaggccaggattcggggcgtatgcagcatcgaaggcagctgtaaaggcaatggtaaaaatactagcaaaggaactcaaaggaactggtatcactgcaaattgtgtggcaccagggccgattgcgacagagatgttctttgctgggaaaagtgaagaagcggtgcagagatgtattgatgaatctccacataatcgacttggtcagagcgaagatgttgcacccgttgtcgggttcttggcctctgatgctagtgat

SEQ ID NO: 21876 - DNA, 972 bp, Gossypium hirsutum
  Clone ID: GOSHI-09MAY01-C10079_1
atttaagggaaatctcctgtactacagtatctttattattttggcaccagattgggcttggctactgtctcctctgagcaacacattccttgtttctggagctatgcatcggaatcccttttccaatgtttttcctaccgtggtctgaatgtttcccttgtctacgcgatgatcccacttcaaatacacttaacaaaggaacctttggtggaagaatatagcatagctgcttctgtgtggaagctgagtgcatgtgatttatgtgagattgcccgtaattcagtctaccagtctggtttttcacatgctttgaagtcacactggattggaaaggagtattacaagagagggcctaatggaaatgagatacagaggacaaatgtacctcatatccggctggaatttcgtgacaggatctggagagaggagatgcagctggtgtacctgggtaaggccattatccctgaagaagtggagaagtaatgtgcaaccatactgcacaaaattccattgtttaacactacacatcacatatactgaggaggaggcggcaaagaagagaagctggcctttggacctgaatcctgcatgaaagaagggatatgacgatcaacatgggaagctgatggatggtatttacaaggccactggttgggcaaagcaaaagcaaaagcaaagcttagcttgtaggtggtggtggtggggggaaacatcttgcaaagatgacaaacacaggaggaagcataattctcaaacaagaccatttcagatgacaatcaaagatgatatcttctattgttaggtaggttaaagctatcatagaatactactacttactgttatatatagttactacgataatatatatttatttatcaaggtaggaagtctgctctcttctcttgtcttctcatgcattatcaattttgaccagacttctaatttcaatgttattcgaaaataataatttat

SEQ ID NO: 21877 - DNA, 366 bp, Gossypium hirsutum
  Clone ID: LIB3196-017-P1-M1-F5
cggacgcgtgggatcgcctgtgctacagtatctttattatttggcacagattggcttggctatgtctcctctgagcaacaattccttgtttttggactatcatcggaacccttttccaatgtttttcttgcggggtctgaatgtttccctttctacggatgatcctcttcaaatacacttaacaaaggaacctttggtggaagagtatagcatagctgcttctgtgtggaagctgagttcatgtgatctatgtgagattgcccgtaattcagtctaccagtcaggtttttctcatgctttgaagtcccactggattgggaagcactactacaagagagggcctgatgggaatggtatacacaagac

SEQ ID NO: 21878 - DNA, 582 bp, Gossypium hirsutum
  Clone ID: LIB3825-008-Q1-K6-B5
tgaagagggaatagagcctgaacagtgacggggctgtcttgagaattaaacccctatcgaacggaaagaccgcgctgaaaatcttcttttaactttcagtcttgtcgcatgttcatgtgctttgcttgcaatctctggtgtattcatttttaaatttcgagttctaagatacaaaaggctgttggaaattggaaatttgggcctaaccggagagcttacgttggcatcgttttcatacaatgtactcaagagagcaacgaatggttttaaagaagagttgggtaagggatcctttggagcagtctacaaagggtccttaaacagaggaagaaatttgattgcagtaaagcgattggagaagttagtggaagaaggagaaagagagttccaagcagaaatgcgagcaattggcagagctcaccacaagaatttagttcgacttttgggatactgtgctgaggactccaagagggtgttggtgtatgagtacatgggcaacggctcccttgctgatctactgttcaagtcaagacagcgccctgattgggatgaaagaacaagaatagccctggatgtagctag

SEQ ID NO: 21879 - DNA, 382 bp, Gossypium hirsutum
  Clone ID: LIB3166-021-P1-K1-B1
cccacgcgtccgcccacgcgtccgtccacgcgtccggtttgcaggaaacaaaagcttccactatggcatttgcgacgacgacaaggtgtgagttccacggttttcttaaagatgggaatcagaagcctagaagcagatgatggtactgtttcccatgaattaaagccccaaatcaaacggaaagatccgacgctgaaaattcttcttttaactttcagtcttgtcgcatgttcatgtgctttgcttgcaatctctggtgtattcatttttaaatttcgagttctaagatacaaaaggctgttggaaattggaaatttgggcctaaccggagagcttacgttgacgtcgttttcatacaatgaactcaagagagcaacgaatg

SEQ ID NO: 21880 - DNA, 527 bp, Gossypium hirsutum
  Clone ID: GOSHI-09MAY01-C10029_1
gttctagatcgcgggcggtcgcccttttggtactcttttagttgaactctggatatggcatgtataggactaccctttgttggttttttcaagtactttttgtgatgtatgtgtgtacagacatgcgaaaatggctcgtagaagtggagtatggcgtggctatgaaaattgtgtcccaaatggtgttgctaaggagaagaagagctggtttggctggaataagaaaggctcaaagaacagtgatgatcctgatgattcaaagattggaaagttctcaaaatcggctcctgaaggtagcaatcagagacaagttgataatcatagatcgtcatctgaatttgcgaaggaagatgctgccatggcaagaagcgtaaagataaaagcagcaagaagaagaagaagaaagggggcaatagtgatgataaacatgaaagtgagtataagaagggtttgagacctgttttgtggttaacaccagatttccctttaaagacagaagaactcctgcctttacttgacatattagc

SEQ ID NO: 21881 - DNA, 437 bp, Gossypium hirsutum
  Clone ID: GOSHI-09MAY01-C10379_1
gcctagattgctacctgatgtcaccgatttgacctcattctggagactcttcactgtagtccctgttttagtcacggcatatatctgccactacaatgttcacagcatggatgatgaactagaagactctacccagataaaaccagttgtgcgtacggcacttgctttatgctcaactgtttacataatgacaagctttttcggcttccttctatttggtgattcgacattggacgatgtgctagccaacttcgatactgaccttggcatcccctatggctccctgcttaatgacgctgtccgtgttagctatgctgctcacctcatgcttgtatttcccatcgtcttctacccgttgcgactcaacatggatggtctcctattcccatctgcaaggccgctagctctggctaatatgaggtttgctttcactactg

SEQ ID NO: 21882 - DNA, 610 bp, Gossypium hirsutum
  Clone ID: GOSHI-09MAY01-C10329_1
gtgattcctagtttagagacagagactctgattttgagatgacaaggcaggaatttcctaattctagggagtatgagttatctaggaatggtagccgtgatgttgcaagggctcgattatgggaagctagagatagagctagggctagacagaaagatattaaagagagggacgtgataaatggtgggtatcgttcctcttcgagtagaagtgattctggtggtaatagtagtggtggtggtagtcatggcctcaggcgacgtgaattctctcttggggtggtagacaaggagcctggtgaattgtctagtgagagtggatcagaggatgccattgagtctgagtcggtggttaaagatagtgaggttgagaaggttatggagaatggggctttatctcctgtggggaggaagagggagttttcacctattgtgtgggatagaagtgacaaggatgtaagtatgtccaaaagtaagaattcacctgtagttacagtcgttcatcatacaccaccacgttcaaaagcttaccacacgtcacctaacatcatatcttgtaaggctgcacagacatctcttgttatagaaaactaaagccagaaaccacattc

SEQ ID NO: 21883 - DNA, 413 bp, Gossypium hirsutum
  Clone ID: GOSHI-09MAY01-C10289_2
gccacccttccgttgaaatagggtttttgcccctttgctaccacttcgccgccgcgactctgccatccaactggtacatgaagcaaccttttttccagtgctcaaccattgttagctaaagctgctaaacactttgagatttgaggtgtatttgattacggatattagatatgtttaacattacaacaaccttctgcaaaaggataagcgtgaaggagctagttaccagcgctcctgtgtatggcacaatcacggatggatcttctggcttaagtttgatgcttaggcggtgggctagtaaaaaaactgctggatcaactaagaatggaagagattcaaaacccaagaatcttggggtgaagaagtttggtggcgagggcggggttcctggaaacattatagttcgtcaacga

SEQ ID NO: 21884 - DNA, 514 bp, Gossypium hirsutum
  unsure (1)..(514): unsure at all n locations
  Clone ID: uC-gsflmaxxa076b07b1
ttcacgcgtccgagaagctgaaatagtgtgctgcccctttgctaccacttcgcctccgctactctgccatccaactggtacatgaagcaaccttttttccagtgctcaaccattgttagctaaagctgctaaaggtgtctttgattacggatattagatatgtttaacattgcaacgaccttctgcaaaaggataagcgtgaaggagctagttaccagcgctcctgtgtttggcacaatcacggatggatcttcttctggcttaagtttgatgcttaggcggtgggctagtaaaaaaactgctggatcaactaagaatggaagagattcaaaacccaagaatcttgggtgaaagaagtcttggtggcgagagggtgattcctggaaacattataggttcgtcaacgaggaaacacgtttccatcctggaaactatgtnnggatgggaaaaagatcatactctctatgccctaaaggaggctgtgtgaaatttgagacgcatagcttagcggcgc

SEQ ID NO: 21885 - DNA, 705 bp, Gossypium hirsutum
  Clone ID: GOSHI-09MAY01-C10249_1
ggaatgcttcaatgcacatggaagggtgggattccatattttgttttctccttagataatcggaaggaggtatatgtagccaatttgtcaaaggaaggatcagctcggggtaagggtccggactttatgtactccttccattcaagcaagggtagccataaggaacacgggattagtgatgatgagtcacaccttgttgctaagatgaaggtaatgacttctttctcgatctgcccccaaggttctaaaatcatggagacggagttcgttttgtttagtggtaatgaaacttttaacccggaggtgcaaactctgagctataaccataggaagaatagaggtctaccgaaaaaggtagtggaagcattcaagagcagtcactcatccaaaccgagaacaataccgagattatggtctagttccatagttgaggattcttcttggggtccatgccatgatacagtcaacggtcctaattcactcaataaaatggatctcttagaggaagaattttcaccgaatcttgaattggccaccattgttgtgaggaaccatttgcctaaaaatcctcttccggaagttggaggttggggcttaaagttcctcaagaaagcgggggttactgcagcagcctcggttccatgcgattgttctctgaataccgatgattgctcaacaagtacagatatcctagtcccggcaggc

SEQ ID NO: 21886 - DNA, 631 bp, Gossypium hirsutum
  Clone ID: GOSHI-09MAY01-C10239_2
ggagagacattttaaaccaagcgattccagaaacagcacgcaacctgcaacttaacttcccgatcgggttgagaaatgctgaggattccacagcacaatcatctagtagtagtaggagagatagggatggcggagttgttccagtttggtccccgccatcttcgagttaccccgagcaatttataagtgaggaaagtggtatcggtgcaagctcatcttttcttcaagggcatccacagtcccaccaaatcataaattggaggcgattatctcaaaccgggtaaaacgaatgcacgccaaaggcagggacctagtacttgcagaacgctcagtctagtggccggattggacgataacatggcatgttatcaaccccatgtattgtccaccaatctaactcgatctgcagccaactcgggagttgggtgaatgatcagctatccaatgttctaccatacgcatagctctgctgtatagtgttttggcttctttatataaaagggtagatgagattcattgtagaaatgttgtaatcctggaataaacacaggcttctgtgtatttactttttaactgactaggaaggtgtattggattactcattcctagtgctccctcttttcctttcttt

SEQ ID NO: 21887 - DNA, 660 bp, Gossypium hirsutum
  Clone ID: GOSHI-09MAY01-C10239_1
caagaaccacaaagagactcattaaaccagggaattcagctaacagctcgtaacaacaacacttttcggcaatttaatctcccaatggggttgggaaatgctgaggattccacagcagattcatctactagcagtagtaggagagaaagggatggcggagttgttccagtttggtctcctccagcttctagttattcagagcagttcataggtgatgaaaacgatattggtacgagctcatcttatttaccaaggcatccacagtcccaccaaatagtaaactggaggcgtttatctcaaactggataaacacttacgaacaccggaatcttgtagtcagagaatgccagaatggccaatcttgtgggctgatggggtataacatggcttcaatctaccacactcgttatccccaatctaacttgatcagcagttgccctcctatgtgtacgaaacttaagattgatccggctgctgatctttggactatctttttcccatgctgtaccatattacatagtcctgctgtatagtattttgtttcttttataagatagtgaagagagtcatgggtagaatttagaattgtgtagtcctcaaataaaaccatgtttatgttacttttaactgattgtaagaaatgattgtattgtaattcat

SEQ ID NO: 21888 - DNA, 610 bp, Gossypium hirsutum
  Clone ID: AI054824.1
ccctaatttcggggcctataaagtattcaccagcaaccagacatcactcgacatctcttctctggccaaacatgtcgatgctacaaacgagtcttaaagcagccatgaacgcaagagtaattgggtcggggagtgagaccatgattcttgcacatgggttctgaagagaccactctatctgggacataaaacttccttacttgacaaagcattatcatgttcacctttttgactggctgcggtttggaacagtaaaagatcccaaactctatgactctttgaattacacgcactttaaatgccaattcaggacatttaactaatcatacatgctttacttgcatcaaggagtatatataatcattgtacaaacatctgtattgctttaattacatgtattgctttaatttcttggaaagtgattgtttttggttaattcatttagtatgcgtttattaatataatttctaacgaagcattattaattccattcaatttgaggctattattataattactataagaaatgagtgtaattaactctatcatatatttcttatcaaaggatatttacatatacaattggttctaatatattgtacatattacg

SEQ ID NO: 21889 - DNA, 380 bp, Gossypium hirsutum
  Clone ID: LIB3166-046-P1-K1-C12
catgtcgatgctacaaacgagtcttaaagcagccatgaacgcaagagtaagagggtcggggagtgagaccatgattcttgcacatgggttcggaggagaccaatctctctgggacaaaatccttccttacttgacaaaacattatcatgttctcctttttgactggctttgttctggaactgtcaaagatcccaacctctatgatcctttgaaatacacctcctttgatgcctttgctgatgacttaatagcccttatggatgaactccacttgacttcctcagtctttgttggccattctatgtctggtatgatcggatgtattgcttccattaaaagacctcaactttttagcaaactcatacttgtcggatcttctc

SEQ ID NO: 21890 - DNA, 892 bp, Gossypium hirsutum
  Clone ID: GOSHI-09MAY01-C11949_1
tcaaaaagacaattcaacaatttatttttttaatttttactgaaaaatcaaagggggcaaccctcgcgttcgcccacgcgtccgccctcgcgggcgtaaccatgaaggaggttccaaccggcgcgtggcgctgtgccgagattatctccggcaacggccacacttactgcgtcaagtatggttggtttccgatcactggcgaggcggcgttggtcgagagagtcccgaggaaagcgattaggccttgccctcctcctataaatgggaccgacgattgggttcctggcgacgtcgtggaggtgttcgacgagttgtgttggaaaccagcggtgatcgttagagttttcggtggaaacaacatgttttctgtcaggattcttggatcgaagagccaactcaaagcacatcaatctcgattgcgtgttcgacaatcttgggaagacggctactggctcctcgtcgggaagggctcgtcaaattccactgggccgccgaagaggaaaagatcttcgcttggcttcccggatgctggtggaaagaagatgaaggtgattgaaaaagaatatctcatggcaatgttggaggcatcaatactttgcttctaaagccatgatggattgaatatgtcatctctcgctgttgatcaggggacaacatccatggtttattcctaaaggaacccttaagccctgcttttggtacgaattatttctaaaaatatttgaaaattttgatttatctatggaaatgctggtataggtcattgtattccttgctgcagaaaaacaagataatcttaaaagctgccctacagttagcatgtaaattgataggttgcaagtgcacttatggaaagacatatctgttattccccctcccttcttcttatccc

SEQ ID NO: 21891 - DNA, 603 bp, Gossypium hirsutum
  Clone ID: LIB3825-024-Q6-K6-B12
gcgttcgggaggttccaaccggcgcatggcgttgtgctgagattatctcgggcaacggccatacgtatagtgtgaagtacggttggtttccgatcactggcgaggcggcagcggtggaaagagtctctaggaaagcgattaggccttgccctcctcctatgaacgggaaaaataattgtgcttgtggtgatatcgtagaggtgttcgatgacttatcctggaaaccggcggtgattgttaaggttcttggtggaaacaacttttccgttaggattcttgggtcgagtagcgaactcaaagcgcatcaatctcgattgcgtattcggcagtcttgggaagatggcaattggttcctcgttggaaagggttcatcaaattccactgggccgcagaaaaggaaaagatcttcgcttggcttctcatatattggtgcgcaaaagaagagggtgttggaggaaggtagtaatggtgttcaaagaataataattcggcttccttcgcctgcctctgaaaaggtagatggatttgattccccaaataatatgctgggtgaaagatgtatgccttcttcctttaatagaattgatgataccctgagttgtg

SEQ ID NO: 21892 - DNA, 436 bp, Gossypium hirsutum
  Clone ID: GOSHI-09MAY01-C11889_3
gaaaaaaacaaaaaaaaaaatcctctggagaggattcctggtcctctgagctccggcatttagccgatcagctctggtcatcggacctccacgctgagatccacgcgccgccaccgactccgccacacattacgggcggaacttgaaaagtttcacttttcaaggtacttgcgaaaaattcggcaatggcaaaggcttgatgatggtccaccggtggcgttgatctcggcgtgacttggggcctggaatcatggccttgacggggtagctggaacagcaggagctgaagggtcatgaggcttggcttctggaaccttctgtttgcggcgtgaggagaaagagggcagaaaccctagggtttcctgcctgggtctgcagatgtttgggccaattggacctctggaaattttgggtttgtaatgggtagaggtgtttt

SEQ ID NO: 21893 - DNA, 677 bp, Gossypium hirsutum
  Clone ID: GOSHI-09MAY01-C11889_2
tttcgtttaaaaaaaactaaaaaaacctctgaaaaaagggctccgaccctcggagctccgacctcatggccgtcctggctcgtcctagggtctggcgtgcttggtctccacgcgcttaacgagccgccaccagagccaccgtatacggtggttagggtttcaaaaaccctcccttttctttgccgattctcaggtacttgcaaaaaatctggcaatagcaaaggcttgacgatggtccactggtggcgttgatctcagcgtgagttggggcctagaatcatggccttgacggggtagttggaccaccaggagttgaagagtcatgaggcttggcttctggaaccttctgtttgcggcgcgaggagaaagagggcagaaaccctagggtttcatgccttggtgtaacaagctgggccacttgggcccgttttgtcctgggcccccttgggtctgttgtaatgggtcttagttttagtgtatctaggtaggatgtaatagtgggcctgctggttattgtaactgggtaaggtctcttgtatttgggcctgccgtttaggcttttgtatttgggtaaaggactgttaagagcctttatattttgaaattttggattatcccttggctttcaatgggccgggcaaaattgaggtattacaattttcatttgtttaatcaat

SEQ ID NO: 21894 - DNA, 982 bp, Gossypium hirsutum
  Clone ID: GOSHI-09MAY01-C11889_1
aaaaaaactaaaaaaacctctgaaaaaagggctccgaccctcggagctccggcctcgtggccgtcctggctcgtcccagggtctggcgtgcgtggtctccacgcgcttaacgagccgccaccagagccaccgtatacggtggttagggtttcaaaaaccctcccttttctttgccgattctcaggtatcaaccttctccctctgttttgagtttctattttttagatctgggtgtgtgcatgttagtaaatgaccagataagattaaaaaagaagaaaacgattcgattacctttgaaaaacgagattcgccttttatttctctgtttcaaaaggattacaatggttcgtgctattctattaggtaaatccctataccttcttttttgtttctctttgcttctaaaaactctctttttttgattccctattattcttctctctgcttttgtgtgggtgtatttctgctatcgagtctctccctccgtgtgtgtccttttttacagaataaaaagaaggctttatagcctcgactactacaatttttggaaagaaatctttgatttctttccgtatttgcttcgcatgtctgctgtgattttctttccttttcttgcaggtacttgcaaaaaaatctggcaatagcaaaggcttgacgatggtccactggtggcgttgatctcagcgtgagttggggcctagaatcatggccttgatggggtagcaggagttgaagagtcatgaggcttggcttctggaaccttctgtttgcggcgcgaagagaaagagggcagaaaccctagggtttcttgcctgggtctgcagatgtttgggccaattgggcctctggaaattttgggtttgtaatgggtagaggtgttttgggctaccagtctgtaacgggtccattgcaactgttttgggacttagtttaggctgggctagtctagtaaaatttggctgttgggtttgtgtatttaggc

SEQ ID NO: 21895 - DNA, 605 bp, Gossypium hirsutum
  unsure (1)..(605): unsure at all n locations
  Clone ID: LIB3582-061-P1-K1-B3
tctagttcntaaaccctataccttctttttttgtttctctttgcttctaaaactctttgttttttgattccctactattcttctctctgcttttgtgtgggtgtatttctgctatcgggtctctctcccgccgtgtgtttttacagattaaaaagaagctttatagcctctactactacaagttttggaaagaaacatcgatttctttccgtatttgcttcgcatgtctgctgtgattttctttccttttcttgcaggtacttgcgaaaaatccggcaatggcaaaggtctgacaatggtccactggtggcgttgatctcggcgtgacttggggcctggaatcatggccttgacggggtagttggaacagcaggagctgaagagtcatgaggcttggcttctggaaccttctgtttgcggcgcaaggagaaaggcagaaaccctagggtttcatgccttggtgtaacaagctgggccacttgggcccgttttgtcctgngtccacttgggtctgttgtaatgggtcttagttttagtgtatctaggtaggatgtaatagtgggcctgctggttattgtaactgggtaaggtctcttgtatttggg

SEQ ID NO: 21896 - DNA, 697 bp, Gossypium hirsutum
  Clone ID: GOSHI-09MAY01-C11859_1
ctagagtctagagtcttccaaacgttaaggtgagggggtattttcgtaattcaacagaggccgggaatccatcttaaaccctaagatctccccattcttccaatcatctcctgtaacagccaatcccgtcgcacaaagaacctctgtttctgcccttctctaacaacaaacatggcaaagcgattgattccttcatttaatcgcattttggttgagaaaataatccctccttctaaaaccaactctgggatcttgcttcctgagaagacccccaagttgaactctggaaaagtggtagcagttggaccaggagctcgagacagagatgggaagcatatcccagttaatctgaaggaaggagatacagttcttttgcctgaatatggtggcactgaagtcaagcttggtgaaaaagagtatcacctatacagagatgatgacatcttgggaacccttcatgactgatttttgcggctgtgggactggagaatttgattctcattcaaatatgtctctgttcttgaaggaaacaaatatttaccttggacttgtgactctatcagtaattttacatgttttaagactttttattcgtttgaaggcattttggatgaggaatgttttcaagaattttactagctatgagggaaaaatggtgcctaaatccttcatccattatcccctgccttttgggttt

SEQ ID NO: 21897 - DNA, 433 bp, Gossypium hirsutum
  unsure (1)..(433): unsure at all n locations
  Clone ID: LIB3135-037-Q1-K1-B1
gttggaccaggagctcgagacagagatgggaagcatatcccagttaatctgaaggaaggagatacagttcttttgcctgaatatggtggcactgaagtcaagcttggtgaaaaagagtatcacctatacagagatgatgacatcttgggaacccttcatgactgaattttgcggctgtgggactggagaatgattctcattcaaatatgtctctgttcttgaaggaaacaaatatttaccttggacttgtgactctatcagtaattttacatgttttaagactttttattcgtttgaaggcattttggatgaggaatgttttcaagaattttactagccatgggaaaaaaaaaaaaaaaaaacaaaacccccntaaaaaaaaaaataaataaataaaaaataaattattccaaaacctttttataaaaattaa

SEQ ID NO: 21898 - DNA, 953 bp, Gossypium hirsutum
  Clone ID: GOSHI-09MAY01-C11599_1
cccacgcgtccgcccacgcgtccgcccacccctccttactacgacatatacaatttagccaactcttgtgtatttcatccacgatgaatcccttcaaaaccttgccaaccctttctttcctcttcttaacccttttcagcttagcccatgcagccacatttgatataagaaacaactgcccttacaccgtttgggctgccgcatctccgggtggtggcaagagacttgaccaaggtcaagcatggcaaatcactgcagcctctggaaccacacaagcccgaatttgggctcgaaccaaatgcaatttcgatgcctccgggaaaggctcatgcgagacaggcgactgcggtggagtcctcgaatgcaagggatacggtaaagctcccaacacactagccgaatacgcaatcgaccaatttgagcaccaagacttcattgacatctccaacatcgatggctttaatgttcctatggagtttagctccaactccccagggtgcactagggttatcaagtgtacggccgacattgtcggacaatgcccgaaccagttgaaggttcccggaggttgtaacgggccttgcccagtgttcaaaactgaagaacattgctgtaattctgggaactgtcaacctaccgacttctcgaggtttttcaaggagaggtgccccgatgcttatagttacccaaaggatgacccaacaagcttgtttacatgccccacagggactaattacaaggttattttctgcccatgaagagtatttgggatggttttaagtcctttctatacacaaattagtaggtttatatcaataaatggaataaactcgaatgctatttgagcacatttcttgatgtgcatatgttctgatttgtaataatagtgtttgtcatgaatgaaaatttggagtctctatgggtttcgttttgtgttcatctaaaattggagc

SEQ ID NO: 21899 - DNA, 333 bp, Gossypium hirsutum
  Clone ID: LIB3135-060-Q1-K1-E10
gcgccccgatgcttatagttacccataggatgacccaacaagcttgtttacatgccccacaggtgctaattgcaaagttattttatgaccatgaagagtacttggatgggtttaaagtcctttctattcccaacataataggttataatcaataaaggaataaacctcaattgcttttgaacacctttcttggagggcataaggtccgaattggaaatattatggttggcatgaatgaaaaattggaatcccttaattaaaaaaaataataaaaacccatattttaataataaaataacatagaaaacattacttgaaataaaccttattaat

SEQ ID NO: 21900 - DNA, 418 bp, Gossypium hirsutum
  Clone ID: GOSHI-09MAY01-C11579_1
ctcccaaacatcctaaatctcgtcttcgtcgccgacgccgaaacgccgctctctgcagccgcttgcccgggaacgcacccaatttcaaaaaacggcttccgtttctcatcccttggcctaaccaaactcctcgattccccgttctcgtctctccttcactgattccatcctcgaaaatggctttcatttgcttttagggtttgtaaaatcaaacccattagtttccgaacccaatctgtaccatttattgttctactttatccaattcatcaatatggctatccgtttcaccgtcagtttctcgggctacgtcgcccaaaacttagcctccaccgccggttcccgtctcggttcttgcccttcccggtcagtccacgaatgctggctccggtctcgtttcctttccgccaaacaaaaa

SEQ ID NO: 21901 - DNA, 364 bp, Gossypium hirsutum
  unsure (1)..(364): unsure at all n locations
  Clone ID: LIB3166-040-P1-K1-F3
attgaagctccccctcccaaacattttttatctcgacttcggcggcacctccggagtcgactactcctatacgccgaactcttgacccggtcgtccggcagcgcacccaacttcagaaaacggcttgcgtttgtcatacatcggcctaatcaaactcctcaattgccctngcttgtgtctcgctcaccgattccatccatgaaaatggcttccatcagctgctagggctctgaaaatcaaacccattagttgccgaacccaatctgtcccacttattgttctactttatccaattcatgaatatggctatccgtttcaccgtcaagttctccggctacgtcgaccaaaacttagccttcaccgg

SEQ ID NO: 21902 - DNA, 427 bp, Gossypium hirsutum
  Clone ID: GOSHI-09MAY01-C111511_1
tttttctctttcttttttgttctacgcgtccgcttcaatagagcagtttgttggtctaagcttggactctgggaaaaatctgtagaggactgcaaccaggctcttaggatccaaccaaattacctaaaagccttacttcgaagggctgcctcgaacgcaaagcttggacggtggccagatgctgtgagagattatgagcccttgagaaaggaacttcctggagataatgaagtggctgagtctctgcataatgcacaggttgcactgaagaaatcccgtggaatggatgttcttaacatgaaaatcagcgtgaagtagaagaaatttctagcctagagagattcaaaactgcaatatcgacaccagtggtccactttaaagtggcaaccaatgaacaatgtgaagaaatatccccattcgtaaattt

SEQ ID NO: 21903 - DNA, 575 bp, Gossypium hirsutum
  Clone ID: GOSHI-09MAY01-C11499_1
gcttggaaccctaattccgagtgagaagggaagaaaagaaaaagaacaaagatgaggccgattttgatgaaaggtcatgaaaggccattgacgtttctcaagtacaacagagatggcgatcttttgttttcgtgtgccaaggatcacactcccaccgtttggttcgccgacaacggcgagcgtctcggcacttaccgtggccataacggcgctgtttggacttgcgatgtctcaagggattcgatgaggcttataactggaagtgctgatcaaacggtgaagttatggaatgttcagaagggaactcaattatatacgtttaattttggttcaccggcgaggtcggtagagtttgccattggggataaacttgctgtcattaccacggatcccttcatggaattgacatccgctattcatgttaaacgcattgccggagatccaaccgaacaaactgaggaatctgtgcttgtcatcaagggtcctcaaggtagaataaatagagctgtttggggacccctcaataggactatcattagtgctggagaagatgctgtaattcgtatatgggatta

SEQ ID NO: 21904 - DNA, 585 bp, Gossypium hirsutum
  Clone ID: GOSHI-09MAY01-C111441_1
ggctcgcccgcacggtacggagccgggactgactggctggacccacgcgcgcggtcttgcttgggtcagatcaagcaaaagcagatgcttgggagaaagcagagatggttaaaatcaaagaccggtaataatacattgacaccgagaagcactaattgtttagtactaaacagttgtaggcaattagaagcatatgatcttcttcactaacaatgaattacaggtatgtgaagttaaataacactatactcgaatgggaggaaaagaagaaaaagaaggccagaagcaagctggacaaagcagagaagagtgaatcggagaaaaagagagcaagagccttaaccaaatttaggaatgaaatggactacatcaaacaagttgcagatggagcaagagcacaggcaaatgctagacaaagaaatgatgagcttaaagcaaaggaaaaggcaaacataattagaacaacaggagagcttccaatgacatgcttctgctgctgaatttaactaattagtagtatcatgactcttaaggcacatataaaaccactacacaatgctttgactaattaaacgatgccttagc

SEQ ID NO: 21905 - DNA, 739 bp, Gossypium hirsutum
  Clone ID: GOSHI-09MAY01-C11409_1
gaagaaacggcacctgcacaggtggatctacttggagaagctttgtttcaattttgtgatccaatgatggagccattggattggaagctcttttcaccattgcattcgcagatcgaagccgagggggcaccttggatgtttgaccatgtcgggaacagttttggtggggtgaagttcgagcatggcacaaacgaaaatgatgctgaattcatgaactctatcctgaataattcggatgactattacagtgacgactcaagcagtcgaaggaattcagttattgaaaccgagaccccaaagtcaatggcctttggtacaaatggtggattgtattgcaaacctgatgctgaaccggctcgagtattgcctgggacaggaactgccaacggaggagcattctataatgtgcgaaatagcaatggagaaccaagcaaccatgtgaacacagcttgtaacgtcgacactgcacctaccatcaggattcgatctcgtgctcatcgaattcagccagacacagagaacttcgacacacagggtattgcatcgagaaggtgtaaacttgtggtccattcacctcgcttcgaagagaaagaacatgaatcgaaacccatccttacgaagggtgtaaaagccatggaagagtatatcagtgttggcaacgatgctgctcgaaggaccatggacgaaccccagattttcgagacaagcaaaagagatgttttgaggtcgaagagcaaga

SEQ ID NO: 21906 - DNA, 864 bp, Gossypium hirsutum
  Clone ID: GOSHI-09MAY01-C11439_1
ttttgggaactctaaaattccccctgggcccggtctccccaaaacatatctaatttttcccccaaatcgaaaatccccaaatcaaaatccttccaccatttccgtgtcgccatactgatccctaatcctcagcatctatctcaatgcatttcttgcttctctaaatctccatctctaaatctccatctctaaatctctatctctttgattttcgccgaaatctatgattcacatgagagctatggcgagtgagcaaggcatgagtagttggaccgatcttctccactcatccaccaagcttcttgagcaagctgctccttctgctcagtttcctcctcttcagagaaacttagatcagttagaagcactatcaaagaagctcaaggcaaaaaccttaagaactgaggctccttctcaatccattgctgccacaaggctacttgcatgggagggaattaacgctgaacagcttacacgcgatatgaaatcttttgacttgaagacaacatttgaggatgttttccctactgaagcaacaagcgttgaggagtatctgcagcaggaagattggcaaaaggaaaaacgggatttcttacagagtttgagcagaatttcaacattacctaagaccaacttgattgataaaagtagtggtggtattcgttcaggtcaaatggttcccatggcttctagttctcatgtttcttctggtccttctgccaatgggcttctacctttagccgacaagccagttgttgagaaaaaagtgtcggtatatgcggaagttgttagaaatctgaacaatgcaagacaacaaggcttgccatttaaagcctgtgccatcagcgcttgtggtaattttgc

SEQ ID NO: 21907 - DNA, 346 bp, Gossypium hirsutum
  Clone ID: LIB3166-039-P1-K1-A10
cccacgcgtccgcccacgcgtccggaaatccccaaatcaaaatcttccaccgttgctgtgttgccatactgatccctaatcctcagcatctctctcactgcatttcttgcttctctaaatctccatctctaaatctccttctctaaatctccatccttttgattttcgccgaaatctaaaaatataaattgaagagtaaaactcttgagctttccctcgcatcagtgattcacatgagagctatggcgagtgagcaaggcatgagtagttggaccgatcttctccactcatccaccaagcttcttgagcaagctgcttcttctgctcagtttcctcctcttcagag

SEQ ID NO: 21908 - DNA, 1103 bp, Gossypium hirsutum
  Clone ID: GOSHI-09MAY01-C11749_1
ctcttctttgtagccaaaaaggaactatgagccgaattaaagaaactttatccaacatttctaattctgccaaacacatttccttcaccaagaaacacaagaaaattttcttggcactatttgcatctttagtcattgtcgctgctataatcggcattgttgctggagtgagctcacggaataactccgatgagtccgatacttcccatcatgccgttgtgaaatcagcttgtagtggtacgttctaccctgatttatgtttctcggctgttactaccgtccctgctggtactgccaaaaaggtgaggagccaaaaggatgttatcgaattgtctcttaacatcaccaccactgctgtcgaacacaattacttcaagattaagaagctgttggctcgaaaggacttgacgacgcgtgaaaagacggctctccatgattgtttggagactattgacgagaccctcgacgagctccacgaagctgttgaggatcttcatgagtaccccaacaagaaatctttgacccagcacgcggatgacctcaagaccctgatgagtgccgcaatgaccaaccaggaaacttgcttggacgggttttctcacgagggtgccgacaagaaaatccgtgaggtcctgatcgatggcgagaagtacgtcgaaaagatgtgcagtaatgcgcttgccatgatcaagaacatgacggacactgatatagcaaacgagatgatgctcaagtcatcgaacaggaagctgaaggaggacgaaagcggcattgcctggccagagtggttgtccgctggcgacaggcgcctgcttcagtcgtcttcggtgacccctaacgtggttgtggcggccgatggtagcgggaacttcaaaacggtgtcggaagcggtcgccaaagcaccggagaaaagcagcaaaaggtatattattagaatcaaagcaggcgtctactgagaaaacgtggaagtcccaaagaagaagagcaacataatgttcatcggagacgggggctctaaaacaatcatcaccggcagcaggaatgtggtcgacggaagcaccactttccactctgccacagttgctgtggttggtgaaaagttc

SEQ ID NO: 21909 - DNA, 969 bp, Gossypium hirsutum
  Clone ID: GOSHI-09MAY01-C11779_1
cgttcggattatcttcatcagatctccgctccaacaagctgcattcaggtctgtttccatctggttttcatcaacttgatcgtactgccccacctactagactttccggcgacaacttttgtagcgacaacgcgaacaataccaatatatcttccttgttgacaataggaaatccgacccagagtttgaaacaaagcaatgatagcaagacaccccatattgtattgttcggtcaactcattttctgtgagcagcgggcttctcagagctgctcaggtgatacagttggaaacagttcatcagatgggaatacagagaagactgctatttcctctgatggaactggatctgtgttacatcaaaatgttcgggaaaattcttcggatgaagggtttccttggtgcaaagagcatcaaaaaactgatctaggattggagactggtcattgcaaagtgtttatggaatcagagaatgtaggtagaacccctgatctttcagttctgggatcatatgaagagctgtttgggaagctggccaacatgtttggcatagaaagttcagagatgctgagcagtgtgctctaccgcgatgctgccggttcagttaaaaacactggagatgagcccttcagcgagtttatgaagacagcaaggaggctaacgattctcatggattcaagcagtgacaacttagaaagatagagagatgaatttgcgccaaattgtacagttttcccagccgtcggtttccgattttcatttcttctacggtagttgtgagaaatctccacttgacccattttgatggaactgtaaaaccacgttttgttggttaactcgaatttttctttccaacataaaaaggatctatgtcctttgtcatgtttattaaatcccagtcctagaaactgtatatttatggaagaaaatggtgctcgcatcatgttggaataaaccgttcatttgtttc

SEQ ID NO: 21910 - DNA, 383 bp, Gossypium hirsutum
  Clone ID: LIB3166-043-P1-K1-H5
ggattatcttcatcagatgtccgttctagtttgctgcagtcgggcctctttccacatgggtttaatcagcttggtcatactatccctcctatgggacactccagtgactatggaaacaataggaatatttcttcctcgcatacaatgggaaatcttacccaaagtttaaaagaaagcaatgaaataaagacaccccatatcttattgtttggtcaactcattttctgtgagcagcacgtttctcagagctgctcagatacaattggaaacagttcatccaacgggaatacagagaagactgtgatttcttccgatgcctctggatctgcattacatcaaaatgctcgtgaaaattcttcagatgaagggtctccttggtacaa

SEQ ID NO: 21911 - DNA, 616 bp, Gossypium hirsutum
  Clone ID: GOSHI-09MAY01-C11709_1
cggacgcgtgggtgaagggcaaaggaagcgaagagcgatggacaggagccatagcaaatctcaccgagatggcttcaaatcttgattctctgcagaaattacttctcaaaaaagctgttttcgtcgacgaagataccttcgccaaggcctcacttacctcggaacaagcccgaaccatcaaggtccttgaacaaagggtggagacgcttgaaagagaggtagatgctgcaatcacagcagcagcgcgtgctcgttccgagaagcgacaggctgaggctgcccaaaaggccgccgaattgcgtgcccaagaggttacaaaggagctcgagaacaccacaaaagtatttgaacttcacatggaagagttgcgagcaaagcaagaagagatctctaagcgtgacaaggaaattaaactccttgaagcaataattcaaacccttgccggtaaagattctcgctcttccccccttgaatgaggaaaaaagaaatttaaggaaccaataaaacttagttttctcatcatactacgtatcattttttctttttagtgtaatgtaatcagtttatacaattcttttactgtcatcgtaacgaaagtttgctttgtttttccaaa

SEQ ID NO: 21912 - DNA, 431 bp, Gossypium hirsutum
  Clone ID: GOSHI-09MAY01-C11649_1
attcatcacctcatctaaaacatcttataatccctctttttaaatactcggctgtaaaaacaaaaattgtgaaacatgcacaatccactttttcttgtagcttactgtaatattctccagcctggtggttcagccagtcatgggagcaaagggtttcagtgtggagcttattcatcgtgattcgccaatatctcctttctataatgcttctctcacctcatcacagatcccaagaaaaaatgccctccattccctggaccgtctcagacacttccaatccttgattgatcaaagcgccatccaatctgcagtgactccaaatgggggtatctatctgatgaaactctcctttggaaccccgccagttgactacatggccgttgcagacactggaagcgaccttatatggatacaatgtgttccatgtcttc

SEQ ID NO: 21913 - DNA, 397 bp, Gossypium hirsutum
  Clone ID: LIB3165-048-Q1-K1-B7
cccacgcgtccggatttgtattttcctttttcttttttctttttttttggcgaaatgatgcataaaccactttttcttgtgcttactgcaatattctccagcctggtggttcagccagtaattggagctaagggtttcagtgtggagcttattcatcgtgattcgccaatatctcctttctatgatccttctctcacctcatcacaaatcctaagaaaaaatgccctccattccatggaccgtctgaaacacttccaatccttgattgatcaaagcaccatccaatctgcagtgactccaaatggaggtatttatctgattaatctctcctttggaaccccaccagttgaatacatggccgttgcatacactggtagcgaccttatatggatacaat

SEQ ID NO: 21914 - DNA, 532 bp, Gossypium hirsutum
  unsure (1)..(532): unsure at all n locations
  Clone ID: LIB3585-056-P1-K1-H3
cggacgcgtgggctaaacccttacaaaagtcagggttggtagtcgctgttttgattattgtaagggaacgtaaataaaaatgttgagaaggaacattcgattgaggagagagtatttgtacaggaagagcttggaaggcaaagagcgtttgctttatgagaagaaacggaagatcaaagaagcccttgaagagggaaaacccattccaactgaactccggaatgaggaggccgcgcttcgccaagaaattgaccttgaagataattacacttccattcccaaaactcatattgatgatgaatatgcaaatgcaactgtacgagatcctaagattttgctgacaacatctcgtgatccaagtgctcctcttatacagtttgttaaggaattgaagtttgtctttcctaatgcanagcgaatgaatcgtgggggccaggttatatctgaaattattgaaagttgccgtgcgcatgagtttacagatgtaattttggttcatgaacatcggggtataccagatggtttgattata

SEQ ID NO: 21915 - DNA, 385 bp, Gossypium hirsutum
  Clone ID: LIB3166-042-P1-K1-C4
atttatgaataaccaataaaaatctagttattaaaccctaattcaattcaggggagcctagccattctcattcaacattccaaatcagtcgctgttttgattatcttaaattgaagtaaataaaaatgttgagaaggaacattcgattgaggagagagtatttgtacaggaagagcttggaaggcaaagagcgtttgctttatgagaagaaacggaagatcaaagaagcccttgaagagggaaaacccattccaactgaactccggaatgaggaggccgcgcttcgccaagaaattgaccttgaagataattacacttccattcccaaaactcatattgatgatgaatatgcaaatgcaactgtacgagatcctaagattttgct

SEQ ID NO: 21916 - DNA, 385 bp, Gossypium hirsutum
  Clone ID: GOSHI-09MAY01-C11629_1
ctttttcgtttgaatataaagaacttaaagccccctcttttgtcgcttaaacccgaagcacaagccccctcttctcatcggatgtccggtttccagtttataacagcctcttcttcttaacttcattcctaagcttggcttttcctcaaggtgcatttttgcatattgttggttaaatctaagagtaaaagaatggcacatctgatgtcaacttcatgctcaataaagatctcctctagctacagaccttgtggtcaacctctaagtcaggatcgaaccgtacttcctaactcttttaccattaagacttccaagtcacccttcaaaaggctcatttcgaaagggcacagggcaggaaggagttgtggggttcttgcaattgctg

SEQ ID NO: 21917 - DNA, 398 bp, Gossypium hirsutum
  Clone ID: uC-gsronu33B047d10b1
tgggttgggaagtgaactatggagcagaattcgtacccagcggtgaagatagctacacaataataatccagaagagcaagaaggtgggttgttcagagggagaagtagtgtgtgacaatttcaaggttggtgagcctggaaaggttgttctcaccatccataaccctacatccaagaagaagaaactcctctatcgcttgaagaccatgcccgcatctgcttagacccaaacactaagagattcacttttgctattttgcttgcctcttaaaaaaagagaacgtttctattattattattatttggaatttggaggttgttcattttatttaattatttttagatatagttatctggtttgtgtatattttatttatacctaataccgcttaaagatt

SEQ ID NO: 21918 - DNA, 300 bp, Gossypium hirsutum
  Clone ID: uC-gsronu33B047d05b1
gcggcctctgttgggaagaggaacaaggggtcttattggactgtttttaattgaaggaagctaccccattaaccacccggaggagtagagagggggtctggtatatttgtatatagttcgttttatcccatatctagttttggtgcgtctcacataggtagtttctatacattcttaaaccctacatccaagaagaagaaactcctctatcgcttgaagaccatgcccgcatttgtttagacccaaacactttaaagattcacttttgctattttgcttgccttttaaaaaaaagagaac

SEQ ID NO: 21919 - DNA, 593 bp, Gossypium hirsutum
  Clone ID: GOSHI-09MAY01-C11109_1
cccacgcgtccgaaaaaacaggctaaccaatcataactgaaatgtttctgttaaagagctaagaagcaaaaaaaaaaaaaaaaaaaagctgaagctaaaatcacagcttgataatggcttccaccgccatttctctttctttaccaacatttccttcatcttcttcaactgttaaagctaaaccttctatattcagtcacccccatttattcattgcaaagaacgtaccatcttcttcactctttagttcttcaacgaagataacgaagcaaattcgtactgccttcaagatcaaatgctcatcggcttctttttcgaatactcttccatctgctcttctttttgactgcgatggtgttctcgttgatactgagaaggatggtcaccgggtttcgtttaatgacactttcaatgaaaaaagaattgggtgttacttggggtgtggatttgtatggagagttgctcaaaatttggtggtggggaaagaaaggatgacagcttactttaacaagacaggttggccagataaagctccaaagagtgaagaagaaagaaaagcattcattgcttcacttcataaacgaaaaaccgag

SEQ ID NO: 21920 - DNA, 313 bp, Gossypium hirsutum
  Clone ID: LIB3120-043-P1-K1-H3
ctcacacgcacgaccacgcgtaacgcaccgtgtgctctattgccacaccttgcacattgctgcgaccgccatttatctttctttaccaacatttccttcatcttcttcaactgttaaagctaaaccttctatattcagtcacccccatttattcattgcaaagaacgtaccatcttcttcactctttagttcttcaacgaagataacgaagcaaattcgtactgccttcaagatcaaatgctcatcggcttctttttcgaatactcttccatctgctcttctttttgactgcgatggtgttctcgttgatact

SEQ ID NO: 21921 - DNA, 458 bp, Gossypium hirsutum
  Clone ID: GOSHI-09MAY01-C11079_1
agggaaaaaagggccgccgacgcgtccggaatcagtacccaaggtttcgccgactccaaccctaggcaccggcggccggcacatcgcggatcaagcggcggctaaaacctggtgcggcagcgcctttcagatgccgctgcattacccaaggtacaccgaagctgattacgaagccatgcctgagtggaaagttgattgtttgcttaaagaatacggactacccatcaccggcgacggtgagcagaagagaagctttcgccatgggagcttttctgtggcctcggtagctacaattaatgttgttttatgggtcccaattttcttcactttttttctttttttaaattatgaagtctgaaagggcattgagttatgatcttttgtttgcttcattgccaagtgattatgaaaatatggtaattttgagctatttgtattttaaatattaaataaaattt

SEQ ID NO: 21922 - DNA, 358 bp, Gossypium hirsutum
  Clone ID: uC-gsronu33B008g04b1
ggaagtgggtatggaatcagtacccaaggtatatgcgactgatacattaggcacacatggactgcacaacggggatcaagcggcggttaaaacctggtgcggcagcgcagaaaagatgccgctgcatgacccaaggtacacggaagctgattacgaagccatgcctgagtggagagttgatggatagattacgaatacggactacccatcaccggctgacacaaaaacaaaagagaagctctcgccatgggcgctaaatgtgagtgccccgattgctacacaataatgctggtttacatggcgccaatgtatcttgcttctcttctttgcaggaacagaggacagtctgcatgggcat

SEQ ID NO: 21923 - DNA, 484 bp, Gossypium hirsutum
  Clone ID: GOSHI-09MAY01-C11019_7
atttttcatttatttacgtacgtaggtttgagcatagaaaacaagcataaaatgtaggcagtagccataagaagagtccaaatgcatttaattgatactaatacagaagtaaaatgaagtttatttatgcaaggatttgctcaagaggcttggtttccagttcgggcttcttggtcgtctccatctgctgctccttggccagtttctttagcatggcaagctcaagatccttgctcatcttcctcctgtacatctcagcaaatgtgatgggctcctcaagtataggtttctctccttctcttatcttcagtggatacactgttgcatcgggtgctgggttttggaatgtggctattgacaatctgctgcagtcggagttcaccactgcttggtgatcggcgttcttgaacctcccattgctcaggtaatggccatgatctccaaggttgaccacaaatgccccttcaactggttgaacagtgat

SEQ ID NO: 21924 - DNA, 505 bp, Gossypium hirsutum
  Clone ID: GOSHI-09MAY01-C11019_6
ctgtgagcccaccgaaactgcccatgtagatcctaaccttctccttattaaccagacccctgtggagagtgctcgtgcactctccattgctgggggtctggttaataaggagaaggttaggagctcatgggcagttttctgtgagccaccgcaggatcagatcatccttaagccactcccggagactgtctctgggaccgaacctccactgttccctcctcgtacctttgctcagcatatcgagcataagctgttcaggaagacccaggataatctgtccaactgaaactagtatttttatttgtcgcgataacctatttctttctgtactctgatgaatgctatatttcgttggggggttaaacccttggttgtggcgtctgtctccactccttggctcctctttacctgttctatttgaataatgagagctgatttggttcttttaaaaaaataatattttttttttttttttattattttttttttttattttagtttattt

SEQ ID NO: 21925 - DNA, 515 bp, Gossypium hirsutum
  Clone ID: GOSHI-09MAY01-C11019_4
aggaagaaagtgaagtgggaaattttattttcatctattaccgatacccgagtatataatagaccacaagcatcaaatgtggaaaacatgacatacattactcgctagaaaagaaatagaaacgggtatcaccaccacaaaaaaagtagaaatgcaataaaattaacacaacatagtggaagacgaaacagtgctggtaaaagttttatgcaaggatttcctccaatggcttggcttcaagcttgggcttctcattctcagcctccttctccttcaactgttgctgctctttggccaccttcttcagcctggcaagctcaagatctttgctcatcttcctcctatacatctcagcaaatgggatgggctcctcaaggattggtttctctccctctctgatcttcaagggatacactgtggcatcgggtgctggattttggaatgtggctattgacaatctgctgcagtttgagttcaccactggttggtgatcagcattcttgaacctcccattg

SEQ ID NO: 21926 - DNA, 619 bp, Gossypium hirsutum
  Clone ID: GOSHI-09MAY01-C11019_3
agtggcatatcgggccacgttgaatagtcctggatcttaattgggtacgagaagtagtctaccatctcccgccaatcttgcaccgtttctccctggaggtgactggagacgatgaacccacctttcttgccaccagacatatcgaaccgaagcttatcttcggcgggcaaagcgaagaactctctggcaagacgggtcatctcagaaatgagtttagtgtcgacaccatgatccacgacctggaagataccccaattttcacaagcctcgacgattttctggcatatctccgccctcttttcacctacataattgataccggcaagagagatcacagggatttcatcgctgaattggttgtaagcaaccttaggacgctcatcttcatcacgaacaaagcttgcctgtaaggtttccttccctgcaagctctgtgagagttgaaggagccattactgctggttttaattatttggtatgcgttaaatggatgtttggttacaaatataggttagcagagaaccgtggaaatggtgtatacacaaggagctgcgggtgcgggcctaaccccccccccccaaggctagtgagtaacctcccaagcagacagctattagttt

SEQ ID NO: 21927 - DNA, 1675 bp, Gossypium hirsutum
  Clone ID: GOSHI-09MAY01-C11019_2
aaactaggaagaaagtgaagtgggaaattttattttcatctattactgatacccgagtatataatagaccacaagcatcaaatgtgggaaacatgacatacattactcgctagaaaataaatagaaacgggtatcaccacaaaaaaaaaagtagaaatgaaataaaattaacacaacatagtggaagacgaaacagtgctaacacaataaccagcagtagggtaaaagttttaggcaaggatttcctccaatggcttggcttcaagcttgggcttctcattctcagcctctttctccttcaactgttgctgctctttggccagcttcttcagcctggcaagctcaagatccttgctcatcttcctcctatacatctcagcaaatgtgatgggctcctcaaggattggtttatctccctctctgatcttcaatggatacactgtggcatcgggtgctggattttggaacgtggctattgacaatctgctgcagtctgagttcaccactgcttggtgatcagcattcttgaacctcccattgctcagataatggccatggtctccaaggttgaccacaaaggctccttccacaggttggacagtgatccaagtcttgccattgtcccgggtggcctgaagcccaccaacttggtcttgaagcaagagtgtgatggtgcctgggtcagtgtggcgcttgagtcctaaagtgaggtcaggttgagggcatttaggatagaagttaaccaccactttctgatccatgtccacacatgccttagtcaaggcctccttctctaaacccatggcctctgacaacacctcaagaagcttgcaagctaggcccatcaacttctcgctgtactcctttgtaacttcaatccaaccctctggcttatcaggccaccttgaatagtccctgctcttcaatgggtatgaaaagtatgtcacaatctcccgccaatcttgcactgcttctccctgaaggtggctggagacgatgaaaccacctttcttgccaccagacatatcgaaccgaagcttctcttcagcaggcaaagcaaaaaactctctcgcaagacgggtcatttcggacacgagtttagtatcaacaccatgatccacaacctggaagacaccccaatcctcacaagcctcaacaatcttcttgcatatctcacccctcttgccatcaacatcatcgataccagcaagagagatgacagggatatcattactgaattggttgtaagcaaccttaggacgctcatcttcatcacgaacgaagcttgcctgcaaggttttctcttccgcaagagccgtcagagttgaaggagccattgatgttgcttatgactctgaactgaaacctttccctcacttaaaaatgggtttgcgttaaacgatcgaacgttataagtttagttgagaaccccacgcgtccgcggacgcgtgggcggacgcgtgggcgagcataagctgttcaggaagacccaggataatctgtccaactgaaactagtatttttatttgtcgcgataacctatttctttctgtactctgatgaatgctatatttcgttggggggttaaacccttggttgtggcgtctgtctccactccttggctcctctttacctgttttatttgaataatgagagctgatttggttcttttatt

SEQ ID NO: 21928 - DNA, 1371 bp, Gossypium hirsutum
  Clone ID: GOSHI-09MAY01-C11019_1
cccagcgtccgccccgcgtccccccccccccccccccgcgtccgaaaaaaattgtttttgtttttaaaatataaacttacgacatctacaaatggtgacctcagtgctacctagagtagaaagcttggcaagcagtgggattcaatcaatcccgaaagaatatatcaggcctcaagaagagcttacaagcataggtaacgtgtttgaagaagagaaaaaagaggaagggcctcaggttccgaccatcgatttgacagaaatcgagtcggaggacaaagaggtccgggaaagatgtcagcaggagctgaaaaaggctgccatggaatggggtgtgatgcaccttgttaaccatggcatctccgaggagctcatggatcgtgttaggaaagttgggcagaaattctttgaactccctgtggaggagaaagagaagtatgccaacgaccagagctctgggaatgttcagggctatggtagcaagcttgctaataatgctagtgggcagcttgagtgggaggactacttcttccatctaatttttcctgaggataagagagacttgtcaatttggcctaaaatccccagcgaatacactgaagttacaagtgagtatgcaaggcaactgcgaggcctagcgagcaaaatactttcagcactatcaatttgcttgggattagaagaaggaaggctagagaaggaagttggtggcgtggaagagcttcttcttcaattgaaaatcaattactaccccaagtgtccacaaccagaactcgctctcggtgtcgaagctcacaccgatataagtgcactcactttcattctccacaacatggttcctggcctccaactcttttaccaaggcaagtgggtgaccgctaaatgtgttcccaactccatcatcatgcacattggagacaccatcgagatcctcagcaatggaaagttcaagagcattctccacaggggtctggttaataaggagaaggttaggatctcatgggcagttttctgtgagccaccgaaggataagatcatccttaagccactcccggagactgtctctgagaccgaacctccactgttccctcctcgtacctttgctcagcatatcgagcataagctgttcaggaagacccaggataatctgtccaactgaaactagtatttttatttgtcgcgataacctatttctttctgtactctgatgaatgctatatttcgttggggggttaaacccttggttgtggcgtctgtctccactccttggctcctctttacctgttttatttgaataatgagagctgatttggttcttttttttaaaaaaaaaaaaaaaaaaaaaaaaaaaaaaaaaaaaaaaaaaaaaaaaaa

SEQ ID NO: 21929 - DNA, 441 bp, Gossypium hirsutum
  Clone ID: LIB3135-036-Q1-K1-E8
caaatggtgacctcagtgctacctagagtagaaagcttggcaagcagtgggattcaatcaatcccgaaagaatatatcaggcctcaagaagagcttacaagcataggtaacgtgtttgaagaagagaaaaaagaggtccgggaaagatgtcagcaggagctgaaaaaggctgccatggaatggggtgtgatgcaccttgttaaccatggcatctccgaggagctcatggatcgtgttaggaaagttgggcagaaattctttgaactccctgtggaggagaaagagaagtatgccaacgaccagagctctgggaatgttcagggctatggtagcaagcttgctaacaatgctagtgggcagcttgagtgggaggactacttcttccatcttatttttcctgaggataagagagacttgtcaatttggcctaaaatccccagc

SEQ ID NO: 21930 - DNA, 430 bp, Gossypium hirsutum
  Clone ID: LIB3146-009-Q1-K1-A4
cccacgcgtccggttctagatcgcgagcggccgcccgcgatctagaaccccacgcgtccggaaagaatatatcaggcctcaagaagagcttacaagcataggtaacgtgtttgaagaagagaaaaaagaggaagggcctcaggttccgaccatcgatttgacagaaatcgagtcggaggacaaagaggtccgggaaagatgtcagcaggagctgaaaaaggctgccatggaatggggtgtgatgcaccttgttaaccatggcatctccgaggagctcatggatcgtgttaggaaagttgggcagaaattctttgaactccctgtggaggagaaagagaagtatgccaacgaccagagctctgggaatggtcagggctatggtagcaagcttgtaacaatgctagtgggcagcttgagtgggaggactact

SEQ ID NO: 21931 - DNA, 470 bp, Gossypium hirsutum
  Clone ID: uC-gsflnu33B090c05b1
cttactcgtccgcccacgcgtccgcccacgcgttcgcccacgcgtccgtgacccgtcttgcgagagagttttttgctttgcctgctgaagagaagcttcggttcgatatgtctggtggcaagaaaggtggtttcatcgtctccagccaccttcagggagaagcagtgcaagattggcgagagattgtgacatacttttcatacccattgaggagcatggactattcaaggtggcctgataagccagagggttgggttgaagttacaaaggagtacagcgagaagttgatgggcctagcttgcaagcttcttgaggtgttgtcagaggccatgggtttagagaaggaggccttgactaaggcatgtgtggacatggatcagaaagcggtgggtaacttctatcctaaatgccctcaacctgacctcactttaggactcaagcgccacactgacccaggcaccatcacactt

SEQ ID NO: 21932 - DNA, 410 bp, Gossypium hirsutum
  Clone ID: LIB3493-024-P1-M1-D12
cggacgcgtgggcggacgcgtgggcggacgcgtgggcggacgcgtgggaaaaaaattgtttttgtttgtaaaatataaacttacgacatctacaaatggtgacctcggtgctacctagagtagaaagcttggcacgcagtgtgattcaatcaatcccgaaagaatatatcaggcctcaagaagagcttacaagcataggtaacgtgtttgaagaagagaaaaaagtggaagggccttaggttcctaccatcgatttgacagatatcgagtcggaggacaaagaggtccgggaaagatgttaccatgagctgaaaaaggctgtcatggaatgacgtgtgatgcaccttgttaaccatggcattttcgaggagctcatggatcgagttatgaaagatgggcaaaaattcttt

SEQ ID NO: 21933 - DNA, 391 bp, Gossypium hirsutum
  unsure (1)..(391): unsure at all n locations
  Clone ID: LIB3148-014-Q1-K1-C7
ggaagatgagcaaggatcttgagcttgccaggctgaagaagctggccaaagagcagcaacagttgaaggagaaagaggctgagaatgagaagcccaagcttgaagccaagccattggaggaaatccttgcctaaaacttttaccctactggttattgtgttagcactgtttcgtcttccactatgttgtgttaattttatttcatttctacttttttttttgtggtgatacccgtttctatttattttctagcgagtaatgtatgtcatgtttcccacannanaangtaannaaaaaataaaaaaatataaaaaaaaaataaaaaaaaaaaaaataaataaaataaaaaaattataaaaaaaattaatatataatatattattaattaatt

SEQ ID NO: 21934 - DNA, 386 bp, Gossypium hirsutum
  Clone ID: LIB3148-013-Q1-K1-C6
attaatgtctttcattcatccttattttgttctatttgtattttgttagatttctggtgtagtatgataagtgcggtattttgtttggcgggatgtatttatatcatagattattcttcttctcaaaaaaaaaaaaaaaaaaaaaaaaaaaaaaaaaaaaaaaaaaaaaaatgatgttgatggcaaagaggggtgagatatgcaagaagattgttgaggcttgtgaggattggggtgtcttccaggttgcggatcatggagttgatactaaactcgtgcccgaaatgacccgtcttgcgagagagtttatcgctttgactgctgaaaagaagcttttgttcaatatgtctggtggcaagaaaggtggtttcatcgcctgcagccat

SEQ ID NO: 21935 - DNA, 278 bp, Gossypium hirsutum
  Clone ID: LIB3083-056-Q1-L1-C5
gagccttgttgggttttagttatccgacaccctcgaactccttataaatacacggtttacacggttctctgctaacctatatttgtaaccaaacatccatttaacgcataccaaataattaaaaccagcattaatgactccttcaactctcacataactttcatgtaaggaaaccttacaggcaagctttgttcgtgatgaatatgatcagtctaaagttgcttacaaccaatttatcgatgaaattcctgagatctctattgccggtatcaattatg

SEQ ID NO: 21936 - DNA, 1429 bp, Gossypium hirsutum
  Clone ID: GOSHI-09MAY01-C11369_1
atccctctctctctccccctcgtccgtacgggatctctagggtttcaaccttcgacttcgattgaatcgctagggttttgattatatcctctctcctttgatcgtacattaaattgaatcaagaaattcggaaaaaaatatggtactttctcagaggattcatgaggcattcaaaggaactgtggaaagaataacagggcctcgaacagtctctgcttttaaagagaaaggagttttaagcgtctccgagttcatcctggctggtgataatcttgtatccaaatgccctacctggtcttgggaatctggagagccaagcaagaggaagtcctatttaccgcccgaaaagcaatacttgattactagaaatgtgccctgcctaaggagggctgcgtcagtggaagaagaatatgaagctgcaggaggagaggttcttcttgataatgaagacaatgatggttggttggcaactcatggtaaacccaaagataaaagtgatgtggaggaaaacctgccttcaatggagactctagaaataaggcagaatgctgtaagatcaataccttcttattttggggttggtgaagacgaagaagatatacccgacatggctgattatgaagaagctgacaatcttgttgagactgatgcggctactttacaaccgacatatcttgttgctcaagagcctgatgatgacaatattttacggacccgaacctatgatgtcagcatcacgtatgataaatactatcagactcctcgtgtgtggcttactgggtatgatgagtcaaggatgctcttacaaccagagcttgttctggaggatgttagtcaggatcacgcacacaaaacggttactattgaggaccatcctcacttacctgggaagcatgcatccgtacatccatgcagacatggggctgtcatgaaaaagatcattgatgtgcttatgtcacgtggagtagaacctgaagttgataagtatcttttcttgttcttgaaatttgtagcctctgtaattccgacaattgagtatgactacaccatggactttgatcttggcagcaccagcacttaattagagctatggcttgacaatttattgatggatcatattgggtatacctgcaactgcttgtaaatgcatatcccgtgcatgataatcacccttcctagtatgcattgcttgactgaattactgggttcccacggtgtttgcttcgttcgttagttcataccctactcagggccaccacacttgtaaatatgctgtctctgttatcagactggaactgtgttctcgactcttttatttggaaatttttcatgccacacatattgtttcgtatcaacgagctgattgaacgtggcaaacttaatttgcgattgtgaattatcaaggcttctctatgggtattactagatt

SEQ ID NO: 21937 - DNA, 418 bp, Gossypium hirsutum
  Clone ID: LIB3582-055-P1-K1-B8
cttttcttgttcttgaaattgtagcctctgtaattccaacaattgagtatgactacaccatggactttgatcttggtagctccagcagttaaatagagactttgcaggcacagattgacaatttggagctagttgattattatctgatgcatacctgaagctgcttgtaatgtctgcagtcagcgctgggtggtcaaccatccttgcaagcactgaatgacagataattgtgtcgctgtttgttcataagctattaatgactgccacgcttgtaaatacatctgttaataaactgaaacttagctttctacattgttattttgtcacaaacatgattcttgagtggggattgtgaatcagtaagactactgtatggttggttgctagatataaataaaatagtactttgttgagtgct

SEQ ID NO: 21938 - DNA, 344 bp, Gossypium hirsutum
  Clone ID: LIB3189-024-P1-K1-E9
cccacgcgtccgccagggtttcaactcactcttcaatcttcgactgaaccgctagagttgcgggtgatcgtaaaagatggtgctttctcagaagattcacgaggctttcaaaggaactgtagagagaataacagggccccgcaccatctctgcttttaaagagaaaggggttttgagcgtctccgagttcatcctcgcgggcgacaatctcgtctccaaatgccctacctggtcttgggaatcaggagagccaagcaagaggaagtcctatttaccgcccgaaaagcaatacttgattactaggaatgttccttgcctgaggagggcttcatcggttgtacaag

SEQ ID NO: 21939 - DNA, 441 bp, Gossypium hirsutum
  Clone ID: GOSHI-09MAY01-C11319_5
ccaaaacgccaatattgtaatgggagaaatataagtcctcctacggtttctcttcgcggactcgccctcgatctcagcgaaccgatctccagagggaagaatatactcataagtataagcaaattagatcgaggttctctgataaggtcttcaatttgatattggcttggtacttgcttctccaaaattcaatatggttgtacttgcggcttctgttttaagcaagtctggcaaagtgcttgtctctaggcaatttgtggacatgactcgcataagaattgaaggtcttcttgcagcttttcccaagttggtgggcacggggaagcaacacacatatgttgagactgagaatgttcgatatgtttatcaaccaatagaagctctttatttgctacttgtaaccaacaaacagagcaatattcttgaagaattggagactct

SEQ ID NO: 21940 - DNA, 538 bp, Gossypium hirsutum
  Clone ID: GOSHI-09MAY01-C11319_4
tgagtatgaagcttcagccatgtttgatctgcgaaacgttgtgatctctgtacctcttccagctcttcgggaggcaccaaatgtcaggcagattgatggtgaatggaggtgtgaccccagaaattccatcttagaatggtccatacttctgattgataactctaaccgcagtggatctatggagtttgtggtgcctccagcggactcatcagtgttcttcccaatatctgttagattttcagcccctagtttatacagtgacctgaaggttgtgaacattattcccctgagaggtggagcgactcccaagttctcgcagaggacaaatttgagtacagagaattaccaagttgtgtgaatgttaatatcaatattccaagtgtactaataataggttgagacactttttggtgaactttgagagcaagttcaagtattcaaacaacggctattgtttttctgaaagttcatagatcattgatgttgtacttcaattttaggttcggtttgatttatgaatatatttttattgtcattt

SEQ ID NO: 21941 - DNA, 560 bp, Gossypium hirsutum
  Clone ID: GOSHI-09MAY01-C11319_3
gcgaaacgttgtgatttatgtacctctcccagctcttcgggaggccccaaatgttaggcagattgatggtgaatggagatatgactccagaaattctgtcttagaatggtccatacttctcattgataactctaaccgcagtggatcaatggagtttgttgtgcctccagcagattcatctgtgttcttccccatttctgtccgtttttcagcaacgagtacatacagtgacctgaaggttgtgaacatcattcccctgagaggcggtggagctcctccccccaagttctcccagcgaacaaatttgattacagagaattatcaagttgtgtgatgaacgactgtaataataggtgacaagtttctactgcagttacacagcgagtacacttcaatctatgattcaaacaacagctgcacctttctttttgcatcttcataaaatacttttacataagtgatttgctagacttgcaattttatctgtcgtttttcgtcattatgtattttgttggtgtcttcttcagcatcccacttaattgaaatatacatttttttat

SEQ ID NO: 21942 - DNA, 561 bp, Gossypium hirsutum
  Clone ID: GOSHI-09MAY01-C11319_2
aacgaatcgatctcccgagagtgaagaagatacagagtacaaactagatcgaggtcttctgataaaagcttcaaattgatattgtctgggtagattgcttcttggtaaccaagatggttgtacttgcggcttcaattgtaagcaagtctggaaaagtgcttctctccaggcagtttgtggacatgactcgcataagaattgaaggtcttcttgctgcttttcctaagttggtgggaacaggaaagcaacacacatatgttgagactgagaatgtgcgatatgtttatcaaccaatagaagctctttatttgcttcttgtaacaaacaaacagagcaacattcttgaagatttggagactttaagactgctctccaagctggtaactgagtattcttactctctagatgaggagggtattggcaagactgcttttgaactgatctttgcttttgatgaagtcatttgtcttgggcacaaggaaaatgtgactgtcacacaggttaagcaatactgtgaaatggagagtcttgaagagaagttgcacaagctggtattgcaaa

SEQ ID NO: 21943 - DNA, 1888 bp, Gossypium hirsutum
  Clone ID: GOSHI-09MAY01-C11319_1
ctcccgaatgaaaagaacagagtacaaactagatcgaggtcttctgataaaagcttcaaattgatattgtctgggtagattgcttcttggtaaccaagatgtgcttctctccaggcagtttgtggacatgactcgcataagaattgaaggtcttcttgctgcttttcctaagttggtgggaacaggaaagcaacacacatatgttgagactgagaatgtgcgatatgtttatcaaccaatagaagctctttatttgcttcttgtaacaaacaaacagagcaacattcttgaagatttggagactctgagactgctctccaagctggtacctgagtattcttactctctagatgaggagggtattggcaagactgcttttgaactgatctttgcttttgatgaagtcatttgtcttgggcacaaggaaaacgtgactgtcgcacaggttaagcaatactgtgagatggagagtcatgaagagaagttgcacaagctggtattgcagagcaagattaatgaaactaaggatgtcatgaagcgtaaagctagtgagattgacaagagcaagattgataagaataaaggtgataaaggagggttcatgtcaatgggctctggaagaattgaaagtagctttagtgatatgagcatttctagcagtggaagtggctttggaagtagttctgggttgggattaacaactgatctcgattccttctctaccaagtctaaaggccgccaactgtcatctgcaaccgcccctcctaaaggtcttggcatgcagcttggtaaatcacaaaaaacaaaccagttcttggaatctctgaaagcagaaggtgaactgatagttgaagatgtgcagccaagggcaggccaggccagagtggctgcagctgcacctactgatcccatcactttgactgctgaggagaaactcaatgtcactttgaaaagagatggtgggataagtaactttgatgttcaaggaactttgtctcttcaaattcttaaccaggaagatgcactcatccaagttcagactgaaactgggggtaatcctggcattcttttcaagacgcatcccaacatgaacaaggagttattttccaatgagaacattctagggttgaaggaccctaataggcctttccccactggttctgctggggatgcagctggtgttggtctcttgaaatggagaatgcaaagtgcagatgagtcaatggttccattgaccatcaactgttggccttcggtttctgggaatgaaacttatgttagcattgaatatgaagcttctgccatgtttgatctgcgaaacgttgtgatttatgtacctctcccagctcttcgggaggccccaaatgttaggcagattgatggtgaatggagatatgactccagaaattctgtcttagaatggtccatacttctcattgataactctaaccgcagtggatcaatggagtttgttgtgcctccagcagattcatctgtgttcttccccatttctgtccgtttttcagcaacgagtacatacagtgacctgaaggttgtgaacatcattcccctgagaggcggtggagctcctcccccgaagttctcccagcgaacaaatttgattacagagaattatcaagttgtgtgatgaacgactgttagtgcaggtgtcctggtccccccgctcctacacagcgagtacacttcaatctatgattcaaacaacagctgcacctttctttttgcatcttcataaaatattttacataagtgatttgctagacttgcaattttatctgtctttttcgtcattatatatttgttggtgtcttcttcagatccacttaattgaaatatatatatttttataaaaaaaaattattctatt

SEQ ID NO: 21944 - DNA, 383 bp, Gossypium hirsutum
  Clone ID: LIB3272-057-P1-N1-B6
gataaaattgcaagtctagcaaatcacttatgtaaaatattttatgaagatgcaaaaagaaaggtgcagctgttgtttgaatcatagattgaagtgtactcgctgtgtaactgcagtagaaacttgtcacctattattacagtcgttcatcacacaacttgataattctctgtaatcaaatttgttcgctgggagaacttcgggggaggagctccaccgcctctcaggggaatgatgttcacaaccttcaggtcactgtatgtactcgttgctgaaaaacggacagaaatggggaagaacacagatgaatctgcggttagagttatcaatgagaagtatggaccattctaagacagaatttctggagtcatatctccattcac

SEQ ID NO: 21945 - DNA, 311 bp, Gossypium hirsutum
  Clone ID: LIB3148-026-Q1-K1-D2
gtgcctccagcagactcatcagtgttcttcctaatatctgttagattttcagccactagtttatacagtgacctgaaggttgtgaacattattcccctgagaggtggagctactcccaagttctcgcagaggacaaatttgagtacagagaattaccaagttgtgtgaatgttaatatcaatattccaagtgtactaataataggttgcgacactttttggtgaactttgagagcaagttcaagtattcaaacaacggctattttttttcttgaaaaaaaaattaaaaaaatttaattttaaaaatataat

SEQ ID NO: 21946 - DNA, 396 bp, Gossypium hirsutum
  Clone ID: GOSHI-09MAY01-C11309_1
gccattgttctccgatacctcttcttatgtgtacttgtatcaaacaaacaatttttttttttggggttcaacaatcaatatcatgttcctatcaagatctgttcttgcgtttattttcctttcttcactgcttcttttccctgcaaatccaatcaggttgtttaaagctgaggatgaatcagatttgttcatggaggcaccagtgtatcaaaatggacctcactgtccggttttgggtaaagatactttgatatgtgactcttccgttgttcatattgcaatgaccattgatcctgtatacttgagaggcaccattgcagccatccattcagtcgtgaaacatggctcatgtccacataacgtgttctttccacttcattgcctccgattccagct

SEQ ID NO: 21947 - DNA, 482 bp, Gossypium hirsutum
  Clone ID: GOSHI-09MAY01-C11299_1
aaagcataatcgaatcgtgaaattactttgagaggaaaatggggaaacagccggtgaagatgagggcggtggtatacgctttgtcgccgtttcaacagaagattatgggtgggctgtggaaggatctgccgggcaagatctctcacaaggtttccgagaattggatcagcgctactcttctccttactcctctcgttggaacctacgcatatgtccagaacttcaaagaaaaggagaaattggaacacaggtattaaaaacctcaggaagcatcccttttatcggagtaactctgagcttttacgttttagatgcaaatttattgtggtccggtccaatgatgaaccatgttttttgtttgggatctgattagtatctgactgtttgagttggtgttttgttattcatatggaataaatgaatttggaacagtgtctgcattttcggtaaaataaatttgttgattcgccctttcaaaaata

SEQ ID NO: 21948 - DNA, 380 bp, Gossypium hirsutum
  Clone ID: LIB3189-002-P1-K1-E3
cggacgcgtgggcaaatttcagaaagcctgtattaaaacaaactcttgtggataaaaagattgaggaaaagaacatcgaagtgatgaagaaagaagattgcttccaaaagaacctcattaatgaggaggcattaaaaggtcaattgcaaaaacagcaaatgatctttgatcaacaacaaaggaatattaaggaactaaagcatgctattaattccacaaaagcaggcatgcaattcatacaaatgaagtttcatgaagaattcaacagtcttggtatgcatattcacggcctagctcatgctgcttctggttaccacagggttctagaagaaaaccgcaagttatataaccaagttcaggatcttaaaggaagtatccgt

SEQ ID NO: 21949 - DNA, 372 bp, Gossypium hirsutum
  Clone ID: LIB3189-002-P1-K1-E4
ggaacatgtgcacagattcaacacttcttttttttatacacactattgtggctgaagggattggggatatgaacatggaagagcaaaataacgaagattgcttccaaaagaacctcattaatgaggaggcattaaaaggtcaattgcaaaaacagtatatgatctttgatcaacaacaaaggaatattaaggaactaaagcatgctattaattccacaaaagcaggcatgcaatttatacaaatgaagtttcatgaagaattcaacagttctggtatgcatatttacggtctagctcatgctgcttctggataccacagggttctagaagaaaactgtaagttttataaccaagtttaggatcttaaatgaa

SEQ ID NO: 21950 - DNA, 732 bp, Gossypium hirsutum
  Clone ID: GOSHI-09MAY01-C12989_1
caaaatactagccagaaaaaaaaagttaattaaaaaaaaaaaaaaaaaaaaaaacccaggtgccaccacgatcaccaccagccgttttatttcagaggagtgaaaacgacgccgcatctgaaaccttttctttactcttcaaccaagctgctgctcattcatccctttctctctctttttggtttcattattaaacacaccaaaaaaaagaatttcaaattattggttttaaggggatcgtatttatgatcacgtcgtagctctctattccacgccattgttcttctgtttaactcgttttgaggaggttattgtttgatctagggaagaaatggttgtttctgggccaattacgcctggacaggtgtcttttcttttaggaattcttcctgttttcgttgcatggatatattcagagttcctagaatacaagagatctgcatctcattctaaagtccatgcagacaataatctggttgaatcaggagatgagaaaattaaagaagatgaccgggctcttttgcttgaaggaggtctcactagatcaacatctgctaaagtccatagttcaaccatcaaaacaaacttgattaggtttttgactatggaagactcttttctgttggaaaatcgagcaattttgagagcaatggctgaatttggtgctatcctagtgtacttttatatatgtgaccgcacaaatttactaggagaatctaccaagaaatacaa

SEQ ID NO: 21951 - DNA, 530 bp, Gossypium hirsutum
  unsure (1)..(530): unsure at all n locations
  Clone ID: LIB3583-048-P1-K1-F1
ccccgcgtccgcagnanacccaaccaaacaacagcaaccatggcaacaacaaccgtttgagagtgtngaaaacgacgtcatatctggagttttttttttcttcttttctctattcttgaagcaagctggcgttgtatttatgagcatgtcctagcacaatctctctattctactcattggttttctctttctttgttggaggaggttattgtttgatccagaaaagaaatggtagtttctgggccaattacgcctggacaggtgtcttttctcttaggagttatcccagttttcattgcatggatatattcagagttcctagaatacaagaaatcggcatctctttctaaagcccattcagatactaatctggttgtattaggaaaggagacaattaaagaagatgacagggctgttttgcttgaagggggtctaacaagatcagcatcttctaagctccatgcttcatccatcaaaacaaacttgattaggtttttgatcatggaagactctttccttctggaacaccg

SEQ ID NO: 21952 - DNA, 489 bp, Gossypium hirsutum
  unsure (1)..(489): unsure at all n locations
  Clone ID: LIB3585-052-P1-K1-F11
ttttgctgttaattttaggattttgttggatttattttttttatttttattttgagagggttgaggaggttactgtttgatctanagaagaaatggtggtttctgggccaattacgcctggaaaggtgtcttttcttttaggaattcttcctgttttcattgcatggatatattcagagtttctagaatacaaaagatctgcatctcattctaaagtccatgcagacaataatctggttgaatcaggagatgagaaaattaaagaagatgaccgggctcttttgcttgaaggaggtctcactagatcaacatctgctaaagtccatagtttaaccatcaaaacaaacttgattaggtttttgactatggaagactcttttctgttggaaaatcgagcaattttgagagcaatggctgaatttggtgctatcctagtgtacttttatatatgtgaccgcacaaatttactaggagaatctaccaagaaat

SEQ ID NO: 21953 - DNA, 662 bp, Gossypium hirsutum
  Clone ID: GOSHI-09MAY01-C12959_1
aacaatttcaacttgcccaaatttcttaaaacagttgctgcacttcttcttcttctctttgtctttcaccttagtcctttctacattctctcctaaaacccgttcctcccttctgttgccctttctttcttgttcttttatttctattcttttttccttttttaatctctgtccatcggtcgtcggtcggagtaaggtctccctctctcgttttcgcgctgccgctgaccagttcgcctttttcggttctcagatggaaagtgataatcttgcatacatggaacttgcaattcaccaggcaaaacttgctttggaaagccttgaagtgcctgttggttgcgtaatcatcaaggatggggagcttatagccttgggtagaaatcgaaccactgagacacgaaatgcaacaaggcatgcagaaatggaagccataaaaaatcttctaaaaatgttggagaaaaaacgattttcaaaagcagtattggtaaaaaacttttcacaatgtattttgtatgttacatgtgaaccagcataatgtgtgctgcaactttgtcatttcttggcataaaggaagtatattatggttgtgcaaatgaaaaatttgaagggtgcggatcaattttatccttgcattcaatttgctcaaagctttcatcaatgat

SEQ ID NO: 21954 - DNA, 726 bp, Gossypium hirsutum
  Clone ID: GOSHI-09MAY01-C12949_1
tttccagtacgaggggaaagtctgatctcagccatttactgtggtaggttatattggcaagtcatcaatttttccacttttaactcatcttagttacaaggaaacgaactttttagagagcatcatgttgttgtacagttttcgcgaaaactgataagcttggtgatcccgtttgggttcttaatataagggataaagtccagacatttggtccgagaaaggccaacttatccatataagattagtcggattgggtagaaccaagaggaataattcatgtcttttgttatattggatttcaaatgctttggagcttaccagatgattgtagaaattggtgtattgtgggtttctctagtttatcattttatttttaggagggaaattaaagagcatggatgatggatcgtctctgacgtttccgaggctgctagcttggggaaggtcggttgtttcattcatgagcttgttgtataaatactaaaatttcattttttatatttatttttcaccgtcgtcatgggcatgttaggaactcatcccttgggtgggtctgccgacatgtggcccatatttggtaaaaaaaaaaaagaacaaacaaaaaagcaaatgaaacacaccctgtaaaaaaaaattaaagccaaaaaaatgtggaagttacacggggcgggcccgctttagttgccaacctccctacccccggctttctagggggggtcccttttt

SEQ ID NO: 21955 - DNA, 651 bp, Gossypium hirsutum
  Clone ID: GOSHI-09MAY01-C12969_1
ttcccgggtcgcccagcgtccgccccgcgtccgggccgataagttgatggatgttatcgtgattactatatcccttcttgctctcttcttccttcaccaatatcgttttctcaactcccttatctctgttgggtatgggttccactatgtgggaaaaaaccatattttctgccacaatgttttgccttcttttttgttttggcaaaagccaattttttggccttttaacatgggactgggcagcattcttaattgagagcaaaattctcaattacactccaggagagtaaagagagtgaaattgaagctcgttggagaaaaaagagaatagaaaaaaaatcagtttttcaagctgggtgcagcagtgatcaactcgtcgatcgaaggtccatccgtggttcgattgagctgatttttggacagcagctaggcgataaggtgttcttgactctgtacggtcggatttttcatccgagtcttgtagcgtcggaaatacccatttttcagcagctgcgttttttggggatgttctctcatttttctctcttttgcttaagattacatattgctagccttgtccgagttgtatgcttgctgtaggcctgatattgcgatcttgtaggcgttcattcgttgatttgtatatctttt

SEQ ID NO: 21956 - DNA, 807 bp, Gossypium hirsutum
  Clone ID: GOSHI-09MAY01-C12909_1
ctctttttgttttcattttccttttgtcctttttctctttcctaggttttcggttttctcagccaaaggctttcgtttagcttcatcaatggcacaggaggaggttcagaacggaggaccggagaaagtagcggaggtgagcttcacggcgctgaaaccgcagctcatggtcgaagcacccaaggcagctgatgcggtgcagttctacaagaccgcgtttggcgctgttgaggctggccgtaccgtgtaccctaagcgcaaggctgagcaggagcagcctcacgtcctctccgctcaacttgagcttgctggctctaccattctcgtttctgacatcgctgataactctactccggtgaaaaccgaggggactggatgtgtgctctgcctggagactgaggacgtcgaagctgcaattgccaaggctgtcagcgctggaggcgttgcggagggtgaggtaactgagggcgatggcgcgtgctgtggtggtcgcgtgggcaaggtgaaggatccatatggatacgtttggcttatctgctctcctgcgaagaagtgcggtgacgcggaggcttagatgccgttcgatctttgatctactttctgttaatctctgagctttaatttgtcagtaaaaaaaatggcttctagccggtaggattaggtgatcaacagtgatagactctttggtattgactcttttgatactgttcttcatgaacctacagttgtcagttgcagttaaatgaattttactagcgtttttctctctcctaaaaaaaaaaaaaaaaaaaagaaaaacaaaaaaga

SEQ ID NO: 21957 - DNA, 302 bp, Gossypium hirsutum
  Clone ID: uC-gsflnu33B134f11b1
cctactcgtccgaaaaaatggattctagccggtaggattaggagatcaacagtgatagactctttggtattgactcttgtgagactgatcttcatgaacctacagttgtcagccgcagttaaatgaattttactgacaactactagaaaaaagacagtatttacggtgccagaaagataaggacagactgactggacggacagctgacgaagggatgatagttccaactctacaacagagatggaaaggctcacgtggtacaatccattcttaaagcagaatatactgccacttggaccttt

SEQ ID NO: 21958 - DNA, 613 bp, Gossypium hirsutum
  Clone ID: GOSHI-09MAY01-C12939_1
ccaaagttcaagcaaggacttaaaggaactggtgagaaacaaggaaggtggtgaggggaaattgtcttcttgcaaggaaagggtagtccatgaagctttgatggaggtaaagagtgttgggttatgggtatttggggttgttttggctaccttgtctggagagaccaaaccatacttggagatcaaacaagtgattgtcaggttcaattctgctttgttaattgatgtagattcatgtgtttttaaggttatggtggagaaaggtgagacattaaaagaggttaaggagctgaacagtgcagcaaattccctagtatcagcaatcctttctgggaaaaccagtgttgcagccatggatttcggtggaaagttaggtgttttcgagaaggagatggatgctttagaaaagcaagtggatgccctgttttcgagtgtattggcagccagaaatgaactgcttaacggtgttcggcaacgcaagcaataacatcaaaatccccagtttcttatgtaaatagaagaaaaaataggcacatacacatttgtgtgacattttttttatattatgtatcttcaaaaattattaatggaaatagaacagtttttcttgctt

SEQ ID NO: 21959 - DNA, 776 bp, Gossypium hirsutum
  Clone ID: GOSHI-09MAY01-C12849_1
agatgagagaagatgcttggagcaattcttaggaacgaagtcggatggttcgatgaagaagagcacaattcaagtcttcttgcagccattattggcagctgatgcatgctgacgtaaaatctgcaatgagctgagcggatctcagtcatactccaaaacatgacttcacttctcacctccttcatcgtcgccttcattgtagaatggagggtctctcttctcatcctcggtaccttccctcttctagtccttgcaaactttgctcagcaactctctctcaaagggtttgctggtgacactgcgaaagcacatgcgaagactagcatgattgctggcgaaggtgtaagtaatatcagaacagttgcagccttcaacgcacaaaacaagatcctttcgctattttgtcatgagctccgagttccacagatgcaaagccttcgtcgcagccaagtttctggcctcctctttggcctatctcaacttgctctttacgcgtcggaagctctgatactttggtatggtgcgcaccttgtaaacaaaggtgcctccacattctcaaaggtgatcaaggtttttgtggtcttggtggtcacggcaaattcagtggcggaaactgttagtcttgcccctgaaatcattaggggtggtgaagctgttggttcagtgttctccattttagatcgttcgaccaggattgacccggatgatcctgaagcagaaccagttgaatcaattcgtggagaaatcgagcttaggcatgttgattttgcataccc

SEQ ID NO: 21960 - DNA, 383 bp, Gossypium hirsutum
  Clone ID: GOSHI-09MAY01-C12879_1
cggggtttccagttcgtggagatgtacacgactacatgtcttaaatgggtgcagaattcttgcttgattgttttggtgaccaggtctctgagattgtaatcatgtttgaatggttttttttttattgtaaaataattatacatccctttagtttcagtttcaattcagcccttcagtttgtaatatgttgccatatagtccatttggtgacacccatccattgaaattctttcacccttctgtacatgttgaacttctagtgtttctttttttctcaatacaataataaggcccagtatttctcttaaaaagcataatgccctgaccgagaagagtattggaaaaaccctttaaaaggcctgccgttctaaggaccaaaatat

SEQ ID NO: 21961 - DNA, 626 bp, Gossypium hirsutum
  Clone ID: GOSHI-09MAY01-C12839_1
cccacgcgtccggggaatcatccaaagggggaatttgaacttgcaacgatgtccatatattttgaaggaccctacaagaccctaacaaatgcgctgtggtttctagatcttccttacacagtgggcatacaacctcctcacatagtgttcggcgtgccaagttcccatagtgtggcaccatgttattgaacaatctccaaacatgtatttttattttctctggaatatgtaaaacccaaagatccatgtaaaaaattttgtattcttcatttgtagaggacatgtgtagattgctctgtaaataatctgtaataagaactcggcacccactcctgacagtatactcacctgagccttcatacttccataccaacatattctctggtcggctttcagagatgggaatgtcaaagattcgattagcagtgttatcatccactagattgtgaatcaactctctattccaggcaaccaggggtcattccaaatgttgatacttgcaccatttcctacacgccacaagattccatcactgatcaggtcccgcgcactacaaatacttctccaagtaaatgaagggtaagaaccaacctttgctgttagtatagtggaaagagggaaataac

SEQ ID NO: 21962 - DNA, 388 bp, Gossypium hirsutum
  Clone ID: GOSHI-09MAY01-C12829_1
gaggttttaggcttcatcagggttttggggaagccaaagaaatcatggctggctacttgtggaagaagaaccctagggttctcctgctcctcggccaagaccattttcacccatttaccatcctcaacacctgctaacaataagctacccggccttttctctcctaacaaaatttctgcttctcgattctctctccgcaatctcactttttccaggctcccattggaattgggtggtgcagtaactttgatgcctttgcatagtgttacggcttctgctttgttcacttccttgctgtctttgcataatcaaagctgggggtgtttgtcagaaggatttgcaactcctctatagcattgcctatgggctcctgttgtcgatgctgctt

SEQ ID NO: 21963 - DNA, 584 bp, Gossypium hirsutum
  Clone ID: GOSHI-09MAY01-C12599_1
tccacgcgtccggcttggtgtgaatattgttagtgtacaatttctggagatggactcacccaaaattgttagtgaaaacaggcataatggttttctggagaatgatggtgagaggacttccaagtcaattcctctggagaaagattcgcaaaatggatataatggtctggagaactatggctctgattatgctagtgcaactgagtgtctcgcacaagttgcaaatagttgtgatggtccaggagtttcaatggcaatggctcattctccttttggcccctgattgtattaaaacagtatccggaactgattttgctgcaccttcctgcataaacatgggaaaatagctgtagatcgatctgaacctaggaaccgcttgctactgctgagacaccaatgctttcactcacaccgagtacacccaatggagatggaccaagttatctttgatcgagacagtgaagatgaacttgatgattacatcgatgatcttgaagatcgcaaggtatggtttacaatatgcatctgaatatttgcttaatgttttattacaatcatatgcttgctagggtacgctttaaatt

SEQ ID NO: 21964 - DNA, 1266 bp, Gossypium hirsutum
  Clone ID: GOSHI-09MAY01-C12549_1
gcttcttctcatactgtcattctcctcagtggctaaccttgcgtctaagcttcagccatggtggctgttgcttgtaattcccttcttgtttgtctccaacacttatcattgtgtcaatgcagaaccacaagtgccttgctacttcatcttcggagactcattgtcggataatggaaacaataacaaccttgcgacggaggccaaagtaaattattggccttacggtatcgatttccctaaaggacccactggaaggtttactaatggtcgaaccatgcaggatatcattgttcaactactgggtttccaagaatttattcctccttttgccacttcaagaggccaagagattctcaaaggtgttaattatgcatctggttctgctggaattctcaatgatagtggccaacatctgggtgttcgaataagcatgaacatgcagttaagcaaccaccaaagtgttatctcaacaatagttgagatgttgggaaattgtgcagcatcaaagcttttaggcaaatgcatgtatgcggttcaaataggcagcaatgactacattaacaactatttcaagccagagatgtacaacagcagccacctattcactccagagcaatatgctgcttatctcatcgaacaatattcacggcaaataaagactctgtacaataacggcgcaaggatgtttgcactgttcggacttggtgccatagggtgcactccaaatgcaatcgcggtgcatggaacaaatggttctgctctgcgtagaaaaaatgaacactgcagctcaacttttcaatgagaggcttgtaccgcttgttgatgaactgaatagcaacttcaccgacgctaaatttacgtatctaaatcctacgggagcaagcgcagcaaattcccttggttttacagtggcaaatgctagctgctgtgacatagggagtggtggagatttttgtatcccaggttcggagccatgcggtgaccgtagtcagtacgtgttttgggatgcggttcatacttcggatgcatggaatgaggtcattgcagttgaggcttacgattctgaatccaaggccatagcttatccctttaatgttcagaaaatggcacaactgccaaacaacaacgatgccgatggtgatatttgtgaaatgggtccacattctggggtcactgtgtaatccgattcactcgaagctgtcagtttgaatcgttgtaatatgtttactccctcgttttaaaattaataaaggagctgtttagttc

SEQ ID NO: 21965 - DNA, 508 bp, Gossypium hirsutum
  Clone ID: GOSHI-09MAY01-C12499_1
tcctacgcgtccgcccacgcgtccgcaccatttttctgctttttcttctttcaaagggattccttcagattttggaggaagatgaatcactacaatcttcagcagaatcccattgccgtttccgcttatgaggagatgggagggtttatctcttcaatatcggagcatcatagggccggccccgttgtttgccctaagcctcggcgaattggggttctcaccaataaccctatcaagccttttagattgcatatgagtcaccaagccgatgtaagtgaatcgaaagccagtgcagaacttctagatatcatcctcaacaagggtgatttatgggcagagcaatctgcagcacaggtagcatcttcacccccatttttttgtggttcgcccccaagtagggccacgaacccagttgtgcaagatgctcgatttggtgacgaaggagttgcagccctttcagcatcgcaaagtccatctccgtcgccatcggcacataaaggggggatgt

SEQ ID NO: 21966 - DNA, 563 bp, Gossypium hirsutum
  Clone ID: GOSHI-09MAY01-C12489_1
ggcagggccctctcactctcagtctccgcagccagtaaaccctacctagtcaaagatatatcattcgctcccaatctcccaattttttatttgctgtaattttttcagaaaaaaataagttaaaaaaaaaaaggaataccaaattctaaaatctctatatccccaaatcatggccctgccagaaaccctagattccccgcaatcatcatcttcttcagatccacagctgttccggaacttgtcatccagtcggctcaatgcccaggcgccggagtttgtgcctactcgctcgacgcctcagcagcagcaacaacagcagcaaagtatgaggatgatgatccctcctcctccgccccctgggatcatgcacgtctactctcctcctcctgcgccggcgggggcggcgtttcacctccccgtgcctatgccacctcacttggttcccgttccccatcatatgtccatgagaaatcatcatcatcatccttaccagaaccatcatcatcgagagcaggaagttgaagctgttgctaacaaagatcatcaggagcacaaggatcatg

SEQ ID NO: 21967 - DNA, 511 bp, Gossypium hirsutum
  Clone ID: GOSHI-09MAY01-C12479_1
cagcaactgaaagcccatctttgaatgctctctctttctttccctattctttcattctatttgctgtgcgataaagaaaagaaaagaaaggaaaagaaaatcccaagcaacgcttaattattagtaatcaaactgagaaaggaaagtgaaaatccaagtgcggaggattatttttcttttaagcggggggacgctacaaatggggactcttcaaacttggagaaaagcgtatggcgcccttttagattccaccaaagtcggtctcgctcatgtcaatagcgattacgcggatttggatgtcgctatagttaaagctaccaaccatgtcgagtgtcctccgaaagaaaggcatcttagaaaaatcttgttagccacatcagcgattcggcctcgagcagatgttgcttattgcattcatgcgctttcccgccgtttggccaatactcataattggatggttgcattgaaaacactcatagttatccatagggcgctgagagagggtgacccg

SEQ ID NO: 21968 - DNA, 448 bp, Gossypium hirsutum
  Clone ID: GOSHI-09MAY01-C12469_1
ttttatttaaaattatttcgacttcgaatcgtggatccaattttttgattgcctccgcaactcttcttttcttcccctaaaatcgaaatcccatgaaatccttccatctttttctcactgctgatgccaagccattcattgcattgaagaattttgattgtattttaagaacacctttcccttttccctcttccctcgtccaccctcaactatggcttccttaacctctctcaaaagatcctcaccctccatcctccatctctcctccatccatcatcgcctccaaatccgccaattctcgtcgctgccgctcatcatcgcttcatacatccagtctaataacttaatggattccattgccagctccttcctcaaatggatcgcggtcggttcgagtttcggcttggtttgctggtactcgttttcagcttcggatcggagtactggt

SEQ ID NO: 21969 - DNA, 418 bp, Gossypium hirsutum
  Clone ID: GOSHI-09MAY01-C12419_1
cccacgcgtccgcaaggcgcgagaatcggatttggtgccaatcgttctttccctttataaaaaccccgaatctaatttcatctcattttccatttcattttcattttttcattttcttgttctttcttctttgacttttcttctacagagaggaaaaggggaaggaaagaaagaaaaaatatatatttatttttgcaaggatgcagaggcgtcaagatcaacggtcgagatctgttaaacccattacggttcatgggttagctcagtctggggatcttgttggtcttcaaaagttgctcaatgataaaccttttcttctcaatgagagaaaccctgttatggcacaaacaccacttcatgtatcctctggaaatgacagggctgagatagttaaatttttgctcgattggcaaggatc

SEQ ID NO: 21970 - DNA, 1223 bp, Gossypium hirsutum
  Clone ID: GOSHI-09MAY01-C12409_1
aaggtgtgaaatttcgtggtttgtctgtttttctttttaatggcggaagtagagaagcaagacaaacttgctgtaaatggaggcaaaagggaagaagaagagacgctgttagaaggaatggcggtgttggatttcgacatgctatgttccacggtggctttgcaaacgcaaggcaaatggaggaaactcgaaagcgccgaggatcctttagaacaaggaaacgccgacttcggtggtgttttgaggatgtgggaaggtgaagttgttcttgatttcttggaggaccgccgcctcgctctcgaatctgcctgttgcccctgctatagatttgggaagaacatgcggcgggctggtttaggaatttgtttgcttcagggaactgtttatttcatcctcgcagtcactgctattctcaactttgttgccttcttcgttaccaagcggaattgctttctgtatttgggtgttactttcatcttgtctattggagcatatttgggtttcttccgtagacagataaaaagaaaattcaatattaggggcaatgatagcttattggatgactgcgtctaccatctgatctgtccttgctgtacactatctcaggagtctagaacattggagatgaacaacgtccaagatggtacatggcatggtcgtggtgatatatgcataggaagctatgctgaaggcaccaagccgctctttgggctacaccctcctcctaccatgtcaattaagacccctgaaccctgcagcatgcaaaatggtttaaatggcgacgataatggtcaaacatgagaagcttactcaaaagatgtaggccaatattaggtgtgaaagagaaattcaaacatccgagtcaatttattctttgatggagcgatgttgcagaggtggatttagagagcaaagcttgtgcagcttggatcattgaatcctgcaggaaggagatccagaagcataacagtgcttccatgtgcatagaaggaaactactttgtatcagtttgggggagttttaggacatccgatccatctttagatatcattttcacttttctcagatacacattgagcctattagagaacacctttttcaccttaactgttctagatgttcctctctgaaatgtatattatctttattctaaataatagcttggaaatagatttgtcactttgatccttataatataagaatttatagtattatggagggtt

SEQ ID NO: 21971 - DNA, 661 bp, Gossypium hirsutum
  unsure (1)..(661): unsure at all n locations
  Clone ID: AI054442.1
attaaaaagcaaaaagaaaagagggagagagagaggttaaggcttaagttgtgaaatttcgtggtttgtctgtttttctttttaatggcggaagtagagaagcaagacaaacttgctgtaaatggaggcaaaagggaagaagaagagacgctgttataaggaatggcggtgttggatttcgacatgctatgttccacggtggctttgctaacgcaaggcatatggaggatactcgaaagcgccgatgatcctttacaacaaggaaacgccgacttcgctggagttttgacgatgtggaagcatccctacgataaaatctgttgattttttctttataaaaatagaatacgttggtgctttattgctgaaaatgattgaataatctaggttatatgcttatcaagaaccccttttattcaattattattacaggcttatccttgtctcaatattcattttatagggctttagcccatctttgtctattcaatattggcaatccagtctttctatcagtacctttattgatatatcatgtgcctgcttttgaataatccaggattctgtatacttgtcatggataattttaagctctctcataaataacctgcttgtctaatcttgtcattgctttatggatctaataggtcctatcantccg

SEQ ID NO: 21972 - DNA, 269 bp, Gossypium hirsutum
  unsure (1)..(269): unsure at all n locations
  Clone ID: LIB3166-052-P1-K1-B6
ggaccattaaaaagcaaaaagaaaagagggagagagagaggttaaggcttaagaagtnaaatttcgtggtttgtctgcctttctttttaatggcggaagtagagaagcaagacaaacttgctgtaaatggaggcaaaagggaagaagaagagacgctgttagaaggaatggcggtgttggatttcgacatgctatgttccacgttgtgcttttctaacactatggtatttggtattaactcttaatcttcttgttccttttttactctt

SEQ ID NO: 21973 - DNA, 888 bp, Gossypium hirsutum
  Clone ID: GOSHI-09MAY01-C12759_2
actcactatagggaaagctggtagggcctggaggtgaccggtcaccgaatttcccgggtccgaccccacgccgtcccggaaatggcgttgccagtggatgaatccctagacctacgggtggtctcagcgagaaggcgtgccctctcttctcttgaccttcccctctcccaagttattgaagaacccgtttcgtctcttctcatgctcgcctcaattcttcaagcccaccctctttattatcccctttgcccggattcccagctcttaggttttctctctattcatttttttttcccttttcaatcttcaatgaaatgggttttaggtgttctcagttttttgggtgccagatattctactggaagaaccgaacattccattgatgtgctacctctgagatctgcactgctgccgagagagatcgttataagaaattcgtgttcaaagctcaaaggaatgtaattttgtgtacgactgcatgcctcctttactggtgtatctaccggatttgccagtatcacatggaaattcagagtttggaggaagtagagaagagatacaagaatgagtagtttggtatcagaatgcttctatgcaaaaactcatcgacttgtagagactacgttatgttctaaagccactacatggcatgtttttaatacagctaaagctcctgccgtttctctcagcggagactataattcattccttgaaccatgtatgttcgatttgttaatacttgagcggttatggatgtcttgttagttggaagtgccgaggcaatacgtacacattggttaggaaaattcaacacacaactggcttttctatagctccaaataattataataaaaaagcttcatgaaaaccttttactagtgcactaga

SEQ ID NO: 21974 - DNA, 802 bp, Gossypium hirsutum
  Clone ID: GOSHI-09MAY01-C12759_1
cgaattcggcacgaggtttcgcagcctacgaaaaggaaattaaaaaaaaaaatcaaacccccctcgcgtcccaacaaatcaaaaggaaatggcgttgcagtggatgatcctaacctacgtggtcgcagcagaggctgccctggctcttctcttgaccttcccctctcccaagttattgaagaaccgtttcgtctctctcatctccctcattcttcagcccaccctctttattgtcccctttgccggattcctgctcttagatatctactggatgaacgaacatcgcttgatgtgcacctctgagatctgcactgctgccgagagagatcgttatgagaaatccgtgttcaaaactcaaaggaatgtaattttgtgtacaactgcatgcctcctttactggtgtatctaccagatttgcaagtatcacaaggaaattcagagtttggaggaagtagagaagagatacaagaatgagtagttttctatacaaaagctcatctagttgtagagactacgttatgttctaaagcctacacatgatgcccccatggcatgttttcattacagctaaagctcctgcacgtctctctctcagcggaaactataattctttccttgaaccatgtatgttcttttgttagcaattgcattttagctggtttacttgagcggttatggttgtcttgttagtggcaagtgccaaggccatacgcacacattggttaggaaaattcaacacacaactggcttttcgacaactctaaataattataataaaaaagcttcatgacaattttaattt

SEQ ID NO: 21975 - DNA, 840 bp, Gossypium hirsutum
  Clone ID: GOSHI-09MAY01-C12779_1
cagccacaccagttgttcaaccacttactccaattcctacagcagctccaccaggacatcatccaccatcgttaccgcagcaaaagtcacatttgcaccatcaacagcagcaacaagctcaaaatacccaacttgttgtgaagcataatcaacagcaggagcctataccttcggaagtgataatggctatcccggagcaaaaggtgccaccacaggaaattggtgggagcgagggcattaagcctgcatcgtctagatggcctaaagccgaggttctagcacttataaacctaaggagtgggcttgaaaccagatatcaagaggctgggcccaagggtcctctttgggaagaaatctccgctggtatgagcaggatgggctataaaagaagcgctaaacgatgcaaggaaaaatgggagaacatcaacaaatacttcaaaaaggtcaaagaaagtaataagaaacgccccgaagatgccaaaacctgcccatattttcaccaactcgatgccctttaccgtaagaaaatacttggaagtggttccagtagcttcagtgaccagaataggtttgaaggagaaacatcacaacagcatcaagatcctcctatggaagcaccacagcatagtcatgatcaatctgaaaataaaactggaaccactattgatgtactgacaagcaaagaaaattcacctgggagtctctttggaaaaggaaacggtagagctacaaagaaatcagaagatattgtgagggagcagatggaggagcaagagatgcaatgcaatagcaacaacatgcagtggatgactaatggctatgatctataaggttgactac

SEQ ID NO: 21976 - DNA, 492 bp, Gossypium hirsutum
  Clone ID: GOSHI-09MAY01-C12729_1
atctccccatcaccatcctcttcctcttgccttttcaatggctttaatgcttgataattgtgaaggcatattactatcacttgactcacacaaaccagtaccagctccatgtttaaccaaaacttaccaacttgtcgacgatcccaccaccgatcacattgtttcatggggtgaagatgatactacttttgttgtatggcggccacccgagtttgctcgtgatcttcttcctaattacttcaagcacaataatttctctagctttgtgagacaactcaacacttatggttttaggaagattgtaccggatagatgggaatttgccaatgagtacttcaagaaaggtgaaaaacacttgctttgtgagatccatacaaggaaaacagctcagccacaagtgacggcagcgttaaacctactacaaccaccaccaccgtcatttacacacacagtccaccaatggataataaatacctcattatggctaccttt

SEQ ID NO: 21977 - DNA, 668 bp, Gossypium hirsutum
  Clone ID: GOSHI-09MAY01-C12699_1
gaagagaactgtgaaatgatcctagtttatgattatatggcttatggaacgttgcgtgagcatctctacaaaacccaaaagccgcctcttccatggaagcaaaggtttgaaatatgcattggtgctgctcgcggtttacactatcttcacactggtgccaaacacactatcattcaccgtgatgtgaagactaccaacattcttctggatgagaagtgggtagcgaaagtttccgatttcggattgtcgaaaactggccccacattggttaatactcatgtaagcactgttgggaagggtagctttggctattgggatcctgagtatttcagaaggcaacagctaactgataggtccgatgtttactcatttggggtcgtcctttttgaaatcctttgtgcccgtccagcattgaatcctacgctgccaaaggagcaagtgagccttgcagagtgggctgcacattgtcacaagaaaggcatccctgatcagataatggattccgtatctgaaggggaagatagcgccggaatgcttcaaaaagtttgctgagactgcaatgaagtgtgtagcctgatcacgggatcgacagaccggccatgggtgatggccatggaacctgagttgctttgcacttgggaaaacgcgaagaacgcaagggattattg

SEQ ID NO: 21978 - DNA, 514 bp, Gossypium hirsutum
  unsure (1)..(514): unsure at all n locations
  Clone ID: uC-gsflmaxxa011a03b1
gtcgaaaactggccccacattggataatactcatgtgagcactgttgtgaagggcagctttggctatttggatcctgagtatttcagaaggcaacagctaactgataagtccgatgtttactcatttggggtcgtcctttttgagatcctttgtgcccgtccagcattgaatcctacgctgcacattgtcacaagaaaggcatccttgatcagataatggatccatatctgaaagggaagatagcaccggaatgcttcaaaaagtttgctgagactgcaatgaagtgtgtagctgatcagggaatcgacagaccgtccatgggtgatgtgctatggaacctggagtttgctttgcagctgcaggagagcgccgaagagagtggcaagggaattagtgaattggaagttgaggaggggacctacgatgtaacctgtaaaggcaaaaaggatcctaatgcatcccctggttttgacatanatgtggcagattcgaggagcagcggcatgagtatga

SEQ ID NO: 21979 - DNA, 249 bp, Gossypium hirsutum
  unsure (1)..(249): unsure at all n locations
  Clone ID: LIB3829-022-Q6-K6-E12
cgtgggcggccgcgtgggggggaggtccggcagggaacaaaaatttcgttgatcggttactgtgaagagaactgtgaaatgatcctagtttatgattatatggcttatggaacgttgcgtgagcatctctacaaaaccttttttcttcctcttccatggaagcaaagggggggggggggcattgntgctgctcgcggtttacactatcttcacactggtgccaaacacactatcattcaccgtgatgtg

SEQ ID NO: 21980 - DNA, 586 bp, Gossypium hirsutum
  Clone ID: GOSHI-09MAY01-C12679_1
tttatttacggtagcaaagagtaggggaaagaaagatggtggccgatcatttcagcggcggcggttgtggttggcgagatataaagacattcgggttgaaactgattctgggacggtggttcatggtgtttgcttcactgcttatcatgtcggtatctggcgcaacatatatcttcggtctatactccaatgttattaaaacatctttgggatatgatcaaacaaccctcaatcttttaagcttttccagggacttgggtggcaacgttgggatcctatcggggctcatcaatgaggttacgccgccgtgggtgattctcttgatcggggccgtcatgaatttcttcggatatttcatgatatggctcgccgtcaccggccgcaccgctaagccccatgtgtggcaaatgtgccgttatttctgcttaggtgccaattcccaggcctttgccaatactggggctctggtcacttgtgtcaagaacttccctgaaagcaggggaagtgttttaggccttttgaaatcttatgtaggtctaagtggtgcaatattgacgcagttataccatgctttctacggggacaa

SEQ ID NO: 21981 - DNA, 1292 bp, Gossypium hirsutum
  Clone ID: GOSHI-09MAY01-C12669_1
ctttgcttgcttctgcctatgctttcagatttgttggtgagtggctgaaatggctatacactgacgtgactcgaagattggaagccaatgatttctccacattacctgaggtccatgcatgtactgcagggttaaaatctgttactacttctgcaactgcagatgcaatcgaagaatgccggaaattatgtggtggtcatggttatctttctagcagtgggctccctgagttatttgcagtttatgtccctgcctgtacttatgaaggcgacaatgttgtgctacttttacaggtttcaaggtttctaatgaagaccgtttcccagctggggtctgggaagaagcctgtcgggacaatagcttacatgggacgatcagaacacctcttgcaatgccgttgtgaagttgaaagggctgaggattggctaaagcctaatgtaatattggaggcatttgaagcgagggctgctaggatgtcggtcacctgtgcaaaaaaccttaacaattttccaaatcaagaagagggttttgctcaactcgcaactgatttggccgaggctgcagtcgctcatgttcagttaattattgcttccaagttcattgagaaattgcaacaagacatacccggaaagggagtaaaaagacagttggagatcctatttaatgtatatgctttaagtctgttacacaaacatcttggtgactttgtcgcctccggctgcattaccccaaagcaaggtgcactagcaaatgaacagctgagattattgtactcccaggtccgtccaaatgctattgcacttgtcgatgcattcaactacactgaccactaccttggctctgttcttggtcgctatgatggaaatgtgtatccaaaactctacgaggaagcgtggaaagatcctctgaacgagactgtcatacccgatggttaccacgagtatattcggccaatattgaagcaacatattcgcgttgcaagactctaaaaaaacaatcaaccatcttgctgttgaattgtatagtgtgttatatgaataaataaagtgcagagatactggtcattcgaaagagcaagtcaggtttagggctgtgcccaacaatgtacttagattatggcttgattatttaaatgggatactatcagttttagtccctttctaattaatcaagcttttctatttaatgcttttcttaaaatatattttttcctttcttctatatattatatttttatttattaatttttattattttttttaatgttatttattttttataattttttattt

SEQ ID NO: 21982 - DNA, 506 bp, Gossypium hirsutum
  Clone ID: uC-gsronu33B098g03b1
tatagggaaagctggacgccgggggagcgcgccgggaatgacccggcggacccacgcgtccgggccattttatatgggctggccctagcaatctacatgggtggctttttatgaaacatcaatgtcgttgcaacagcgcgtcatgtccttcagatgccaccagacgagccaagagtgagcggaccaccaatgccatctatcccaaatctcccacaaccaacaataccgacattgccaaccactcagccatcgttacccaagcctggtgctctacctccacttcctaccatgccaacattgccgaccatacctaatgccccaaaactgagcatgccacctctgccgaacattccctccttccctacaataccagctactatgccatctattccattcttctcggcaccaccggccaaaaactagcacttcaaaatagatggtttgggtgaatctcttagggaatacatagatggtgttttagacattcagttcattccaccttactt

SEQ ID NO: 21983 - DNA, 498 bp, Gossypium hirsutum
  Clone ID: uC-gsflnu33B012g11b1
ttccacgcgtccgcaaccaacaataccaacattgccaaccactcagccatcgttacccaagcctggtgctctacctccacttcctaccatgccaacattgccgaccatacctaatgccccaaaactgagcatgccacctctgccgaacattccctccttccctacaataccagctactatgccatctattccattcttctcgccaccaccggccaaaaactagcccttcaaaatgttgtcatctggattatgcgtctttgctttggtgcgatggtgttttgttgcatctcttagggaatacatagatggttttttagacatttgtttcattccatcatacttgtgtgaggttcctttttgtttgcttcttgtggttcttccaccattgttgggtgctggcagaattatttgggtcgtgttcttgtatgataagaaagaaatcacttgtgatttatatattgcaacaatgatttatcgataattctcactccgatcggt

SEQ ID NO: 21984 - DNA, 693 bp, Gossypium hirsutum
  Clone ID: GOSHI-09MAY01-C12169_1
cgagccactgcctccctctctataagggctaatataccacgctcaacgctgaattgactctaatcctttatccttgtatatgttccctctattaaataccccccaaaccgcctccccccaccttcgacctactatcactaaaattcctctccttttttcgtcgaaatctgcgtcccagaacttcttttttctggctcttttcccctttttgttggaatcaaaccattgatcttttggtatttttgtgaatggtggaaacaatttggagctgtagtatattgatgctctccccttgcaaatcgagggcgagcactctccttcctctttctgctgcttctgctttcgcattcggttcttgcaaagaaggctggtactaccgctgccttggccttgacccataaacaaccccacctcaatacctctattcctttccaccaataacccagatttgttttttttttgttatacgccccacaaaataacaaaacaaacccattgtttctcttttcgcggttgttggtgaattgttcattcatctgtttttggttttgattccttttcattttgaattttgaacaaaatatttttgaaagaatgttgctttacaagcagaagaagagaccagggtccccaggggctacaggctcctgattagcgtcactgttctcggaagtgctgggccgatccgttttg

SEQ ID NO: 21985 - DNA, 433 bp, Gossypium hirsutum
  Clone ID: LIB3147-024-Q1-K1-B8
cccacgcgtccgaagatcaatgttttgattttaacaaaaaggggaaaagagccagtgatctgggggtatttttgtgaatggtggaaacaatttggagctgtagtatattgatgctctccccttgcaaatcgagggcgagcactctccttcctctttctgctgcttctgctttcgcattcggttcttgcaaagaaggctggtactaccgctgccttggccttgacccataaacaaccccacctcaatacctctattcctttccaccaataacccagatttgttttttttttgttatacgccccacaaaataacaaaacaaacccattgtttctcttttcgcggttgttggtgaattgttcattcatctgtttttggttttgattccttttcattttgaattttgacaaaaaaaattgaaagaatgttgctttac

SEQ ID NO: 21986 - DNA, 681 bp, Gossypium hirsutum
  Clone ID: GOSHI-09MAY01-C12119_1
ccaagttgaaacccaccgatcctacccaccagccctacaggttcgagtcggttttgatggtgctcaacaacggcgatgaggagcttaattcgtggaaggtttccgtggagtttcaaaacgatgagttttgcgctttctcgtgcagtacatgaaattgaaaccatccgcaaaagtttcccagctattgcagtcattaagtccattaaactctcagaatgggactcatggtgatgccttatccggatcgagctcaatggattccaacggagcagcttggactcgtcaaaatgtttaatccacttgataaaatttgaatgcatgggtgatgtggctatcccttttctacccagtttgtttatttttttgctttatatattgagatgaaaatacgatgtgcctgttatcatcagtgacagtggattggaataagttacaacggatccaatcccaagttctacctgggtttttaacataggattttctaaggtataaaaacaagattgagagagagagggtgggaataggtttatattatgtctgcaatgtaaggatgtgggggtaaatagttcagtctctgggttttaactggtggttgaggggacacaattcaacaaatagcttatggtttatttattttatcatttgaaattgaagaaaagaggaaagaaaaattagttctgt

SEQ ID NO: 21987 - DNA, 506 bp, Gossypium hirsutum
  Clone ID: uC-gsflmaxxa027a09b1
ttgattaaaatcatgctttcaaattccatcctctactaagctgtccaaaagcttcaatccaaccacaccaattcctcgtcttacgcgtttcctttcgctacaaattctttcatttttctttcctttttttctgtaaaccaaaagcttttgcagcaaattacaaatcaatggctttctacttgaactgcaatacccacttcttcttcaagttttcactccttttctcccttttgagcttctccttctcccaatccgacgtcgtcgaggctccgtctccggccgctgattcttgcaacgggatcttcttgtcttatgcttacagttccgggaccaagttgaaacccaccgatcctacccaccagccctacaggttcgagtcggttttgacggtgctcaacaacggcgatgaggagcttaaatcgtggaaaggttccgtggagtttcaaaacgatgagtttttggtttccggttcgaatgcggttttggctgacgggacgagtttgcct

SEQ ID NO: 21988 - DNA, 430 bp, Gossypium hirsutum
  Clone ID: GOSHI-09MAY01-C12089_1
ggcaatagctgtcgcttagaccctttggttgggtttaaaccccaagattattagctgtcatcgggataagggtatctttgcttctagtacttgttgcaggagagcatgctttcctcctagaataagatatacgattctaaagtttcatggaaggaaaagacatgaatatcttcgtccagcacttgctatatcatcagatgtggaagatgtcggagtttctttccagcttgaagacttcactgttaccccttctagtactgaatagagccgaaagctaaagataagagtcgaggtatcatgagccaaaactcgagcaatttttaatgaagcatttgacaagatgcgtgctgatgcccatccaatccctggctttagaagagtataaggaggaaaaacaccaaatatacctagagagattttggtagaagtc

SEQ ID NO: 21989 - DNA, 390 bp, Gossypium hirsutum
  Clone ID: LIB3166-048-P1-K1-A2
cggacgcgtgggaaaaagttgaagctatccatatccattactcacccgagtccgtgtaacatatgccattaatgcatcaatgaaattccaatctcaaagcaaattgaattcaaaacattaatcttatggattcccctattaccattttttatttcttttgcagattattagctgtaaacaagaaaagggtatctttgtttctaatactttttgcaggagagcatgttttcctcctagaataagatataggattctaaagtttcatggaaggaaaagacatgaatatcttcgtccagcacttgctatatcatcagatgtggaagatgttggagtttctttccagtttgaagacttcactgttaccccttctagtactgaagagagccgaaa

SEQ ID NO: 21990 - DNA, 708 bp, Gossypium hirsutum
  Clone ID: GOSHI-09MAY01-C12059_1
tgccccttatccgtgttccagccgagtatcataagtttttcggaaggcctctttacgtagcagagtatggagcattcaaacttgttaaccttttccatcaattgctagtgtgtcacccatctttttgaaaagattaacaagtttgtctaccttcgaaattggaaagcctgcccaagtgcacctcctttggttttaacaaggaaagataagaagggtaaggggaaccaggaggaaagcctggacattgctgcaggtgttggctcttctgatgagttctccgatgaagaaagagtggtagttgaagaacattacgagaagaggaatgaaggaagaaccaactttggggaagcaggatgtgaagtcgatgaccgtaacctcgagcaatttaaatgtgagttgcaggaaattctcgtgagttattcttgccgaattttcttgggttgcttcgaagaaatataccagcaacgatacaagaaaatgctggactatcaaaagctaggcgtggagaagctggaggagttgtttgacaaggtgagggatgtagtcttcttgcatgaagaaccactaagcaagagaaaatttctctatgcagtaggcagctagaagaatctgacaaagcctttgattttaaaataaaaacaaaaatactagaatagatcatacaattgagctaatgttgatcaatgtttggtccctgatgtctgtttt

SEQ ID NO: 21991 - DNA, 574 bp, Gossypium hirsutum
  Clone ID: GOSHI-09MAY01-C12049_1
gttaaccaaccccatggttcttcttgctgtgatcctgggtagcaccatcattttcatactattcctccaaccgcgccacctatcatcttccccgaagtctgattccatggctgcccggagctttgttctttggcttcacgggcttggtgactctggtccagccaatgaacccatcaagacactctttaggtcttccgagttccgaaacaccaaatggtctttcccttctgcccctgaaaaccctgtcacctgcaattatggaatgcgaatgccttcttggttcgacattcaggagattcctgtcacagccgattctccaaaagctgaaagtgatgtccttaaagcagttcagaatgtgcatgcgatgatagacaaagaagtagctgctgggacggatcctaataacgtatttgtgtgtggatttagtcaaggaggtgccttgaccttggctagtgttttgttgtacccaaaaaagcttggtggaggtgcagtcttcagtggatgggttcctttcaattcttcaatggtagaaaagttcccagaagatgcaaagaagacacctattttgtggtct

SEQ ID NO: 21992 - DNA, 1182 bp, Gossypium hirsutum
  Clone ID: GOSHI-09MAY01-C12009_1
ccattccattcattgcttcttctgtgtttctttgggttaattcttttattcattatttgctgttcgccaacttggaacttgtaaccttcttgttgtgcaattaaatcttattcacaatcagagacatcacataatggtgcgtaaaggatggagcttttggcaaggatatgttgtcctgttggctcttgctgttgttgttaaggctgagagtccttacaggttcattgactggaatgttacttacggtgatattttcccacttggggttcgccagcagggaattctcattaatggacaatttccggggcctgatatctattcagttaccaatgacaatctcattattaacgtccagaacaacctggatgaaccttttcttctatcatggaatgggttgcaacaaaggagaaactcgtacgaggatggagtgtatggaactacatgccccattccaccaggcaagaatttcacttacattttacaagtgaaagatcaaatcggtagctttttctatttcccttctcttgctttccacaaagcggctggcggctttggaggcatcagggtcctcagtaggcccagaatcccagtccctttccctgaccctgctggcgatttcacccttcttattggcgactggttcaaaaatgaccacaggctattgaaagcaatgctagatggtggtcatatgcttcccttccctgatggtattctaataaatggtcatgggcttaatggtgcttctttcacagttgaacaatggctaatctttcaggtttcggatatctaatgttgggctttcaaattcgttgaaattccgcattcagggtcacaaaatgaagctgtgggaagtagagggaaccccactgtcagaccatctatgaatcactggatgtcacgttggtaagtcctattcttgtgctggtactatggatcaagctgcccaggatttctacatcgtggccttcaactcgttcactgacaacatctttcaccactggcacccttcatacagtactcaacacaggatgctggcctattctgctgacaaccgaccaaatgattgcttttaacaggtcggctttggaccaacttcccgagggccaggccaatcccgggtttccatgggcttaactttaaaatactcggaccagtctatggggagaaacttttacggttttg

SEQ ID NO: 21993 - DNA, 359 bp, Gossypium hirsutum
  Clone ID: LIB3166-057-P1-K1-A12
ccattcaattcatttcttcttctgtgtttttttgggttaattcttttattcatgatgggctgttcgccaccttggaacttgtaaccttcttgttgtgcaattaaatcttattcacagtcagagacatcacataatgatgtgtaaaggatggagcttttggcaaggatatgttgtcctgtttgctcttgctgttgttgttaaggctgagagtccttacaggttcttcgactggaatgttacttacggtgatattttcccacttggggttcgccagcagggcctgatatctattctgttaccaatgacaatctcattattaacgtccagaacaacctggatgaaccttttcttctatcatg

SEQ ID NO: 21994 - DNA, 450 bp, Gossypium hirsutum
  Clone ID: GOSHI-09MAY01-C12359_1
ctttctggttccggatctctctgcatttgcttccccgcctacaatgaacgccatctccacctctcctgtcgatttcattcaagagagtaacaatggcaatggcagcgactccgataccagtcacgatgacgcgcctgaatactaccagccgatctcagccgtggatggtgatgatgacgacgacgacgatgaggatcgagaaagtttcgatgatcaagtcaattcagatgaagaacaccaccatcgtaacctaacgagtggttacgtcaatcgagtggagaacgggatctcgtttcttcacgtaggcagcgtcgctacggagcaagaagaagaggaagaggaagagaggaggagagaggcgtctgatacggcgataaggagggcgtttagggaagatgagaggcggagaaacgcgccgttaacggcggagaatgctatgagagtgaggga

SEQ ID NO: 21995 - DNA, 696 bp, Gossypium hirsutum
  Clone ID: GOSHI-09MAY01-C12369_6
attaaacaagctacattaattaatagcatatcattcatactaagtttcggtatgcatcaattcaagattatcctttctctaaattcataagaaaatgtgataagtcacaacaatcacatttaaagtcagattctaacagagtggttcgcatgtggcataacttcatcagtcaaagcctctaaaggagcgaccaccacaatccgagaggcccatcacaccgaatatgtgttttcataagattctagatcaagagcttctcaatagcatccttgagttgttgtatttgggatttcaattggcttccttcgtttgatgtgacagaacatgcaattacagggtcttgtaaccccacatgcacgtccaagtgcttgctttgaaggaacaaatacgtagggaacattcttatcttcagcaagcaaaggaagatggggcagaatctcaaggggctcggtatcagcagccatcacaatgaactccgagatacctctattcagggtcttagtagcttcattagctccctttttgagctgcttgtagttggcagcttgttgaacaagatctaaaatcgtggttgttaactgagcatccgctagtgggtatgctttggggttcactggttctccacgtcattatttttcaatgagacagcagatgaggaaaaggcaagcgactaggatatttgtcgatataacaaaa

SEQ ID NO: 21996 - DNA, 934 bp, Gossypium hirsutum
  Clone ID: GOSHI-09MAY01-C12369_5
ggaaaatgcttaacacaaaagctccttaaaaagaagcctaagaagggttcaaagaatgccaagcaaatcactaaaactgaagattgtgaaagtttcttcaacttcttcaatcctcctcaagttcctgatgatgatgaagacatcgatgaagatgctgctgaggagctacaaaatcaaatggaacaggattatgacattgggtcaacaattcgagacaagattattccacatgctgtgtcatggtttacgggagaggctattcagggagatgagcttgagttggatgatgaggatgaagatgaaattgaggaagatgatgacgatgaagatgaggaggatgacgatgatgacgatgacgatgaagaagaagaagaagaaactaagactaaaaagaagaggaatggaagagcacaaggagatgggcagcaaggtgagaggcctccagaatgcaagcagcagtagattgtaatggctgcacactatatagagatgtttgattggaagacaaggtggggggagtgtggggtttgcagttttggtgggttatatttatttttacaatttttttacgtcattccatgcatgattggtttggagaaaatcctttttcccttttttattgggtctggtctgtgggtttgataggaaccctggtctgttagttgaaatgtgttaaagaattttcttttacgtgaattttcctttaaaactctcgagtatgcctattttagtatttattctcagtctgattataattattatttttttgatctcttgccatgttccagccttaattgattttttgtttgattatgcattggctatttgctttttttaataccaatagcaagaagcaaaaacattctgtattgctgtgctagcacaatgctcaactgattttattatttgaataaaatgactaaagaactttgtc

SEQ ID NO: 21997 - DNA, 1366 bp, Gossypium hirsutum
  Clone ID: GOSHI-09MAY01-C12369_3
ggtctcgttaacgctgtgaaggaataaacttcagaaatcttgcttagggagcacactgatatgttggagagcctgttcaccaaatggttagaaagcgtgttgagggttctcagaagatccagggtcaacatgatgagttagtaggctaaatattttgaggagagggcagcacgtcgggagcgtaaatatcagaaattattatcaacctttgtattgccaagcgatatgatattgtgaatggtgttgcttgaagctgagggaactacccaaatgatgcagccatggaccagaaagaggataacactgctgaagagaaaggagtacctgatttttggcttactgccatgaaaaacaatgatgtgctttctgatgagatcactgagcgtgatgaaggagctctcaaatatctcaaggatatcaagtggcataggatagaggaacccaaaggattcaagcttgagttttactttgaccccaatccttatttcaagaatgctgggctgacaaagacatatctcatgattgatgaagatgaacctattcttgagaaagcaattgggactgaaattgaatggtatcctggaaaatgcttaacgcaaaagcttcttaaaaagaagcctaagaagggttcaaagaatgccaagccaatcactaaaacagaggagtgtgaaagtttcttcaacttcttcaatcctcctcaagttcctgaggatgatgaagacattgatgaagatactgctgaggagctacaaaatcaaatggaacaagattatgacatcggatcaacaattcgggacaagattattccacatgctgtgtcatggtttacaggagaagctatccagggagatgagcttgatatagatgacgatgaagaagatgacgatgatgatgatgaggaagaggatgatgaggaagaggatgaggatgctgacgatgaggatgaggatgatgacgaaggaagtaagaccaaaaagaagtcggctcataagaagagtggtaaagcagtaggggatgggcagcaaggtgagaggcctccggaatgcaagcagcagtagaaattaattgctgctgtcggagtgtggtttataagattttgattggaagaagcgggagaaagggagggtttgcagttttggtggttatttatttctacagttttatgttattgctatgagtatgattggtttctacagtcgttttatcctttttggtctgttggattggtaggatggtctggtaatggtactctaagatgttttgggattttgttttaatgtttaatgttcccagcacctcttttaagagttcttgtgatagcttgttatcaattatttaatggccggtctgattaaagttccacaag

SEQ ID NO: 21998 - DNA, 1119 bp, Gossypium hirsutum
  Clone ID: GOSHI-09MAY01-C12369_2
gaggcaacagctttattataagcctcccactcaaaccctttcaaaacacccttccgcccctcacccctttcaatctagggttttatctaaggttttagcttgctcttcccctttcaatttctggaaattcatccacgagtgctaacgttaacatgtccgatctcggcggtgttattaacgagttagctcgagctgatctcctgaacgatctcaagaataaacttcagaatctctctcgacaccacaccgagatgctggaaagactgtctccggatgtcaagaagcgtgtggaagttctcagagagatccagggccagcatgatgagttagaggctaagttttttgaggagagagcagcacttgaagctaaataccagaaactatatcagcccttatatgccaagcgatatgatattgtgaatggtgttggtgaagccaatggaactactgatgaagctgccatggaccaaggagaggataaagctgccgaagagaaaggagtacctgatttttggcttaatgcaatgaaaaataatgaagtgctttctgaagagatcaccgagcgtgatgaaggggctctcaaatacctcagggatattaagtggtataggatagaggaacccaaaggattcaagcttgagttttactttgatactaatctgtatttcaaaaataccgtgttgacaaagacatatcacttgattgatgaagatgaacctttactagagaaagctattgggacggagattgaatggtatccaggaaaatgctttacacaaaatctccttataaagaagcctaagaagggttcaaagaatgccaagcaaatcactactactgaagattgtgaaagtttcttcaacttcttcaatcctcctctattccctgatgatgatgaacacctcgatgaatatgctgctgacgatctaccttatccaatggatccggattttgaccttgggtcctcccttccacactatattattcctcctgctgtgtcttggtttacgggatacgctatccccggacatgaccttcagtcggatcatgacgatcaccatcatttccacgagtatcatcaccatcatcatcaggaggatgactatgatgaccatgatc

SEQ ID NO: 21999 - DNA, 766 bp, Gossypium hirsutum
  Clone ID: GOSHI-09MAY01-C12369_1
ttcacttgtacgagtcttttcttccttattattcttcgtcttctttatttttatttgtttttttttttttttttttttttgtttttttctgttaaaacatcgattaaaacttcattgatactaagatgtgctaaaagatcaattcaagattatccttttttcctcagttcataagaaaacctaataggacacaacaaccacttttttttaaggtcgaatactaaacagcggctcgatagtggcacgacttaatcagtcaaagtctctaaaggagcgaccaccacattccaagaggcccatcacaccgaatacgagttacgtaatatctttagattaggagcttctcaatggcatccttgagctgttgtatttgcgatttcaactggcttccttcatttgatgtgacggagcatgcgattacaggtcttgtgacaccgcatgctcggccaagtgcttgctttgagggaacaaatacatatgggacattcttatcttcagcaagcaaaggaagatgcaaaagaatctcaagaggctcagtatcggcagccatcacaacaaactccgatatacctctattaagtgtcttagtagcttcattagctccctttttgagctgcttgtagttagcagcttgttgaacgagatccaaaatcgtggtcgttaattgagcatctgctaaagggtatgctttggggttcactggttctccagtcatttttggtttgtgagagacggctagggttttcttttagaggtaataaattta

SEQ ID NO: 22000 - DNA, 592 bp, Gossypium hirsutum
  Clone ID: AI730555.1
ccatgtggcataacttcatcagtcaaagcctttaaaggagcgaccaccacaatccgagaggcccatcacaccgaatatgtgttttcataagattctagatcaagagcttctcaatagcatccttgagttgttgtatttgggatttcaattggcttccttcgtttgatgtgacagaacatgcaattacaggttttgtaaccccacatgcacgtccaagtgcttgctttgaaggaacaaatacgtagggaacatttttattttcagcaagcaaaggagatgggcagcaaggtgagaggcctccagaatgcaagcagcagtagattgtaatggctgcacactatatagagatatttgattggaagacaaggtggggggagtgtggggtttgcagttttggtgggttatatttatttttacaatttttttacgtcattccatgcatgattggtttggagaaaatcctttttcccttttttattgggtttggtttgttggtttgataggaaccctggtctgttagctgagatgtgttaaagaatttttttttacgtgaaaaaaaaaaaaaaaaaaaaaaaaaaaaaaaaaaaaaaat

SEQ ID NO: 22001 - DNA, 259 bp, Gossypium hirsutum
  Clone ID: LIB3189-037-P1-K1-F4
cgtgcgcacccattcacatctagggttttatctaacgttttagcttgctcttcccctttcaatttctggggattgggccacgagtgctaacgttaacatgtcctatctcagcggtgttattaacgagttagctcgagctgatctcctaaacgatctgaagatctgatttcatacctgttcaccagcagcctgatcatttattggtcaagatggctcctactggtggaagaacagaggagtggttcgaaagaaactcaaa

SEQ ID NO: 22002 - DNA, 1032 bp, Gossypium hirsutum
  Clone ID: GOSHI-09MAY01-C12249_1
caaacacacagtctctgtctctctctctctctctctctctctctcaacactacgtaagccactttgtatgaattaagcctcttaagccaaaacccagtttggatttctagcttttagttccagattttgtcacttctttgttaatccttcaagttctcaagttcctttctttattgtttacttgttttcaaattcagtgctttcttcgtttagtctttgaagctttgcgtttcagttctcttaagtccaaactcttgtaagaaaggacatggagtctgaaaatggggttacagtggaggaagagacaattgtgagtgaaaaaactgatattgaagaatctgctacagaagaaaagaaaaaggaacatgatgatgctgatgctgacattaatggtgaaggggattcaaattcgaagcagcaagaaacaaaatctgaaggcaagacaagtaaagctcctgcaaatgtttccaaaactcaattgtcaagaatcttaaaggagcctggtaatgcaaagaacagtaaggtgacaaaggataaacctaatctgagaaatgcagttccaatttctcgtaaccagaggcatgttctgtctcaaagtctttcatttcctgcaagaagaatccatggggatggtcttgtgaagagcactgatctcaaacattcccaagagaaaagctcaaaaactcatgccccttcttccaatggatcagctagtttgagtcatcccaacaggcgcggatccatccatgtcgatacaaagccggcaaatgcaaatggtggtggagcttcttctagaaggaccactatagcatctttgcctagcaataagccggcaaagtctggtcctggaaataacggtgctaagccctcttcatcatccgaattcattggatccaaacccatagcagctaccatgccgagcctagaagaagaggatgcccattccataatttctggccccctctccttaccctaaggaagaattattgggtccagaatccccctccaggttggaaggaacgttgccgaaaa

SEQ ID NO: 22003 - DNA, 286 bp, Gossypium hirsutum
  Clone ID: GOSHI-09MAY01-C112251_1
gctgttttcaggatctttgcagaaccttctgaaactcgggactaaaaatgtcggtgtgggccgcaactatgccgcgctcgccaaagaactcggcaacgccctccccaaggaaccattactgcttttaaagccgacatcatcttatttggaaagtggaggtacaattgaggatccacattcattgaattcattggattatgaagttgaacttgctgtcgtgatcggaaaaacggctcgggatgtgcctgaaaacactgccatgaactatgttggaggctatgcttta

SEQ ID NO: 22004 - DNA, 516 bp, Gossypium hirsutum
  Clone ID: GOSHI-09MAY01-C13959_2
gatacactcatctccaccattccttacttcaataaacatggttttgggggagagaaggtgaactcatcttctttggaggcatggatggaagagagcaaggcaccagctctcgaccacacattcaagctcttccatgacattaaagatagagggatgaaaatctttctaggctcttcttaaggggtttcgaagatgaatacatgcatgtggaacaatacaagtcccaagtgaggaaaacattaatgggtccaggggtccgcatttggggaatcggtggagatcaatggagccgcttaaagggtttgcccgaagccaagagaacattcaagctgccaaattccatttactacatgtcttaacttcatctgaataaatttttatgcactcattttcccacctcatgtgctttttgtatttgcttgcgggtggttttcaaaaattccaattttaaatttctagttaaaatttctcttttatttatttttcaaaaataaaaataaaactttcttaattata

SEQ ID NO: 22005 - DNA, 1070 bp, Gossypium hirsutum
  Clone ID: GOSHI-09MAY01-C13959_1
cccacgcgtccgccctcgcgtccgcccacgcgtccgcccctctgcaaaaatggcaaggaaaattgtgctcattctggtactgagatgcctctgcattgggctagcagctgctgactggaacatcttgaacccaatatggaatatcaatgcaagacaagatagcttgaaaaactactgtgaaagttggaggatcaatgtggagctgaacaacataagggagttcgatgtagtgccccaagaatgcgttgctcacatcaagaagtacatgacttcatcacagtacgatgctgactgccagagagctatcgaggaagtgacactatacttaagccgctgttgctctttgaaaggtgatggcaaagatgcatggattttcgatgttgatgatacactcatctccaccattccttacttcaagaaacatggttttgggggagagaaggtgaactcatcttctttggaggcatggatggaagagagcaaggcaccagctctcgaccacacattcaagctcttccatgacattaaagatagagggatgaaaatctttctggtctcttcaaggaaagaaacccttagatctcctaccgttgataacctcattaatgttggataccatggatggtctaggctcttcttaaggggtttcgaagatgaatacatgcatgtggaacaatacaagtcccaagtgaggaaaacattaatggatcaagggtaccgcatatggggaatcgttggagatcaatggagcagcttaaagggtttgccagaagcaaagagaacattcaagctgccaaattccatttactacatgtcttaacttcatctgaataaatttttatgcactcattttcccacctcatgtgcttttgtatttgcttgcggttgttttcagaaatccaatataaaatatcagtaaaaagtcctcgcggccgcttctaaaaaaaaaaaaaaaaaaaaaaaaaaaaaacaaaaaaaaaaaaaaaaaaaaaaaaaaaaaaaaaaaaaaaaaaaaaaaaaaccaccaaaaataaaaaaaaaaaaaaaaaaactcaacccatcatgggggg

SEQ ID NO: 22006 - DNA, 736 bp, Gossypium hirsutum
  Clone ID: GOSHI-09MAY01-C13919_1
gctccatatcaacttaacaaaatcatccatgggaaattctttgcctccttgctatcttactctttttctcctccttttcatctcattcaacaatgtcggccatcgaaacctcgttttcgccaacgatgccctgattgaagcccaatgtcacaatgctgaagtccccgaaacctgcataaaatgcgtaaaatctgattctcgaagtcaatcagccaataaagttggcattgctgccatcatcataacttgtcttagcaacaaagccacgaccttgataaacaacatgacgactcttgcttcgggcgctcgcgacaagaacttgaaagtggctctccgaggttgcgagaaagggttttactacacgaaaaccaatttgatcgctgcgacgaaccgattgaaggggaaagaatatgatcaaacgaatcttctggtgaaacaagcgctcgaagaagaatttgtttgtaagatgaaagtggaggttttacgatttaactttccgagtagtgtcacgtttgacatgggagtttacgaggaactttcaactgcagtaatgagaatagttgataggtttgtatgagagtgaaaaatggaaaataaaaataaagcattatatcagataatattatatatttcatttgaataaaaactacccttgttgagtgttttttgtgtgtatttatatgatccagttattgttcatagatgtaatgtcatagataagtttcatgtatgtcta

SEQ ID NO: 22007 - DNA, 647 bp, Gossypium hirsutum
  unsure (1)..(647): unsure at all n locations
  Clone ID: LIB3543-040-Q1-K6-A12
gctctnntgcctccttacttatcttggtgccgttgggggggccttttcatctttttcaacaatgtcgaccagcgaaacctcgttttcgccgacgatgccctgattgaaacccaatgtcacaatgctgaagtccccgaaacctgcataaaatgcataaaatccgatccctcgaagtcaatgcggggggggggaggaggcattgcagccatcatcataacttgtctaagcaacaaagccacgaccttgataaacaacatgacgactcttgcttcgggcgctcgcgacaagtacttgaaattggctcttcgaggttgcgggaaagggttttactatgcaaaaaccaatctgactgttgcgacgaaccgattgaaggggaaagaatatgatcaaacgaatcttctggtgaaacaagcgctcgaaggagaagttgtttgtaagatgaatgtgggggctttacggtttaactttccaaatagtgtcacgtttgacatgggagtttacgaggaactttcaactgcagtaatgagaatagttgataggtttgtatgagagtgaaaaatggaaaataaaaataaaaataaagcattatataagataatattatatatttcatttgaataaaaactacatctattgagtgttaaaaa

SEQ ID NO: 22008 - DNA, 735 bp, Gossypium hirsutum
  Clone ID: GOSHI-09MAY01-C13899_2
tcgggattccaggcacgcgtcacgcccacgcgttccaaaaaaaaatggcagcttccaacgttttcattttattagcctgcttcatttccttgggtttttcaagcatggaggttagcctagcaacccgaaatcttcagcaagtgccacctccatttccaccaataccattgccacctccattgtcgccaataccattgtcaccagtaccattgctacctccattgtcgccaataccattgccacctccatttttaccagtaccattgccatctgcatatttaccggtaccattgccacctccgatgtcaccacttcctttaatcccagaaccaccaccatttccttcaatcccagaacttagaactaccaccacttcgtaagttgcccaacatacttccattgccttcaatcctagatctaccatcattctcagctcaaccctgcatacctccattgccttgaatcccgaagctaccaacaatcccaccatcttagcctaagcctatcactgttcttccaccacttcccagtagcagcttgccttccattcctttcatgtctccacctccacctccacctccatccagccattgaagacagtttgattcctaattagtatcacatatattactgagaatgaactctgccatcacattctctatgatgttatttcatgaaataagaatgtagcttctatctacattttacatatataataaagtgtggtgttttttt

SEQ ID NO: 22009 - DNA, 725 bp, Gossypium hirsutum
  Clone ID: GOSHI-09MAY01-C13899_1
cggccgcgtcgaccaatctttagagcgtcgctccaaaaaaatatggcaggctccaacgttttcattttaatagcttgcttcatattgttgggtttttcaagtatggaggttagcctagcaactcgaaatattcagcacgtgtcactaattgaagtgtcaccaataacattgtcgttattcccaccattgccaccaataagatctccgttcttgccaccaataccaccaataacattgtcaccaatgacattggcaccaataacattgacaccaacaggtacaccaatcgaggaaccaacagatccaccaaccgagaaaccaacagatccaccaactgaggtaccaacactgccttgaatcccaaagctaccaacaatcccaccatcttagcctaagcctatcactgttcttccacaagttcccagcaatagcttgccttccattcctttcatgtctccatctccacctccacctccacctccatccagctattgaagacaatttgattcctaattagtatcacatatattactgagaatgaactctgtcatcacattctctatgatgttatttcatgaaataagaatgtagtttctatttacattttacatatataataaagtgtggtgttttttttacaaaaaaaaaaaaaataattctggcggccgccccccgcgggtggaactcccaattcgccctaaaattaaatccttattacccccccc

SEQ ID NO: 22010 - DNA, 356 bp, Gossypium hirsutum
  unsure (1)..(356): unsure at all n locations
  Clone ID: LIB3585-041-P1-K1-D12
gacccccacgcgtccgcccacgcgtccgtcaatctttagttcatctctccaaaaaaaaatttcatcttccaacgttttcattttattancgttctttatttccttgggtttttcaagcatccaagttagcctagcaacccgaaatcttcagcaagtgccacctccatttccaccaataccattgccacctccattgtcgccaataccattgtcaccagtaccattgctacctccattgtctccaataccattgccacctccatttttaccagtaccattgccatctgcatatttaccggtaccattgccaccttcgatttcaccactttctttaattccaaaaccaccaccaattt

SEQ ID NO: 22011 - DNA, 620 bp, Gossypium hirsutum
  Clone ID: GOSHI-09MAY01-C13829_1
tataaacaaaacagaggagagcgagagacagcgttttaatggcggatgatacgtcgtcactgaaagtgttggctaaggtcttggtttaagccaagatttgattagttatggctgcctcttcttctcttctctttacactgcttttggttcttctcactttctcagattcatcagtacaaacccttggtcttgaagttggaatcaactatggccaaattgcaaacaatcttccatctccagcccgtgtctcatacctcctcagatccctcaatatcagcagagttaaactctatgatgcagatccaaatgttcttcttgctttcgccaacacaaatgttgaattcattattggattagggaatgagtaccttcaaaacatgactgatcctataaaagcccaaaactggattcaacagcgagttcaaccctaccttactcgcaccaagatcacttgcatcactgtggggaatgaggtctacaaaacctatgatcatctgctatggcctaatctccttccagcaatgcaaacagtttataatacccttgttaatcttggccttgataaacaagtaaccgttactaccgcgcattcgctcgatatcttaagcgtgtcgttccct

SEQ ID NO: 22012 - DNA, 696 bp, Gossypium hirsutum
  Clone ID: GOSHI-09MAY01-C13599_1
tggctcgcgcgcctgcaggtcgacactagtggatccaaaggctcttccttgatgagccaaccagtggcctcgacagtgcttcagcattttttgtcacccagactttacgaggcctgtcaagagatggtagaacttgtaatagcttcagttcatcagcccagcagtgaagtctttgagctatttgatcaggtatatttgctggctgaaggcaaaaccatttattttggccaggcttctgaagcatacgagttctttgctcaagccggatttccatgccctgccttgagaaatccatctgaccattttcttagatgcatcaattctgactttgatagagttaaggctactctcaaaggatccatgaaattacggtttgaggcaagtgatgatcccctggagaagattaccacaactgaagctatccgaactcttattaacttctaccgtacatcacatcaatgttatgccgcgaaggaaaaggttgatgagatatccaaagttagaggaaccgtgctagattccggaggcagtcaagctagtttcttgatgcagtcttacactttaaccaagcgttcattcgtgaacatgtctcgagacttcggctattattggctaaggctgctcatatatgttgttgtcactgtttgcattggaaccattttccaatattggaccagctacaattaattctgcaag

SEQ ID NO: 22013 - DNA, 917 bp, Gossypium hirsutum
  Clone ID: GOSHI-09MAY01-C13549_2
ggaacaatccctggcatcggagttcccatgccattatcagttccatctcttgatgcatcttctcaaggggatcaaaagcagcttcatcctggttccttgccttttggtgctcctcctcttcctccgggaccacatccatctcttctagccaatcagcagcatggatatcaacaaaaccctcaacaaattcagcaacagcagcaacagggaatgcaacagcaaatgcctcctatgccaatgggacctccaaatatgcagctacaacctccatctcacatgcccctgcttccacatcctcatttacaacgccctcctccccaaatgccttctcttggtatggcttcacaaatgccaggatctttgaatccaccttcatcaatgccgacatcacatccaatgccaatgcctggtccaatgggcatgcaaggtacaatgaatcagatgcctccttcaatgccacaaggtcattttatgggcatgaatccaatgcactcaggatcattacccaccagtggtggcccttcagttggaggttttccaaatggtatgcaaaatatgcagggccctggaaatatgggcggtggccaaatgtatctgcagggtagtggattcaatcgtgcacaaggtggtcagatgccaatgatgcctgggtacaatccataccagtctggtggtcagtctggtatgcctccaccgccaacaggtcccacaccacatggccaaactccgcagtaagacctatggttctagaatgtttacaagtatttattttggcttcgttgggacaactgttttttgtttgacgtggatggaacagttgggatatcaccaagcaattggtttttgtttgtttttgctgtacgttatcgtatgaaaattggaatgcttgaaagcccaatcctcattttgccttggct

SEQ ID NO: 22014 - DNA, 817 bp, Gossypium hirsutum
  Clone ID: GOSHI-09MAY01-C13549_1
ggattatggccagattagtgatagaacagcattcagaagcacttaagtgggactgattggtaaatgaatgaatagctgtcacgttccttctttcctgatgctcccttctctttatagtaatcggtgataatccaaagcttaagcaggagtgaggtttgaaccttgtccctgcatcatcaatatgagccacagggccaaatcctgcagttcctcttcaatgcccccttcagtttcagcggaatggaaagttaatggaaactattgagattctttgctcgtgcttttacttctgttgaaaaccaatttgattaagtgcttattttcattttgtctggattgagagtaaaacaatttatgcatcctatttcctataggcgatgctgccatactcgttagatattccactattataatcatatttggatacatatctatattcagcactcataaaaacacacatttgattctgctgcgcggttgtataaccgctggaatgctcctgcatttcatgcagcctcatctgaggcaactgtatttgggtaaaatacccaagttcatatgatactaacatgttattgcttccgcttattgcagtctggtggtcagtctggtaagcctccaccgccaacaggtcccacaccacatggccaaactccgcagtaagacctatggttttagaatgtttacaagtatttattttggcttcgttgggacaactgttttttgtttgacgtggatggaacagttgggatatccccaagcaattggtttttgtttgtttttgctgtacgttatcgtatgaaaattggaatgtttg

SEQ ID NO: 22015 - DNA, 1136 bp, Gossypium hirsutum
  Clone ID: GOSHI-09MAY01-C13569_5
gttgaatattgcttaatgttaggatcttgaactagattaaaagaagaaagagccattttgtagttaattttcttcaaaatttcattgcttttgctcccaacattaacattgttaactgtttgcaattaacaaagtagacgctttatagcatgagatgaagaaaggaggacaatccttttatcaaaaccacaacttctttccaacttgcagttttttttacatgaaattaacaaattagaagctttatagcttgaaacgaagaaacaaagacaatcctttcatcaaaaccacctatcaattaaaataggatttttttttagtgcgaaaaaagctttttcggggaaaatcaattagtggtttggatcaagtacacaagattggcttagaaagattttagggcctggaatgtctgagaaaatgtgggatgtcacaatcaagcatgccaaaacttgtgttatgggaaataaatactatgtttttcaaggcactaattacagagtcttcttaaaccccatttgtcaacttgtgaaagcagagattaatgggactacatatcctatacaaaccctaagtagtatcaacagaatttggtcagacaagcttatgtaaattggtcttccttggaagaaatagaaggaatttctaatgagattggcttgctcacacaaggaagtcgaagattatgatgattatgacatggaaggagaatatcaagacgaagatgtcatggcagagatctggtaaggaccactcagttcttttggtccttccgtctggcatataccattacaagttcattgtcgatggtgaatggagatatacacatgatttgccttttatagctgatgaaatgggccgcatttgtaatcttcttgatgttcttgactatgtacctgaaaatcgggatagtgtagccgagtttgaggctccagcatctccaacttccagttacagtcaagcatttccagcggtttttttattaatttctagtattaattgtggtttggaagctaatttataattattcagtccttttttttatttttatataacacaattataaataatttatttggctttggttgttttcaatttatgacggttaatattctagcttaataattgagtattactat

SEQ ID NO: 22016 - DNA, 695 bp, Gossypium hirsutum
  Clone ID: GOSHI-09MAY01-C13569_4
aaaaagaaaaaaaatggtttctgatcagaacaacgtttcccggcagttgcagtcgaacacgttcctagtgtcaatctccgtaaataaaccgaaagccagtgttctttaatccctggcttcactctacccccgcgtccggtttctccttgttttcttttatttttaatctaatttttgttttctttttggatatctttgaaaaattatatactaaaagactgaaaaatatggggaatgcaaacggaagacaggacggagctaacggcggtgtcgacgatctatccggaagatccaatggcggcgaggccgttgttcctggagccgctgcagctggaattcgcgtgccatcgtctgattcaatggtgaatactccgccgcagagccctgggcggtctcgatccccgcttttattcgctcctcaggttcctgtagctcccttaccaagggctgatggccattcctttttcaaccaaacttggcggcatgattctcctgtggttgctgatagtccgtcagagaaaggaatccctgtcatcattacatggaattatggtggtaatgacgtggccgttgaaggttcttgggacaattggagaatcaaggaagatgctgcagacatctggtaaggaccactcaattcttttggtccttccatctggcatataccattacaagttcattgtcgatggtgaatg

SEQ ID NO: 22017 - DNA, 630 bp, Gossypium hirsutum
  Clone ID: GOSHI-09MAY01-C13569_3
cccacgcgtccgcccacgcgtccgcccacgcgtccgcccacgcgttcgggagaaacttaaggttgcaagagatgactcatttcttgaagatgacagaggggttccagcgcctgcaaaagagcctccacctcgaaatgtttctgctccaacctctgatgcgcgatctgctcaaatgtttccaaaaagcaaacaagctttgagcagcaacagcaatagtggcagaaattcccaaggcatccgtgatgaaaggaaatcagttccattgaagggtcaattgcaatctaaagctggtacccttaagtcttctaccattaaaccaaatgggatgccaatggattctagaaagcagcatggtgttagcaatggtatggggccaggccggcctggtggtgttagcaatggtatggggcctggccagcctggtggtgctagcaatggtatggggcctggccggcctggtcgtgcttgcaatggtaccgggcctagccgacctggtggtgtaagcaatggtactgggcctggtcagcctggtggtgctaacagctgttctagatctggccgggctggtgctgctagcaatggtgcaaggactggccagcctgttggctcaagcaatggtgcagggtatgg

SEQ ID NO: 22018 - DNA, 2069 bp, Gossypium hirsutum
  Clone ID: GOSHI-09MAY01-C13569_1
atccctctgcccccctttcgtgtctgggagcttctttttttattttcccccaatttatgtaaaacctataccatgcgctaactcttcttctgcaagatcgaagatttgcgtctcgttctttgttatttgtctcttcatatctttgaagcagttcccaagtctcgctctttcgtggtgccgattttagcttttcgcttggaaaatcgtggatttcgctggtttccgatccgattgaaggtctcctgcattttttatctgacaagttcattcaatacactacgaaggaaaactgttaattggttctggactgagcaatgcggggatacgacagagaagaagtcgaagattatgatgattatgacatggaaggagaatatcaagacgaagatgtcttggaagaagatggggatggatatgaggaggaagaagaagaggaagaggaagaggaagaagaaaccaggcaacctacacaagaagaagtggaatatctagagttaaggcagcggctgaaagaatctatcagacgaaagaggaagcatggtgctgtaggttcttctcaagagaagaagcttccatacaataactttggatccttttttggtccttctcagcctgttattgctcagagagttatccaagaaagcaagtcattgttggaaaaccacaatttggtatcgaagatgttgacttcccgtcagtctagtaaaaagaactctgcttcagacggtgctagaccaagacaagggcgacatatccggccacccaaacccacaagtgagctcagaaagaaagtggagaaacttaaggttgcaagagattactcatttcttgaagatgatagaggggttccagcgcctgcgaaaaagcctccacctcgaaatgtttctgctccaacctctgaggcgcgattggctcaaatgtttccaaaaagcaaacaagccttgagcagcaacagcaatagtggcagaaattcccaaggcatccgtgatgaaaggaaatcagttccattgaagggtcaattgcattctaaagctggtaccctcaagtcttcttccattaaaccaaatgggatgccaatggattctagaaagcagcatggtgttagcaatggtatggggccaggccggcctggtggtgttagcaatggtatggggcctggccggcctggtggtgctagcaatggtaccgggcctagccgacctggtggtgtaagcaatggtactgggcctggtcggcctggtggtgctaacagtggttctgttcctggccgggctggtgctgctacaatggtgcagggtctggccggcctgttggcgcaagcaatggtgcagggtctggccggcctgctggccctaaagctgtgccttcaaagatgcctatcgcaaagatggagatgaagattcctccacctacttctaggaatctcccacctagtgcgcacaaagcacccccctcaaaactgcactcatctgattcaagacagcacttggaacagaaaaggggattacaagagcgtagtaaggataaaatgatgcaccaaaggcctccagtatcgtcaaagccacaggtaaacaagccaatcaagccagtctcatcacaatctcatatgaaaccaaatgttcagcgacccaagaaaaagcaattaagtgaagatgaaaaggctctaatgatgatcagaaatatgttccacactgatcgatatccagtttgtgatgatgatgacgttagtgacatggaggcaaattgggatgagattatgaaggaagaaagaagaagtgctaaaattgcaaggcaggaggatgaagaacaattgaggttgatagaggaagaagagcggcgggagcagatgcggcggatggccaaaaagcgcaagctgagccaacactgatagattcgattgtttgattgtaaccgaatccaagcggcagccaggcttgaaattctgaaaaatcttttttcatcttctggtgtttatttattttgcctatgtaattactgcacattgaagaatgttttttcattttcaagttttagaattaaataatacattagattttttttttttcgtt

SEQ ID NO: 22019 - DNA, 668 bp, Gossypium hirsutum
  unsure (1)..(668): unsure at all n locations
  Clone ID: AI054978.1
caagatgaagatgtcatggaagaagatggggatggatatgaggaggaagaagaagaggaagaggaagaggaagaagaaaccaggcaacctacgcaagaagaagtggaatatctagagttaaggcagcggctgaaagaatctatcagacgaaagaggaagcatggtgctgcaggttcttctcaagagaagaagcttccatacaataactttggatccttttttggcccttctcagcctgttattgctcagagagttatccaagaaagcaagtcattgttggaaaaccagaatttggtataaagatgttgacttccgtcagtctgtaagcatacttgtttaatcaatttttatgtgaatggtttctgtgtttaatgctattgatgtgcatgattatgcaaactccaatctgatgaactcagtcagcctgttgctggtgttatatattccattggataatnatataacnttgacagtttaatacatggcgtaagtttgcaactaaataaatcattcctcctggcatgtagtatgctggngggtttaattgagcatgctgtcttaatcagtagggaactctagctcttgtcatactggtatctcaaactcgctctagctcgatgagtntgtttgaagcttaagctaaaatgaggtgattcatgttgacttan

SEQ ID NO: 22020 - DNA, 572 bp, Gossypium hirsutum
  unsure (1)..(572): unsure at all n locations
  Clone ID: LIB3543-034-Q1-K1-B3
cccagcgtccgggnagggggaaaaaggaagnactgaagttatgggaaatgcaaatggaagagaagacggagccaatggtggtatncgaaaatctttacttaagatccaacggtggggagcccatcgttcctggagccggcccctcggcctctgcagtagttgttaaagtgccgtcgtctgattcaatggcgaatagtccgccgcagagccctagccggtctcgatcccctcttttgttcgcgcctcaggttcctgtagctcccttaccaaggggtgatggccattcctttttcagccaaatttggcggcatgattcacctggggttgttgatagtgcaactgagaaaggtattcctgtcatcattacatggaattttggtggtcatgatgtggctgtggaaggttcttgggacaactggagatcaaggtcgggtttcagccccttgcattatagacactgactttcacgcttaagaaatcccactgtttctctttttgtttgaatagtcaaacccaagcttggatggcatataattgagtctgttatttttgcttccaggaagaaactgctg

SEQ ID NO: 22021 - DNA, 511 bp, Gossypium hirsutum
  Clone ID: LIB3585-064-P1-K2-B3
tgtggatctctctggagggggaaaaaggaagactgaagttatgggaaatgcaaatggaagagaagacggggccaatggtggtatcgaaaatctttacttaagatccaacggtggggagcccatcgttcctggagccggcccctcggcctctgcagtagttgttaaagtgccgtcgtctgattcaatggcgaatagtccgccgcagagccctagccggtctcgatcccctcttttgttcgcgcctcaggttcctgtagctcccttaccaaggggtgatggccattcctttttcagccaaatttggcggcatgattcacctggggttgttgatagtgcaactgagaaaggtattcctgtcatcattacatggaattttggtggtcatgatgtggctgtggaaggttcttgggacaactggagatcaaggaagaaactgctgagatctggtaaggaccactcaattcttttggtccttccatctggcatataccattacaagtttattgttgat

SEQ ID NO: 22022 - DNA, 274 bp, Gossypium hirsutum
  Clone ID: LIB3083-076-Q1-L1-G11
aaaaaatggtttttgatcggaacaacgtttcccggcacttgcagtcgaacacgttcctagtgtcaatctccgactgaaaaatatggggaatgcaaacggaagacaggacggagctaacggcggtgtcgacgatctatccggaagatccaatggcggcgaggccgttgttcctggagccgctgcagttggaattcgcgtgccatcgtctgattcaatggtgaatactccgccgcagagccctgggcggtctcgatccccgcttttattcgctcct

SEQ ID NO: 22023 - DNA, 553 bp, Gossypium hirsutum
  Clone ID: GOSHI-09MAY01-C13539_1
cccacgcgtccggcaaaacgcaatttggtatatggtaattacacgatcttctctctctctgcaatccttacattttagtccttcgccaaaaccttacaacaacgacaatgttgcaagaaagacacggcggtggtccaccccacggcgtaatactagcagtggtcgtatttgtcgtggtattaactccgttcttatccggtgaccaaggtgaagctatcactgaagccatttccgagctattgactccactcggtctcctcctcttgcccatcttcctccttctcgcaatccagttcctttcctccgatcgtggctcctttgtctccgccgtcttctccaccggtgaacccgacaccatttacggtctaagtggctcccctgtcggcggtgccctctttcttctcctcgtcttgttcttactttacaatcgtgtttccatcttcggcgggggcgatgattccgatgattgacgatttaacgtcgcagccctgtctttggtatgtcttcattcggttcggcgtcgttgaggaatggattccgatgatcataagtg

SEQ ID NO: 22024 - DNA, 1529 bp, Gossypium hirsutum
  Clone ID: GOSHI-09MAY01-C13459_1
cccacgcgtccgcccccgcgtccgcccacgcgtccctccccgcgtccggaaaaacatttcttgaagagagaaaatgatgtgttactgccgcttgtttgttttgcttgcactctcaagttttgtggtcgaaagtcgacatctcaaaggaaattcatacgaattatccaacttccatccttccggcaccaatgccaccattgaacccaaaatatgggcagttttagttgctggctccaatggttttgtaaattataggcaccaggcagatatatgccatgcatatcaaatcttgaaaaatggtggactagaagacgaaaatattatcgtttttatgtatgatgatattgcattcgacgtagaaaatttgagacctggtgtcattatcaataaaccagatggagacaatgtttataaaggagttcccaaggattacacaggggaagatgtaaatgtggacaatttacttgctgcaatacttggaaacaaaactggtgttaggggtggaagtggaaaagttgtggagagcggtccaaatgatcatattttcatatattatgctgatcatggcggcgctggaatacttggaatgccttctggagtagaccttactgccaaagatttaatgaatacgttgaagaaaaaacatgcagcgaaaagctacaaaagcatggttatctatgttgaggcatgtgaatcaggcagtatttttgaaggactattgccaaaaaatatgaatatatatgcaattacagcagcaaatgcaaatgaaagtagttggggcacttattgtcccggagaatttccaagtcccccttctgatttggacacttgtttgggtgatttattcagtatttcttggatggaagacagtgacattcatgatttgcggaaggaaactctggaccagcaatatcagttggttaggaggaggacagcagttgatgatatggttggtgcttctcatgtgatgcaatatgggaataagacgattgcaaagcaatttgtgttcaattatatgggtgcaaatccaaagaatgattattattcaccttcttctgctgatgactccagtttaacaactactcccagtattgttagccagcatgatgctaccctcctccatttctggaataagttccgtaacgctccggaaggctctcccaaaaagactgaagctcacaagcaattgatggatggactttccctaaggaaacacattgatgaaagtgtaaatcagataatatcagtcgtttttgggcaagaaaaagttccagagatgctcaacactgttcaatctgcggggaaccctcttgttcatgattgggattgcttcaaaatgctggttaatagttttaaaagactgtgtggaagcacatcaaggtatgaaatgaaatacagtagagcttttgcaaatatgtgcaatgctggggttcatatcaaccatgctaccctagcaataactcaagcctgctccaccagttctcctcctccatgacctctttcttcttctacatcttcttttaattaat

SEQ ID NO: 22025 - DNA, 662 bp, Gossypium hirsutum
  unsure (1)..(662): unsure at all n locations
  Clone ID: LIB3543-062-Q6-K6-H7
tggttttntatgtgaacattggtgggtggggagggctgaaaaccatttgaagtacatcaaacatccatcatgagctgaatgtaaattcaatttattcagtatttcttggatggaagacagtgacattcatgatttgcggaaggaaactctggaccagcaatatcagttggttaggaggagggagcggcagttgatgatatggttggtgcttctcatgtgatgcaatatgggaataagacgattgcaaagcaatttgtgttcaattatatgggtgcaaatccaaagaatgattattattcaccttcttctgatgatgactccagtttaacaactactcccagtattgttagccagcatgatgctaccctcctccatttctggcataagttccgtaacgctccggaaggctctcccaaaaagactgaagctcacaagcaattgatggatgaactttccctaaggaaacacattgatgaaagtgtaaatcagataatatcagtcgtttttgggcaagaaaaattccagagatgctcaacactggtcaatctgcggggaaccctcttgttcattgatgggattgcttcaaaatgctggttaattagtttaataaacagggtggaagcccattcaaggtttgaaaatgaaataccagtggagctttt

SEQ ID NO: 22026 - DNA, 333 bp, Gossypium hirsutum
  unsure (1)..(333): unsure at all n locations
  Clone ID: LIB3543-049-Q6-K6-C1
tccggttcgacccagcgttctccccgcgtccggaaaaactttgtgtgggaagaaaaagatgtgttactgccgcttgtttgttttgcttgcactctcaagttttgtggtcgtnagtctgcttctcagaggaaattcattcgaattatccaacttccatccttccggctccaatgccaccattgaacccaaaatatgggcagttttagttgctggctcncctggttctgtnnttttttggctccaggccgctgtctgccgtgcttgtcacatcttgcccgttggcgggctcgcagacgcccatgttctccttcttgtgtctggtgctcttggttt

SEQ ID NO: 22027 - DNA, 717 bp, Gossypium hirsutum
  Clone ID: GOSHI-09MAY01-C13419_1
tctagatcgcgaggggccgccctttatcttatagggggctttttaaaactttacattcctttgttttacaaaaaaaaaaaaaactttacgatcctttctctatttctcgatcctaactccgggattttttttttccatttcgctctctgggaaatagttttcccggaaaagtacgagccaaattgtatatcggaccaatcagaaaaacgaatcagtagctttcttttgaatggggcaacaacaatcaaaagacgagttgctatacaatcaagtcaattatggtaacgcagaagggatcaaatctcttttccgtgaaggcgcaggcctcgagtggatggatagagaagggaaaacgccgttgatattagcgtgtttgaatccacagctttttgatgtggccaagactttgatcgaacttggttctaacgttaacgcttatcgtccgggtcgccatggggggacacccttgcaccatgcggcaaaaagaggccttctaaatacagtcaaattacttctttctcatggagctaatccgttggtgatgaatgatgattgtcaaacacctctagatattgctagggtgaaaggaaatgtcaatgttgtaagggcaattgaggatcatatatgtttattctctggttggatgcgggagttttacgggccaggatttattgaaatgtttgttcctcagttgctttcaagaaaagtttgggtggt

SEQ ID NO: 22028 - DNA, 837 bp, Gossypium hirsutum
  Clone ID: GOSHI-09MAY01-C13769_2
cccacgcgtccgcccacgcgtccgctgtaatgctgtctctctctctctctctgactctctcttcaatattttttattatttttcctcaaaagtctttttcacgcttctctcactgctaccgccgacttcataacggttagccgtcgtattttggcggcgccgattttcctgtttcccggcgatcttctccgaaaggaatagacaaaatgattggatcctttcttaccagaggactagtgacggtttttgcctatgcttttccagcatatgaatgttataaaactgttgaaatgaataagcctgacgttgaggaactgcgcttttggtgccagtactggatattggtggctgttttgacggttagtgagagaattggtgatgcttctgtttcatgggggccaggggacagtgaaggctgagtcggctttctttatttacttgtgggacccgaaaacaaggggaacttcttatgtgtatgactccttctttagaccatatgttgcaaagcatgaaaatgaaattgactgtaacttgttggaactaaggactagagctggtgatatggcagttctttactggcaaagagctgctagctacggccagacaagagtttttgacatcctgcagtatggtgctgcacagtcaacccccagacctcgccctgctcggaatccgcaggctcaaggtcccaggcctcgccaaccatctggcatgcctaaccgtcaaccatctaataaagcacaaccagcacaactggaggacgaagaaccaccttctccgacatctagcacgtcttcgactcaacaccaaaaaggaagtggctgaaagaggtgggac

SEQ ID NO: 22029 - DNA, 624 bp, Gossypium hirsutum
  Clone ID: LIB3543-060-Q6-K6-H9
ccccgcgtccgccccgcgtgcggggcggtgtcactcttctctcactgctaccgccgacttcataacggttagccgtcgtattttggcggcgccgattttcctgtttcccggcgatcttctccgaagtactcttttattatttcctcctcaagtgcatcgctttggaactctggttttaactatcatttctgagtttaatagtgttgcgttcttgtttgctttatcttattgaaaataatctttcaaaggtaccaatcactctgccgtttccaccttctttttcggtgattgattccgcacatcgcagtcgagatttatctgacattacattgttgaatgttgataacgatattatctaaggatctcttttgggtcttgaacatgtttttaaaattttcctgtatttcctgtatatgattttcttcaattttgttatttatctattttttgaactcaacggtgtttgcgtttttctcgatgatttcttcgttttcactgcttctcggtgcgattatgttgcttcaattttgaatacttgaaatagttccgtacggtgtcctatacttttgggatctaattagtgtttttaattcttagtatgttgcttgttgtgacttgcgtact

SEQ ID NO: 22030 - DNA, 702 bp, Gossypium hirsutum
  Clone ID: GOSHI-09MAY01-C13709_2
cgaaaatcaaaagcagccatcatctttagatcagagacacaaaaaagggctttgacggttgttgaagaagaaattaaaaggtaaaaaaaagaaaagagctgctgttttttgactaagattgtgattgtcaaaattgatgctgaggatcaaactgggttaattcattcatggagatttgcttaatctattctgtttttggttaacgagtgattttgcttgatcgagtgattgtttgctgttagaagacgaaggtgttactagtattatcaacgaattctatcgaaaatcgagtgctttattgacaagcagggttcggtttagatgcaaacgtctcagaaacaccaaactcgggtcaatatccacaggttgtatcaccaacctgttaaggatgttgatcaattttgtttgcctcatattcagatattagagaacaatgcatgttcggatatcggcagtcaaggacccagtgtgtcctatcaagcctacaatgaccagatttttactctggaatcatccacggcggctgctagtatcgttgcttatgattccccttctgctataagtgtctcgtcgagcaggagtcctttctctccacaaggttctcaatcgtggatgtctgatcctcatcattcccccgacaatacacatggatcaccgttcagtggatcttctgttgttgatgatagcaatggattgaagcac

SEQ ID NO: 22031 - DNA, 787 bp, Gossypium hirsutum
  Clone ID: GOSHI-09MAY01-C13709_1
cgaaaatcaaaaccatccatcatctttagattagagacacaaaaaagggctttgacggttgttgaagaagaatttaaaagaaaaaaaagagctgctgttttttgactaagattgtgattgtcaaaattgatgctgaggatcaaacagtttgcttaatctattctgtttttggttaacgagtgattttgcttgatcgagtgattgtttgctgttagaagacgaaggtgttactagtattatcaacgaattctatcgaaaatcgagcgctttattgacaagcggggttcggtttagatgcaaacgtctcagaaacaccaaactcgggtcaatatccacaggttgtatcaccaacctgctatggatgctgatcaattgtgcttgcctcatattctgatatttgacaacaatgcatgttcggatgtcgccccgcatggacccggtgtgtcctatcaagccttccaggaccagatcctcttctctggaatcctccaccggtgctaatttcaaggttgcttattatttgccttttgcctaatagtattaattaaagtgatttctttatgttctctggtatcttatctgtgatgtctgatccttatttttctctctctatactactatgtttctccgtctgtggatttattgttctgatgatagtaattgcctgaacccatgtacttgatgtgtatatatgtatctgagtcttaattttatttatgtgtttattattttttatcctatgggttactattcatttctctctatctttatcttagtactggatccg

SEQ ID NO: 22032 - DNA, 609 bp, Gossypium hirsutum
  Clone ID: GOSHI-09MAY01-C13669_1
cggcgcgtgggttccactccaaaaaactgtagctatggctaacaatttcctatatttttgcctcttctgtagcttagttgtattaactcattcagctcctgaggaggctctggtcactcaactccctggcttttctggcacttttccttcaaatcactactctgggtatgtgaatgtcgatcaaaatcatggcaagaacatgttttactattttgtggaatctgaaaggaatccgtcagaggatccactggttctttggctcaatggtggacctggatgttccagctttgacggctttgtttacgagcacgggcctttcaattttgaagcagcaaaggcaaatgagagtttgccccaactacatctcaatccctatagttggtccaaggtctctaacattatatatttagattctccagtcggtgttgggttttcgtattcgaagaacaaaagtgattatgagactggtgatgtacagactgccattgacacccatgcatttttgctcaagtggtttgaactatactctgagttccttccaaaccccttttttattgccggagagtcatatgctggtgtatatgtgcctactctatcttctgaagtcgt

SEQ ID NO: 22033 - DNA, 1029 bp, Gossypium hirsutum
  Clone ID: GOSHI-09MAY01-C13609_1
cccacgcgcccaataccctaataatatgaatcaattccaccaatatattgcttgaggttgtctgttattatcaatctctctattaacccaaatccatctaaatttctcctttatatgcccccttcttattgtaattctttgcagtgtgacaaggaacaaggaagatggcggcaggaatgaatgcaggagcaccggagagagaggcacggagagcccatgcctccatggcgttggttcaactcatcaatggagggtatcatgtaattaccaaagtagccctcaatgttggtgtcaaccagcttgtcttctgcgtcttccgtgatcttcttgccctctctcttcttgcccccctcggctatgttcgtgaaaaaaggattcgaccacctatgactaaacgcctccttctctccttcttctttcttgggttaactgggatatttggcaaccaacttttatttctcattggtctgagctacacaaatcctacatatgctgctgccatacaaccttcaattccagtctttacctttctcttggctgtaatgatgggtacagaaagagtgaatttgctcaaaactgaaggtcaagcaaaggttggaggtaccctgatatgtgtttctggtgcgatattaatggttctgtttcgtggtccagctttgattggacagaaagatgcagactttgctctaaatgacataagtgccaggggtcaaccagaaccttctggatggctcgtgtctactcttctgggatttggactggaacattggcatattggggttctatgcttgatagggaactgtatgtgcatggccactttcctagctattcaggctccagtgttagccaagtatcctgcaaacatttctgtcacagcattttcctatttttttggtgccatattgatggtaacaacatccttttttatgaccaatgagtcaacagactggaagttgacgcggtctgagctttttgctgtcttatatgctggaattattgcatctgctcttaactatggactcctgacat

SEQ ID NO: 22034 - DNA, 285 bp, Gossypium hirsutum
  Clone ID: LIB3083-107-Q1-L1-H8
gaatgaatgcaggaacaccggagagaggagcacggagagcccatgcctccatggcgttggttcaactcatcaatggagggtatcatgtaattaccaaagtagccctcaatgttggtgtcaaccagcttgtcttctgcgtcttccgtgatcttcttgccctctctcttcttgcccccctcggctatgttcgtgaaaagaaaagacaagaaaagaaaatggtgacaggggggcttgctccggggctgtcgcgtaaactgaagaggtattggaatgccggactgatac

SEQ ID NO: 22035 - DNA, 441 bp, Gossypium hirsutum
  Clone ID: GOSHI-09MAY01-C13639_2
cgcgacttcacgaatcttccgcagacacattggctctcaagcaactctctttcttttaaagtccacgccttctttcttcctcacattaagatttcaaatcccctttttttgcggcggttaacgtttgctgatcgttgcttggtttccgaggatcaatcatgactcgtggtaaccagagagatcgagatcgagaaagggctcaatcccgagcgggcggcaaaggcagcaagaccaaggacgatggcttaaccccagaacaacgtcgtgaaagagatgcaaaggccttgcaagaaaaggcggcaaagaaggctgcgcaggcggcagctggagggaacaatgctggaggcggtagtaaaaccaagaaataattatccgatgatgtcaaattggtaatgatttatttacgctggacgggaaagacagggttggttcgttgattgg

SEQ ID NO: 22036 - DNA, 589 bp, Gossypium hirsutum
  Clone ID: GOSHI-09MAY01-C13639_1
tcaactctctttcttttaaagtccacgccttgtttctttctcacattaagattctcaaatcccgggcggccgcgtgggctttttttgcggcggttaacgtttgctgatcgttgcttggtttccgaggatcaatcatgactcgtggtaaccagagagatcgagatcgagaaagggctcaatcccgagcgggcggcaaaggcagcaagaccaaggacgatggcttaaccccagaacaacgtcgtgaaagagatgcaaaggccttgcaagaaaaggcggcaaagaaggctgcgcaggcggcagctggagggaacaatgctggaggcggtagtaaaaccaagaaataattatccgatgatgtcaaattgttaatgatttatttacgctggacggtaaagatagtgttgtttcgttgattggggaatcagatctatgtgtttcttttagggtttttcagagtctttgcctatgtcgtcttaagattaacaaactgttgtcgtgtttgcttgatttgacattgatcttgactcttaaatcttctatctgatttgtattgaaattgatttcctatgtagcatttgttctttttgtt

SEQ ID NO: 22037 - DNA, 275 bp, Gossypium hirsutum
  Clone ID: LIB3147-047-Q1-K1-G12
cttccgcagatccattggctctcaagcaactctccttcttttaaagtctacgcctgcggtcttcctcacattaagatttcaaatcccccttttttgcggcggttaacgtttgctgatcgttgctcggtttccgaggatcaatcatgactcatatccttttgtgtaagtgaacgcggtaaccatagagagcgagatcgagaaagggctcatgcccgagcggtcaaaggcagcatgaacaatgacgatggcttaaccccagaacatcgccttgaaag

SEQ ID NO: 22038 - DNA, 684 bp, Gossypium hirsutum
  Clone ID: GOSHI-09MAY01-C13629_1
aatccaacaaccaccatcaccaaaaaagcttccttttttaatcccaaaaactccatcaaatctcaatttaaagaaataaagttacaaactttgtttctaagagaaaagtgagtgtttgagacagagatggcaacgcagtttggcaaaatctacaatggaacacaaaaaacatgtgttcttcccaatgtttcaaaaacccagaatcccaaacatgttccttttgtttcattcaaatcaaatctcaatggaaagacaagttcttggggtttggttgtgaagaacaatgggaaatttggttcaataaaggttcggtctttgaaggtttctgcttcaacagcaacagctgagaaaccatctagagcttcagagattgtgcttcaaccaattaatgaaatttcgggtactgttaagttacctgggtctaaatcattgtctaatcggatcctgctcttagctgctttatctgagggaactactgtggttgaaaatttgttgaacagtgatgatgttcatcacatgcttgttgctttggggtaactgggtctgtatgtgaaacatgacagtgaaaagaaacaagccactgttgaagggtgtggtgggtcagttcccagtccggaaaaggtgaaggtcaagaaaccgagcttttccttgggaatgccggaaacggcatggcgaacactttac

SEQ ID NO: 22039 - DNA, 740 bp, Gossypium hirsutum
  Clone ID: GOSHI-09MAY01-C13199_2
cggttctttggcggacgcgtgggcaactatcaatggttagtttcattgcattaaatggatcatgaaatctttcctttctttttttgcattcctctcacttctcctgtttgtagacaccattgcagcagctaggaaagatgctggagagtactggggagctgtaacgaaagatcagcctatgcctgaggcactccaagagcttgttcggattgaggctgccgttgtcagccccgatgagaaaaccaagtgccatacatcagttaatattgagcttaaggaagagaagattattgttaatgaggagttcgaaccaaggccaaacgtttcagcttatggtgatgacgctaatctaaaaggagataaatcatcatcttttgctgaagattttgaaccgagacctaacgtttcggcttacgggggcgatgatgctggtcttaaaggacagaaagaatcattcactaaagatttcgatccacagccaaatatctccgcttacaataactaattaaaagcgaaacccaagtaccattggcttagacccacatcttccattaatttcgtcatcagattgtgtgtgaagctttatgttttatatttgtgaaaaaaataagtgggttgttatgaatatctatgattctgtgaccactatcattacagtagaatggcaaaggaactgtgaccactattgggatctttgtgatgttaactctttggaacatcaaatcaactattattgcaac

SEQ ID NO: 22040 - DNA, 854 bp, Gossypium hirsutum
  Clone ID: GOSHI-09MAY01-C13199_1
tcgtctccccttcccccccctcgtccgtcgaagttgatatccaactatcactctttaggtttattgcattaaataaatcatgaaatctttccttcctttctttgcattcctctcacttctcctgtttgtagacaccattgcagcagctaggaaagatgctggagagtactggggagctgtaatgaaagatcagcctatgcctgaggcactccaagagcttgttcggattgaggctgccgttgccaaccccgatgagaaaaccaagtgccatacatcaggtaacattgagcttaaggaagagaagattattgttaatgaggagttcgaaccaaggccaaacatttcagcttacggtgatgacgctaatctaaaaggagataaatcatcatcttttgcagaagattttgaaccgagacctaacatttcggcttacgggggcgatgatgctggtcttaaaggacagaaagaatcattcactaaagatttcgatccacagccaaatatctccgcttacaataactaattaaaagcgaaaccaaagtaccagtggcttagacccacatcttccaataatttcgtcatcagattgtgtgttgtactcttgcgtgtgaagctttatgttttatatttgtgaaaaaaaataagtgggttgttatgaatatctatgattatgtgaccactatcattacactagaatggcaaagaactgtcggtgttcgtagttatctcatcttgtaacatctctttcagcactcaatttcatttaagggtatgcattttctttttcaataacacgaaacacatcaaaaatcgattcacgttttctagattcccaaaaatgaattttgtttaat

SEQ ID NO: 22041 - DNA, 386 bp, Gossypium hirsutum
  Clone ID: LIB3149-028-Q1-K1-E4
cccgacccacgcgttcgggagaacagtgaaacgggtgtgaaagaaaaagacatagccggaggccctcataaagcttgtgctgattgacgctggcgaaaggaaccccgatgagaaaaccaagtgccatacatcagggtacattgagcttaaggaagagaagattattgttaatgacgactatgcacgatggaccttcgttgcattttcatgagatgtcgcttttacttacagggcttgggtttgatctttgggcgatgattttgaaccgtaactctactttttgcttcttgcttggttgaaatatttatataatgagattcctttgaaatgttcattattattaattattggcattgttgttaaggcttgtatgcaaaattttatga

SEQ ID NO: 22042 - DNA, 527 bp, Gossypium hirsutum
  unsure (1)..(527): unsure at all n locations
  Clone ID: LIB3147-023-Q1-K1-E12
ggaannncccgggtgcgggccgacgcgtccgctgctcacttttctcctgggtttgtagacacgcagttgtctagcagctgaggaaacgatngtctggagagtggcggtggggatgctgtagggtgagaggaggcgagcctatanngcctgannggcactcncaagnnnagcttgtntnncggattggaggcttgccnnngttgccaacncnnccgatgagaanannaccaagtnngccataccatttcaggtaacannttgagcttaagcggaagaagaagatnntattgttaatgaggagttcgaacccaaggccaannnacatttcagtttaccggtcgatgaccgcttaatctaaaagcgagaataaatcatttcatcttttgcagaagaattttgaaccgagaaacctaacatttcggcttaccgggggcgatgatgcntggtcttaaaggacagaaagaatcattcactaaagatttcgatccacagccaaatatctccgcttacaataactaattaaaagc

SEQ ID NO: 22043 - DNA, 315 bp, Gossypium hirsutum
  unsure (1)..(315): unsure at all n locations
  Clone ID: uC-gsronu33B058d08b1
ngtcatacccccgaaccaactatcaatcatgaggggtattttaaaaaacacaccattaattcacccctccctttatttgcattactctcacttctcctgtatgtagacaccatcgccccagctaggaaagatgctggagagaactgaggagctgtaaccaaagatcaacctatgcctgaggcactccaagagcttgatcggatcgaggctcccgttgtcagcccccatgagaaaaccaagtgccatacatcaggtaatattgagcttaaggaagagaagattattgctaacgaggagttcgaaccaaggccaaac

SEQ ID NO: 22044 - DNA, 291 bp, Gossypium hirsutum
  Clone ID: uC-gsflnu33B090g08b1
ttatctatcactctttaggtttattgcattaaataaatcatgaaatctttccttcctttctttgcattcctctcacttctcctgtttgtagacaccattgcagcagctaggaaagatgctggagagtactggggagctgtaatgaaagatcagcctatgcctgaggcactccaagagcttgttcggattgaggctgccgttgccaaccccatttgtttaagaatatttggtatttttcttaatggtaagctgtggattgttcttgctaaaaatttggaggcttgagccaag

SEQ ID NO: 22045 - DNA, 589 bp, Gossypium hirsutum
  Clone ID: GOSHI-09MAY01-C13159_1
aatcagcaaaagaggctactccaaagaataatgctgcaaacaggaataggcttttgaataagaccagttcaaattcaaggtctgtttcggacactgggagtcgtaagttacttaccaaaactcagaagacaaccaaaacagagcctgttaaaggaaaggaaaagaccaagggacagggcaccgaatcagctgatcaagaagatcaggtttgcccttcggctgcagctgagactgttgaagaggacaaagaaaatatggatgcacctctgacagaagaaagcagcctgtccggagtgatgtagggggccaatgctcaaccatgctttaaattccatcctctattgggttgtctttcatgggttgatgtttgtatagggttttaaactttataagtttaagtgttccaatctggtgtgaagtcaagacctgttcttttgtttttttacttaggttgttgctttaaactgggattgtctgtttctggtattatacaatcacttgaggtacaaattgtatcaaatcaaccgacttatttgttattttgttaatgttattcatatgatttgacacaaaaaaaaaacaaaaaaaa

SEQ ID NO: 22046 - DNA, 606 bp, Gossypium hirsutum
  Clone ID: GOSHI-09MAY01-C13169_1
aattcagtaaaagtattttaattaacttttaagcattttgtttattgtaatcaattaattcctcctttatcaataataattattaaaaataatatattcggatcctacatgaagaaaactcataagaaaaaggacccgtcgagtcgacccacccaacctatgataggcagcttggaaatttgcttgcctgttaatctctgtcgaagaagatggtttccgtttagatccagcaaaaatacagttttcttaagccttctttgatcctatattcctagccaatacaatctgcagttttcagaaatactagtaatttagaaaaaaaatggcttcaacggggggtctggtgcccataacaagggcgtttctcgcttcttattacgaaaagtacccattcgatccactcccagacgacgtgtctcgtctttcctctcagattcggtctttcatccaggatttgatccaaggctttcctccaactcaaggtgaaagcttattaatacaagaagcagatagtcagcctccgcataaaatggatgagaacatgtggaaaaatctagaacttttggaccaattttgttttacttgaatgactttatttgctcttat

SEQ ID NO: 22047 - DNA, 639 bp, Gossypium hirsutum
  Clone ID: GOSHI-09MAY01-C13119_1
ctttagcttctctacttttcgtacttcccagtggaaatatcttatgatggagttcaaacatcaaacatcgacactctcattgatctttcttcttatgatgcctggttttgccctttctgatgtcaatcaagacaaagcagaatgttctaatcagctagtcgggcttgctccatgtctcccatacgtaggcggagaggcaaaaacacccaccatagattgttgcagtgggctcaaacaggtgctggataagagcaagaaatgcctgtgtgtgttgattaaagataaagacgacccgagcctcggcctcaagatcaacggtactcttgcgggaactcttcctagtacttgtcgagccagtgctagcatgacagaatgtatctccctgctgcacttggcacccaattcccaggaagcaaagttatttgaaggatatcaaaagctgatagaggggcatggcagtactcttgctgccaccgggaactccactagcagaccatcaagtgctgcagagaagagtgatggaggacaagggaagagatgggtgggagttgagatggctaccggaatttcactgttgattttctatagcatatacagaaacattggtgtgtgagagtagtggaacccgctggcagctgg

SEQ ID NO: 22048 - DNA, 454 bp, Gossypium hirsutum
  Clone ID: LIB3585-003-P1-K1-H6
acagataatcagctggtagtgaaacgaaaagcacatctgggcacggaataaggatggttagtggggcgccttgttttgccccttctgatttcaatcaagaccaaacaaaatggtctaatcaactaggtcggcttgcttcattgtgtccatacgtaggcggagaggcaaaaacacccaccatagattgttgcagtgggctcaaacaagtgctggataagagcaagaaatgcctgtgtgtgttgattaaagataaagacgacccgagcctcggcctcaagatcaacggtactcttgcgggaactcttcctagtacttgtcgagccagtgctagcatgacagaatgtatctccctgctgcacttggcacccaattcccaggaagcaaagttatttgaaggatatcaaaagctgatagaggggcatggcagtactcttgctgccaccgggaactccac

SEQ ID NO: 22049 - DNA, 600 bp, Gossypium hirsutum
  Clone ID: GOSHI-09MAY01-C13139_1
ctttttctttgctgttttaagaaaaacattgcgaatagggagaagggtgagagagataaaaggggaacaaaagaactgcaaaaaaattgaactttttttttcctaaaaaacctcaattagaagagcgattatcgcttcatcttccccgaaacgacttcgtcagatttttttcaggttgcttttgttgccatggctgctgctgcgactgcctctggtggtccacgatatgctccgcctgaccctactcttcccgaaccatggaaaggcctggttgatggaaaaactggttatctctacttttggaatccggtaacaaatgtcacgcaatatgagaggcctagagggatagattctgtcccaaaatcttcttcagtgcctatgggttcttcagttctggttcaacaatcttctgaagggcgttataggtatagctctgagaaggaaaatgaccggcatggaagaggctgcaatgctgtatcaaaacttgagtcaatattagggggtaatcagaattcaagaggcggaccatttcattcccttattgcacctaatgggacttccagctatgtgattggaggatcttttagaggacaaggatca

SEQ ID NO: 22050 - DNA, 557 bp, Gossypium hirsutum
  Clone ID: LIB3543-034-Q1-K1-C6
attttctcttccctttttttgctgttttagaaaacttgcgaatgggagaaggtgagagagtaaaggggaacaaaagactgcaaaaaaattgaattttttttttcctaaaaaacctcaattagaagagcgattatcgcttcatcttccccgaacgacttcgtcaggacatttttcgatttcggtattagaaaattttgagattttgcattaattttctatctgtgttttggttattggaagaggctgtttaaacaattagatttttttcaggttgcttttgttgccatggctgctgctgcgactgcctctggtggtccacgatatgctccgcctgaccctactcttcccgaaccatggaaaggcctggttgatggaaaaactggttatctctacttttggaatccggtaacaaatgtcacgcaatatgagaggcctagagggatagattctgtcccaaaatcttcttcagtgcctatgggttcttcagttctggttcaacaatcttctgaagggcgttataggtatagctctgagaaggaaaatgaccggcatggaag

SEQ ID NO: 22051 - DNA, 719 bp, Gossypium hirsutum
  Clone ID: GOSHI-09MAY01-C13089_1
ggaatatggaagcttgatacagatgacgacatggcttccttctacttggtgcacatggagttggaatatggaagcaagatccatgtcatgagattattggccctgctttggtctcaccttataatgaaccaatgttcaactctgtcttttctttctgactaaacattaacatagcattctctgatctttaaattttcctaggcataataaaaatttgcggagccttttgtgaggattcccaaggtgacttggtaagtgttctatagtatgcatcttcttattaccgtggttgaatgtttgcaggcgttgctccatttcatttactgggatgccttgccagacatggaagagctcatgggttcaacttctaaatgggcttctacgcttgtagctcagcatctgcttgccgctgctgaccggtatgcgcttgagagaatgagattgctttgtgaggctaaactttgtgagggtgttacaataaacacagttgcaactacattagccttggcagaacagcacaactgtttgcatttgaaaggtgtatgcttaaaattcattgcattgccagagaatttaaaagctgtgatgcaaacagatggatttgagtatttgagggaagctgcccgggtgttctacctgaactgctgcatatgtgcgaaaatcggggagcattcttgtatttctttgggatatcgaaaagaagggatcgtggatgggtc

SEQ ID NO: 22052 - DNA, 699 bp, Gossypium hirsutum
  Clone ID: GOSHI-09MAY01-C13349_1
ccatgcaggaaaaaacctcctcgaattttcctacacctaccgcgcattttagcaaaaatggcccggcatccgatagccgaagccaacgaggagagccccttcggcaccttaactccggacgaattctatgcccgccactcagtgagtcactcatccgagttcatcactaacgctcgcggtctcaaactcttcacccagtcttggaccccactcgatactccgatcactggaatcgtcgccgttgtccacgggttcaccggcgagtcgagctggttcctccaacttacctctgttctttttgccaaatcgggattcgccacgtgtgcgatcgatcaccagggccacggattctccgaaggccttgacggactcgatactcatattccgaacatcgaaggcgttgtcgacgattgcattcagtgctttgactctttccgtgctcgtcacgcgccggatttgcccgcctttttgtactcggaatcgcttggcggagctattgccctttatatctctctccgtcaaaaaggcgtgtgggatggcttgattctcaatggcgcaatgtgcgggataagcgctaaattcaagccaccatggccgttggaacattttctgttcatagtcgccaaacttatccccacctggcgagtggttccgacgcgcgggtctataccggatgtttcgtttaaagaaccgtggaag

SEQ ID NO: 22053 - DNA, 420 bp, Gossypium hirsutum
  Clone ID: LIB3189-008-P1-K1-E5
cccacgcgtacgcccacgcgtccgattttccttcactcttctcgcgcattttagcaaaaatggccggggagccgatagccgaagccaacgaggagagccccttcggcaccttaactccggacgaattctatgcccgacactcaatgagtcactcatccgagttcatcactaacgctgggggtctgaaactcttcacccagtcttggaccccactcgatactccggtcactggaattgtctccgatccccaaagggttacagtctagtcgagctctgatcatcaatttactttttctcttttttatatatcacattttttccaccgtttaatcgattatattttatttagttcttgtttgttccaaatttttttatccttaatttgttgtaaattatttttcattcatttttattttaata

SEQ ID NO: 22054 - DNA, 986 bp, Gossypium hirsutum
  Clone ID: GOSHI-09MAY01-C13379_1
cggacgcgtgggcggtcgcgtgggcggacgcgtgggtttgtagtctctcaaggacatcaccacctccactcaccttcccatttttctgtagcaccccctaaaaagcttgtgcttggatatggctgaaaacccagtaaaatggctgtttctcattctagcaagctgcctgtgtttcgctttcgtcctctcggaaagcaacttattgataaagaagacctacatcgtccaaatgcacaagtctgcaatgccagcatcattctcaagtcctctggaatggtactcatcgaaattaaagtcggtaatgtccgatacccagagtgaaggtgaaggagatggtgaaaataggatcatctatagctaccaaaatgcttttcatggtgttgccgctcagttaactgaagaagaagctgagaggctaaaacaagaagatggtgtagttgctatacttccagagaccaagtatgaattacacaccacaaggagtcctatgttccttggattagaaccagaagaaagtactagcatctggtctcaaaaacttgcagatcatgatgtcatagttggggtacttgacactggaatttggccggaaagtgctagctttaatgatacagggatgacaccggttcctgctcactggaaaggaacatgtgaaactggacgaggctttcaaaagtatcactgcaacaggaaaattgtgggtgcaagagtgttctaccggggatatgaagctgccactgggaaaatcaatgagaaaaacgaatattaatcacctcgagatcaagatggacatggtactcacacagcagccactgttgctggctctccggtacgaggtgcaaatcttcttggttatgcctatggaacagctagaggaatggctcctggtgcaagaattgcagcttacaaggtttgctggactggtgggtgcttcagctcggatattctgtcggcggttgatagagcggtgggtgatggagtgaatg

SEQ ID NO: 22055 - DNA, 205 bp, Gossypium hirsutum
  unsure (1)..(205): unsure at all n locations
  Clone ID: LIB3189-008-P1-K1-H6
gtagtctctcaaggacatcaccacctccactcaccttcccatttttctgtaacaccccccaaagagcttgtgcttggatatggctgaaaacgcagtaaaatggctgtttctcattctagcaagctgcctgtgtttcgctntcgttctgtcagcggttgatagagcggtgggtgatggagtgaatgtgttgtcgttacctttgggt

SEQ ID NO: 22056 - DNA, 820 bp, Gossypium hirsutum
  Clone ID: GOSHI-09MAY01-C13319_1
agattttaaaaacccatttttatttattttccaactcttgctttaggcttcactctctagcatagaagcaaagaggtaggaaaagaaaagcaaaggcaagatatgggttcggtttcactgaaaattggagatggaactgctagattcaagagagcaaccctttgttcttcagctgttaacattctcatgcttttctcagttattacaaccaatctctttgctttatatgccttcacgttttcaccaaaacaacacttagacaacctatttcaccatcctcacagaaacatctctctgatctctcaacatgtctctttgattataaaagagatcgattcttctcagaggaagcttgctcaaatggaaaaagagctccttggttatgacactcttgatctttcaagacccaaccttgctgctgagctcaagttgtttttgcaacatcatcagcttcctttggggaaggattccaaaactgggatcactgagatggtggcttctgtgggacattcttgtgagaaatctgctgatttattgtcccaatacatgagttacaaggtttctggaccttgtcctgatgattggagtcttgcgcaaaagctaatcttgaagggatgtgagcctttgccgaaaaggaggtgctttgccaagactgttcctaagccaggtcttacttctttacctgtttctttatggaaacctgttaatgataagatccttacttggagtggtctgggttgcaaatttcaactgtttgaatataaaaaattgattagggatgtttttggtgctttatttgactacggatatgaaactcaat

SEQ ID NO: 22057 - DNA, 935 bp, Gossypium hirsutum
  Clone ID: GOSHI-09MAY01-C13289_1
atttgaagcgtataaaatcttaaaccctagcggccacctgaaaaccctctttgttttcttatagagtatttgttcttctactctgatttatcctccaaaagaatggcgcgcactatcaaaaaccctaaaaaggctaagagaaagaataagggttcaaaaaaaggcgatggagcatcaacgtcttcgtcagtgccgacaattcagccaagggtttggcaaccaggagttgatgaattggaggaaggagaagagcttcaatgtgatcctttagcttataattcacttcacgcttttcatattggatggccttgtttgagctttgatatcgtacgtgattcgttgggttcagaccggaaagattttccacattcggtgtattttgttgcagggactcaggcagagaaggcttcttggaactctattggagtgtttaaagtaagcaacatttcgggaaaaaggcgtgagctagttcctaagaaatcttccgaggatgatcctgatatggatggtgaaagtagtaatagtgatgatagtgaggatgaagaagaaggtgcttctggtgcaccggttttgcagttgcgaaaggttgctcatcatggatgtgttaaccgtatacgtgccatgggacaaaatcctcacatatgtgcatcatgggctgatagtggtcatgttcaggtatgggacttcagttctcatctgaatgctttagcggaatcggaaactgaaggcatccagggaagttcggtttttaaccaggctccgttagttaacttccgtggccataaagatgaaggctacgcaatcgattggagtcctgttgttgttggaaggcttgcaaccgggactgcaagaattgtattcatttgtgggagcctacatctgattcaacttggaatgttgatcctactccgtttattggacattctgctagtgtc

SEQ ID NO: 22058 - DNA, 802 bp, Gossypium hirsutum
  Clone ID: GOSHI-09MAY01-C13249_3
gtttcttcttcttcagttttgggccaatcatttcgaattactcgaccttcacgttgttacagttcttcctcaaatgagggacgttatttcatttgttcaaagatatcctccaatatttgtccgcactaggtcattttctgctgatagtggtgaacttgttgatgctgttgttcctttcatgggggaatccatcactgatggaactctacaagttttttgaagcatcctggtgatcgtgtagaagtagatgagccaattgcacaaatagaaactgataaggtgacgattgatgtgagtagtccggacgcgggggtacttgaacagctggtagccaaagtaggtgacactgtggagccaggtactgaagatagctggcatttcaaaatctggcggtgtaactcatgttgctccatcagaagacaagcctagcaaggaagcctctgagccctgtcctgcaaaagccaagaaagttgagacgaagaagcctagagcagaaactccacccagcagagaaaagcctacagcaccttctctgcctcctcccaaaccttcagccaaggaacctcaacttcctcctaaagagagggagagaagagtacctatgactagacttagaaaacgtgttgcaacacgtttgaaggactctcaaaacactttcgcaatgttgacaacattcaatgaagttgatatgaccagtttgatgaaacttcgttctgactataaggatgctttttttcaagaaacaatggattaaattaagacttatgtttggatttttaaaagcaagtttttatctcttttt

SEQ ID NO: 22059 - DNA, 568 bp, Gossypium hirsutum
  Clone ID: GOSHI-09MAY01-C13249_1
gtccctctcttcagtctttacttttcgagaagctttgacccaaacccttttcctttctcctacattcttaaacacaggggttataataaaagaaggaagctatgtgggctgttccaaggcgaagagtttcttcttcttcagttttgggccaatcatttcgaattgctcgaccttcacgttgttacagttcttcctcaaatgaggcctatgcaaagactttagtttcgagaaaagggacatcacaagttgcagggattgtgggttctctagggtttccagttggcccaaggcctctaagggacgttatttcatttgttcaaagatatcctccaatatttgtccgcactaggtcattttctgccgatagtggtgaacttgttgatgctgttgttcctttcatgggggaatccatcactgatggaactctagcaagttttctgaagcatcctggtgatcgtgtagaagtagatgagccaattgcacaaatagaaactgataaggtgacgattgatgtgagtagtcctgaagctggtgtaatcgaacagctggtagccaaagtaggtgacac

SEQ ID NO: 22060 - DNA, 526 bp, Gossypium hirsutum
  Clone ID: uC-gsflmaxxa076d01b1
gttctctctcttcagtctttacttttcgagaagctttgacccaaacccttttcctttctcctacattcttaaacacaggggttataataaaagaaggaagctatgtgggctgtttcaaggcgaagagtttcttcttcttcagttttgggccaatcatttcgaattactcgaccttcacgttgttacagttcttcctcaaatgaggcctatgcaaagactttagtttctagaaaagggacatcacaagttgcagggattgtgggttctctagggtttccatttggcccaaggcctctaagggacgttatttcatttgttcaaagatatcctccaatatttgtccgcactaggtcattttctgctgatagtgatgatccaaatagaggcctcatggcatcagggaactctagtgtttgggaggagtttgtgagggatgaacaaaccggatcagagtacaagctttgttcttcgcattgtgctggtgcttggcatcgcttggatgaccctgcttatatttaactcttgc

SEQ ID NO: 22061 - DNA, 488 bp, Gossypium hirsutum
  Clone ID: GOSHI-09MAY01-C113221_1
gtcaagttcggggactaaacgttgccttatccgtaaaattttttttaaacaaaaatgatatttaaactattaattccatctcgttttgtcccaaaacacgttacctgccaataagagtgtgacatcatttttttgggtaaaataagatcaaattaatagtttaagtactattttggattaaaaaaatatattttaggtacctaaataggaaaatcgatatagtttaggggttaaatttgtagtaagactatgtttgttttaatctttttatttcttcatataattgtacattgaagacaatgctaaaagctcaaatctggttgtggtagtgattataggagaaaagattggtaggctttgagggggcaaaaattaaatgtaaagtgtaatttttttaaaaccagaaataattgttcaaagtaggagaaaaaaaataacatttttaatctttgaataactattccatgtggaaaaaacctggtggaatt

SEQ ID NO: 22062 - DNA, 404 bp, Gossypium hirsutum
  Clone ID: GOSHI-09MAY01-C108431_1
atttgactctcggctgccggatcagagaaggtccatcggtattaatgtcctgacaacgccaaccctatgtgttcagttaaacactttatattatgctattaatcaactgaacaagttggaagatagcatctgggaacactggacaaggaaaatgcccattgaaaaaatctatatcaggaaatccatggatgataaatctaaatgttcaacccaaaaaggcacctttgatggaagcaggaaagatataaatgctgctattgaccgcattcgggagtttactggaactaaaattattttctgggatctaagggagccatttattgagaacttgtataaacctagtgtttctcaatctaggttggaagcagttattgaaccacttgatgtggagctaaaccaactat

SEQ ID NO: 22063 - DNA, 386 bp, Gossypium hirsutum
  Clone ID: GOSHI-09MAY01-C108001_1
gcgattaagtttggattggattgcacaagtaagttgggaaaatacataaaagaagtggattgcacaagtaagttgggaaaatacataaaagaagtgcttaacaacatgatacatccattaacgatacaaaccactaaaaacaacgttaattgtatgaggttttccccaaaagcctaaaggaaacattaaacccagaaatatccctttgtatctacaagttatgactattcaacccgggtatttctttcagctccaactaactgattaaaaggaacaaaaaaaaaccaaaaaggttttaaaggaggaacagaccggagcggttgaaagaccagaactgggggcctttttttggcttttggttttaacatgctttggcgacaccatta

SEQ ID NO: 22064 - DNA, 628 bp, Gossypium hirsutum
  Clone ID: LIB3582-049-P1-K1-D11
atccttctcttcaagcttgttttctattcaaaggccaaaaagccgcacgcgaaaccctcttccactgcaaccatggttctgcaaaacgacattgatttgttgaatccgccagctgagctcgagaaaaagaagcacaagctcaagcgtctcgttcaatcccccaattcattcttcatggatgtgaaatgccaaggctgcttcaacataacgacagtatttagccattctcaaacagtggtggtgtgcggtaattgccagactgttctatgccagccaactggtggtcgagctagactcaccgaaggttgctctttcaggaaaaagggtgactaattctcgcagtctgaggttggaagacgagttttgatttgtgaatcttcgacaatgtgatgttaattggagcaatgtttctcagtttgaaaatgccatcttgaaaaggttaacctgcaaagaagttacatctagaggcgatgaccgttaaatgaggttttagtgagttatcatttccttgagaatcaagtaattcgaaacttttaaccgtaatagtgttcgttgttagcacaattttagcactctacttggtgttttagacgcatcgaatgatgcattttttttcaaaaaataaaaa

SEQ ID NO: 22065 - DNA, 183 bp, Gossypium hirsutum
  Clone ID: uC-gsflnu33B095b08b1
ttttaatgcgatgttaattggagcaatgtttctcagtttgaaaatgccatcttgcaaaggttaacctgcaaagaagttacatctagaggcgatgactgttatgtggtgttatttgccattccctcctattatatactttttttctttcttatcttcctttttttattcttccctcttttattt

SEQ ID NO: 22066 - DNA, 630 bp, Gossypium hirsutum
  Clone ID: GOSHI-09MAY01-C109481_1
tctgactttccactcttgcctggttgatattcctgttgactggggcttttgtatcttgttgatgaaatggctttcccatcttctcattcgttataatgtcaggaacctcaaatgaaagaccccgagagctctctatggactgtgcctgattcgatgcacaagatgactcgtttgtcgaaggatgcccgttattttcagatttggcactagttggaaatcttgaaatttggtttgaaggaccgctgttattgagatgcatatagggaacactggcctgcccatagcttacagaatcagggcccgtgttttgcttgtgctgttgaaggtccagtggggaaaagaggggacatgacgaatcagtaaagggatgcttcacatctgcaaactgcttgatgttaccataatggtgataagagccaccattttcgaggagatgatctgtttcttctccccacgctctcagttgcttggccccccttttttgtgggctgatctgctcagtgggtgtcaagtcatccttaatttcagattctttattggatacatccaaagaagacatgtcagcaagaccaggattatcaccactcgtatcaagggaccttattttgtcacttaaaagtaacatttttc

SEQ ID NO: 22067 - DNA, 330 bp, Gossypium hirsutum
  Clone ID: GOSHI-09MAY01-C104811_1
tcgccccgcgtccggattttatgagtgggccgggcagttgagtagatgttttaacttccaacaatgtcatgattgtcctagaagagacccatgctaaataaggtcctaacttatattagctggttttagattaggttcatgtctggacctaagctacagtagggatagttttagacgcggggggctcctctgcaacctatcattgtagtaatatgcacatgtccatgatgctattttttttaaaaaaatttttggttctttttctgtaaagggaactttagcatcatggtacttaaggtggaggcataaaataactgaagttaatatgac

SEQ ID NO: 22068 - DNA, 543 bp, Gossypium hirsutum
  Clone ID: GOSHI-09MAY01-C104521_1
acctgttgaaaaaacatggatcataaatatgaaaaagtactactgcaacgcattctggcaataatggaaatcataattcccacaaaagcacgtgctatattgtacttacaacaaagcggccaatacaataacatattacaagcggccaacacaaaaaagtgtagcatcatttggatcataacgtctatccattcgcccttataacacaaataaaagtctgcaaagtccaaaccaaagaggctaaaattccaaaacttaggaaagtaaaattagtagtccctctaaatgacataatcagaccactcagcaatgtgtgaagtatgatccatggtaaaacttggaatcttgtcaagctttatagggttctccctccctcctaccaatctagccggattccccaccgcagtagtccttggaggcacgtcctttaacaccaccgaaccagcacctatcttagctccatcaccaatcttaatattccctaaaatacaagtaccggcaccaatcagaaccccatctccaacctttgggatgtctaccacc

SEQ ID NO: 22069 - DNA, 673 bp, Gossypium hirsutum
  Clone ID: GOSHI-09MAY01-C104451_1
gagataggaaaactgatatactgactttgtatgcaaattacatccaataatacaataaaatcgcgattaacagacccacaattttatttaaatataagctggaacagggattattttataccatcattaggggacattccaatcaaaggaatcgtagtttgtgttgtagtagtccaagtatcaaaagcattgatctctatcatggtatttttgggctgttaaatgcaggtttcatgaatatttcagagtttgatagcaccaaaagttgtcaggattggttgcctggtcataacttgcgttgggtgtaattgccctataacttgcgggtaaatggtaaagccgtgattagtcagttttcttcttgctcagtctaatgcagctatgactgcatcaacgacttcttgagtagtactagttcctccaaggtccttcgtacggtacttgccatccgatataacccgttccacagcagtttccaatcgatctgcaaatgagggaaactgcagatgtcttaacatcatagcagacgacagaagcagggccacagggtttgctttcttctgttccaccaaattctcattgcccacatttcctgcaaaactccttgctcgaaaacagcatgatcagccccaacattgcctccagcataactccagtgcccccagcaatacct

SEQ ID NO: 22070 - DNA, 807 bp, Gossypium hirsutum
  Clone ID: GOSHI-09MAY01-C104371_1
gaaattgaagcaaaggattttattacaaaactggaaaactctaataaaacgattatacaagtctcgggaaaattctactatatattaataggaaaatggatttcaaaatgtaatgaaagaatatttccttaaacaaaaaacaaaatcatggacggttaatcagaacaccgaaagaacctgaaatgctttgcattaaaatgctttgcttgctcttactgtgaagccagttggaggtgaggcctaattggcaaccggattgccagtcttttaagctgtacaaagagatgaccaagaaaaagccagactttcagttactacggaatattcttcgagggtcaagttgtccgctacagtaactggaaggaacagctgaaatctccagcctccctttccactcttcaccaggtttcaaaatgatgggcttctctacacaagcagctgtgacacatagcatgtgtttatattcatcatcaccgaaatcagccatcgcctttgctttcttatcccaggggttccacacgacagcatctggaagtccatcctttctcaacacaaaagtccgcttcctgtcatggtccaggatggcaatttttgtaggtgtactgagatatactttgtcaaaaaaagacccccccccccatgcgtccccttgttcagtgaaccgctctctattcttcaggttatccaaataatccagcgtctctagtccttctactcgcacttcactgatatcagtgactgaaaaataggtgtgataggcaaatgtttatgtaacccctttacataacccgtggtttttcgcggacg

SEQ ID NO: 22071 - DNA, 811 bp, Gossypium hirsutum
  Clone ID: GOSHI-09MAY01-C105461_1
gaatgaaccacctaacaggtgctcagatatcacagcatgagaaaataatagatcttaaagcagacgagggagggcagcgctaacgtcccatgaaatgctaaaccagcagcaagccttccggaaagacttgaaaggcattcttatggacgaaatacagggagtttggctggaagaaacactagtaataggtaagtcatcgttcaaaaaggaaaactaagggaatgactgaagaaacatctgacgaagaaaattgcaagattctaaaccattcaccttcgactaccaagatctttaagattcaagtagccattataaatgcttgaatcaagttttcagcttcacgcttctgctgtggagtgccagttataagagccacacgttcccctcgagaggatttggattcagaaatttcaatcattgccccggaaactttcttatgttggctaaattgagccctcctttgcccatcactttaccgactgcatttgaagggatcaatatttcaagagttgaagatgcaggcaagcctccatagagcttcgatgaatatgagggcatggacccatagccgttttcccccattggcagggttccatatccatagaggctgcttgaagaaagaacaccacggtcacttccactttcagccccccgatcaaaagccaaagtagcaactggaggaacagaagacaagagagatgatactgaaagacttgcaccacccgagtagagagcatcagcacctacagaagggttatgaccaccatctttttctttcaaaacatcatctcggagccttagaacaatcaga

SEQ ID NO: 22072 - DNA, 597 bp, Gossypium hirsutum
  Clone ID: GOSHI-09MAY01-C105131_1
aggtgaaaagcaagctatattctggcagatgatcacttaacaaattggcaaaaatctctttacaacacagaaaggtagcttaagtttttacagccatttcttctgggaaattcaaaccatactactacatacaaatacagggctttagtgtaaaaaaaaaaaaagtgatacccaaccattgaacaaagggagaatgaatatttaacaataacagttcacaaaacttccttatcataaaatgcaagaagttgcttcacgtgagaatgccaggctccaacattttgtctgtcaactgtgacccaatctacaacagttgatgccggttgctcccaccactcgtccagcaaacccctgacatatttgcagtcctccaagcacttctgagcattcaaaattgcagttttaagttcaggtagccatttctctatgacaatcttatcttgctcagctgccaaattcaaacaataatttgttgtccttgcatattcttgttgagcacggtaagcatggttcaatagtgcatgaccactttcaacaagatcctgtcgaatatggaccaaatttattgcctttgccaattcctccaggacactagaa

SEQ ID NO: 22073 - DNA, 855 bp, Gossypium hirsutum
  Clone ID: GOSHI-09MAY01-C106671_1
ttcaatttcaactctcctttcccctaaaaccatgattttaccttaaccttaatcccccaaaaaaacaatacaaattatttaaaacaaagaaacaaaaaaagaaaaaaaggggggcttcatcttttatttctggtttttgcaaacccataaagaaaatcccagaaaataaaaaaagaaacccagatttgtttttgagcaagaacgtcattaaaaagggagccccttttatgttttttgtaagaaaagaaaattttcaaaggaaatgccaagcgtagctttgaaattatacagtgtgttcttcaagttcctcttgaagcatcggttgcagaacctgatccaaaacgctattgacgaatcatccaatccgtatggtgttactacccgacccgaagaatccgtttccgcttccaatccttcgttcaccgatggtgtcgctactaaagacatccacatcgatccattcactgctctttctattcggatcttcctcccggattcgtccctttctcctccagaacagcccgatttgaaacccaatctcagatcgtccggaaatgatgacccgaattcccataatcaccgccggagtagttatgccccgtcgaatgtcggagctccgagaaacgatccgagaagaagcagtttagagggtttaaatttaagatctgacaacaatgtttatcgaggttattcaccatcacctcaaaactgtcgaaaattaccgataatgttacagtttcatggaggtggttgggtgagtgggagtaatgagtcggttgctaacgattacttttgtcgaaggatagcgaaattgtgtgatgttatagtcatcgccgtcggttacaggctggcacc

SEQ ID NO: 22074 - DNA, 1055 bp, Gossypium hirsutum
  Clone ID: GOSHI-09MAY01-C106131_1
ctctctggtcgatacaatatcaatgcgtgggggcccaaccacatgtttccgggataagcaccccagcggagttggatgctgcgtctgttgctgcaggcatccctctcttgacatacggccaagaggatgttgggatttcccctgataagcatgctcttattgttcctccctttatgagtcgtggaaaacgtgtccatccaatgccaatgcctgatccttccatgactttgccacctagaccaatggatcctaagaaagatttggcagtgtatgggtacggaactgttgcatggaaggaaagaatggaggattggaagaaaaaacagaatgagaaactccaggtggttaagcatgaaggaaataatggagacgagtttgaggattctgatttgccaatgatggatgaaggcaggcagccactttcaagaaaactaccaataccctctagcaagataaatccgtacagactaattatcctactccggcttgcggtcttggggttattttttcactatagaattctgcatcctgtgaacgatgcttatgtgctgtggcttatttcagtcatctgtgaaatatggtttgctgtatcatggatattggatcagttcccgaaatggtacccaattgaacgggaaacatacctcgatcgtttatcattgaggtatgagaaagaagggaagccatctgagctagcttctgtagacgtatttgtgagtacagttgatccaatgaaggagccaccgcttatcactgcaaatacagttctgtctatcctttcagttgattatccggttgataaagtagcctgctatgtctctgatgatggtgctgccatgctcacgtttgaggctctatccgagacatctgaatttgcaagaaaatgggtaccattttgtaagaagttcagcattgaacctcgagctccagaatggtattttgctcaaaaagttgactatttgagagataaagtagatccaacatttgttagggaacgccgtgccatgaagagggaatatgaagaattcaaagttcgaataaatagcttggttgcc

SEQ ID NO: 22075 - DNA, 481 bp, Gossypium hirsutum
  Clone ID: GOSHI-09MAY01-C100751_1
gtatggaccgacatccggctagtgggattgggattggtcggcccccgcccaaatcgggacgtggagggaagtacacgtgggaaggacctgatgacatgatggagaacgagctgtcgccggtgcctgcagccattgatgagaaggatcctaactacgtggatgaggaagaagaagggaggattttgaggggtgaaaagagcgacgtgagtgggtttgtggtgggggaagtggaagtggctaaaacagctcaggaccgtgatggggtagctcgagttgaggttgacgctcacttgatgcctgattaaactactatttctatcaagctttcattcatttgaccttgcttttctgtttgtttgatcaaaatatagaggatactctgtattctacgggcttaaattgtaaatgtatcttcctatcttaattaacctacctttcagtttcaatcttaaaaaaaaaaaacaaaaaaaaaaaaggacaa

SEQ ID NO: 22076 - DNA, 594 bp, Gossypium hirsutum
  Clone ID: GOSHI-09MAY01-C100701_1
gtcaatgtcgatctggatcgcttttcggcacgcgagtgcctcagccgcaaaagctgatacaactcgttgatggatctctaagcatgataaaagaacattgccctcactatctctggccacgatccccactgccagttagcaaagtctcccatcgtatgctgcatcaaaattaatcttcacaacctgatcaggtggctgtctcccatttactaacagctagagaaatttgtgggtttcttttatcaatctcatttagctctgatatgtagctattaatgaaactcactatttttttttttttccaaatttgctaacctccttatgcactctagcattcctatctccccaaattgcccataatgcacagtaaaaaatcctacactgggatggcaagttctgcgaaaatacccaggacattcacggaagagatggtccatattctctgttcctattccacaccggggacatattgtagtgttcgttacctctctttgtagcatgttaactcgtatatgtagataattccacgatattttccagattgtaatttttacttttgaaggtagattcagtagccatagtttttttttttgt

SEQ ID NO: 22077 - DNA, 550 bp, Gossypium hirsutum
  Clone ID: GOSHI-09MAY01-C100101_1
aacatcttcaaattggacagcatggggaggagcagttggagcagaggagtgggaaatttgagatcattcataggtaattcaatgggaggtcttagaggaggtgccaatttagcttcttgggttgttgctggaactctcgcttatttcctttgggtgaaaccttctcaagatctcaaaaaacagcaacaggaaagggcagctcttgcagcttcggatccttatcgctatatagagaaacgaaaaccaatccctgatccccaggaaaatggattgatatacggcaacaagaagaaaactgatagtaaaacagaggaataatgtctgatattactattttgtaagtttgggttttctcttataagtttcctgaagctatgtgaatcgggatggaatgttgatcgtgtagtattaattatgataatctcatgatagctaattcattatccactgtacttagaggcacttttaacatccattaccgttccttgctacaaattggaacaagtactgtgattatctgcaaaataagtcaataagaatttcttaatac

SEQ ID NO: 22078 - DNA, 575 bp, Gossypium hirsutum
  Clone ID: GOSHI-09MAY01-C100111_1
caaaaaaaaaaaactttttttcaatataatcaattaaatacattcaaacaataatacaaagatagaacccttaacttaaggcaacatcccacacacattaaggctccattattcatgcaaaaacattggattttacattaatggaaatctcccacgttaaaaattgaaataaaaaaacaaataaaataaaaagtcatttaccaaatcagaaaacattggaaaatcgaaaaataacttctttcacttttctgacgtggcatcatggcattggttaaaagcatttagttcttaacacgtggcaccgtccatacccgccgagattgaatcagtgtggtccatgaacgaaaggacagcttagtggatatggtaagtttccttaatctcattcatggtcggcgcgtgttcagacacgcgccacaccttgacggacttatccaagctaccactgtagacaatccatttccggttagtctcagtcgacatctggtgatcttcttcaacggctaagcattttaatggaccggtatgacccgttaaaaccgacaagcaagcatgaataccgccttcttctcgcc

SEQ ID NO: 22079 - DNA, 623 bp, Gossypium hirsutum
  Clone ID: GOSHI-09MAY01-C101451_1
ctcggtatcaaggctagaccttaccgggagcctaccacattctacagctataatcctctgtaaatcaaaaataaagttacgttttcgaattcgatccaacagcgaggggaaagaacgaaatggaagacgaagccgaaatttacgatggaatcagagctcagttccctcttgcttttggtaagcagcaaaaatcccaaacctctcttgaagccattcacaacgccactcgccgttccaccgccggagccgctgcctccaccgctagtaccaccgctagtaatagtaataataaaaccaatgaagcccttccgtctctttcttcctattccaaagcttggctcgattcccttcgcaattctaagtctcccaaccctaaccctaatgactccgtgattggcccgcctcgtccgccacctggtccagttcctgatgaggatgacgaagacgtcatggtaggacctcctccgcctcctccaggttccggtgaggatgacgataacgatgtcatgattgggccgccacgcccgccagttgggccgatttctgactcggaggaggatgaggaggaggagaaccgttatcgaattccattaagcaatgagattgttctcaaagggcatact

SEQ ID NO: 22080 - DNA, 428 bp, Gossypium hirsutum
  Clone ID: GOSHI-09MAY01-C101791_1
gcggattccaaagttgaagttagaggattcgctacgtgtaacgataagtgtggctgtccttcgccgtgccccggcggcacgacttgcagttgcggagccggcgaggcggaccacaagcggtgctcgtgcggggagcattgcggatgcaatccatgcacatgcagccaggctgaagccgccgggggcagtggcaccggaaagatgtactgcaaatgtggtgccggttgtacctgcgccacttgtgccacttgtgccaattgaattttaagagcaaagagtaatgtatggatgggtacattatttgatgatatgttttaagctatattattatagaacggaaagtaaattatgcaatgtatgttgtttcgagagatacgatgataagggttgtttttgttatgatgtaaacgaattgaaatttgtttctc

SEQ ID NO: 22081 - DNA, 645 bp, Gossypium hirsutum
  Clone ID: GOSHI-09MAY01-C101751_1
tagagactaaaaattttctcctctttctcatttgctcgagaggtgttggctcagtgatggccttcatctccatcccctatcaatttctgaatcggtgagaacttgagtaacagactcatgaacagagtatgcattcaccctcgttttcagcccttcagatgccaggttatgtgctgctctttttgcatgctggaatttgcatccataaaaattcgcattatgctcttgaatatcatcaatataagggccgattaccgatttatcttttttttttgtgttcactttttttataaccgtcagagagtcgccttcgaaaataacatattttatctctagttcttttcccaccataactacctgcaaacatgctaaggcttctgctgcaaatcctgaagaaatattgtcatggatgaccgattttgaaacgaatacatcacctttaaagttcttgactattacccctgaacaagatatatttttccccttatcaaaagcagcatcgaaattgattttgaggaacccgctttccaacgccttccatgaatttaaagctgagtatttggcatggtgttttctttccatctcttgtaattcttgtaaatactgtagatacaaactaatgtattaataaaaattttaatcgac

SEQ ID NO: 22082 - DNA, 464 bp, Gossypium hirsutum
  Clone ID: GOSHI-09MAY01-C101671_1
tgtaactccttaggtctatcattatgtatcttgataagttaacctcacaggaggttatcagcttagaactatcaaccgggatacccatgctttacatttttaaagaggggaagttcattagaaggggaagtcccatcgcaccaacagaggctggagtttatgcttatactaggaagttggctcagtacaggcagaaactagatgagatgttgcattgacatgccccttttcagcataggagagcctacttgcatgatcatttacatctacgattacattggttgtaatgtcgggccaaatacctaaggtcagctactgtcacagttgatttttcttttggttgcggtaatcttatagttccatccttacaattctagttacgtgcatctctggaaaagatggtgaaccctgtaacagatatacatacagcaataacaactttccttcatttgtctttgattgag

SEQ ID NO: 22083 - DNA, 805 bp, Gossypium hirsutum
  Clone ID: GOSHI-09MAY01-C101611_1
gccaacaagggcgtctcacgggcgcgcgtcgttgccccccggtctgccggattgtggacggagaggggaaaaagacgaccacgttaggtaaacccttctcttcttccctcttcccctttctcgtttttgttttaagagattcgtgtggggggggtaaacaagcaaacataaagaaacgaacaagaacacgaagagaaaaaaaatgtttaaatcaaccttttttttaatttctgtttttggcttttttttcaataatctttgggttcgtgtgtgtgtgagggtaaccactttacaatattcctaatggctcttctatagctagattcatagaagaaaatagaaataaaaatcgccccctctaaaaaaaacaatccgtttctcctctttttctattttcctgctcttgtttgccctttgtttgtgtctgtcttttgttgctttgtgttttgcaggcgttcggaggccgtacggtgatgcgtgtgaggagtggctcggggcgtggttcgtggcgcgcatgcgaatggagagcggcggcgactgttagtttgctgcctagggttgctgggtgctgcttggtgttgggccatcgggcattaggcttagtgggttgtgagggtattcaggctattcgggtttgggccattgggtttagaattaggtttatgttagatctgggctttgtaatactaaacatttaaaaaaggactgttatattattttattttatttatttgtgtatgtgtttttgggcccgggcaaattgggcttattacagccaagattacacatgcctaatttttcagtt

SEQ ID NO: 22084 - DNA, 708 bp, Gossypium hirsutum
  Clone ID: GOSHI-09MAY01-C101111_1
cccacgggtgccgcccacgcgtccgaggagctattcttcagagaacatttccacctgaatcccccagggagcaaaccatgaaaaacaagatacagcataggttctgcctcaaagaatctcgctgtggcagagcttcgtacaatggtgcattcgctgtttttagaatcatgtgcttctatagagctcgcttcacgcctactttttgttgtcttaactgtgtgtgttagtcatgaggctcagttcagtgggagtaagagaccaagaggtgaagaaagttatcctcctgatgagggcgttgaggagtcacaggcacaatctgaaaagctgaaagacattaaacctagaaaagcaaaaaaacaagggcctgtagctgcgtttgattcttatgtgctggctgctgtctgtgctcttgcctgcgagcttcagttgttccccttggttacaagaggaaatactcattcaactgctaaagatgttcaagctatggccaaccctgcaaaagtaaatggatcttctatagagtatggacatggtattgactctgctattcatcatactcacagaatcttagcaattttagaggcacttttttcgctgaagccatcttctgttggcacctcatggggttatagttcaaatgaaatagttgctgcagctatggttgctgctcatatttctgaactatttagacggtcaaaggcttgcatg

SEQ ID NO: 22085 - DNA, 826 bp, Gossypium hirsutum
  Clone ID: GOSHI-09MAY01-C102471_1
gtcccaccacgcttcactcgctatgtacggacaaccaacattcccgcgctcttcctccgagtttctcaccgactcactgacgtctcccgacgtggtgtcgttgcctttaaactttccgttaagtccgcagactcaactcactgtagccaagtcggtggagtcggtgagcgacgtgattcacagtggcagcagtagcagcgggagtttcaactcgccgacttcgctagcgagttgctgcacacataaaccgagtttcattagaagcttcagtagccattcccttccaaagaatgaattccactgtcgttttgcctcaagccttaacgacttcattgactctgattctgctccggtgaggagagttttcagtaccggtgatctgcaccaggtgcagcagagtggtaggaaggcagagagtccattgtcaaatgagagtagtgcaatcattgaaggaatgagcagagcctgccgctacagtcccgaagaaaagaaacagaggattcaaagatacagaaccaaaagaaaactcaggaacttcaacaagaagattaagtatgcatgtaggaaaacattggcagacagcaggccacggatccgaggaaggttcataagaaatacagaaactgaaaagattaatccccaagttgaatggagccacatagctgatggagaagaagatgatgagatgaattggattagctttctagatatccactctcaccaattgcttattaatccttaatgtttatagatttttagatgcaatttgcttctttcttttttctttataattttatgcaacgttttaagtcattttgtcggattt

SEQ ID NO: 22086 - DNA, 369 bp, Gossypium hirsutum
  Clone ID: GOSHI-09MAY01-C102791_1
gtcgacccagcgttcgcctggtacgaatcaacggagatgaaattttccgttttggtgcatagggggctaggcctcgggcagtggacgcgctgacaccgcacgtggaggcagcggcgcagagggatgtggctagggcttgctttcctccgaaaatagttaggtgttgggcttagggtttgaatttgattttgggctttgggactggggttggtttagtttgggcttatttttatttgggtttttaggcccaggtcaaaattgacctgttacaaaatgtttatagtacaaatgagcacgaataatacataattatgtaatatttgttatattatcatgcgtaattacattatcagtaaacatttgttatac

SEQ ID NO: 22087 - DNA, 505 bp, Gossypium hirsutum
  Clone ID: GOSHI-09MAY01-C102151_1
ccaaatgctgcccatcttccaaacaaagaaccacaatcccaaaattaaaattgctagggttctttacatctgccagattcaccattttgtttggcaatcgacagtataccaccatgaagagatccatgccacgtccatgaaaatattatttggccgtacagtggaggtgtgcgcgggaggaatcactcgtgggagttccaatttttggcctattctggtacattccagaagctcctagtgctgctgagaattttgggtgtattaggcctcgagttttagggctaattcttattgggtttggggacttagaatttgggcatctgttatgtaattggggctaaaattttggagtatttggttagaaaatgagtttattagaattgggttttaattttatgtaaagggttttggggtatttgtttaattgggttaggtgttttgtaaatgggcccgggcaaaatgggcctattataaacaggtgatctcctcgataagtgattagttt

SEQ ID NO: 22088 - DNA, 831 bp, Gossypium hirsutum
  Clone ID: GOSHI-09MAY01-C102081_1
caaaactccttcttccccccttttcctctccaacgatcgagttccccggaggctcaccctaccgccgccatggccaatggctggcgctgcaggaaatgggctcgcttagctccgttttggagcgcctctgaaggccgatactaccaacacccgaagatgcggaaaagatgagactctcagccccctttttgagcccgacctcggtgacggagaagggctctccgatgtcacgaccgtggggaatttcaggtgtcagacggccctcagaggcgtgtgaagcggccatgacagaggcgtggtggccgatgggaggtgaaaagtttggcagtagcatgcttgggggctggctgttgctgttttcttttctttgtaatgggctagggtttcatttgggttgttgggttaggtaacttgggtttggtattgggccatttgttatttatgtttgggttttattttgctttattgaattgagtttttttgggccaaaattggctattacaacttgatgaagaggctgattactagtgttatgagccctatatgatgttaggatctgctggcctctatgtctactgatgcacaggggagggttggaaggcttttggagatgaagggattttcagatctggggacgtttcattttccgttttttacttgctttgctgtagttactgtttttgtttgttaggacttgttttgttttaaaatttttaggctgtttttatgattccctatgcaccgttttctggcctttagttgagcagcatacatgtggtaaagatgtaactagttttgtctccaagcatttatggcataagttggattttc

SEQ ID NO: 22089 - DNA, 738 bp, Gossypium hirsutum
  Clone ID: GOSHI-09MAY01-C102001_1
gcaggcttggtgcaaccttgggctgcaatagtaatgggaatgctttcgggcagtataccatgggtgtctatgatgatccttcacaaaaaatgcagttggctacaacaggtagatgatactcttggtgtgtttcacacacacgcggtggccggcctgttgggcggcctcctcaccgggctgttggcagagccagatctctgcagactcatactcccaagagaaacaaggggtgcagtttatggtgggaatggaggggttcaattcgtgaagcagatagtagcagccttgtttgttattgcttggaatgtagcgtccacaacaataatacttttagtaataaggttgtttataccattaagaatgcctgataaccaactcgaaatcggagatgacgccgttcatggagaagaagcatatgccctttggggtgatggagaaaaatatgacccaacaaagcacggttggcatacgtcttcgtactcagaggtgacagcaccctcacgtttcgttgatggtgcgagaggtgtgaccattagtttggtagctgcatgcatgtgaacgtaaacaaatttgctgtaaatacgatttttcctggtgtgagattgcgtcccctagcttcagcctggtttcttgaattttaagagcgtagaccattgtctctgtggtctgtctgagttttgcgccaacaatgctgatgtttttatagtttataaaatgaatatttatgtttctattatt

SEQ ID NO: 22090 - DNA, 627 bp, Gossypium hirsutum
  Clone ID: GOSHI-09MAY01-C102201_1
gaaaagtagaaatggaattgcttggagcctaaatccggcgttacaccttaagatctgaacctcaacatgtaggattttaacaagtctcttcccagtataatgttctataacttaatgagatcggatctaatagaatggaatggaacgtgaggtgaaaactgctgtcttagccagacacgacttaaaccaacagtgtacaaggttgtagggtaaacattttgacctcttaactgcaactgctgtagccaagacttctatgttatcatccatcaatccatgttaaaactagtccattcgaaccagcaagttttagacgggttcgatctttgttattcgagaagtacaacatgaaactgcgattgttttcaggttatgaggtggagaatgttatgattttctttattgtccttgatcccatttctcccctggtatcacttcaatgctgctttgaatggcttcccaagcatccaagggttaacccttttcttttctgtatatttaagagttggcttttggtgagttgcatcggtcgttaatagctcaagcttattgctgttgaaacgtaactgctgactttttcggtgaatgcaaacatcatcattgcttcttttgaagtaatgttttatt

SEQ ID NO: 22091 - DNA, 971 bp, Gossypium hirsutum
  Clone ID: GOSHI-09MAY01-C102211_1
gtttcttttcaagtaccctttgggtgatccattggagatatctcaacgtcgatgcctgttaataatggccatgggtgttaaacctgaagttgggcatacctgtctcagacacatttctgtaccagacactaacactcaaatggaagtaagacacatttctgtatcagacactaacactcaaatcgaagtaatgtagggaacttccacaagcattgactttgaatgtgctgtcatatacattctgccacccttttttttttaatgcgatactattatatttgataatggagatgctttgagttctttatcattttattgttttagtttctctttagttataatttatgttggtacacttgttcgtcttattttaatgcatatgatattttttttctgtaaaatgcacgcaaagatgtttcttattagtattatttgaaatataagacatgtttatgccaaatattttgttatgtgatatatatggtcatggatctttcaatgggtgattactttagagctttacttatgttttcaaaagatgtatggagtcaatatataggcctagaacccctactatttggcctgagatgatttaaaattgcatttaagtaatagaaacttattcgattcaattatcgggctgtgggtaacctctgcctactgctacctacatttgttccatccctcttgcacctgttctcattatttgtggttaggagtttttgagtttaggattatgttatagataactcaacatagaagacatgagaccatgctcaaaagatgtttgaaccactcgtaatgagctgtaggacatgattctcttaaaagtctctttccccatcccctactcagctctcttatttatctctgataaggagatcaaggccttgagttgagaatgaagataatctttctgtaataattgtataaaaagttattggttttgcctcacttttatctcaactact

SEQ ID NO: 22092 - DNA, 656 bp, Gossypium hirsutum
  Clone ID: GOSHI-09MAY01-C103451_1
gaaaataatctgttcttttacttgcttttaaaacaccatcactgtaaaaaggaaaaaataacaaaactggataaaaaagagcaaaagaaccaaaaagaaaaaagaagaggcaaatacatatagttcggtaaaggcagacatatagaactggaattacaaccaatgagagagttaaataaatatctgatccagatggcaggaaaatgtttcaacttcaatgacaagtgctgcttgagagcattaggatgcaacatttctggaacacatttgcttaccttggcaagaagatggcagttggatttccaggggatggaggattctggtttagcagggatgcatgtgtaccagctttagcactagcatcagagtcagtgaatgacagtacttctacctcttcaagaccaacttgtcttttgatcaagtccaagttctctttgaggacgtcaatctctccaaagggaagtttcaaatccagagcttggacaccaattttaatagcctcatccttcttgaacctcaagaatggcatacattgtttctggatctttttgaagtctgctgcctgaccaacagtgctctcctgtaatgctttcattatctccccatctgatgcaaccgttcgggcattactgtcaaacttgctttggagaatctgc

SEQ ID NO: 22093 - DNA, 784 bp, Gossypium hirsutum
  Clone ID: GOSHI-09MAY01-C103601_1
atgaaaacgaactatttatcgcttggttatattagttttcacatttgctaaaaagtttcaacttttaagaagatttaacaaagctttgcaaataggataacaaatctgatcgtcttctaatccaaagtccaaggggttcaggtcagctcataattatttagcttcaaaaagaatggaagagtatggagccacattataggtgctgccaattccagggactccttcacccacaaaatcatccggcgacgcaagattggtgtccaccacacggaaccaacgcctttttggtggtgccggcggtatagaaactttaacgaaaaagtcatgagcattgaatgccagatagatttctccaccacctttgtcatgaagcgtaaatgcgaggaatttgctgtctgggttgtcccagttatcctcatgccaagtcacatcacttctgtcgagaaaattcttcatgggaaaatactcgatgcttttgccgatagtgtatcacctcagagaaaaacctgaagtggtcactcttccttgcattcaactgttgccactggaaattattaagagcagtatcatgcccgtaactgttgttattcccgtatcgtgtatgcccatattcatctcccattagcatcataggaactccctgtgataccatcaatgccaaatggaagtttttcatttgccggaaacgcagggcaataatatcaacattgtcagtttctccttcaaacccgcaattccaactaaagttgtcattgcttccatcatttccaccttctccattggc

SEQ ID NO: 22094 - DNA, 604 bp, Gossypium hirsutum
  Clone ID: GOSHI-09MAY01-C103171_1
ggggcctatggtgttaaggccttggctgaggcattgaaggacaagctgaagaagatgttgagattgtgccacctaagaaagagaaagatggcaaaaatgagggtggcgagaatggtggcggcggtgatggagggaaaaagaagaacaaaggtggcaatggcggtgccgaagatggtggacatggtggtggtggtggtggtaagatggaagggagcaagatggaatttatggttcaaccccacatttggatacatgcccgcttactcgggatatgagcacccgggctatgggttcggttacgggcacggctactccgggtacgtgccgggttacccagtatctgttcatcctcctcaccacatgttcaatgacgagaaccctaatgcttgtgccattatgtgaggagaaatggatttttaatagcgtagagttttatgttaaggaatgtgtaaataagaaacagagaagcagagagtttacttggaagtcaacattttgggttaaacttggatggcagtttataaaatgttaattttagggttttgatattgtaatttggtgttgccattttccaatgcgattagtgtgttttgcgcctatgtcc

SEQ ID NO: 22095 - DNA, 633 bp, Gossypium hirsutum
  Clone ID: GOSHI-09MAY01-C103271_1
atttttttttttttttttttttacgcccccaataacaaagctaattccataatgcaactggacattatttaggcatcgtgagccgggtgctggcagaaacgaaaagtgatcacacatgttgcttcttcgaacaaaaactaattctttttcagaaaataaaaattcaatcaattgcctatgctactcaaatatgctgtacaacaatttgcctacaaaagagaggttagaggatttacatggaatgtacatagtaagtggaggctgtcaatcatcaaggcgttggatctcacccatcattatacggttgctggtgactttgaaacccagtagagcaggatcaatctgtcttccctttttccctttcttcttgccacttcgtccagcttgtgttgcaccatcagatggttccaaagaagtgctgttagctgcctcagtcccacgaagaaccggcttctttagaatctcaatgaatgatgcttcagacactgcagcatcattgcaagatgaggtcctcctaaaacggacgtctttcttgctagatgcctgagtttctacactcctcatcgttcctagattcgccaccgtcccctgtcttccttcatcagaagttgcaaggctagcagaattattctg

SEQ ID NO: 22096 - DNA, 313 bp, Gossypium hirsutum
  Clone ID: GOSHI-09MAY01-C103251_1
agaaattcaattcttgccctcatctttggtgttctgaacaccctcaaatgagggcaagaattgaattactgctcaagcagcagaaacttactaagaatgatatcaagaatatacttcaggaatatcatgacaatatcggtgacctagatggagccgaagagaaggaacaagcacaaacaaggatccagaagatcatttcatccttctgattgtcatctgctgattttgtaccatcatatcttttgaaggatgccatgtgagtttagcattgtgaattttttgagctaaaattaatggtaatgcttatacaatt

SEQ ID NO: 22097 - DNA, 531 bp, Gossypium hirsutum
  Clone ID: GOSHI-09MAY01-C38989_3
agcattggttaataaaggcaaacaaggcgattaggttccatagttcgcctccatatatactgtaactgtacccctacagtgtccatctttgcggtatcaacatcaagctcccactatcgtctcaaactttacaaccattagcacccctcagtctcaggcgaggacggatggtccagaaaacagagtaagtccagtctgagttgagacagacgcttctaagtgcctcatgaagggccatcatcccaacagcttctttgctcctctctgctgaacctgagcccacctcccctctccctccccctctctctctctctctcttccctctatctctctctatatatacatacaagtgtttatatatttatatgtaagaaaagatgggttcttttctttttaattttggctcccaaagcaagcaacttctttgatacactgctgtctgctgctgcctttgacacttcttttggttataaaactttgggtaagctcaagctggcctttaccctattttatttgagtgaccttttttca

SEQ ID NO: 22098 - DNA, 539 bp, Gossypium hirsutum
  Clone ID: uC-gsronu33B015f11b1
ttcattcgtccggtgcaaggttggagatgataacggcagcttgatgttgatatgggaagatggattttgcaaaggaagggttacaacagaatgtttggaagagattgaaggagaagatccagtgaggaaagctttcagcaaaatgtctattcagttatataattatggagaagggtgggtactgggttggagatgataacggcagcttcctcctgaatggactgatcaattggattcaggcattcaggttctcctcttatattgttgaagatgcagatgttctttctaccatgttgatgttgcatcccccctcgcaatgttgaagtctttcaccatattgaggttgtaaaagtcttctcactgtgttgatgttgcaaaacttagaattgttccccctctcactatgttgaaattgtaaaaggctttccggcattcgaaacagatccaccttggtcatcacgaatgccacccaccttgctatatgcgtcgatgttggaaaaaaaaataaaatgtcggtcttgtgaaaagtaaaatttttt

SEQ ID NO: 22099 - DNA, 645 bp, Gossypium hirsutum
  unsure (1)..(645): unsure at all n locations
  Clone ID: LIB3825-022-Q1-K6-G11
ctttgagagagaaaaaaaaaaaggaaagaagagtttgctttgtggtttgtgataatcttcaaaggcagcagcttttttttaaacaagcttaaaaaccaagagaaagtagcaaaaggtggcagccagcaacagcaacagaagtagcagatagcactagcagacattgttgttttcaaagagaaaaaagaaaaagaggtgggctcaggttcagctgataggagcaaagaagctgtggggatgatggcccttcatgaagcacttagaaccgtttgtctcaactcagattggacttactctgttttctggaccatccgtcctcgcccgagagtgagaggtggtaacggttgcaaggttggagatgataacggcagcttgatgttgatgtgggaagatggattttgcaaaggaagggttacaacagaatgtttggaagagattgaaggagaagatcctgtgaggaaagctttcagcaaaatgtctattcagttatataattatggagaagggttaatggnggaaagttgcatcagataagtgtcataaatgggtattcaaagaaccaactgaatgtgaacccaatatctccaattattggcaaagttcttttgatgctactattgctgntattcaagctggccatggtct

SEQ ID NO: 22100 - DNA, 375 bp, Gossypium hirsutum
  unsure (1)..(375): unsure at all n locations
  Clone ID: LIB3147-003-Q1-K1-H1
cccacgcgtncgcccacgcgtacgcccacgcgttcgcccacgcgtgcgcaccaagctgccgttatcatctccaaccttgcaaccattaccacctctcactctcgggcgaggacggatggtccagaaaacagagtaagtccagtctgagttgagacaaacagttctaagtgcttcatgaagggccatcatccccacagcttctttgctcctatcaactgaacctgagcccaccatctttttctttttttctctttgaaaacaacaatggctgctagtgctatctgctacttctgttgctgttgctggctgcccccttttgctactttctcttggtttttaagctcgtttganaaaaaaaaaaannnannnnnanaa

SEQ ID NO: 22101 - DNA, 833 bp, Gossypium hirsutum
  Clone ID: GOSHI-09MAY01-C38889_1
gttattggtgaagaaacctctgagacagaatcgggggattcacttaaatgccacattgggcaagaagtgaaccatttacatgaaggtctaaagcatgctttgaaatcagaactggaaaaggcttctcctgccctcgggcgcagtgcaatttacttgaaagagtcccgaattaatggtttaccaaggtatttgactattcaattcgttcgttttttctggaagagggagtcaaatcaaaaggccaagatattgcggaaagttgattatccactggagttggatgtttatgatctatgttcagatgaacttcgcaaacaattggaaggtcctcgtcagatcctgagggatgaggaaggtaaaaagctcggtctgaaagctaatgggaaaagctccagctcaaaagatgatgatgtcaagatgatcgatggagaggggtcatccaatgcaagtggagaatcaactgtgactacatctcaagaaggggttccctctgacaaggaaacacgtttaactgggatttatgatttggttgctgtgctgacccacaagggccgaagtgccgattcagggcattatgttgcgtgggtcaagcaagaaagcgggaaatggattgagtttgacgatgataaccctatcccgcagcgagaggaggacattgttaaactttccgggggaggtgattggcacatggcatacatctgcatgtacaaggcacgcactgttttaatgtaatctttgtttttattatgaactgtactttcggtttttttttccccttttttttatttgcttcgaacatgagaaattgtgaaatggccaaatagatatttact

SEQ ID NO: 22102 - DNA, 625 bp, Gossypium hirsutum
  unsure (1)..(625): unsure at all n locations
  Clone ID: LIB3829-005-Q6-K6-A7
taatactgcaaagctgtcctttctttggaatccttatacaaatgggctttgagtggcactccactgcagaatcgtgttggagaactgtactctttggttcgcttcttgcaaatagttccatactcctattacttgtgcaaagattgtgactgcaaaactcttgattatagttcatcaacacaatgcccaaactgcccccataattctgtgaggcatttttgttggtggaataagtatgtggctacgccaatacaacattatggaaatggtgagatcgggaaaagagctatgatattgctaaaacacaaaattttgaagaacattgtcctaaggcgtaccaagaaaggcagggctgctgatcttgctcttcctcctagaattatttccttgagacgggacaccatggacattaaagaaaccgactattatgaatctttgtacagtgaaagtcaggcacaatttaacacatatgttcaagcaggaactgtaatgaacaattatgctcacatttttgacctcctcacacgcttgcggcaggctgttgatcacccttaccttgtagtatattcgagtactgctgcacanagagctgggaacatagtcaatggtgatagggatgatgatg

SEQ ID NO: 22103 - DNA, 384 bp, Gossypium hirsutum
  Clone ID: LIB3145-055-Q1-K1-E11
cggacgcgtggggttggagttcgattgagctttggtcaaagaaattttgcaaaaatgtgtgtaggaaaatgtagtatgttgttcctatatacaggtagtgttgctagacttgaaatcttggggaattgacgggtatgtttggtttgcgaatagcaaatagatccatactcctattacttgtgcaaagattgtgactgcaaaactcttgattatagttcatcaacacaatgcccacactgcccccataattctgtgaggcatttttgttggtggaataagtacgtggctactccagtgcggcgttctggaaatggtcagatcggtaaacgagctctgatagtgctaaaacacattgttttgaagaacattttcctaagacggccc

SEQ ID NO: 22104 - DNA, 454 bp, Gossypium hirsutum
  Clone ID: GOSHI-09MAY01-C38789_1
cccacggttactgcacaaccatctggtacttctggtgccaccaccaatgtctcagtcatcacgagtttgcagaaagcagatgcgatccgtcaggctgatgcgagtgatgacagtgaagatgaggataactggagcgacacttaattatcttggaacatggatgcatcagataattgcaagtaaatcctgccagtctccattgagtatttttcacaattgggtttggagctcttcatagctgtctttgaattaaaccctctctttgatcgagccattgccatggatggacaaagctgtgatattgattcaaccaggtttggctttggttaccatgtgttaacaaatgttgcataaatttctcacattcaaaagattgataaacatcatgcatccatttagatcacgtatatcaactttggcacagatattaagtctatggcttctgctattgcct

SEQ ID NO: 22105 - DNA, 513 bp, Gossypium hirsutum
  Clone ID: GOSHI-09MAY01-C38769_2
ggttaatggaccgagtgtgaagcatgtggtgaaggccagcctggatgatgacagacatgattactattctattgggacttatcatgagaagaatggtacatggattcctgatgaacctaagattgatgttggcattggactaaggtatgattatggtatatactatgctgccaagactttctacgatcagaacaaaaacagaagagttttgtggggttggattggagaatccgatagcgaagctgctgatatgcagaaaggatgggcatctgttcagagcatcccgaggacgattttgtttgacaagaagactggtactcatttgcttcagtggccagtggaagaaatagaaagtttgaggttgaagagctacgaatttaaccaggtgaaagtccaggccggatctgttgttcctctagatgttggtccagccacacagttggatatcatagcggagtttgagatagataacgaggcgttagagaaaacaacagggtccaacgtgccattccg

SEQ ID NO: 22106 - DNA, 1087 bp, Gossypium hirsutum
  Clone ID: GOSHI-09MAY01-C38769_1
ctaaggtatgattatggtatataccttagtccaatgccaacatcaatcttaggttcatcaggaatccatgtaccatgcttctcatgataaacctaagattgatgttggcattggactaaggtatgattatggtatatactatgctgccagaaattcttacgatcagaacaaaaacagaagagttttgtggggttggattggaaaatccgatacgaagctgctgatatgcagaaaggatgggcatctgttcatagcatcccgatgacgattttgtttgacaagaagactggtactcatttgcttcagtggccagtggaagaaatagaaagtttgaggttgaagagttacgaatttaaccaggtgaaagtccaggccggatctgttgttcctctagatgttggtccagccacacagttggatatcatagcggagtttgagatagataacgaggcgttagagaaaacaacagggtccaatgtaacattcagctgcagcagcagcggtggaactgtagaacgtggggcattgggaccatttggtctgttggtgcttgcggatgacagcctcagtgaacagacacctgtatacttctacatcgccaaaggatccgatggcaaactcaagactttcttctgcaatgatcaatctcgatcatctgtagcatctgatgttaataaacaaatttatgggaacttggttccagtactggagggcgaaaaattatccctcagagtcttggtggatcattcgatcgttgaaagctttgctcaaggtggaaggacagtcatcacatctcgggtttatccgacgaaagcaatctatggagctgctaagctgttcttattcaacaatgctactgaggccagtgtcagtgcctcacttaggatctggcaaatgaactctgctttcattcgaccttatccaaacgataaggagtcccaataggaccgaatagaagttaatccaaaagtcaccattgattaattaattattgtacctcctgctattcaaaggaaaatgaagtttcttgttttttgtactagttattcttttcggctttttagtaggccaataaaaattttattag

SEQ ID NO: 22107 - DNA, 602 bp, Gossypium hirsutum
  Clone ID: GOSHI-09MAY01-C38639_1
ttctctcaccagccacaaggaagaacttttgttccctgttggaagctggttatagttgtatcgtagtgcctggtggagtgcaagagacatttctcatgcagcatgattctgaggttgcattccttaagtcacgaagaggatttgttcgtatagccatggaaatggggtgtccactggtcccagttttcgcctttggtcagtcacatgcgtacaagtggtggaaaccaggtggcaagctcatccttcaactttcaagagctatcaaattcgttcctatgctattttggggagcttttggaacacctataccgtatcaacatccgatgcatgtggtggtggggaaacctatttacttgaagaaaaatccccaacctactgccgaagaggttctggaagtgcatgaccaatttgttaaagcacttgaagatctcttcgagagacacaaagctcgggttggatacgatgaccttcatttaaagattctttagtttcagcttattttaagcgaacagtgtttctttatttcccaatttcttgttccctcgcgttcactagcgatgcctcaaggaactactcggtcattaaatttagttatttacatc

SEQ ID NO: 22108 - DNA, 355 bp, Gossypium hirsutum
  Clone ID: LIB3145-057-Q1-K1-F5
tgattctgaggttgcattccttaagtcacgatgaggatttgttcgtatagccatggaaatggggtgtccactggtcccagttttcgcctttggtcaggtaagtagtgcttgttttctttatcattttaattctcggaatccccttttcccactctttttgcagcttcagatgcagaaaagtgaagctaatttccttgctgttttcttacttgtgctgcagtcacatgcgtacaagtggtggaaaccaggtggcaagctcattctttaactttcaagagctatcaaattcggtcctatgctattttggggagcttttgggtatgcactaaattattctacttaccttttatgctca

SEQ ID NO: 22109 - DNA, 800 bp, Gossypium hirsutum
  Clone ID: GOSHI-09MAY01-C38149_1
cttgctttacagcagtttcttccctttcatagttgctgaggatgatgtttgttgagagagccgaatgcttgagagtttactggagattactgacactgatgccgatgttggcagaatggaagccaaaaatgtagccatggacttcattcatgaagttggttggcttcttcatagaagtcaattgaagtctagattgggccagttggatcctagctcagaatccttttctctaaggcggttcaagtggcttatggagttctctatggaccatgaatggtgtgctgtagtgaagaaacttctaaatattcttcttgatggaacagtgggctctggggagcaccactctatctaccttgcattaacagagatgagtcttcttcacagagctgttaggaaaaattgtagacctctagtggagctccttttaagatttgtccctgagaagacttcagatagattaggatttgaaaacgagacagtagctgatggtgttcataaaagctacttgtttagacctgatgtcataggtcctgctggtttgacccctcttcacattgcagcgggtaaagatggctccgaggatttgctggatgcattgactgatgatcctggaaaggctggcattgatgcttggaaaaatgctcgagacagcaccggttctacacctgaagattacgctcgcttgcgtggccattactcttacatccacctggtacagaagaaaattaataagagaccaccttctgggcatgtggtcgtcgatattccaagtgccgtctctgactgtagcacaaacgaga

SEQ ID NO: 22110 - DNA, 1099 bp, Gossypium hirsutum
  Clone ID: GOSHI-09MAY01-C38079_1
cccacgcgtccgcccacgcgtccgctcgagagtgagttcttttcaacggaacctcttccctgtgatcctttaagcttgccaaagtatcctccaagcaaagagttagatgcaaaattaagggatgaggaagctagaagacgagtggctggaaccaaaggcctgagacctgatcttgacaggagagcaactagagaatctcgagctgttcccgcgcctccggcgaatgctgaattagtcatgtcaatgcagaaaagacaatcaaattcaaagagccggagtgagaagtttaatcctcatcccgaagaagttgcctcaggctttcctatagacccgcctagaccatcacaagcgatagaatcaaatgcggattcacagggaaatcatcccaagagagcctcacattcggggccactggctcaccgtgctgcttgggcgaagtctgggaaaaacctggatgatgctccgaaaatttctaccggggctgacttgtcaatgatgtccggtttagtggcaccaaggactagtcttgcatctgatgattgtacggaaaaatctggttttccacaatcaaaagctccaaaaatgattgctagatttccagggtcctttaaagagtcctcagaatctggcatccaacaggatccaaaaaacaatgagcaggagaaagaagatggaagaaataacaacaaagatccagctctgcttggttatggttcaaagggacacaaaattcactattctggtcctttattagtcccatcaggcaacatggatcagatgctcaaggatcatgatcgccaaatccaagaagctgttcggcgagcacgtgttgacaaggcaaagatgagaaaaaatctgttagaagggaaccaaatatcaaccaaatcattatttgtctccggtcgttgaggtaaactctgtaagcagcaaatcagtatgaacattgtcaagatgatcccacaagcaaatcagtagagtggattttcttgtataggttgatgcttttaggaaaatggctagtgggggcatattttagctaagcttatggttttattgagaaatcattctatgatttaatcattgtgtatttctttccacc

SEQ ID NO: 22111 - DNA, 494 bp, Gossypium hirsutum
  Clone ID: GOSHI-09MAY01-C38349_1
aatcaagacaagaacaaatacaacacgcctaaataccgatacgttgttcgatttgtatccgaaaatctgcttgttctaatgatatgttttactgattttattatgtatagagagtacataatgtagcctttgaaattgatatgtattgactggaccggttagttggacccgttggattgagaactggctggggtactggtctgagaagatgtattagattggttgacctgggaactcgtacggactggttgaattggaattttttaatgatttatttaatagaactggttaaaccagcaaaccagtggcctgacaagtttgagcaccagaccgattttgaaaactttgggcaaaagcttactagttcaaacagttgcattaggttctctaaactgattcgttgttcgatttgtatctgaaaatatgcttattttttacaatgtcttataacttatagttgataaatcttttgttttcataccatggttttatgt

SEQ ID NO: 22112 - DNA, 428 bp, Gossypium hirsutum
  Clone ID: GOSHI-09MAY01-C38379_1
aagaaatttagtgtcgtcttggttacgatggcggtgctcctgacagccaccatgcctccaatggcaaccgccgctcgcaaagaggcggtgactctccccgctgactcaagctcaacagccactttggttaacattttccacgttaaaggaaatcctgatgccgaatgcgtcccgaagtatgagttttgcttatttgcagaaaaggaatgctgtggtaatggcacatcctccggagggggcttcccgccgtatttccttaattgaaggaggggggctaaataaggacctttatggggtttcatggctggtttaataatttaattacttggttcaataaacgtaaatgttaaatgccttttgtctttttagtatactctaaacttattttactggcatttgtaatttttcttttcaatgatatgattttt

SEQ ID NO: 22113 - DNA, 800 bp, Gossypium hirsutum
  Clone ID: GOSHI-09MAY01-C38279_1
cccacgcgtccgtggcaaactgtctcaagatgatgaggcccttgctattgctaccacaatgccgaagctcaagcaactcgaggtagcatacttgcttattagcacagaaggtgtgggtaagatacttgaaaactgccctgcgcttgaattattggacgtgagaggatgttggaacgtgaagctggatgaaaatcttgtcaagaaattctcacggctgaaggtggtcggacctctcggtgcggattattttgggatgaagggctgggatgattgttcaaactattcaggttcctcaggttacttggcctgggactttgttgctggagatgtcggtattgattacgatgatgagatatcagatgtggattgggaagacgaccaaagtatagaagatgtgggaatgaggttctacgacggttttgacttggaaaatgctgcgttcgattggcccctctccccttgaagggattgttatccattcgagctctacacagactgcggtgagcacttttttgattcccctttgctatgcacaaacattgttcttataaggtagtagtatataaaacaagctttcctatgagtatttgtaataataaaaaaatagaacttgtaatatgtagcaaaagaatgtgtttccctagtaattgagatggacatgtcatagcattttcatgccccatgtcacatgctttatgtactgtacctacaataattatacaattagtgggaattgtaagatggttcaaaggtgtgatgatgacatgatggaatataaagaaattaatgtcagatgtgac

SEQ ID NO: 22114 - DNA, 459 bp, Gossypium hirsutum
  Clone ID: GOSHI-09MAY01-C39919_1
ggacaatagatatctcttgtccttccatgatggactggttcttcggtggtttacagttccagttagagcaccatttgttccccaggttgccgcggtgccatttgaggaaggtttcccctctggtgagggaactctgcaagaagcacaaattgccttaccggagtctgtctttctgggaggcgaataaatcgacgattaggactctgaggactgccgccttgcaagctcgagacttaactaaccctgccccaaagaatttgttgtgggaagcttttaatacccacggctgagttaaaatttttttttggcttggtcccggcctagatttactgctttttagaccgtcagattttaaattgctctgcatttcaatacggtgttcagttattctatcttaattttatgagttttgtttttgttggcccaaaaaaaaaaaaaaaactcgagagttctctctct

SEQ ID NO: 22115 - DNA, 541 bp, Gossypium hirsutum
  Clone ID: GOSHI-09MAY01-C39939_1
aaaaaagtctacattgctctttcgttccatgggttaaaaacccagggcaaaatcggaaaacatgattaccatcctccacttcttgctgacacctcaggcaccgatcttccgtgatcactctcttcagctttaaattagaaaacgagggaatgtaattccactaaatcctctatattttaatttttactttcgagggcatgttcaaactccataatttcttgtaaaaatttttggtatcggtttgtataaaattactagggatcagtgtagattcttgtaatagtttataggcacccctcactaagaagttccctgatggctcccctcttcacacttgaaaatcgtcatagatcgatttcgccaacgggatttgtaggattttcctagcaatattcgcgtcaaaggtattgacaatcaacttattattccaagttcaaaaaaaaaaataaaacaagaagacgtttttacaacatgtattttagaaaaaaaaatgctcgtggttgctataacaaacaatattttctttttaaggggggggggg

SEQ ID NO: 22116 - DNA, 548 bp, Gossypium hirsutum
  Clone ID: GOSHI-09MAY01-C39879_1
atgagaactggtattggtttttgttagaactgaaagctgccctgtcaacatcttgtcctataacatttgttgcagacatacagaagggtttacgggagtcaatctctgaaattttcaagggatcatttcatggttattgtctccgatacttaactgaacagctcattagagacttgaaagggcagttttcccatgagatgaaacggctcatgattgatgacctttataatgcagctttggcacctagacctgaagccttccattcgtatatcaacagcatcaaaaaaatttcactggaagcttacaattggatcattcagagtgagccccaatattgggcaaattcatatttccagggtgctagatataaccatatggcatcaaactttttggggaactcttttatagttgggtgtcagatgcacacgaattacctataactcagatggttgatgtcatacggcaaagggttatggagttaatttattcccgcagggctgagtctgatcattgggtaagtaggcttactccatgcatggaggaaaaat

SEQ ID NO: 22117 - DNA, 800 bp, Gossypium hirsutum
  Clone ID: GOSHI-09MAY01-C39819_1
gaaactctgggcattggacaagccaggaattattcctccctggagtcagagcaacttgctgttcattcatctagagtacctaaactgcatgctagtgatatcaatattccaaggaatgtatcttgccctgtttcacccataggaagccctcttctacattcaaggtcaccgcaacatctaaacggaagaatgtctccttctcccatatctagccctcggaccacttcaggctcgtctacacccttgacaggtggcagtggtgctataccttatggttatcttaaacaatcgccttactttcaggagggtcttggtagcatgccaaagccctcaaatggactttatgtcagtggctcttcctgtcatgataataatcctgacatttttcgaggcctgcaagcaggttctcacatcttttctgaactggtgccatcagaaaatgacattttaggagctggaagatcagtccatggggaatcttatgatggacagtctgtattagctgatcgtgtttctcgacagcttctgaaggatcacgcagcaatgagcccatccctggatctaagtcccagctctcctttaccttaccggagtgttattatctaaactcagctttgaagattcaccgatcagaatgtcttttgggtcttacgggatcaatttgtattcatcacttttaacttcttctaaggcagcatatgggtcaaatatggaacctgaacagaaattcgaggaataaggttgagagcaaggaatgacgtgcagtagtcattgccaagatcgggttagcgtcataatca

SEQ ID NO: 22118 - DNA, 520 bp, Gossypium hirsutum
  Clone ID: GOSHI-09MAY01-C39549_1
cgttccctctctttaacgtgttcgccgttgaaggctgccgatccgacttagtcataaacaatgggccgcaaagctgatgcgctttatataaatccaaagaaatttggctctcttacaaaaccttgcatgaaggaaatgatatcattcctaaattgcatggctcttaacaaggttaatgatgaaaaatgcatccggcagaaggatcttttgagtgcttgcatggatgctcagtctaccaagaataggaagccatggggcagcattaattaccacttgcagaggcttaataggggaaggaagtaatgtgggttttctttaaagatgaatgttgaatttatgcatcattcttctagttcatcacttctagtaagatgatgtgcattaggttgtagctacagagaacattcatttgtatttttttttcttgcggttggttgaaattttggagaaagatgctcaatgtagcttaaaccaattcctgtcacttcaaagagtagcaataaattggattatataccag

SEQ ID NO: 22119 - DNA, 578 bp, Gossypium hirsutum
  Clone ID: GOSHI-09MAY01-C39409_1
gttagttcttggtgctgggactctaccttttggtacccttttcatcgagcttttcttcatcatgtctagcatttggatgggacgagtgtactatgtctttgggtttctgttcattgttctggtcttacttgttgtggtttgcgctgaagtatctttggtgttaacttacatgcatctgtgtgtggaggactggaaatggtggtggaaatcgttctttgcatccggctcagttgccatctacatcttcctgtactccataaactatctcatatttgatcttaagagcttgagtggacctgtctcggctactctgtacttggggtattctctcttcatgggtctcacaatcatgttcgcaactggcacggttggattcctttcttctttctgggttgtgcattatttattctcttcggtaaagctggattgaagatggtttctccaggtatgcacacaaaaaatggcacactgaagaggtaggtggacaatgaagaggatcttgagaaaagaattcaacccttatattagtcagtcttctctttacaagtattttgttatcttgagctttactttagtgg

SEQ ID NO: 22120 - DNA, 693 bp, Gossypium hirsutum
  Clone ID: GOSHI-09MAY01-C39099_1
aacttttctaggtgttccccaaaataatgttcacccacatattcacaatatatcctaataaggtcattagaaataaaaaaagagctttcacttactttttcttttaattgtaagaccaaaaaccattctctatcattcctcatctctttagagcttctcctctttctctcaatttttttttttcctttttgcatgcttgataagaaattgatggcaactttgatttttatttccttaggtttccatttttttaaccctagtgtgttttttactcatgggctttagtcaaaactcttactaaaacaattggaccgtgctattatgatttgatcgagtaattacatatttcaagtagaaaaattgtgtgaatggattgatgtattagtctaaaacttggttcactcttaaaggaaacatcttaattttatcttctcacgagtgaattgaatgttactaatatttactctatcaggatatatgaatttgactgatttttggctttgctgttctgatttgagttgtgttggggactgaaaactagacaacatttggatggttttctttatatatgcagctcttagatcttcatatgcaattaccgttatgcacttgataatatcaatttcttgtgtcaagtggttgagtatgtgaatgtgcacaggtgtggcagatgagaactggaccacgtctctt

SEQ ID NO: 22121 - DNA, 597 bp, Gossypium hirsutum
  Clone ID: GOSHI-09MAY01-C39339_1
gcgggtgtttacattcatgactgcactgagagacttggctgtggagagtgggttattcctgaaaaagcttgacaaaaaattggaaagaactctcttgcattcatatcgcaaggatttgacttctcaagtatctgctgaaactgacccagtttctcttctgccgaaagttgtttccctactttatatacaggttcacagtagagctcttcaagctcctggacgggcaatttctgttgctgtaactcgattgaagaataaactagatgattcagcatacaagatcttgacagatttccaaactgcaacagtgacacttttagcacttatttctgctgcagctggtgatgaagcagactgttcatctgatagaattttgagtaaaaaggagcttttggagggccaagtgccggcgctaaaagctttggttttaggctcctctggctctcaagcttgacagaactcaagaggaccatcacttggttatggtttcattgataactgactcactctgttgttatagacattagtgccccccacctccttccattttctcctcaaatcaagcatactagctggactgaaagttatgttttcagg

SEQ ID NO: 22122 - DNA, 515 bp, Gossypium hirsutum
  Clone ID: LIB3828-026-Q6-K6-B4
cacatatagtcgctataattcaatactcaagggagcttgaaataagaaacgtatacggaagttggcacatcccatttctctagattccatgtcacattttcttttcttttttttcctgagaacataactttcagtccagctagtatgcttgatttgaggagaaaatggaaggaggtggggggcactaatgtctataacaacagagtgagtcagttatcaatgaaaccataaccaagtgatggtcctcttgagttctgtcaagcttgagagccagaggagcctaaaaccaaagcttttagcgccggcacttggccctccaaaagctcctttttactcaaaattctatcagatgaacagtctgcttcatcaccagctgcagcagaaataagtgctaaaagtgtcactgttgcagtttggaaatctgtcaagatcttgtatgctgaatcatctagtttattctaaaataagagacagcaaagcattacataaaaatatttttggttgaactatttaaa

SEQ ID NO: 22123 - DNA, 737 bp, Gossypium hirsutum
  Clone ID: GOSHI-09MAY01-C39279_1
actgcaagatgcccttcgaatttatgaaaagcccatgccagggtttcccccggtggagattgccgctggcctcactgatgtttctgccatctatgaatcaatgaatgaccttgatcaggcaatcaagttgctgcagaaggccttaaaaatatacaatgatgtccctggtcagcaaagcacagtagctggaattgaagctcagatgggagttatgcactacatgttggggaattattcagaatcttacaactccttcggcagtgccatttcgaagctacgcatatgtagagacaagaaatctgccttcttcggcattgctctcaatcaaatggggctggcttgtgtgcaacgctatgctataaaggaggctgttgagttgtttgaagaagccaaaagcattttagagcaagagtgtggaccgtaccaccctgatacactcagcgtatacagtaatctcgcaggcacttacgacgcaattggcaggttggatgatgccgttgaaatactggagtatgttgttcagaccagagaggaaaaactggggacagcaaattctgtggtcgacgatgagaagaaacggttggctgaactattacaggaagcaggaagagttgtgtgcagaaaagccagatcattagaaaccctttttgatgccaaccctcatcataattctaatgctgagggatttaaggtatgaatatgctaaacatgaatttatgtactttataatatattat

SEQ ID NO: 22124 - DNA, 581 bp, Gossypium hirsutum
  Clone ID: GOSHI-09MAY01-C39219_1
gatttttgggttggtgggtttggctcaagacaggggagtccaaaaaaaagaagaacctaccatctaagtgatgctcttaccaaaaccaacaactcacgggtatcccaattcatgggccgccctattggtgtccctggacaacccgcgtatgtgggacatgaggtctgcatcatgggaaaggcaatatctggggcaacaattttatctgagagtctggaatcctgttcggagtcttgctaacgaatacgacattccttctaatgtcttactctgcggtaaagcagttgggcgccacccttagccagccggtatgcccctagtggctattgtctgttaccagtcatcagagtttgactgctgataaaatagattgagagagaagaaattggattgaaatgtttggcctttattcatttgtatatcttagaaagcaatagactaaaattatctattccgatagttattactttattatctcttcaattcgtgttctgcaaacagagttaaaattatgaggttttgtaaaattaatcattttcttttaagtattaggtgtgcaattttatatatatttcaatttt

SEQ ID NO: 22125 - DNA, 702 bp, Gossypium hirsutum
  Clone ID: GOSHI-09MAY01-C34999_1
cccacgcgtccgcattgagacattttttaaaacagatagtgtgtgtgagtgagagagaaagatatagaaaaaatggagctctcacagcatggttccttagaggagttaatggctgctgctccaagaagggacagttggaccactttttcaaatggggtgaccgagttcttccctaatggatggaacttcgaatcttttgatgctacaccaccaaatcttgccttcttagggttctctacaacaacaactgatgaaattgaaaacccaagctttgaatgtccttttagtgaccaaccttacccttttggtgatgggttttcagtatcagagatggatgcttcaacttcacctttcccacctgctcatgaagattacccatcaatggttgatgatgaagatcagcttggccttctcaccactgaccaccatcatcagcagcagcacagcttggaagaaatgaagcatagttgcaaagttgaaatggagcaaactagcaacaacattcacggtttcaacatgggcttgtttgtagagaaaaagactaaagccaagagattagaaggtcaaccttcaaaaaatctaatggctgaaaggaggaggaggaaaaaattaatgacaggctttcaatgctcaaatcaatattccccaagatctgcaagatggatagaacatctatacttggagataccctggattacctgt

SEQ ID NO: 22126 - DNA, 1007 bp, Gossypium hirsutum
  Clone ID: GOSHI-09MAY01-C34809_1
aaatcgtgtcatgctttttaggacagcacttgctttaatggagttatatggccctgcactggttacaactaaggatgcaggagatgctgttaccttgttacagtcattggctggctcaacatgcgacagcggccaacttgtattgacagcttgtatgggttatcaaaatgtaaatgagaaaagactacatgatttaagagagaagcatcgatcagctgtaatagctgcagttgaggaaagatcaaaggggcttcaagcttggagggattctcagggcctagcatctaagctatataattttaagcaggatcctaagtccatgattatggaaacaaataagacaaaagcaaatggggatctctctcattctgagtctggttccacaaactctgacgaagttcttattagtctgactggagatgctgacacaggtgctgttccagatcttcaagagcacgttgtgtggttaaaagttgagttgtgcaggttgctagaagagaaaagatcagctgtcctcagatctgaggagctggaaacggccttgatggagatggtaaagcaggataatcggcgccaattaagtgctagggtggagcaattagagcaagaggttgctgagcttcgtatggccctttctcagaagcaggaacaagaaaatgcaatgcttcaggtcctaatgagggtagagcaagatcaaagggtgacagaagatgctcgcagatttgctgaacaagatgcagctgcacaaagatatgctgttcaagtgcttcaggaaaagtatgaagaggccgctgcttcacttgctgaaatggagaaaagagtggtaatggcagaatcaatgttagaggctaccctacagcaccagtctggacaaagtaaagtccaaccttctccacgatcatcacaccctgattcatcagcacgcagcaatcaagagcctcaacaagaaatccctgcacggaaaattagcatactttctcgaccatttggactcggctggcgtgata

SEQ ID NO: 22127 - DNA, 673 bp, Gossypium hirsutum
  Clone ID: GOSHI-09MAY01-C34839_2
cccacgcgtccgcccacgcgtccgcgcacgcgtgcgcccacgcgtccgccgatatcctaccgaagccagattctgactatctagttcctcacccctcaggtaaatcgtctctcctttctcgaatgcgatctttgctattctgtgagcatctaagttttctgacctgttaatatacgggggagtaagatcttgaaagtcagatttcttctgttgaatatctctgatgatgactccaataactgatttgtctgtggaagtctcttgacatttctttattacagtttttgaatcccccataagtttcactgaatggattcgtaatgaaatccctaactttactccttctaaacatgcatgagcctctgctgcgaaaggagaaggaacatttctgtgaataactgtttttaacgctatcaagactcccctcgtgtcccaacctacaaggccggacgctgaactggaggtattactggcgtacgctgcatcaaaatggatcctggctggcggtgtaagctcttgtactctatagcttctgcatgtgaccgccttaggttttaagcctttcaatcctttctgttctgactcatattgttgggatgttaaggactaaggcccttcctggaatgatatctctctcatgaataatttgattttcataaaaccatatccacca

SEQ ID NO: 22128 - DNA, 609 bp, Gossypium hirsutum
  Clone ID: GOSHI-09MAY01-C34839_1
aatcccccataagtttcactgaatggattcgtaatgaaatccctaactttactccttctaaacatgcatgagcctctgctgcgaaaggagaagaaacatttctgtgaataactatttttaacgctattaagactcccctcgagtcccaacctacaaggccggacactgaactggaggtattactgtcgtacgctgcatcaaaatggatcctggctgtcggtaaaaccatatccaccatagcgcatagcaaaaggaaaagcattggtcattgcttcccctcttgaaaacccagggcaatctcgaaagatgtggaggctgtcttcgacctcagagctgcaccggggacatctgtcgtttgaaaccactctccttatactgagattaacatagtttggaataaagtcccaagagatccgccagattgtaaacgtaattttagatggtagctggaggctccatagctttttttataaaaatcctttgatttcggttggaaataaatagtcacttaggatccatatttgcattttgtaatagtttataggcactacgaacagggaactcaccagataattcccctttccaggcctgaaaatcatcatgcgcaaa

SEQ ID NO: 22129 - DNA, 465 bp, Gossypium hirsutum
  Clone ID: LIB3582-041-P1-K1-F2
cccacgcgtccgatgagtttcactgaatggattcgtaatgaaatacctaactttactcctcctaaacatgcatgagcctctgctgcgaaaggagaaagaacatttctatgaataactgtgtgtaacgctaccaagacacccctcgtgtcccaacgtacaagaccggacgctgaactggaagtattactgtcatatgctgcatcaaaatggatcctggctgtcggtggcaatctcgaaagacgtggaggctgtcttctacctcagaactgcaccagggacatctgtcgtttgacaccgctctccttattctgaggttcacaaagcatggaataaagtcccaagagatccgccagactgtaaacgcaattttagatggtagctgaaggctccatagttttttgtaaaaatcctgtgtttcggtttgtaataaatagtcactaggatccatatttgcgttttgaatag

SEQ ID NO: 22130 - DNA, 436 bp, Gossypium hirsutum
  unsure (1)..(436): unsure at all n locations
  Clone ID: LIB3145-007-Q1-K1-A11
cccacgcgtccgcccacgcgtccggaaaggagaagaaacatttctgtgaataactatgtggaacgctattaagactcccctcgagtcccaacctacaaggccggacactgaactggaggtattactgtcgtacgctgcatcaaaatggatcctggctgtcggtaaaaccatatccaccatagcgcatagcaaaaggaaaagcattggtcattgtttcccctcttgaaaacccagggcaatctcgaaagatgtggaggctgtcttcgacctcagagctgcaccggggacatctgtcgtttgaaaccactctccttatactgagattaacaaagtttggaataaagtcccaagagatccgccagattgtaaacgtaattttagatgggaactcaccagataattccnctttccaagcctgaaaatcatcatgcgcaaa

SEQ ID NO: 22131 - DNA, 660 bp, Gossypium hirsutum
  Clone ID: GOSHI-09MAY01-C34449_1
tcgcgatctaaaccgaggttgcagaggagaagacggtaaagccatgatcgcccccgaccgctacgagagattcgtcgtccctgaggggactaaaaggtttcttacgagagagacaccaaaatcataaatgcggcgaccttcaccatcgagagagaagaccacactattggcaacatccttcgaatgcaattgcacagagatgagaatgttttgtttgctggctacaagcttcctcaccctctgcagtacaaaatccttgttaggatccacacgaccagtcagtcttctccaatgcaagcatataatcaggctatcaatgacctggataaggaacttgatcatctgaagaatgcatttgaggttgagctagaaaaacattcaagggacttttaatgcctgtttgaggtgctgttacctttccggtgcctttttggtctgattttaaaaagaaaagaaccgatatctttgagacatttttcttgtttttactgatgtgatgcggtaaaagttgcaatgcctgctattgaggcttctgtaaggatatactgttctgaagtctgtctcaaagctgttcaagaaacaaaccttctgcgtttctgtattatgtttttctaccaagctaacagcctggtaaatgttacttatctgctatataattgt

SEQ ID NO: 22132 - DNA, 608 bp, Gossypium hirsutum
  Clone ID: LIB3829-019-Q6-K6-A2
tctccggcggcggtgagagcaagagtttgcagaagagaagagaaagagtgagaaggccatgaacgcccccgaccgttacgagagattcgtcgtccccgaggggaccaaaaaggtttcttacgagagagacaccaaaataataaatgcggccaccttcacaatcgagagagaagaccacaccatcggcaacatcctccgaatgcaattgcatggagatgagaacgttttgtttgctggctacaagcttcctcaccctctgcagtacaaaatccttgttaggatccacacaaccagtcagtcttctccaatgcaagcatataatcaggctataaacgatctggataaggaacttgatcatctgaagagtgcatttgaggttgaggtagaaaagcattcaagggacttctaatgtgtgtttgaggcgctcagttaaccaggggttttgtgttatgactttgaaaggaaaaacaaccaaataactttgagacatctgcaatgcatgctattcaggcttttgtaatgacactattttgaaatctgtctcaaagttgttcaagaaacaatccttctgctttctctattatgttttcctaaccaagctgactgat

SEQ ID NO: 22133 - DNA, 390 bp, Gossypium hirsutum
  Clone ID: LIB3135-021-Q1-K1-E3
caagagtttgcagaagagaagagaaagagtgagaaggccatgaacgcccccgaccgttacgagagattcgtcgtccccgaggggaccaaaaagtaggctctttatccctaaatcctctgtttatcaaactcactgctacatatttgttggttaaatttttagggtttcttacgagagagacaccaaaataataaatgcggccaccttcacaatcgagagagaagaccacaccatcggcaacatcctccgaatgcaattgcatggagatgagaacgttttgtttgctggctacaagcttcctcaccctctgcagtacaaaatccttgttaggatccacacaaccagtcagtcttctccaatgcaagcatataatcaggctataaacgatct

SEQ ID NO: 22134 - DNA, 367 bp, Gossypium hirsutum
  Clone ID: GOSHI-09MAY01-C34469_1
cgctataaaaaggtcttaagaatacatctggcatcaaaatcaatgcaacaaagtcgatgatagggcactgtctgggtgcagcgggcggtttagaagccattgccactgtgaaagccattaccacgggatggctgcatccctccataaaccaatttaatccagagccatcagttgagtttgacactgttgccaacaaaaagcagcagcacgaggttaatgttgcaatctcaaattcatttggatttggaggacacaactcggtggtggcattttcagccttcaagccatgaaagtctgttacttacgtgttctgcatttgctaggaaagatgatgatagagaaatattgatccttaaaagagcgagtc

SEQ ID NO: 22135 - DNA, 700 bp, Gossypium hirsutum
  Clone ID: GOSHI-09MAY01-C34769_1
gttttataagagaaagaaatggcaaagcttctgtgatctcccttctttccttatttatttgcattttctcctcactcagctttgcctatgcttcagctccagctccagctccatcgtccaatcaacaaatgagattcgaggtcttaggtcatgtttattgcgacacttgtcgtgttgaatttgagacatctatcagcgaacctattcccggtgcaacggtgaggttagaatgtaggaatcgtaccgacgaaaagatcacctatcaaagtccagaaataacggctggtgataaaggaaactataaaatccaagtgacgggcgattatgaagaatcagattgtgatgtaatgctagtgaagagccccagagcagattgcaatgatcccaccgaagagtggaggaaagcaagggtggttctcaccacattggatggggtttcgggtgaaattcgctttgccaacaaccttgggtttaaaaaaaaggaagctcttcccgaatgtaccaaagttttaacagaaatgggttactttgaacttcaaaaagaacttggaagcgaagctgtttgaggaaatatgttgggtaagttggactttttccatgaattggataattatgattatccttatgtatattcataatttattcaattgtctactaataaactcatgaaagaaaaaaaccctactttcttagctttttt

SEQ ID NO: 22136 - DNA, 359 bp, Gossypium hirsutum
  Clone ID: GOSHI-09MAY01-C34659_1
ctcagtgctgaggagtctcgcaagattagccaacttccacagttcaaagggtttccagctggggaatttgtatcagatgatggtccttacaagtctcttgaagagctttgggatggagagatttgattttcattatctaccggatttattacaaataaaccaaatggacccatatgcaaatctttatagtttggtggtattgtgtatatatgggaccatcattttattgtgttggaaccagcatttagcagacgagaactatggggacaataaaatgtgattgtggagcttattgagtcaagagtcatcctatttttctgtttgtcctttcttgtggagtaacatgttgcaagtattag

SEQ ID NO: 22137 - DNA, 1126 bp, Gossypium hirsutum
  Clone ID: GOSHI-09MAY01-C34159_1
cggccggacggccggacgacccagcgcccagcatcgggtgggaccgcacaatctcacaaaagtgagacccttgcatgagctgtgcgaagccgggcgctgctcaatcagaacaaagaaacgccatggaggcggtagctggagggaagctggatgaagctataaagtctctaacagaagctatcatgttaaatcccacctcagcaatactatatgcaactagagctagtgtatttgttaaatcgagccaaccaaatgctgcaatccgtgatgctgatgcagctttaaagatcaatcctgactcagcaaaaggatataaagttcgagggatggcaagggccatgcttggccaatgggaagaagcagcaagtgatctgcatgtagcgtctaagttagattatgatgaggagattggttccgtactcaaaaaggtggaacctaatgcacacaaaattgaagagcatcgcaggaaatatgaacgcctgcggaaagaaagggaactaaaaaggagtgaacgtcagaggcaacagaagaaagctgaggcacaagatcaggaagcattatctgcttttaaagatggccaggttattggcgttcattccaccagtgagctggaaattaagttaaatgctgctacaagaacatcacggctggcgatattgtacttcaccgcaacatggtgtggtccctgccgcttcatttctcctctctatacgagtttagctgcaaaatatgcaaaggtagttttcttaaaagtggatatagacgagggtagggatgtggcagcgcgatggaacattagcagtgttcctaccttcttctttataagaaatggaaaggaagttgataaggtagttggggctgataaaaatacacttgaaagtaagattgcccaatatgcaagctgattttgagcctatgcctatgaatgaaaggaagttagtctccagctacttgtaatgcccctttccttgcatatgcatgtgaaacatatcaataatgaaaagacttggcaatatcttaggaaaactgtaccatatgttttattaaactgacctgctgggggatggggttttttttaattagaaaaaaaagaagaagaaattctggtgctatatccagtcttcta

SEQ ID NO: 22138 - DNA, 379 bp, Gossypium hirsutum
  Clone ID: LIB3145-043-Q1-K1-F11
gcgggtcaccgcatatattctgtaacttatttatctttgaatttgtgcaggatcaggaagcattatctgcttttaaagatggccaggttattggcgttcattccaccagcgagctggaaattaagttaaatgctgctacaagaacatcacggctgatgatattgtacttcaccgcaacgtggtgtggtccctgccgcttcatttctcctctctatacgagtttagctgcaaaatatgcaaaagtagtgttcttaaaagtggatatagacaagggtagggatgtggcagcgcgatggaacattagcagtgttcctaccttcttcttataagaaatggaaaggaagttgataaggtagttggggctgataaactacacttg

SEQ ID NO: 22139 - DNA, 297 bp, Gossypium hirsutum
  Clone ID: LIB3135-014-Q1-K1-C7
tttgggttgagggtgggtcccgcgtacgtccacgcgttcgtggtgtatttgttaaattgtgccaaccaaatgctgcaatccgggatgctgatgcatctttaaagatcaatcctgactcagcaaaaggatataaagttcgagggatggcaagggccatgcttggtcaatgggaagaagcagcaagtgatctgcatgtatcgtctaagttagattatgatgaggtgattggttccgtactcaaaaaggtggaacctaatgcacacaaaattgaagagcatcgcacgaaatattaacgcc

SEQ ID NO: 22140 - DNA, 932 bp, Gossypium hirsutum
  Clone ID: GOSHI-09MAY01-C34399_1
gaggaactttaccgaccggggaactcgttgccatcaaacgagctcaacaaggttctatgcaaggtgggctcgaattcaaaacagagctcgagcttctatcgagagttcatcataaaaacgtcgtcagcctactcggattttgcttcgaacgaggtgaacaaatactagtatatgagtatgttgccaatggttctcttggtgatagtctatcagggaagtcgggaatccgactggactgggcccggcgactaaaagtagcactcggtgcagctcgaggtcttgcatatcttcacgagctcgcgaatcctccgattattcatagagatgtcaagtccacgaacatattattagacgaacgcttaaatgctaaagttgctgatttcgggctctcgaaaccaatgggtgatagcgaaaaaggtcatgttacgactcaagtgaagggtacaatgggttatctggatcctgaatattatatgacccaacaattgaccgaaaaaagcgatgtttatagctttggagtagtgatgttagagatagtaacggcgagaaaaccgatagagcacgggaaatatatcgtaagagaagtggcgacatcgatggataaaccgagaagtttatataatctccaagagattcttgatccaaccattggttcagatacagatacaataccccatgggttggaaaactttgtagatttagcaatgagatgtgttgaagaagcaagaactgataggcctacaatgggtgaagtagtgaaagagattgaaaacattatgcaagcagccggcttgaatccgaatgcggaatcagcttcgagttcggctacttatgaagatgcaaataagggaactcctcatcatccgtacgcttgtaaaatttggaccgaatttaatttggggtgaacccggttgagtgtcatttatattact

SEQ ID NO: 22141 - DNA, 430 bp, Gossypium hirsutum
  Clone ID: uC-gsronu33B109c10b1
aaaaatttgtagatttagcaatgagatgtgttgaagaagcaagaactgataggcctacaatgggtgaagtagtgaaagagattgaaaacattatgcaggtagccggtttgaatccgtatgcggaatcagcttcgagttcggctacttatgaagatgcaaataagggaactcctcaacatccgtacggtaataaaatttaaaggtattcattaaatgaaccggatttgatttgggttgaaccgattgagtgaggacttaaaagcctacaagatagaggcctttggaatttggatgtcatttctattactagtttgatttgctttctaggagcaatgaactttgtaacaatgagaggtgcttgagttgattgtgggatcttctatttttattttgttgcatattatatgataaaattgtaatataaaatttg

SEQ ID NO: 22142 - DNA, 467 bp, Gossypium hirsutum
  Clone ID: GOSHI-09MAY01-C34359_1
gaagaaaaaaaaacatccccagacacaaaatttgaaaattttgagattagatttttagaggaaaaaaggtaggttgactgttttgttttggctatggagatgtattcaagtgcaaacgactccgatttggctatgctggactcaattcggcaatacttactcagcgattcatcggaccttcgactcactgcttccactgattttacctcggctccccccatgttttgcaggagctcaagctttagccgtttgggcccctgtttcactgaaacctggggtgatctcccgctcaaagaagacgatggccgaggacatgctcggttacggactcttacgagatgctctaaccgtcggttgggcacccttcgataactctacgacgaatgtcgcgctgatgcaagccggcaaccgcatgaatttctaccgcagacatcggtggaaaaagtggataccgacgcggagaggac

SEQ ID NO: 22143 - DNA, 425 bp, Gossypium hirsutum
  Clone ID: GOSHI-09MAY01-C34259_1
ccgatgttcaagctggtttcacagctttatgaagtggtgcctcctattcttactgagttaggcaaggttaaaaacccttggcccaatgttgatgcacacagtggagtgctgctgaaccattttggtttaactgaagcttgatactataccgttctttttggtgtatcaaggagtattggaatttgctctcagctaatatgggaccgagcactatgattgcccctcgaaaggccaaaaagtgttacaatggattggcttgaaaattattgcaagaaagctaaagcagcttaaaatcggtggatgaattaattaagcataataatttctcacaaggattggtcttgtgatgagggtagcagctacctacatgggcaaacggcaagctgtttcgctttttttaataatttactggggaaattagatgt

SEQ ID NO: 22144 - DNA, 709 bp, Gossypium hirsutum
  Clone ID: GOSHI-09MAY01-C35989_1
cggacgcgtgggcggacgcgtgggcaatggcggaagagggacaattaatcaactgccagacttttgcttcatggaacgagcagctccatgcagcaaacgcctcaatgaaactggcggtggtaagtttcacagcttcatggtgcggggcatgccgtttcattacacccgtcgttgtagagcttgctaagaagctgcccgatgtcatattcttgaaggtggatgcggatgacttgaagaccgtgactcgagattttgccgtggaggcattgcctacttttatctttatgaaacaaggcaaaatagttgacaaagttttgggggcaaggaaagatgatttgcagcagaaaataaccttacatatgttgaaagcatgaatcaacttcaattactcttcgaattctgcaagctgtttctgaaactagaatttaacttatagatcttatacatatctgtctctcggatacgaaaattatgttcttgtatgtcttgttcgataccttcattatgtgcttgtagttccttgtatgaacatcaaactcgaaattgcttgtatattcctactacaccaatctatttatatgttacaaatggctgtctttaaaaaaaaaaaattaaaagtttacattaataaaaaaaaatgaaaaatattttttgaatatttaataataaaatttaatagaacattttataataattattttttcataat

SEQ ID NO: 22145 - DNA, 373 bp, Gossypium hirsutum
  unsure (1)..(373): unsure at all n locations
  Clone ID: LIB3148-030-Q1-K1-B9
gcccgatgtcatattcttgaaggtggatgcggatgacttgaagaccgtgactcgagattttgccgaggaggcattgcctacttttatctttatgaaacatggcaaaatagttgacaaagttttgggggcaaggaaagatgaattgcagcagataataaccttacatatgttgaaagcatgaatcaacttcaattactcttcgaattctgcaagttgtttctgaaactagaacttaacttatagatcttatacatatctgtctctcagntgcgncaaattagaaaggcttttaacaagaacaaaaacgagcggctggtatgcgtgaagtttttgactactgaagatatcctactttatggaacaaggcttatat

SEQ ID NO: 22146 - DNA, 454 bp, Gossypium hirsutum
  Clone ID: GOSHI-09MAY01-C35899_1
cccacgcgtccgattattatctgttgtagctcttcttcttgagagtattatttgggcaggaccgtcctaaaatgaactgagtgtaaaaggtctgctccaattcttcaacaaagtcgcgccaaaaatctacaggagaattagaagccacaatgacgaaacgccgaatctctaattctgaatcagaagaaagtggaagtgaagagatgttaagcgaagaagaagaagatgatgataatgaagtaatcctcaagcaagaacagcaaggtatatccgaatacgagaagcagaggctagcgagaattgcagagaacaagagccagaatggaggctttgggtctgcccaaaattgcctcttctttgatgggttcgtcgccaaatacaagtcggacttcgagcaagattaaagggaaacgcaaggtcattgatgacgatgaagattacaggcccaatgata

SEQ ID NO: 22147 - DNA, 608 bp, Gossypium hirsutum
  Clone ID: GOSHI-09MAY01-C135871_1
cgggatgaataggacccgaagtaggtccgaaagggtgtgtctgaatgccatcgctggagaccctctctgaagaaacaccctccgtcaaacctccagcagcctcctttcgcagccaaatactgtcaactacagtgggcctctaacccactgcccgtagagatgcatcctaccccatatcagaatcagtaacatccccagtcaattgtataggacagaaactatcaccatgccccaaacatccacacaagtagcaaaacagtgtcgatttctcataacagaagcgcacatacatagaattgccaggggaaagtaaatttttcttccttcgctttaatggagcctgtatatcaggccgaacccgcatgcgtaaataagaagagttccactacttatctgtttagcatcatactattcaaaagcaccaacaagattacctaattgctgagcaacaattttcgagaaacaacctgacggcaaaccatgaacttgtacccaaaaataggagtagatcaacgacacaagcatcgggtcttcattcggttgcaaacaatgaaacactaccaggtgattattgaaagtccacggggcactattcgccacccgatcac

SEQ ID NO: 22148 - DNA, 702 bp, Gossypium hirsutum
  Clone ID: GOSHI-09MAY01-C135821_1
gttcaaccatcactctattgtcttcccttgaaaactcatgaaaattttaatttttaacaatctatcgaccaaaaagtaatagcaattaaaagtagaagaaccagaaaaataaaaaaaaaatgtctgcttttcatgtctcaaagttaatcattacttcgcaagcctcagcaactcatccaaaattcccccctttttctgttttcagaaaatctctatcattccctcactctgtttctcagtgccaaaggaaaattgcaacctttgtttcttcaaaatcatcagaagctggggagttgccgaccgctgaagatgagtggctcagcagactcccggataagaacaagccactttactctcacagcttgccttgcattgaagcatggcttaggagcttagggttttatcaaagcaaagaggaccgtgctgtttggttgattgaaaaacctgattggcatgcccagctatctcttgatgtcactgatctttatataaggtacttgaagagtggacctgggaatctcgaaagagacgtggaaaggagatttagttacgcactgagtagagaggatattgaaaatgcaatacttgggggaccataaagacctataattagttcctcgtcatgtataacttcattacagcagttgcatattgttttagatgtcaattactttatccacttgctaaactttgaggatatct

SEQ ID NO: 22149 - DNA, 729 bp, Gossypium hirsutum
  Clone ID: GOSHI-09MAY01-C35599_1
aggaaaagatgaagaagcgaagaagaaggaggaatctctagagaacgacttagctaacatgtgggtgcttgttgctaagttgaagaaagaggtatctgctacacttgagagtaatacagataagcaaaatagtcatggaatggataatgttgaagatccaaaagcaaacaacactgagagtaacaatgtcctgaaagagcgacaagtttcagaagtgtcatcaaaaccagccaatgaaatacccaaggaagaacccctggttgttcggctaaaggcccgaatgcaagagatgaaggaaaaagagctcaaatccctgggaaatggagatgccaattcccatatgtgtaaagtatgcttcgagtcaccaactgcagcaattcttctcccttgccggcatttctgtttatgtaaatcctgctcgcttgcttgttccgagtgtccaatatgtcgcacaaagatatcagacaggctttttgcattcccttcttgatacacaacctatttctaccctcctaatgaaggggttcgtgaccacctgtttgatattttcaatgtgagaagcgggtgcaattctttcattagtctgtatgtaaacagtctaaaaaggtatatccatatcaatagtttgttccctagtctctactcattaaaaggctgtaaaaataagaacgagattaaaggttaaaaaaaaaggaagaaaaaaagaaaagaaaagtgaattcactattt

SEQ ID NO: 22150 - DNA, 1548 bp, Gossypium hirsutum
  Clone ID: GOSHI-09MAY01-C35489_1
ctttctatcgctagggtttccgctgcttgggagattctcgatttaatgtttttcttttctcgacaagaaaagggttgaagctcagtgatgcatagctgcttgatacccttttagcaaattaaaaggaaaatgaaaaatggtctcgatttcttgaatttactcaattgtgatgtatcactaaagattcttacgaatttggaggatccatctgatcttgttcgtttcagtgctgtctcacgctcctggcgacaatttgtgattgaaaatggtctactcaagcatctgtgccggagaatgtttcctcaattatctagagttgatcatgtcaacgagctatgtggcactgcaaaagggcatgctgaagctggatctacaattttatggaatgggaagctttgaagagggagcataaagtttatgccttttttgctcgaggttgtttgtcatttgctcccacggagtgcatctatgaagcaatcatcgcttctagcactgataatgatccagaggaaggcatacataatactttggaaccaagagatagggtggcacggagagcttcatactggtcgagtaaaggacaaagtaaccctgcagtgcctgagacgttgacatatagagtgtgtgctgatttatgtgttattactgaaatcaatataaggcctttccaagcttacttccagattggtaaacccatatactcagctaactctgtgagatttcgcatgggtcatgtcaagtcctgcatggacaatatcgtgaaagaatcatgccaggattgtggtaacgacaagtcctgcatggacaatattgtgaaagaatcatgccaggattgtggtaacgaaaagtttgcatggacttacacctcacaagagtttccgatggctcaggaaaattgtttgcagaatttcaggcttccggaacctgttctttgtattggtggaatattacagattgagctgttgggtagggtccagagacaggaaatggatagcttatactatatatgtgtgtctcatgttcaagttgtggggcggccattatctcctgcattgggtattcagacatttgaacactctgaaaaatttgtgctggaggcactgagttataaacaaccaacttcacctgctcagtccagctccgcacccactttgcagatgcgtgtgagagacttggagcagattttgaatttactgcggggaaatgttgtcgacgtagtggaatatggatatgaatgggaaatagaggatgaagaatcacatcaggcggatgaggatgaggatgaggatgaggaacaccgagaataaaactactgctgtttttccttccccgttgaactttatttacaggtcacatggaagctaaaatttcctgtaacattaagagtatgccctttggagtgttacctgaactttgttcaggatttagttattctgatgtgatatgctagtgttaatcaatatatgaaagctttatctaggttacaaagggagaagcgagcttgttaaatggtatgtgagtttgagaagcaagtaaaaaaatccttgt

SEQ ID NO: 22151 - DNA, 509 bp, Gossypium hirsutum
  Clone ID: uC-gsflmaxxa096h09b1
cccactcgtccgcggacgcgtgggggacctaaacgtggggaacagttcaacagccatctatgggactctgccaatctctgggattctgcttgagaagatctcactctcatgaaatcccaatctcttcctcatctgagtcttctcctcgtccgtctcatccattccccaaaaccaccccgcaacactttaacccttcttcttctaaagctacttcatcatccggtattggaaccattttgctcaaaccatatgttgatatcaccaccatttatgatcttgacaaagagttgggcagaggtcagtttggcatcacttatctttgcagatgcgtgtgagagacttggagcagattttgaatttactgcggggaaatgttgtcaacgtagtggaatatggatatgaatgggaaatagaggatgaagaatcagatgaggaggacgaggatgaggaagaccgagataaaactagtgctgtttttctttcccgttgactttagtacagtcacatgg

SEQ ID NO: 22152 - DNA, 255 bp, Gossypium hirsutum
  Clone ID: GOSHI-09MAY01-C35409_1
atttgattgtggtgacccagtgggtttctttatatatagaactattatagggtgtgattgcttttaagttcatagttgtatctgaattcttaaacctagtacttgattgaaggaatattgtaagtttgattgtattattcacctcaaaaaaaaaaaaaaaaaaaaaaaaaaaaaaaaaaaaaaaaaaaaaaaaaaaaaaaaaaaaaaataaaaaaaaaaaaatatttttatttaaaaaaaaacaaaaatcaatta

SEQ ID NO: 22153 - DNA, 970 bp, Gossypium hirsutum
  Clone ID: GOSHI-09MAY01-C35439_1
agagtttcggatctgttgcataaagctggggaccttgtcagctctcctagtttgaagaggttgctccatagcaaggctgatgccttcctttcaaacgactactatgactctgatatagcctggatggaattggattctaagttggatgtcaccattggtccatatgaaacttatgaagattcattgtttgggtacaaggctacgttcgaagcatttattggagttcgggatgaaaaagcaactgctcaacttaaattgtttagtgataacttgcaggttttggaacaaaaccttcctatggacgatacttctaaatcgaaagatatcattgctgctccaattcgtgttgtccagcttctttttaatgcaggggatgtgaagggccctcaaactattgctttcaatctaccaaatgatgagcgtatagttaaagatcgaggaacagcaatggttatacttaagaatgtttctgaagcaaagttcaaacagattcttaatcccatagctgatgcatgtattgcaaaggaacaacacaaacttgtagattttgagtctttcttcactcacacaatctgccatgagtgctgccatgggattgggcctcataccataacccttcctgatggccgaaagtctactgttagattggagcttcaagatttacactcggctttggaagaagcaaaagcagacatagtgggtctttgggcactgaactttctaataaaaaagcatttacttccgactagtctggaaaagtccatgtatgtttcattccttgcaggatgctttcgctcagttcggtttggcttagaggaagctcatggaaaaggtcaagcattacaatttaactggttattggaaaaggaagcctttgttttccatcccaatgagacattttctgtcaactttgacaaggttgaggaaagcaagtgaagttttgagtaggactatactttaccatacaagc

SEQ ID NO: 22154 - DNA, 752 bp, Gossypium hirsutum
  Clone ID: GOSHI-09MAY01-C35799_1
catttaccaaatcaaaaaccaaaatcccaaacttctttttccttcttcttttataccctttgttttgattgatcgtgggatgggggggtctgatttgagatgatggttccaaatccttctttgcaaaatagtctaacaaaaagtgatccactattgtgttgagaaagcaaataggaggagtgggttggggtttgtctcgcttggttgtattcagtgattgtttaaatgagatggtttggagggttttttggatgacatgaggatgttatcaaggttgatgaacttattgaaggcctgttttcggccgagatcagatcgattcattcacaaaaatgcagataccggaggccatcaaaatgggctattgtggtacaaaaacacaggacagcatgttaacggtgagttctcgatggcggtggttcaagccaacaatttacttgaagatcaaagccagctcgagtccggttgtttgagtacacacgagtcaggtccctatggcactttcgttggcgtatatgaccgtcttgggggaccggagacttcacgctacgtcgacgatcatctctttctacatctcaagcggttcacttatgagcaacagtcaatgtcggttgatgtaatacgaaaagcatatcaagcaacagaagagggtttttcgtctctcgttgctagacaatggcctatgacaccacaactcgcggctgttggatcatgttgcctggtcggtgttgtctggtgcacgaacctttatg

SEQ ID NO: 22155 - DNA, 522 bp, Gossypium hirsutum
  Clone ID: GOSHI-09MAY01-C35739_1
gaaagattatccataaacaaactagaaatgtccttgatacattccaaggctcgaaagaggttaaatggatatttgttatgagcacctcgaagaaattgtatgccggcaagaagaagaaaggaatgttccatcattctagcttcttagccggtggagcgacgctagctgctggtagattggtggtggagaaagggatactaaagtccatctctgcatatagcgggcattaccggccaacggatgatagtctcaacagttttctttcctttctgaaggggaacggagtgaaccttgacaaagttgagattcgccgttcaaccgatgattctgatagctacgatgatggaaattccagcagtagtgttagtacttttggattttcagcaagcccagtgccgactgaacccaaaatcaacaatgaagagaagaatctgtcattagaatcatatgatactaaacaaccggagaccacaaatacttacgaaaggactttatctggtggtcttcagagtccgagaactg

SEQ ID NO: 22156 - DNA, 1785 bp, Gossypium hirsutum
  Clone ID: GOSHI-09MAY01-C35729_1
cccacgcgtccgcccacgcgtacggtcggacccgcgggcgaggcttgtctcctcttgtccgagtcctgtttgcaaatcattcatacagtttgcaggacttcggccttgaaaaaaaccattcattttaatatttttttttctccaacagaatcgaataggaaatccgaacacagaaagaagctaaaagaaacaatggccggagtgggaaatagaagttttagcttgattttgtatttcctgtgcttgggggttataatccctagcctcgaggctcacatcgcagaatatgatgactattggagggaaagggaattgcaagctaaagaaaacctggagaaggcttacaatcctaacccagaggaagtcacccagcatttcaacgaccatgtggccagaaacttgatggggtttcgcaccaattccacaaggaggatgttgaagaagcgtaagggaggtccttgtgaagcaaccaaccctatcgaccaatgctggcgatgtgaccgcaactgggaaaagaacaggaaaaagttggctgattgcgcacttggatttggccgtggtactaccggtggaaaggatggacccatttacgttgtcactgatcctaccgatgatgttcttaacccaagtcgcggaactttgcgtcatgctgtgatccagaaccgcccactttggatcactttcgctagggggatgattattaggttgaaagaggagctccttatgaccagcaacaaaaccatcgatggtaggggagccaatgtgcatattgcttatggggctggtattaccatccagtttgccaagaacgtcatcattcataacatccatatccataacatcttccctagcaaaggtggcaagatcaaggatggcgagaaccaccttgggttgaggacaaggagcgatggtgatggcatctcccttttcggagcaaccaacgtttggcttgaccatctttccgtttacaagtgctccgatggtatcatcgatgctattcagggttccaccgccattaccatttccaactgccacttcactgaccacaacgatgtgatgctgtttggagcaagcgacagctacagtgctgatgagaagatgcaaatcaccgttgctttcacccgcttcggtaaaaatttggtacaaaggatgcctagggtccgatttggtttcgtccatgttgtgaacaacgattaccgtcattggatcatgtccgctattggaggcagcagtcaccctacaattatcagccatggcaaccgatttagagccccacgtaacattgcagctaaacaggtttgcaagagggaatatgcaactgagcaagagtggaagaactgggattggagatcagagggtgatttgatgttgaacggtgccattttcacacaatcaggagacccgaaggccgccaagaaattcggaggctacaagatgatagcgtataagccggctcacatggtgccactcctggtgaggtggtcaggaacactcgagtgccgcccaaacaagccttgttagaccactcgcaattaactctcatcatgtaaccgcatttcaacttcaagatatgagcgagatgtttggggatattgaggaaatgtttctttctttattgttttcattctccttgcaaggagttttaatcatttaatattgatacaacatttcctttgagaggcgcaagaatttgattcattcattcattctctctcttctaactaaataatttcattcaatattttttaattaactaattttataaaagctataattattttatat

SEQ ID NO: 22157 - DNA, 402 bp, Gossypium hirsutum
  Clone ID: LIB3145-053-Q1-K1-G7
aactttcaactggaatccataatttttttctttttccttttcttcccggggattctaaaaattctgaaatggtgtatacctgtatctcaccacttctgtagttcagcggtggctctttgctcattgtttcattcttatttttatgcaactctggtccacttctggatgtcttacaatcaaaattgagacgatttgatggtttttcgggttgggttagagatgacatatcttgttgtttgcgcaacagatgcagaagtattttggcggatgctgaacaaccaacaattggcttgaccatctttccgttgacaagtgctccgatggtatcatctatgctgttcatgggtccaccgccctctccatttccaactgccacttcactgaccacaacgatgtgatgct

SEQ ID NO: 22158 - DNA, 371 bp, Gossypium hirsutum
  Clone ID: uC-gsflmaxxa052h11b1
tcgatcaacggagtggcagaagaacacaaccattgtgagttgatggtaccaaggtagtcgatcggacgatcggcatctgccctttttcggagcaacgcaacgtgttggcgttgaccatatttccgtttacaagtgctccgatggtatcatcgatgctattcaggggtccaccgccattaccatttccaactgccacttcactgaccacaacgatgtgatgctgtttggagcaagcgacagctacagtgctgatgagaagatgcaaatcaccgttgctttcacccgcttcggtaaaaatttggtacaaaggatgcctagggtccgatttggtttcgtccatgttgtgaacaacgattaccgtcattggatca

SEQ ID NO: 22159 - DNA, 301 bp, Gossypium hirsutum
  Clone ID: uC-gsflmaxxa069c12b1
gttttgtcaccaattccacaaggaggatgttgaaggggcgtattggaggtccttgtgaagcaaccaaccctatcgaccaatgctggcgatgtgaccgcaactgggaaaagaacaggaaaaagttggttgattgcgcacttgtatttttcttttcacttcttctctttacactttatctttttatctttctcttttattaatctttctcctattactatattttttatttatttttttttatttttattatttatctttctatcaattttttttacctatttattttatatatttatttcat

SEQ ID NO: 22160 - DNA, 294 bp, Gossypium hirsutum
  unsure (1)..(294): unsure at all n locations
  Clone ID: LIB3145-053-Q1-K1-C2
accacgcgtccgtgcatcatgatttctttgacttgcgctatcaactcggcagtcatgactgttctgctttgatatgtaccgaaatgtgaccactcatgatgttcaactgagactatgagggaagtggtacggtcttatttttatgcaactttggtccacttctggatgtcttacaatcaaaattgagacgatttgatggtttttcgggttgggttagagttgactatcttgttgtttgtgcaacagatgcagaagtattttggtggatgctaaaaaanagttattagaccgctt

SEQ ID NO: 22161 - DNA, 811 bp, Gossypium hirsutum
  Clone ID: GOSHI-09MAY01-C35659_1
cccacgcgtccgcggacgcgtggggtcctattgaaggctcatttgagtgtaaatagatgtttgaggatccaaatagatgaatattatatgcttgaagattcaaatgattgcgagtgacatggtagagtgctgctggggggagatttgctgctgaaaagtttgtggcgaaactacctgacaaagtaatagagcaccgcagtgattgcatcttctcaaaactgacttttgatggtgtggttttgttgggtgagaggctagctcaagaggtattggatgttgtcaaacgtaggcctgaggtacggaagatttcttttgtggctcactctttaggtggtcttgttgcaagatatgcgatagggaggctctatgagaattctacaaagttaggtcaatcaggtcctttggccggcactttaactggagagcacacaaattcttcaatgcaagatcttgagcagcattctgaagatagaattgctggattggaaccaatgaattttataacatttgcaacaccgcatcttggttcaaggggacataaacagctcccacttctttgtggtcttccttttcttgagaaaagagcatctgagactgcacactttgttgttggaagatcaggaaagcatctgtttctcactgacaatgatgagggaaaacccccacttctccttagaatggttgatgatggtgatgacttgaaattcatatctgctctacatgcattcaagcgacgtgtggcatatgcaaatgcaaattatgatcatatggttggctggagaacatcatcaatccggcgtcaaaatgaact

SEQ ID NO: 22162 - DNA, 763 bp, Gossypium hirsutum
  Clone ID: GOSHI-09MAY01-C35669_1
tgtgatctgatgacacagataaagaagaaaaagaagaagccataagaaggggtctcggggttttcgatttcatcctagatggatgatgttatgagtcgggatttaataagtgacttgcctcaaagcattatagaaagtatcctcacacgtttaccaatacgggatgctgtgaggactagcattttatcaagtaaatggaggtataaatgggcaacacttactcaacttgtatttgatgaaaagtgtgtgattttatcgaatgatcgatgtaaagttgaggatggtcttgtaaatttcatcactcggactctttttcttcaccaaggcccgattcataagttccagctaacgactacgcacttgcagtgctgccccgacattgatcaatggttacttttcctttcaaggaatgacatcaaagagttggtccttgaattgggtgaaggagagtggtttagggttccttcttgtcttttcaactgcaaaaagttgacccgtttggatcttttccgctgtgaattcgatccgccccctagttttaaaggattcttgtgcttgaagagtcttaatctccaccaggttttggtttctcctgaagcaattgaaagtcttatatctggttgccctcttcttgagagcttagcattgtcctactttgatagtctagcgcttactatccgcgctccaaatctcaagtttttgtgtctggaaagtgaattcaaagacatttgtctggaaaatactccgcttttagttgcaatgt

SEQ ID NO: 22163 - DNA, 478 bp, Gossypium hirsutum
  Clone ID: GOSHI-09MAY01-C35039_1
cttattttctctctacatacattaattcagtttgttaatggcttctcgtcttcccggttttggccccaccggaatccacgcttccgccgtttctgatcatgaccgccgcagaagtacttcgtcgtcttcctatgctaactggtgggctcccctttttcgagtttcatctgagccggattacataggatccgataagaaatcggaggtcacggagagaagagagggcggatcggaagcggatccgcggctaaatatggcgagatcgaagttttaccccggttgctttacggagaagaaggcgaagcagctccgattgatgattaccaactcgtcgtcgtttcatgacgttatgtaccactcggcgatagcttctcgactcgcctctgacttcaaaggtcgatccgatctatgagtgtcaggcaagtaactgaaagtcagacctaattaaacccaggtttccgttaatttttttttcttc

SEQ ID NO: 22164 - DNA, 545 bp, Gossypium hirsutum
  Clone ID: GOSHI-09MAY01-C35029_1
cccacgcgtccgcccacgcgtccgcccacgcgtccgcatttcccttgggttttctgagtttggatcaaatcaaagaaaaccagtatgagttcattcgctatcagatcggcaaagctccttagactttctgtttctacgacacgcaactcttctctagcgggtgtgcaacgtacctccaagatgtggtattcaacaggttcgcttgatgacttcgaaactgaggaagcgaaaagcgaagagatagatgagattcttggcgacaagcctaacaggcgtgagccactgctccaaggtgtcagacccggaaagggttggaatttccgtggtgtacacaaggcaattatttgtggaaaagttgggcaagcccccgtgcagaagatattgcgaaatgggagaactgtaactatatttactgttggaacaggtggtatgtttgacctgagagttgtacgggaccagaacacaccaaaacctgtccaatggcatcgaattgctgggcataatgatatacttggggcatatgcagttcaacaagtcacataaaa

SEQ ID NO: 22165 - DNA, 748 bp, Gossypium hirsutum
  unsure (1)..(748): unsure at all n locations
  Clone ID: AI055155.1
gagagaactagtctcgagttttttttttttttttttttttttttttttttttttttttaaatattgtgaaaaaccattaaaacttgcaggttttgatgggattgagattcatggagcacatggttatttcatcgaccaattcttaaaagatgggatcaatgatcgcacagatgagtacggtggatcattggcaaaccgctgcaaattcttaatgcaaattgttcaagcagtagcttcagccattggtatagatagagttgcggtcaaaatgtcgcctgcaattgatcaccttgatgcaaccgactttaatccgccttttcatttcaaatcctgacctagtctttaggttgaaggtcaatgcaccattaaataggtacatttggaagacgttctatactcatgatcctgttgttgggtacacagactattcattcttgaacgaagagaagggtatacaattactgtcacgcctttgtatgtgcattcgccttgattgtttaatatcaacattgcctaaagttgattgagcaaatacttggttcatcgcctttgattgtcacgttttcttttttgtccaatgtattctcattgatacttactaccttatttaaatattaaataatcttcaggtgtgctcgtccctttcgtctatgtgatgttttccattatttggcgtttttcacttttgatgtataacctggttcccatttacgcttgtgtattcctttttccgttggtttactaaggn

SEQ ID NO: 22166 - DNA, 279 bp, Gossypium hirsutum
  Clone ID: LIB3145-013-Q1-K1-G2
cccacgcgtccgcccacgcgtccggagcattaccacaaagcagccttgaatgccattcgggcagggtttgatgggattgaggttcatggagcacatggttatctcatcgatcaattcttaaaagatgggatcaatgatcgcacagatgagtacggtggatcattggcaaaccgctgcaaattcttaatgcaaattgttcaagcagtagcttcagccattggtatagatagagttgcgatcagaatgtcgcctgcaattgatcacctcgatgcaaccgac

SEQ ID NO: 22167 - DNA, 425 bp, Gossypium hirsutum
  Clone ID: GOSHI-09MAY01-C35299_1
atcaagtaatcagattcggagttcttcgggatcatcatcttcatcattactcaaaagctgtcaagatgattgatgatcaagaccttggcttcttcgcgaatttccttgggatcttcattttcgttcttgttatagcctatcattatgtgatggctgacccaaaatttgaaggcaactgaagattttgcactttttggttgtgtctgcaatggatatttagatgataattttggtagacttgagttgtttcagaaacgaagacgaatcactgttgttaaaaaccttcaacaagttattgatataaatgtcatcttattgctcaccgctggcgtggactatacccgcagccattcctcttgtttttgctttacatttaatattgctcaagtgatttaacatatggtgcaccttgaggcagcactctg

SEQ ID NO: 22168 - DNA, 362 bp, Gossypium hirsutum
  unsure (1)..(362): unsure at all n locations
  Clone ID: LIB3145-012-Q1-K1-G8
aaaataatcaaattcggagttcttccggatcatcatcttcatcattactcaaaagctgtcaagatgattgatgaccaagaccttggcttcttcgcgaatttccttgggatcttcattttcgttctcgttatagcctatcattatgtgatggctgacccaaaatttgaaggcaactgaggattttgcactttttgtttgtgtctgcaatggatatttagatgataattttggtagactgagttgtttcagaaacgaagacgaaacaatgttgttaaaaaccttcaacaagttatggatataaatgtcatctaatggctnaaaaaaaaaaaaaagaaaaagaaaaaaaatttaagagggaaaaa

SEQ ID NO: 22169 - DNA, 547 bp, Gossypium hirsutum
  Clone ID: LIB3828-032-Q6-N6-H6
gccttgaaaaaaatatgttgttttataaaagatgtaaatgctcaaatttgactgggacaataaaccaacaacagcccattactacccaattgaaacttattacaaattaacccaatacctaagcccaagtagcccaaaatctaaaaaaaaaattcagcaaaagaggaagagaaaaccctaggtgccgcagtctccatgtgcgtccccggcgtgcactccgctcgagggtcggcttccacccgctccttgcaccaaaacaaaaacctgcccccgttgactcctagcagacctgcaaagtaacccaaaaaaagaggcaaacacagcgaaaatgcaacagcagaagcaaggccgaatagtgatataacattaacatgtatttggctataaagacacacaaaacagattgtaaaaaaggaggattcgatattaacaaaaaaaaacgaaaaaatagataaaaaaaggtgatttgcgatttcaatttttcttttagttttggaatctcatttcttttctggatgttttttagtctttcttttcttttgcataa

SEQ ID NO: 22170 - DNA, 324 bp, Gossypium hirsutum
  unsure (1)..(324): unsure at all n locations
  Clone ID: LIB3145-029-Q1-K1-B8
agcagcaaaacaagttcttaacaccccccccccttttttccctttgctagggttttggcctcaaccttggagcgccgtcgcaccaccatcggacttggtggccaatcacgcgcagaaaggacgtgagagaggtcggaggtctctaggagtcaacgggggcaggtttttgttttggtgcaaggagcgggtggaagccgaccctcgagcggagtgcacgccggggacgcacatggagactgcggcacctatgggtttcttcttcctcttttgctgaattttttttttagaatttgggctacttgggcttangtattgggttaattt

SEQ ID NO: 22171 - DNA, 1121 bp, Gossypium hirsutum
  Clone ID: GOSHI-09MAY01-C36539_1
tacccctcgccgttcccgatctccagctccgcccactctactcctccacgacgtcttccccaaattgttttcagaaaatctatagacgaaggtttgcgagcatttcttcttcaagtaatcaacaaacttcatcagttggagttaacccttatccaactgtgccaccgccgtcctctcaaatagggtcgccgcttttctggattggagtaggtgttgggctctcagcactctttacatgggtagcttcaagcttaaagaaatatgcaatgcagcaagctttcaaaactatgatgggccaaatgaatacacaaaataaccaatttgccaatgctgcttttccttcgggatccccgtttccttttccaacacctccgtcaacaggacctgtcacatccccttctccatcttctgctcaaaaaactagcattacggttgatgtacctgcaacaaaagttgaagcagccccggtgattgatccatcaaccaaaggaaaaagtgaaacagaaaaagcagaaccaaagaaatatgcttttgtagatgtttctccagaagaaactgtgcagaagagttcttttgaagatgtggctgagacaagttcatcaaacaatgctcaaattcccaaggatgtctctgataatggagctgcatcaaagcaggataccggtgcttttggtggttatcagtcaactggaaaagcaggtccgggtttatctgtggatgcttagagaaatgttggaagatccaacggtgcagaaaatggtttatccatatttgccagaagaaatgagaaccccgagacatttaatggatgctacaaaatcctcaataccgtcaacaactgcaagacatgctaaataatatgggtgaagtcgaattgggacatagatgatggatctgaaaaacttgatactcacagtctgagtgaagcagcattcaaccagatggcctacaccctagaagtatatcaaatatggcaaatctctatgctatgcttcaaatactattagccgtttatggtgtcaaaccctggctgaaatcaataaacgggggggtttacaaaatggatttcggagagggcctcttttgtgtaaaattgatattatatattatataataataat

SEQ ID NO: 22172 - DNA, 716 bp, Gossypium hirsutum
  Clone ID: GOSHI-09MAY01-C36459_1
tgcttctctattgttaaatacaataaaccttagagaaaaactgcatttctccatccccaatctttttcctttgcaataaaccccaacaaaccaaaatggcccgccaaattgttgttcttgctttggccatcatggccctctttgccttggtttccaccgctgcggcggcccccgcccccgcacccggtggcagctccttcaggttcacctggagatgctagctcccctcctcctcaggcacagcgctcctagtcctagcagtggtgccgcacttgaggtctcggctattgccgcaggagcagccgccgttgctagctattttatgttctaaatacgatttatctcaagggtgtctagcagtggcttttctaggtttgatatcatcacgaaagctgccttattaattattttgtaatttgctaatttgttttatgaataaagaattggaacggaaaaaaaaaaaaaaaaaaaaaaaaaaaaaaaaaaaataaaaaaaaaaaaaaaaaaaaaaaaaaaaaaaaaaaaaaaaaaaaaaaagaaaataaaaaaactaaatttaattaaaaaaaaattagaaaaatataaaaaaaaaaagggggggccctttaaaaagcccaaattttttttcccgggtgttgcgaagaaaaattttttttttggggcccccaaaattaaattaatgggccggttttttaaaacttggtgattggaaaaac

SEQ ID NO: 22173 - DNA, 434 bp, Gossypium hirsutum
  unsure (1)..(434): unsure at all n locations
  Clone ID: LIB3148-007-Q1-K1-G5
ccgggacggaaccgggncgacgccacgccgtccgcccacgcccgtccgtggtttccaacctctgcttgcggtccccnncgcccccgcacccggtggcagcgccttgcaggttctacctggagatgnctagctccctnccttctcaggcgcagcgctcctagtnncctagcagtgnngtgccgcacttgagggtctcggcttattggccgcagggagcacgcccgccgttgcttagnnttattttatgttctaaataccgatttatctcaaggggtgtctagcacgtggcttttctagggtttggatatcatcacgaaaagctgccttattaaattattttggtaatttgctaaatttgttttatgaataaaagaattggaaccggatggattgcatctttnaaaaaaaaaaannnnnnnnnaaannnnnnnnaa

SEQ ID NO: 22174 - DNA, 1618 bp, Gossypium hirsutum
  Clone ID: GOSHI-09MAY01-C36799_1
cttaagccccaacagctgaacagctagcaaacacacttagagagcataaagagggccgcaaagcttgaagcagaatgccgaagactcaaagccataggctctaaatcgtccttcacaaatgactgtaaatccccagctgcctcctcgatttatgttgaatccttcatgggtagtcaatccgacagcggagaacggctgcatgtggtggacactgatacccaaaagatgagtggcttggaggcaaacaaaggagaacctagttgttccgactcatgggcgtcagccttaattgctgaacttgatcaattcaaaaacgaaaaggtcatcaacagaaatgtccctagttcttctattgagattgatctcatggatgattttcttgagatggagcaacttgctgcattacctgataccaagaatgaaaatcaatgtcttgaatcaaaagctactgtcaaacaatccaatgatggtgatagctctttgaaggctgagcttgaagccatgattcatcgaacaacagaacttgaagaaaagttggagaagatagaagccgagaaagctgaactagaaattgctcttgccaaaagtcaagaaagtctagaagcatcggaactagagttgagggacagtgaattaaaattggaggagttgcaaagagagctcagcaaggccaagtgaagcaaagcaacatctcgagtctcaactcagtatcatggaaacagatgcagagacaatgtcagcgaagattgatgcattaggagcagaaattgaaaaggaaagggcactgtcagtgcaaatttcagctgatgcaaatgagtcaaagcagcttctcgagtctcaacttgttagcattgaagcagaggctcggatgatgtctgcaaaggttggttcattggaaacagaagttgaaaaggaaaaggcattgtcagcagagattacagtgaagtgtcaagaattggaagaagagctttcaagagcgtgacaggaagctgagctccagcaagctgcgatactcgaacgttgaagtgaagataaaacaggaggatttggccgttgctgctggaaaacttgctgagtgtcaaaaaacaatagcatctttagggcagcaactgaaatctcttgcgacacttgaagactttttaatcaacaccacgagcatgccggagttctctagaggagtgtcgttgattacgaaatctagtgaaccttggaagttacattctaatgaaacatattcacccaaagcagatccagagtcaaaaagagttggtgctgaccattctagccctcaaggaaataagaatgatggaaatggcaacacaccaccatcttcatcctcgtcttcaattgtgtcatcaactcatgccagttcagagaagaaccgaaatggtttcgcaaaatttttcactcggagtaagaatgggatccaactagaaatttaagagatatagattagtgtaaaaacaaagaaattatttgtcatttaaaaggtagtggttaaatactgtttaatcaccatttatacatgaatggttgtctggattctggatacagaagtttgaagttgagaaccttaattgccagtacctggggctatagtttctcccattttttgaag

SEQ ID NO: 22175 - DNA, 549 bp, Gossypium hirsutum
  Clone ID: LIB3829-013-Q6-N6-C11
aacttgaaggaacttgctgtatttttcttcaaagaatggagaaactatagccccaggtactggcaattaaggttctcaacttcaaactttgtatccagaatccagacaaccattcatttatatatgagacaacctaaaggtgaactagttaatggtgattaaacagtatttaaccactaccttttcaaatgacaaatgatttctttggttttacactaatctaaatctcttaaatttctagttggatcccattcttactccgagtgaaaaattttgcgaaaccatttcggttcttctctaaactggcatgagttgatgacacaattgaagacgaggatgaagatggcggtgtgttgccattttcatcattcttatttacttgagggctagaatggtcagcaccaactcttgttgactctggatctgctttaggtgaatatgtttcattagaatgtaacttccaaggttcactggatttcggaatcaacgacactcctctagagaactccggtatgctcgtggtgtcaattaaaaagtcttcaagtgtcc

SEQ ID NO: 22176 - DNA, 639 bp, Gossypium hirsutum
  Clone ID: GOSHI-09MAY01-C36789_2
aacccttcgcgggaagggccaacacaagcgcgggcccgaacggggaggccaacaagggggccccaggaggggggcaccagggcaaaccaccaaaggccgccaaaaccgcaagaggaacacaaaaacaccaagggcgtttgaaggtttaattaataattactagataaatataccaagcatccgaagtaggatttaaccagcttgacttttaggatagctagcatattagaccccatctatagggccctatagtgggactttcgggtcactcaaaaatgtgaagggcttattttaaagtagcccttttatcattttgggtttttagttttattatggggtaggtgtcctaattaaggtacctttttaaaaaaaaaagtattaagggtcacgtttccttctgttgtttgttaaaacaggaggagatggcagaggtgggacttttaccacccgccagcagtgttaacctagtaggtcctctggtttttttttttcttcctttgggatgttgagaagcattgttttggcttgtaagctcaattcatctcttttgctgggtgattatctccttggattttatcatatatgtatgagagtaatttggaaattttgcaatgcaaaaccgaactttgatttattacg

SEQ ID NO: 22177 - DNA, 621 bp, Gossypium hirsutum
  Clone ID: GOSHI-09MAY01-C36789_1
ggaatcagttcaccattaatggccactcctacttcaacctagtccttatcaccaacgttggcggtgctggtgatgtacatgcggtggccatcaagggctccaggactggttggcagcccatgtctaggaactggggccagaactggcagagcaacacctacctcaacggacaaagcctctcatttaaggtcacaacaagcgacggccgtactgtggtttccagcaatgttgccccagctgggtggtcctttgggcagaccttcactggccgccaattccgctagaggaacacattatcatcttaggcttttgaagttttaattaataattactatataaatataccaggcatccgaagtagtatttaactagcttgacttttagtatagctagcatattatactctatctatagggccctgtagtgggactttcgggtcactcaaaaatgtgaagggcttattttaaagtagcccttttatcattttgggtttttagttttattatggggtaggtgtcctaattaaggtacctttttaaaaaaaaccctcgcgtccgcccccgcgccctctgttgtttgttaaaacaggaggagatggcagaggtgggacttttaccaccc

SEQ ID NO: 22178 - DNA, 570 bp, Gossypium hirsutum
  Clone ID: GOSHI-09MAY01-C36699_1
cgtccgcaattttctttaaatattctctcaaaaaccaacgaccccaagattctctctttcgaaaactccttcaaatttggctaccaagaaaaacaatggaaataatcgaaaatcaagcagctgtttcgaatttcgacctccagtcaaagtctccgttttataacatttcctccaccgacattacgaacgtcggcttacttggggaatccgaatttgtatctgtggatagtccgaaccaagctagcgaatcggatttcccgacggtggttaatggtggtggtttgaaaatgctgctggagccgttatccgacggccgagattctccgggttcgaatcagacgcgcggtggcggttcttctcattccaacgccgccgttaaggtccagaaggtgtataggagttaccggacacggcgtaggttagcagactccgctgttgtcgctgaagaacttctggtggctggctttaaactatgcaaggcttaatcacagcacaatttccctttttaattatttgaaaccagaaactgctgcttcaaggtggaatcgcgttcgcttaaatgcttctaag

SEQ ID NO: 22179 - DNA, 823 bp, Gossypium hirsutum
  Clone ID: GOSHI-09MAY01-C36619_2
acagatgataaagttaaaccaccatcaaaagaagcattagaggctttggttgtagaaagtccaaattctgaaaccaaagcctctaatgcttcttttgaatcaacatcacatcccaagacagatgataacgttaaaccaccatcaaaatcaacccagaagacgagttctaatgctgcagaaacatctagtcccgaccaaaaggttctggataacaaaagagtttccgacaagcaacagaaagttgctaggccttctgtttccacaacggaaagtgggattgacaaagcaggtggattacgagaaccgtttcaatcaaaaccggaaggcgagaagttgccagtctctgccttagaggaaaacatagttctcggtgttgcattagagggctcgaagagaacactacctatcgatgatgagatgactccgcgcacatcagaagcaaaagagttggcttccacaagccgaaatggaaccggatcaagtgctgaagacaagaaaggcggtcagatctggcccacatctggtaaccccgatgatcagtgatatattgaaagctaactactaatccccagagctcacaacttgcatttgatggacacttgacacttccactgaggctttctttcattaagctgcccccatacatgtatatcttcactcttttattattactcttaaaacgtattaaaatgtaccacgttttatcttgaaagttatggctaaatatgtcatttgctccaagttatttatgtaaaaaattatctaacttaatgcatataatatgattagaattgttggagaaagatatataatgacaccacgt

SEQ ID NO: 22180 - DNA, 740 bp, Gossypium hirsutum
  Clone ID: GOSHI-09MAY01-C36619_1
cccacgcgtccggtcagaaaactcattggcgcattaaaactcacctggccatcagtcacttggatgtccataagattaataatattgttgccgacatgcgcaaggtattggctaagaatcctcaggttgagcagcagagattacacagaagagtatttctggagaatgtcagccccgaaaatcaggctcttttgatattggtgtcctgttttgtgaagacttcccaccttgaagaatacctatgtgtcaaggaagctatacttttagatctccttagagtcatcagccatcaccgtgcccgacttgccacaccaattcgaactgtgcagaaagtagttggtgattctgagttggaaaatgtaccattcgcagactcaatctataaccatggtggagtgtcatctaacaggcctctgttactgatcgaacctgcttacaagatcaatggtgaggatagaacaaaaggccggtctgcaccacccaaccggagaccaagacagtaaaaccacagtacggcctgctgcagacaacaaggccggagcaacaccaaagcctgattccaaatccaaagcagatgccaaggttgtagaaagcccaaattctgaaaccaaagcctctaatgcttcttttgaaccaacatcacatcccaagacagatgataaagttaaaccaccatcaaaatcaacccagaagacgagttctaatgctgcagaaacatctagtcccgaccaaaaggttct

SEQ ID NO: 22181 - DNA, 978 bp, Gossypium hirsutum
  Clone ID: GOSHI-09MAY01-C36099_1
aaaaagatcgaaaagcaatgagctccctgtgatgaaaaatgaatctactaagttggacgcgatcaactgcaactcagcagggggatgaaatgattgtgaccaaggaagaaactaccacagatcaagttgaggagccaaagatggccaatgaagaaactaacgttgatcatgttgaggagccaaagataaaagatgaaatagaggaagaagatccagaggaagatcctgaagaatatgaagaaatggaggatgcaagtcaacccaattcctctattgagaaaaatgaagaagagaaggcacaaacggatgctaagcctgaaaaggggtctgaaaaggaggctgagaagattgaagctatggcatctaccaaatctgaaataaccacaaaagctgctagtacagatgctgggcctgagggagatatgtctagaaaggagcagaaaggtgatcctaagaagaaggtgcctgctattgataaggatttgttgcaggctttcaggttttttgaccggaatcgagttggctacgttagggtcgaagatatgaggttgatgattcatagcttgggaaagtttctatctcatagggatgtcaaagaactagtgcaaagtgcattgttagagagcaacacaggaagggacgatcacattctttacgataagctggttcgtatgtctgacatataaaagcctttggggtccaataagatgctataatctgttttgcatctaatgaggcatgcccattcaaggtgcgactcctaggagctaaacttgagtcactgacgttcaaatagagggttttagcttctcttagtgtataagctattggtatatgcaagggattgtttgctcatggcatatatcatgtcaagagattagtccaatgtggtctgtggtcttaggccttagtgaatgttcttaatctatttgttttcattttccttatttgaattgagatcaactgtattttagccca

SEQ ID NO: 22182 - DNA, 436 bp, Gossypium hirsutum
  Clone ID: uC-gsronu33B015a06b1
cccactcgttcgataggctttcaggttttttgaccggaatcgagttggctacgttagggtgagatctaaatcttaatacttattctggtatattcttttacaatggtgatgattggtggacgctggtattatacaggtcgaagatatgaggttgatgattcatagcttgggaaagtttctatctcatagggatgtcaaagtaggattcacgattctatgattctttctgcagttgtttgtcataatttaactttttatatggtactcttgcattatgggtactcatggcattgtttacctgcatcaggaactacagcaaagtgcattgttagagagcaacacaggaagggacgatcacattctttacgataagctggttcgtatgtctgacatataaaagcctttggggtccaataagatgttataatctgttttg

SEQ ID NO: 22183 - DNA, 642 bp, Gossypium hirsutum
  Clone ID: GOSHI-09MAY01-C36059_1
aatgctcagaagtcaactgagcagaagcaaccccagaaacctgatttcagcctagtgaaagagcagcccaagtatgatgaatggaatgcttctgatggttggaacatgcctgaaaatcctgattctactgtaccacctgtacctgtttcaagatatcaggggatgacaggcagaggaaagcgacatccattcaagggacagaagggtgggggaaacaactataattctgatcacaagaaaactaataatggggaagctgataaacttaactcacgatcttcagcccctgagatggctcaattagattcacctgctgcatcaaaagagaatcgtggtggtggggaccgatcggcatctcattggcaacccaaatcttcacccatcaatcaaagaagaagcaggcctgatatgatcaaaatgttggtactgaaattagtaggactaacaaaaaggattctgctcctcaggctaaggtgtcgcatccatctcaaccagaaaaacaaaccattaaaggtgtgactctgcctcctaaagatcattatgtctccgaaaaaggtgttgaaaaggcacataatgttgggcttcatgaatccaaaaaggaaggaatgtaacttcacataagagcgcccacactctccaaag

SEQ ID NO: 22184 - DNA, 539 bp, Gossypium hirsutum
  Clone ID: GOSHI-09MAY01-C36009_1
cggacgcgtgggcagcaattgttcatatggtctaatgtatatcaaacaatcatggaaaccattatcatttgtcgccccatctttgaagaagaacatggtttgtgaagctctgtccttaaccatccctttctttacaagtccgccctcccgcgcggctaaactggctactaaccgctggaatttatgtcgttcaactccaagaattcgatgctcaagttccagtgcagaagggcctgtaactgctgataaacttgaaaatgattatgccttgactggttctgcttatgattttgaaagaggtaccatatcgattactcgtgagtccttatcttctccaaagaaggtaattcttgtaaggcatggccttagcacttggaatgaagagggtagagttcagggcagctcatacttatttgtgctaacagaagccggagtgaaacaagctgaaaggtgtaggcatgcccttgcaaatatgcactttgatcagcgttttttaagtccgatatccgtgctaagactactgctgaagtgttatggca

SEQ ID NO: 22185 - DNA, 493 bp, Gossypium hirsutum
  Clone ID: GOSHI-09MAY01-C36319_1
cccacgcgtccgcaaccctaatttcaaacctaaaatcgatttgctgaaacccattccagtgactgccaatccaccattttatttggtggccgacaatgctcgagcagcaacccgatcccaccggcgaacgcgccaagcgaggaaacctggtatgccactttattttcccttttaaaaaaaaacctagatctaatgttgtttaatcaagaaagatgaaaccgaatataagaagaacacttagtatcatccgaccctcgtccctatctcaatatttttgagatattcgggacttcattggtatcgtctccaatatttctttctaaaatcgcaaggtaatgagaagaagaaaaaaaattagatagacttgaaaataaccttttctgatttgtgatttcttggttttttcttctttttttttggtatagatgtgtgtcatcccccaaatacaatcgatttttggctttataggtcgaaagaagaggaaaacaaatca

SEQ ID NO: 22186 - DNA, 542 bp, Gossypium hirsutum
  unsure (1)..(542): unsure at all n locations
  Clone ID: LIB3582-061-P1-K1-F5
ggcgcgtgggctatttcaaacctaaaatcgtttgcntgaaacccattccagtgactgccaatccaccattttatttggtggccgacaatgctcgagcagcaacccgatcccaccggcgaacgcgccaagcgaggaaacctggtacgggtgtgttggcatcgtacaaaggctgtgctggcgcttggcgtgaggagtacggaggcgtgctggcgcttgggaggttgctgttgcggcgcaggagaaggaaaggaaccctagggtttctaaaatttctgggccatttgggctcgtttcgggtattgggtcagtcattgggccatggggttttagttattgggtctaggttatgtagttgggtttgtaacttgggacttggactttatatttggttttatttatttgtttttaattttgattttttggttgttgggtccgggcagaatttgggccttacaatatttatttactccattaagcaaaccgtccaccataatataaataaagtctaattatcctttnnaaaaaaaaanaaaaaanaaaaa

SEQ ID NO: 22187 - DNA, 592 bp, Gossypium hirsutum
  Clone ID: GOSHI-09MAY01-C36309_1
cggacgcgtgggcggacgcgtgatcaaaacaacacattgcaaagagaaagggaatattatcaaaagaacccaaccatggcatttgcaggaacaacccagaaatgtatggcttgtgacaaaactgtgtatttggtcgataaattaacagctgataacagggtttatcacaaggcttgttttaggtgccatcactgcaaaggtactttgaagcttggcaactacaattcctttgaaggagtcttgtattgcaggcctcattttgatcaacttttcaaaagaactggtagtcttgagaaaagttttgaaggtacaccaaagattgcaaagccagaaaaaccagttgatggtgagaaaccaatagctactaaagtatcaggcatgtttggtggaacaagagataaatgttttggtttgtaaaaccccagtgtatccaactgagaaggttacagtgaatggtaccccttaccacaagagttgtttcaaatgcacacatggaggatgtgttataagcccttcaaattatatagcacattgaagtagactttacttgcagcaccaacatggtcaactcattaaggaaaaagggaactta

SEQ ID NO: 22188 - DNA, 625 bp, Gossypium hirsutum
  Clone ID: GOSHI-09MAY01-C36239_1
cggccgcgtcgaccgaatttcattacccaggaaaaagaaaagaagaaagtttccccttttttttttataaaaaaaatggcgtattcgggtgttctgaaaaccctaatcaggtcatcgcatttgggatctacgactcgtaatttcagccttgttagcagccaaatcagcaatcacactgcgaaatggatgcaggattcaagcaagaaatctcctatggagttgatcaatgaagtccctccaatcaaggttgaaggccggattgtagcttgtgaaggagataataatcctgctttgggacacccaattgaattcatatgccttgacttgaaagagcctgctgtatgcaagtattgcggcctacgctacgttcaagagcaccatcactagaaactacttgttatgttcttctcaggctgttgggacaattgttattttgctgtacccatggggcactttcctctgtttcagcttgttggtaacaaatttgatgaacccattttagtgtgatgttttttttttcttttacacataataagtgtttgaagttctcatttgagaagatatttcgaaagtaaatttgaacacctatggtctaatcctccatttgcataattgagttaatatt

SEQ ID NO: 22189 - DNA, 476 bp, Gossypium hirsutum
  Clone ID: uC-gsflnu33B049d06b1
ccggatatattgaagagaagaaaatttccccttttttttttataaaaaaaatggcgtattcgggtgttctgaaaaccctaatcaggtcatcgcatttgggatctacgactcgtaacttcagccttgttagcagccaaatcagcaatcacactgcgaaatggatgcaggattcaagcaagaaatctcctatggagttgatcaatgaagtccctccaatcaaggttgaaggccggattgtagcttgtgaaggagtaagcatagtgagatcgaggagacatgaaagccctttcacattttcatgtgaagacgatgcctattttgttcatttgacatgtgcaagagagtgcatgcatgcttgatattttgggaacttacttttaagttatactgatattgttttttaagaaggttaattgttcataaaagaaatggaaactattaaaaaggagtttccttccacccaggatactacacca

SEQ ID NO: 22190 - DNA, 486 bp, Gossypium hirsutum
  Clone ID: GOSHI-09MAY01-C37919_1
gtcgacccagcgttcgctctctctcactgtcaataagtcttgccaacaataagttctataataaagttccaaatggatcgttcctctcattcagtctcagttgctttctttcttctgctgattcttttaaccacagagatggggcctatgtcagcggaggctaaaacatgcgagactaaaagcggtaaattcaaggggatgtgcatgagttctaccaactgtgctagtgtttgcaaatcagagcctggttttgatggtggacattgccaaggttttcgtcgtcaatgcgtttgcactaagccttgttaaaccactaagctttgttagatcagtaatctattatatttcattgtcaccaagatttcccttttttttttgcttatcatgcattatgtgcttgagagttgagagaaataagacatctccaactatattttgtataccagtaattttgttattagaattaaattaatcttttatgatgtt

SEQ ID NO: 22191 - DNA, 355 bp, Gossypium hirsutum
  Clone ID: LIB3148-008-Q1-K1-E6
ggtatgttgatatttgttttattgtttatctcccaatggttttttgcttcgtattcttattgatgaatactgccttgcttcttttatcatgttcttttggggtttgtaagattagaagatttgaatccattgctctcgttttagctgacgttcaatgagacgagaaagatatggattgggcttggcacccaaactgatccctttggttggactggggcctatggcgcggttttcgtcgtcagtgcgtttgcactaagccttgttaaaccactaagctttgttagatcaataatctgttatatttcattgtcacgaaaatttcccctttttttttgcttatcatgcattttgtgct

SEQ ID NO: 22192 - DNA, 499 bp, Gossypium hirsutum
  Clone ID: GOSHI-09MAY01-C37889_1
cgtccggccctgacaaaacccactactttatttacttgttctcgtaccccttcatgatagatcttgttgtggttgtaccaaatagcccaataggcaatagatctaattttgcgagcttctgtattctggctaacaaattctgtttctaaccattttttccaaattggttctctccggcatgttgaaattgacacccccaatcccctcaacacctgtcgtgtgaaagagcaatccatgaagaggtgttccacagtttcctcctcagctcgacaaaccgggcacaatgtgttagcagccagatggcgtatttttaaattgtacatagtgggtaggaagccattggcaattctccacataaagattcgaagtttacttggtaatttaagctctcataggtttgtaaagaaattcgaagcaatttcactatgtattctattacccccctctgtagtaagtcattgatagccactttttactgtataaactcctatgttttcgc

SEQ ID NO: 22193 - DNA, 634 bp, Gossypium hirsutum
  Clone ID: GOSHI-09MAY01-C37599_1
aagaatttcgagcatcatccctaattttcatgaaaaacgtaaggagctgatggaacttgccgcttcatttaaatcttctcaaggacgacccgttactagacctttgagtgttgcaagaagggtccggaattccttaaggcaggcaaataaacctcagtttgtatcagcattctgtcaaacaaattgcggtgatgtcagcccgaacacactcggtgcattttgcatcgacactggtctgccgtgtgatttcaatcatagtacctgcaatgggaagaatgaactgtgttatggcaggggcccaggctaccctgatgaatttaagagtaccgagattattggaaaaaagcaattcaagaaagcggtcgaactttttgacaaggcaaccgaagagttgaaaggaaaagtcgggtatcaacatgcctatatagatttctcgaatcttcaggtttcagttcctaaagcgggaggaagtaatgaggtggtcaaaacatgccctgctgctatgggatttggttttgctgcaggtacaactgatggccccggagctttcgatttcagacaaggagatgatcaggggaatgccttttggaaattagtgaagaacttactaaacccgccgggttcagatcaatcg

SEQ ID NO: 22194 - DNA, 676 bp, Gossypium hirsutum
  Clone ID: GOSHI-09MAY01-C37589_1
gttccctccacgcgaccaccactagctgcctttatatatactcagctcagctcaataacaactcaaagtaactccaattgcattttcaagttccacctagagtgaaatgcagacactgcaggaaaaggcttctcaatggagcggtgttgatgctgccgatgcctttgccattgacgacactaatttgttccagaaattgggactccaaactttcattaacctttccaccaatttttacactagggtgtatgatgtccgggaagaagagtggtttcgatcaatattttccaattccaagaaagaagaggccattcagaatcagtatgaattctttgtgcaacgaatgggagggccccctctttattctcagaggaaaggtcatcctgcattaattgcacgtcatagaccatttccagtcacacatcaagctgcagagagatggttatatcatatggagaaggcattagagagcaccccagacattgatgctgattcaagagtcaaaatgatgaactttttgaggcacactgcattttttcttgtggctggagatgagttgaagactcaaaagcaacaaatcccatgcaaccatggggccagcaaatcagctgaatcatagacttattatcaggaatcctcccccctaattactttgttggaagaaaccactcatgtt

SEQ ID NO: 22195 - DNA, 623 bp, Gossypium hirsutum
  Clone ID: GOSHI-09MAY01-C37539_1
cccattcgttcggctgtttcgttaggatcgatgcataaggaaaggaggctgcatcaaatgatgtatgccgatcgtgactatgatatgagtgatgctaacagtggatcaacaagtgataggagtaaaccgctagtaaccgtggaaaattgtgaacataagggttacaccgttgtaaacttgaggtgccccgatcggcctaagctactatttgatacagtttgcacattgacagatatgcagtatgttgtataccatgcgaccgtcatagcagaaggacctgaagcttatcaggaatactatatccggcacatggatggttgccctattagctccaaagccgagcaacaaagggtaatccattgtttagaggcagctatcaaaagacgagcttccgagggcataagattagaactttgcagtgacgaccgagtcggccttctatcggatgtgactcgcatattcagagaaaatggtctttctgtcactcgagcggaggttaaaacaaggggttcccaagccgtaaacatattttacgtgactgatgcatctgggaatccagtaaaaagtgaaacaattgatgcagttcgaaaagaagatggtcttactatactccacgtgaagga

SEQ ID NO: 22196 - DNA, 1175 bp, Gossypium hirsutum
  Clone ID: GOSHI-09MAY01-C37499_1
gaaaatgtttatagcagagaaaaaaataaggctcgtcgatgaaaaataattttgttccaaaagcttaaatattgctttttcagtgtatgaaattaaattcgctatattcatctcaattcagatctttctcttcttcttctttttattttttttcctttttaatcgtgagctctccttaaaccctagctaatttttcacctcaatccatttctaaaatccgtagctttgtacggtaacggaatcgaatttatcaaggtgatcgatcccgtgcttgatcgcttctctatgcaatggtggtctgcaaatgccgcaaggcaacaaagttatattgttttgtgcacaaggttccagtttgtggagaatgcatctgttttcctgagcatcaaatatgtgtgattcgtacttactcggaatgggtaatagatggagagtataactggcctcccaagtgttgcaaatgccaagctgtgcttgaggagggtgctggctctgaaactactcggttgggttgcttacatgttatacacacaaattgcttgatttctcatatcaaaggctttcctccgcacactgcacctgctggctatacatgtccttcatgttctacatctatatggccccccaagaatgtaaaagattcagcatctcgtcttcattcactgctgaaggaggctatcatgcagactggcatggagaagaatttgttcgggaatcatcctccacctgcatttgcttcagatccactggtaaacgtgaactctactggaaaatgggttcgggatgggaattcattgccctctgtggcaatagatgaaggatactcaactgttgcaggaccttctaaacttccggtgactgaaataacggagatagatggtcctagttcagctgagaattacattaaagcttctagtcctgttgctcctgtggctacaactcgtaagagtacagtccatgctgatcgacaaaattcagaaatctcatattatgcagatgatgaagacggaaatcgtaaaaagtattctaggaaggggtccacttcgtcataagtttctcagagcattgattcccttctggtcaagtgcattaccgactctaaccggtgactgcacctccgcgtaaagatgcatcaaatgcggatgatgtccctgaaggtcggttgaagcatcaaaggt

SEQ ID NO: 22197 - DNA, 667 bp, Gossypium hirsutum
  Clone ID: GOSHI-09MAY01-C37739_1
tttttccccatttcatatccatgccgattttggttgctttctggcaagcgagcgcctcagccgcgaagactgatgtcacctgttgatagatctccgaacatgatagaagagttttgccttcactatccctggccacaatccccacagtcgcttgattaccctttctatcataggctgcatcaaaattgatcttcacgaactgattgcccataaggcacagcaaaatgtcctacactgtgatactgaattcttcgcaaatacccaggacattcccggaagagatgatccatgttctccgatccagctccacaccgggggcatactgatgtattagttagcttgttctgaagtaggttaactcgtgtagctagaaaattccatgatatcttccatattgtaattttgatttttgaggggaggttaagaatccacaactttttgtaaaattcctcatagccatattgtaaagcgtaagctctaggatcatcttcaatactctgtaatagtttataggcgcttcgtactatgaattcgcccgtagcctctgcattccagacctgaaaatcatcatgaggtatctctgccaacgggatgcaaataatcttctcagcaacatcctccggaaaggtagaaaaaatcaactctttattccatgttctattatttt

SEQ ID NO: 22198 - DNA, 1298 bp, Gossypium hirsutum
  Clone ID: GOSHI-09MAY01-C37729_1
cgcatgaagtctttaaagaaagaagcagaccaattgaaagtcaatctcctgaaggctgaggcagttactaaggctgctaagaaagaatatcacgaagaaactgaaaagttaaacaaattgcagtcccagttcaaagctgctgatgacattcgccaagaagcttacgtgctgctgcagagtttgaagaaacaatcatatgagaagaacaaatccttctatcaatacagggatgatgcaaaggcagcaaatgatttggctttgaaaggggacaaagaggcacttcaaaatctgtgtgttaaccaggtggagaaatttatggaattgtggaacaacaatgatgaattctgtaaagagtacatccgatgcaataccagaagcacattaaggaggctgaggacattaaatggccgtgcacttggtcctgatgaggagccacctgtaattcctgcaattcctaaagttgtaaacgaacaagtggccaaggatcaaacagtttccagctcaactttggaagagcgaactcaagagaagactgcacctgcaaaagctgaaatagctaaggctaaacctgcagcaaagtccatggaacaaaagaacctgactagtaaatcagaaaagcctgtgaaatctgtccctcctgcaagtggttcaaccactgcttctagcagggataaaattgaagaagcagaagaaaaaccgaagataacgaaggaggaagaggatatggctaggaaggcagacgaatcgagaaaggaagaggaagcagctaaattaagagagcaacgtcggttggaggagatagctaaagctaaggaggcactagagaggaagaggcgaaatgcagagaaggcacaagccagggctgcactaagagctcagaaagaagctgagcagaaagagaaggaaagagaaaagagggcaaagaagaaggaaagaagaaaggtggctgcagcaggagtaggggatgcaagtgttacagacgaaaccgaatctgctctgactttggaaactccagctgaaactccaaaagattctgaaagtacagagaaacttgtgacagtggcaaagagatctcaaaagccaccacagttcacaaaacaaagcaaggcaaaatccattccgccgccacttcgtaaccgtggtaagagaaagatgcagcaatggatgtgggtccttgttacatccctgattgttttggccttgtttttggccggaaactataacttctctttcaactttgggctgctgcaaaagtttaacttttagacacacacacatatatatacaaatattggctc

SEQ ID NO: 22199 - DNA, 582 bp, Gossypium hirsutum
  unsure (1)..(582): unsure at all n locations
  Clone ID: LIB3584-009-P1-K1-A7
tcccgcgtccgcaacagnagnagtaagtgcaaacgggtcaaccatttgcttatttagcttctggagaaactggttttccacagttttctgttatcacacctcaagcttgtgaagctgcatattcatcaagtggttttgccaggggcagtacatggaatcctggaatttccatgcaaggagagcgtggggttgacacatcttttgaaacatcttctgcctccggtgatgaagaagaagaagaagatgatgttgggatcatcgaatgtaatcccagccagattaaaatggatcgaattgaaaagcgaagacaaatctgtagtggatgtacagcaaggtaactttagtgctggtaaaatgcagttgaatgcaacattcacatggtcgtgtatatatatttcacaggaaatggtattagatgatcgttgaatgcaacatcaaccataaaggaccttctaccgtattttgtcatataatgtcataatgtgacatgccttttacgtgattttatatatttattttggnttttattaaatagtcattttatttatgtaattgatatagaataatgtttttaatataatt

SEQ ID NO: 22200 - DNA, 441 bp, Gossypium hirsutum
  Clone ID: LIB3145-045-Q1-K1-D5
gaaaagacgataatgaagttagttgttgacgcggaaactgataaagtacttggggcatctatgtgtgggccagatgcacctgaaattatgcagggaattgctgttgctctaaagtgtggagcgactaaggcacaatttgacagcaccgtcggcatacatccttccgctgctgaggagtttgtaacaatgcgctctgtttcacggcgtgttactgcccggggaaaagcgaagacaaatctgtagtggatgtacagcaaggtaactgtagtgctggtaaaatgcagttgaatgcaacattcacatggtcgtgtatatatatttcacaggaaatggtattagatgatcgttgaatgcaacatcaaccataaaggaccttctaccgtattttgtcatataatgtcataatgtgacatgccttttacgggaatttatatatttatt

SEQ ID NO: 22201 - DNA, 739 bp, Gossypium hirsutum
  Clone ID: GOSHI-09MAY01-C37689_1
gggggaaagatcctttgaacaattctctcctgaagtcagaataaaagatccacgcaatagagaagctgcctcttttcttcctcctattagactttttcatggaacttcagattattcaataccatcagatgccagtataaaccttgtagaagctcttaagggggtaggagctgaggcagaagtaattttatatgaaggaaaatcccatactgatctgtttttacaggatccattaagaggaggaaaagatgatctatttgatcatgtggtttccgtcatacatgctggtgatgaggaagctcttgccaaggatgcttcggcacctccgaggaaacgcctcgtgctggagattttgttaaggttggcacgtcatatcagccccttttgatttgtggccgagatgtttcttttcttaagctgaatttcctccatattcatattccttgttgcaaccattgggttctttcgttcctatttagatattgtaggaacatcagcctgccatgaaatatacagtgcattttcctttaaaacataggcagcgtttggtgtcattttttaatatccccacagtgatttttattattaggattatcttatcacttgtggtttggaatcattgattgattattggggatgtaagaatcactgtgttttgttttattaaaaatcaattattattttgtttgaatgtatcgaaaaaaaaaggcatattgcaaaaacaaaaaaaaaaaaaaaa

SEQ ID NO: 22202 - DNA, 423 bp, Gossypium hirsutum
  Clone ID: LIB3145-045-Q1-K1-C12
ggaagaatcctttgaacaattttctcctgaagttagaataaaagatccacgcaatagagaagctgcttcttttcttcctcctattaaactttttcatggaacttcagattattcaataccatcagatgccaggttagaatgcctgttgacatagtggtaactaagttctatcggatatagcacctagatgttaaccatttaataccttcgtttacttctatttaattccattactatatttttattctggaattataagatgtattaagtaataacaattgcaattggaatgattctgccagattgtgctttgtagtgaatgtattttgatgaacagacatcatactgctgcaatggatttactgctatttttcacagaaacaggtgtattggttcttgacattgatgtttactgtgcagtat

SEQ ID NO: 22203 - DNA, 429 bp, Gossypium hirsutum
  Clone ID: GOSHI-09MAY01-C37669_1
cccacgcgtccgccaaaattcacagccctaaaaatcaatttgtttgggcatatttcagcagccaccgagtacaccacttcatcaggtggtcgatggcactccagcgacgatcgatgatgcctttgggcccttccaacttcgacttccagcgaagaggataaaaatccatggctgatttgcaaggttcgattgtacggaagagaacgctcgtggatgaggctcggagactgcggaattgctcatgcgagcccgatcccctggcgttgttctggcacgttccagaagcttctggcttgtgtaagcttggtaacttaaggtttcatgaatatttttctgttttgggtcaggatttgggctaggggtttattttattgtgggctaaataattggacttgtaacagggacattggacctaattatttttgtttt

SEQ ID NO: 22204 - DNA, 751 bp, Gossypium hirsutum
  Clone ID: GOSHI-09MAY01-C37179_1
aaaaaaaaaagaaagagctttaaaaaaaatctctcagagctctggccagtggccgtcctagcttgtcccggagctctaccgccttcggcacacgcgcttcacgcgcccccgctgacctcgccatacctcgccatgtatggcggtcagtgtcccattttacggcgaaaaaaggtaactttattatcctttagtatttatcagtatatatttagaacagaaagaaaataaaataaaatgaatcacctcttctttcgattgactgttcgtctttgctgtgtatgtaaaaataaactttttattgaatctgtatatgtgttccaaaacgtgagaatcggtcatttacatcttctcgatttgggctttttatagccactgtttacaacatattttagtaaggaatcttggattttcttcccattttgttgggtcgctgctgttcttttttccttttttgcaggtattcgcgaggaaatttcggcgtttgatcacgctggtaacgtagatctgtcagtggcggtgatcacggcgtgacttggagcccggaatcgtggctgtgatgagtagctggaacgacaggcattgaggagacacgttgattgcggcgcctccggtttctgaaaccctaggcttctctgtcctctgtttagcaacttaggccatttgggccccgttttttggtgggttaaaatgtaatggggtaataggttaattggatcttgtacgggttattgggtagttttagctgggttac

SEQ ID NO: 22205 - DNA, 880 bp, Gossypium hirsutum
  Clone ID: GOSHI-09MAY01-C37169_1
gcttcatctcctttcccagaatctattacaggagcaaaaagaagaaatcagagaaaggttaaagagaaacagaaacagagaatttgcactaataatttgggcgaacaatacaatacaaaacaaaacctattttttgttcttctctgggatgataccatttcttcactacatggagaaagaagagaggagcctcagaacatgcggaacaagacagccggagttgtttttacagtgggggaatagaaagaggctaagatgtgtgagagttaaagaccctcaaaaaatctctcataaatccaatgctataattcgtagaagaatcacttctcggcttttacataaagaatcctctcctttttctcaattcaatcctcgtctcactaggaattcacaagcatctattctgcggtcgcatcaccggaaagcggcttcaccagagaaggaagacacgtactacgccaccaagacggtctgcagtgggattggtggatgagaatgggaagattgcagtggatagcaataatggagaggataacacacgggtagcgtggccaaagctgtttatcgcattgtccggcccacaaaaggaggaggattttatggcgatgaaaggggtgtaatcccccctcccaggccttacaaagagacccccacattatcccccggggcctacttctggtgagccctggggcatggttgactgatatgtgccaagaaagatatgaagttagggaaaagaagagttctaagaagagaccaagaggattgaaggccatgggaaatatgaaaagtgattctgattgaagatacatcaatggcagcagcagggcctttttcttttctgatattttttgggggaatatttttggagttgatgata

SEQ ID NO: 22206 - DNA, 534 bp, Gossypium hirsutum
  Clone ID: GOSHI-09MAY01-C37029_1
cccacgcgttcgcaagcttcttcgtattctagtcctgctgcagcacctgcaccatacccaagccaatcgacaattccttatgcatcaattgctgcaaagaaggatccacaaggaatcccaccaactacccccatgggaatgagcgggtacccatattatattgggaaataataataaagtcccagctcattcatggtgatttgtgaagcgtccattgacgagtactttcttaatgcaactactagttttatactcacagttcaccaacatgtttggtctttgcagttaggtcacatgatgaccaacatgtttggtcttttgcaattagttgtcatgatcggttgtatcttgaaccaactttgcgagaccaggtgttgcacatcagaacaaaaagatcattgggtttgatgtaggagagcttaatgttagcattccataaatttccctggtttcttgtagttaactctaatatactttgtcttattgatattatttagtgtggtttttttctttggtggggtcaaatgatccttt

SEQ ID NO: 22207 - DNA, 394 bp, Gossypium hirsutum
  Clone ID: LIB3145-037-Q1-K1-A9
gtcccagaccattcatggtgatttgtgaagctctattgacgagtactttcttaatgcaacgaatcgttttatactggtggggcaccaacatgtttggtctttgcagttaggtgacatgatgaccaacatgtttggtcttttgcaattagttgacatgatcagttgtatcttgaaccaactttgtgagaccaggtgttgcacattagaaccaaaagatcattggttttgatgtaggagagcttaatgttagtattccataaaatttccctggtttcttgtagttaagtctaatatactttgtcttattgatattaaaaaaaaaaaggagtattggtttataataataaataaacttatgcattattgatgtaaaatgaggacttttcttaatcaa

SEQ ID NO: 22208 - DNA, 538 bp, Gossypium hirsutum
  Clone ID: GOSHI-09MAY01-C37389_1
gtgtaagtaaatattttgactcatactgcagatgttgccttaagtgaggagcagcttactgcaatagaaaaattgaaaatgaaacacaaggcacaggatgcaaaggaaagtttagagagagatagagaagacaagcatccaattaatgaagagcagaaaaggaatcacagatcagaatcgggactcggttaataacatagttgagctcagagctagaaattcaggccactcaaagaacacaggtggtgcgctttgggacattttcagaagggaggatgttcctaaactggaagcttatcttagaaagcattctaaagaattcaggcatatctattgctccccagttgaaaaggtaatccatccaattcatgaccaatcgttttacctcaccatggagcacaaaaggaaattgaaggaggaatttggagttgagccatggacgttcgaacaaaaccttggagaggcagtttttattcctgccggatgtccgcaccaagttaggaatctgaagtcatgcaccaaagttgcttgggacttt

SEQ ID NO: 22209 - DNA, 991 bp, Gossypium hirsutum
  Clone ID: GOSHI-09MAY01-C37359_1
cccacgcgtccgccggattcgcatgggagggaaataagcatcaacaatatggttcttataacgacgtcagccataactaaaggtaatatgcatattctccccgagaaggaacacatgaaattccccgaggaaagagtactcggagccaaaaattggcaaatgcagatcttagttgctcctgttactgatgatgcaagcagaagcaacgacacaggtatcagagtaacgaccataaaagaagcttttagtcctacatctgctaataaaagaaagctgatcaacacttccgagtcatctgagctagaaaaaacagacacacaagaacgagaacccaaagtgtctagatcttgtttggatttaaattttccagtggaggagacccttgtggctcccattgatttggggccgtcaaaaagcgagtccttgtctgagaactcagaagtttggttggaagaattctttagcgaagtatataaaaagatacatttcaagtcattcgatttcgatggacttgctaataaaattgtaaaggaaatcagctcacaatttcaaaggacagttggaagtgaagttctgttagagattaatgaagaagtgatggtacaaatacttgctgctgtctggttttcggacaaaaagggagctctagaagattgggttgcaaatgtgctgggaagaagctttgctgaggctgagcaaaaattcaacctcaatccccaatcagttgtgaaactagttgcacgtgaaggtagtgtggtgaaggaacaagctcccggaatatgtcttcctgcaaaaattgggctgagctgattgttttcttccttttttgaggatgtaattaaatgctcatcgtagctttcaagttatggaaaagtcttgtttgtgaggctttcttttggggtattatttttgtgttgtttaaaacgcagccaaagaatgtataacgtttcttctggtccaaagactgcctgcaaattacctggatttattc

SEQ ID NO: 22210 - DNA, 630 bp, Gossypium hirsutum
  Clone ID: GOSHI-09MAY01-C37319_1
cccattcgttcgcaggagaggaacatcgatagatagaaggagatggcggtgagaggtagagcagtagaaacgctgccaaagctgatgaggagcccgaggaaggactcggcttcttcaacagtgactcgaactccagccttgccctcccttagacgcgctttctctctctacgatcagattaatctcatcgacaatgttcccgatgaccagcttcgtttccaacgatatacggaaacaggattcactgtgaacggtgtcaactatgaaggcagcttgctttgtgtgggaaatttggttacttcttggggcccccgtaaattttctgaaattactccccaaagcttatccatctttcaaattatacgacctattccagaaattttgattcttggctgtggaaggtacattgaacctgtagatccggaactcagacgcttcatccgatctactggcatgaaattggaagccttagactcgagaaatgctgcatctacttacaacatactgaacgaagaaggtagaattgtggctgctgcactgctcccatatggagtttcttcatgaaccttggtactcccaatttttacgacttgggtttttgactttgtggatgagaaattatccaatgtt

SEQ ID NO: 22211 - DNA, 563 bp, Gossypium hirsutum
  Clone ID: GOSHI-09MAY01-C37339_1
gtaatcttgacctggcagtttcaaaatgcgtcgctatgatgatcgttattgtcatactcgtctctatgttggccatatctcctcaagaacccgaacacgtgatctagaacgtctctttagccgatacgggagaatacttgatgtggatatgaagcgtgactatgcctttgttgactttagcgatccccgagatgctgatgatgcaaggtatagcttggatggtcgggactttgatggaagccgcattgttgttgagtttgcaaggggggtgccacgaggttctcaggaatatctaggaagaggcccccctcctggatctggtcgctgctttaattgtggtgttgatggccattgggccagagattgtacagctgaggactggaagaacaaatgttatcgttgtggagaaagaggtcacatagaacgaaactgcaggaacagtccccgaaaactgagttctcgttcacctattagatctcgctcacctcgccgtggcagaagccggggtcgaagttacagtcgtggcctgagctactctcgttcaagatctttcggtaggagag

SEQ ID NO: 22212 - DNA, 471 bp, Gossypium hirsutum
  Clone ID: GOSHI-09MAY01-C37329_1
ggaaaatgcaatatcaaattaccttagtttttcattgctttttcctctcttgggggggattttgtaatcccgatttcagtgtttacaacggctttttatagccaaaatacatcaagaatattctggaaaaaataaataaaataaaaaatctttatttttttgttgtattgttgttatctactggttgctgctgtggttgttagttcgttgcaggtacaactgtgcatggagaaactgctcgtgggcgatagtgcgaaggcttccagaagcttcaccgtttgggccctatgagcctgctttgaaatcggctggctggaggctgttgcgaaggccactggtggttgcttgcggcgcgaggggacgttcgtgggagctgcggcgctgtttagctcggatttcaatttttggttctgaaattttgggccatttgggctagttttgggattgggccattttttggacttattttta

SEQ ID NO: 22213 - DNA, 1069 bp, Gossypium hirsutum
  Clone ID: GOSHI-09MAY01-C37249_1
gtcttggcctgtgcaaatcctagtggttcgcgctataatccgcgtctgtctgtgattgacaacatacacctgcctccaaccttgctgtccagatttgatttaatctacttgattctcgacaaggctgacgagcagacagataggcgtttagctaagcatattgtttctttacattttgaggacacagagattgctgagcatgatgtcatagatcttgctacattaacagcatatgtgagctatgctcgcaagaatattcacccaaaattatctgatgaagctgctgaagagctaacccgaggatatgttgaaatgaggaaaagaggaaatttcccaggcagcagtaaaaaggtcatcacagcaacaccaaggcaaattgagagtctgatacgccttagtgaagccttggctcgtattcgattctcggaaacagttgaaatgcgagatgtaactgaggcattccggcttttggaggttgctatgcagcaatcagcaactgatcactccacaggaactattgatatggatcttatcaccactggagtttctgcaagtgaaaggatgaggagggagagtgtgttatcagcaacacgcaacataataatggataagctacaacttgggggaccatcaatgcgattgctagagttactagatgaaatgaagaagcaaaactctggcagtgaaattcaccttcatgatctaagaactgcagttgcaactctagccagtgagggatttgttgttcttcatggtgacagcgtgaagagaatgtgaatgagaaagctacaaaaaagaccgaaactatcaaagccgaacgaaatagcccgcaaacgtgctaaccaccgcgaatgctgccttgtgacttccgagatgccctctgcgaaagacatttactcttaaggtatcccttagcctgtggtggacttaaagaagagaattgagtgttaggtatgtcatttaattagttgattgtgacatgtatcatatccttaccggctgctagtgtaatacctgagcttattcttttccatgtctcttcttttaagatgtctaaattaatgttttt

SEQ ID NO: 22214 - DNA, 601 bp, Gossypium hirsutum
  unsure (1)..(601): unsure at all n locations
  Clone ID: LIB3543-029-Q1-K6-B3
ggnatgcgtatgtaggcttcttttactgtngagaagatggaagctccctttgtttgcaatgtgatatggctgtacatgttggaggtaaaagaacccatggaagatatcttttattaaggcagagagttgaggtttgtcacttctaatatcttttgaagataatttgagttaaaatgttgctcttggaattttattgccttttttcttttctttttttttttccttaatgcagtttccaggggaaaaacctggtaatgtagaggacccaacttcacaacaggtgggtcccaatgacaccataagaggccaaaatcagataactaaaacaacagcaggagagaagcaacaaaatcacaaggattctcctgttgaagagaaggatgctaaagttgatggccatcataatatgggatctgaaatgatagatttgaatatgaagcctcattggtgaagcctcaaaaatcttataatctacccactggaagccattaatgtgttttgtttatgacgccaaaaggacactcctgttgtttgtatggatcccgaatactaattctaagaaagatgctgatcctgcaacggcagtaaaacaagtccatat

SEQ ID NO: 22215 - DNA, 398 bp, Gossypium hirsutum
  Clone ID: LIB3145-040-Q1-K1-A8
aaagaacccatggaagatatcttttattaaggcagagagttgagtttccaggggagaaacctggtaatgtagaggacccaacttcacaacaggtgggtcccaatgacaccataagaggccaaaatcagataactaaaacaacagcaggagagaagcaacaaaatcacaaggattctcctgttgaagagaaggatgctaaagttgatggccatcataatatgggatctgaaatgatagatttgaatatgaagcctcattggtgaagcctcaaaaatcttataatctacccactggaagccattaatgtgttttgtttatgacgccaaaatggacactcctgttgtttgtatggatcccgaatactaattctaagaaagattgctgatcctgcaacggca

SEQ ID NO: 22216 - DNA, 536 bp, Gossypium hirsutum
  Clone ID: LIB3825-025-Q6-N6-F3
ataagaacgaacatgtatgatgttatattataggtagagtgagaagtagcatgtacaggtaatataagttgcggaagaaagggagaggaaagcaaaatgcacacttgccatttacatatatttatatcaaaactgaaggggtttaaaaacctctttttctccatttcaactatgtgaaatgtgagttgacttccgtaaatccagttaacccgaggatctccggctccatacacttaggtccgactttttaaccccactggcccttttattatgagattgctttgaatttaaaaatggtggctgcacatttggttgaaaagaggtgttgttaatctgcaagttgtctccaggaacaggtttgaacttcaagttgactatcaatacgtgaggcttctctgcctgttgggttatacaacttccgaaactacgcaacttctcctcagctgcctggttaggtattagaatatctggcttgatattttccgacgaaaacgcgagcagacactgactcatgttcctgatcatatctgggagag

SEQ ID NO: 22217 - DNA, 412 bp, Gossypium hirsutum
  Clone ID: LIB3145-039-Q1-K1-F12
ggccgacgcgacgcgaacggaagcctcacttattgattgacaactcgatgttttaaactgatcctggagacaactagcgcagggttttcacgtatcttgggccaaatatacaaccaccatttttgaattcaaagcaagctgataatgaaatggccggtggggttaaaaagtcggacctaagtggatggatccggagatcctcgggttaactggatttatggaagtcgactcacatttcatatagttgaaatggagaaaaagaggtttttaaagtttttcagttttgatgataaatatatgtaaatggcaagtgtgcattctgctttcctctcccatttcttccgcaacttatattacctgtacatgctacttctcactctacctataatataacatcatacattttcagttc

SEQ ID NO: 22218 - DNA, 378 bp, Gossypium hirsutum
  Clone ID: GOSHI-09MAY01-C30889_2
ctctctttgagctttcttcttcggtttatctctgaagtcttatcatttcaatcactgtgctatgcacacacacacacatactttgaagaaaaaaaaaacctttaaagctctctttgaaactcaagcatcactgtataatctgatcatctcttcaaatatgccacgcccttttttccataagcttattctctcctctactctccaagataagaaactgaggatccctgataactttgttaagaaattcaaggatgaactttctgttgcagctgctctcactgtccctgatggtcatgtttggcgtgtagggattaggaaagtcaatacaatcatgggaaatcgtatccgttcgatgaactcgaagaccaagaatgcatg

SEQ ID NO: 22219 - DNA, 951 bp, Gossypium hirsutum
  Clone ID: GOSHI-09MAY01-C30889_1
ttttctctctttgagctttcttcttcggcttatctctgaagtcttatcatttcaatcactgtgctatacacacatatatatacacacatatactttgaaaactcaaaaaaaaaaaaaacctctttaaagctctctttgaaactcaagcatcactgtataatctgatcatctcttcaaatatgccacgcccttttttccataagcttattctctcctctactctccaagataagaaactgaggattcctgataactttgttaagaaattcaaggatgaactttctgttgcagctgctctcactgtccccggtggtcatgtttggcgtgtggggattaggaaaggtgacaacaaggtctggtttcaagagggttggcccgaattccttgaccgatactatatccgaataggatactttttgatctttcgatgcggggggggggcggctttttgtgttagtatctttaatttgtataattctgaaataaactatcagtctaatgctcttcttggtagtcaatacaatcatgggaaatcgtatccgttcgatgaactcgaagacgatgaatgcatgtcttcagctatgcagcatttgttcgggggatccaaacttaaccattgcgttaattggagcggtgaagttaaccttaatgcagcaaaaagcgcgaataatcaacctattcgagtgaaattgcgtacttcaggttcagagacgccaccaccaaagaaacccgggaggaaaaagcagaagttcgaccctaatgatcaggatttgtctgttggacatgaaaacgattcggaaatgcggtataggttttacaaaagcgcttcagctcgaaagagaaccgtgacagccaagaaaaataaatgggcatgaatgcacccaagcatttgaacccaataaccctttctgccaagtgtcttgcgaacatcctttctataccggggaattt

SEQ ID NO: 22220 - DNA, 751 bp, Gossypium hirsutum
  Clone ID: GOSHI-09MAY01-C130831_1
attaaattaaatatgtttccttttcttcttattattatcctctccttgtcatggagaattagtgcttcagctcaacctgctgaggaatttcttcgttgcctttccattcgttttcacaactcttcttcctttgccaaactcgtttacacccaacataattcatcatactcctctgttttgaagtcatctgctcaaaatttgaggttcacaacaccatctacgcctacacctttggccattgtaacaccactgcttgcatcccacatccaagccgcagtttattgttgcagaaaacatggactgcaagtcaggactcgaagtgggggtcatgacttgagggtctttcttatactaccgcttttaaagtgtcctttgtgggtgtgatcgattgggtgaatcttcgatcggttcaggttaacgttgaaaaagctaccggtatgggttggaatctggtgcaactattggagaattgtactacgaaattgctcggaaaagtagaactcttgcctttccggctggtatcggtcacaccgtgggtgttcggtggacatttgagtggaggaggctatgccgtatggtttcgaaaatatggtcttggtgcagataatgtaatcgatgctcgtttaattgatgttgaagggagaatcttgataaaatcccgtgggagaagatttgtttggccattcaggaggtgtgggtagcttggatagccttgctgaagctaataatgcagttcaacttatgtctgttt

SEQ ID NO: 22221 - DNA, 724 bp, Gossypium hirsutum
  Clone ID: GOSHI-09MAY01-C30539_1
cccacgcgtccgcccacgcgtccggtcgcccttgctatcacctgcaaataactctccctcccttcgtccgaatttctctggaaaaaatctcaaattcccttatttgggttgatatatagtattatatatatatatttacaagaatggtagcttcggctatttcagcttctttcaatctctctctctgtactcaatccagacccacttctatttcatccctttctcccagaaactcgacgaagttgatagtctctgcattgccatccccttatggagactcttctacaatggggttatctagtagaactgctgggctacctatgaagatcaacaagaagggcttacttgaatccaatccaagctacgatgcaatacaagctaaaacggggaatccacctgtgatgccagcagtaatgactccaggggggcctttggacctttcaactgtgttattccgaaatcgtatcatcttcattgggcaaccagtcaattcacaggttgctcaaagagttatatcacagcttgtgactttggcaactgttgatgaaaatgcggatattctggtgtatttgaactgccctggcggaagcacctattcagtcttggcaatctacgattgcatgtcttggataaagccaaaggtgggcacagtttgtttcggagtagctgcaagccaaggagctcttcttcttgctggtggagagaagggaatgcgttatgcaat

SEQ ID NO: 22222 - DNA, 464 bp, Gossypium hirsutum
  Clone ID: GOSHI-09MAY01-C30459_1
cccacgcgtccggctggggctggatcggctaccttgtcaatggcatatgcagctgtcaagtttgcagatgcatgtctccgaggcttgagaggagatgccggagtcgtggaatgtgcctttgtagcttccgaggttaccgaacttcctttctttgcaaccaaggtacgacttggtcgtactggagccgaggaagtctatcaactagggcctctaaacgaatatgagagggttggtttggagaaagcaaaggaagagttagctggaagcattcataagggtattgccttcatcaagaaatgaaattgttgctgctgagctaatcttttaatataaatataacataaagcctcttatatctgttaaaagggctttgtatatgttttggcgcttaagaacctctattgagacctaaatgccattgatatactcttctggttaatgcagtcaaattttatgcttgtaaa

SEQ ID NO: 22223 - DNA, 782 bp, Gossypium hirsutum
  Clone ID: GOSHI-09MAY01-C30479_1
gcgagcgccgcccttttttttttttttttttttttttttttttaaataaaatacataaacaggtaataaattcacatagtataccaccctcatattagtatatattttggtggattaataaacttattaaactctcacaaaacatgctaaaatgggggggaaaacatcgtagtatagcaaaacattcaatgtagccagattctagggcatatgtggcttgcttcatcgacggctgtaaatcaggtcgatgatgatcaaggattcggggaagtttggatgctcaaaagcttcacgtcgtcgaggactgggccacatagggaagagaagtcatcactcctcatggtgtaaaaagtgctaaggaacatgattcttgttctgttggaaacagccttgaatttaagctcagcacgcttgaatccccctttgccctttgactcatatgggactttgagtgtgtcttttccagcgaatgcctccacaaccaaagaacgtacacaggagttgttagcatccccaaccgcaaacgagagcctgtacatttttccgacgatggtcctgactatctgagcgatggcactctcttttccagcaactagctccactgcttttcgcccttgaggcacaaagtaatgtgctgagtcgatgtacttgacagccttgagggattcaacaatccaggcaggcagaggagagtgatcatcctcgatgttgggtggaattaagacaccccatggagtgttggggaatacgtagggacctttttcaaaacctccatttttcac

SEQ ID NO: 22224 - DNA, 556 bp, Gossypium hirsutum
  Clone ID: GOSHI-09MAY01-C30469_1
cccacgcgttcgcccacgcgttcgatgctttatatgagcagtgtgattttcaagcaatatgtggaagtggtataaaaggaaaagcaggactatctgctgacaatttggcagaagatcttgggcctctctttgagtctataatcagatgcatacctggtccacatattgacaaagatggtgcactgcaaatgcttgctacaaatattgagtatgatgaacataaaggacgaatagctattgggcgcttgcatgctggggtacttcggaaaggaatggaagtaaaggtttgcacctcagaagattcgggtagatatgcaagaatttctgaactttatgtctatgagaaatttagtaagaccgctgttgagagagtagaagctggtgacatttgtgctgtttgtggaattgaagatattcagattggagagactattgcagataaagcatttgggaaagccattacctggccattaaggtggaagaaccaactgggaaaatggctttctctatcaacacttcaccatttgttggccgtgagggaaagtatgttactagc

SEQ ID NO: 22225 - DNA, 963 bp, Gossypium hirsutum
  Clone ID: GOSHI-09MAY01-C30799_2
aaatctcgttatcaaatcttaatactttcttttcggttttttaattgttaccgctgaagtgaaagattggaattgggaggaaaatccaagattttgaggttttgagacggataagtgtttggttcctgtgttaaaaaaatagaggtcaggaaataagaggagagaattttggggatttaagatctgggattctctccgtagatagaaaaaatggtgaaactttgtttaatggcttctcatgggtacgctcccagcccgggacttgtttttcaccaggaaaagggtgctagcaggatgatcaaggaatgtcaaaccttgttgccaagtaaagcaatgaaacatgacatggtacaaacggctccctttgatctgaagtgcaatggaatcaaagagctgccaaaaccagttacccttctttgtgagcctaaactgattgtagatgtcgatccaaaagcacaaaagcctatggttattgataaaccagttgctcatctagcacacagctctctttggctctgggatagctgagaagtgcacacgacatgacaaaactcttaaagtttcttgtgtctggatcaaaggatgtggataaaggggaacttgatttatcattgctatcagatttgattgaaccgttgatgtttggtgtgcatcagcagccttatgcttctctaatttatccaagtagtgagtttgatgaccagaagccgcttccagacattgtaggagagatggtacaagattcaaaacttattgttaattcagatggtctagttgtacttacaagtagtgggaccgagatgaaagacattctttcgatcgttgccgaatttcacttatcaagcaactcaactaaatggagaaggcagtcgggacttgtcccattcttcaacagccacttgacttcaaagctaggtctgttataactgtcttgtcattcatcttggtccttgtgaatttact

SEQ ID NO: 22226 - DNA, 1877 bp, Gossypium hirsutum
  Clone ID: GOSHI-09MAY01-C30799_1
ctccgcctgccatatccaacctataaaatttctccaatccttacgatcaaatcacataaatcttgttatcaaatcttaatactttcttttcgtttttttaattgttaccgctgaagtgaaagatttgaattgggaggaaaatccaagattttgaggttttgagatggataagtgtttggccctcgcgtccgccctcgcggcctgtaaataagaggagagaattttggggatttaagatcttggattctctccatagatagaaaaaatgttgaaactttgtttaatggcttctcatgggtacactcccagcccgggacttgtttttcaccgggaaaaaggtgttagcaggatgatcaaggaatgtcaaaccttgttgccaagtaaagcaataaaaaatgacatggtacaaacgggtccctttgatctgaagtgcaatggaatcaaagagcagccaaaaccagttacccttctttgtgagcctaaactgattgtagatgtcgatccaaaagcacaaaagcctatggctattgataaaccagacacagctctctttggctctgggatagctgaagaagtgcacaagacatgaaaaactcttaaagtttcttgtgtctgggtcaaaggatgtggataaaggggaacttgatttatcattgctatcagatttgattgaaccgttgatgtttggtgtgcatcagcggccgtatgcttctctaatttatccaagtggtgagtttgatgaccagaagccgcttccagacattgtaggagagatggtacaagattcaaaacttattgttaattcagatggtctagttgtatttacaagtagtgggaccgagatgaaagacattctttcaatcgttgctgaatttcactgatcaaacaactcaactaaatcgagaaggcagtcgggactggtcccatacttcaacaggacccggagcaaaaaagtgcatgctagtactagtctcgctccaaaatatgaagttgcgagtgttgcacctccaaagagtccggagaaaatcaagcccaagccatcaccaaaaaggaagatgtctaagaagtcaaccagggagagaaatctttacaaagcaaattatttccatgcatgtgagagtcttctttctttgatggtaaataagcaccggcatggcaaaatggcaattctttccctgaagaagtctggccctgaacttcctcaacttttgacccaattctctgctggcattgccgggactggtcttgctgttgtcttgtctgttttctgtaaggtagcgtatgcgagagccccattgtgtacatctaacctctttagcactagccttggtttcgggctagtttggctctcctgggcagttaacagactgagggacacgatcgaaaatatcagcaagaatactggcaagttggatatgaaggaaaaagagatgatttagagagttgagaaaagtgttgatgacatctacatcagagctgcaacgttgatggctgcagcgatgttaaggtttgtatgaattctgaagatataactcatttggataaccatctggactggctgaatatttcaacaacagaaaacattgacatctatggtcttgtgatgaccttgagctcatatgagcaggacctcagcatctgccagcttgtatatgtataataatcattaagcgctatgaatggagaagagggtgaaaacctttcatgtattttggtgcacgcattgcctctgccgggcataaatgggtgggagcggattagtagaactggtactaatctttaatatattcttcttcatgcaaagaaaaatgactggttatggtgttcacgttccaagagggctacaatttttaaatgtcttgaaatgctgtttgatt

SEQ ID NO: 22227 - DNA, 616 bp, Gossypium hirsutum
  Clone ID: GOSHI-09MAY01-C30719_1
atggtttaaaccattgattgtgctggaggaacgcgaagaggtgtatgataatctggaagggtattatgattattatccttacgaagatgaggacgatgaagaagatgaagtttattacaccaattcaccgagtctccgcatcggcaaccggagatggggtgatagtggatatgtaaggtcagggcgccaagaagccaggcctgttcaacgatccagggtccaggactccactggtgccgggtcctcacgcgagcctaagaataaagaaaccacaaaaagtacaatggggagacgagcaaagagaacgctcaatcgtgaggctgccaataaggctgctgaagaaaaacatcaagagcatttgatgagttcgaggctgaagtgattttcttcgacgttgaagtgtttaataaaaaccttaatactgaagaataaggttaaccggaatccatgtatttggttcttgtattgtacagtattttctttctctgcaacaaaaataacgacattgtcgaattcgtatctatcggtttatgcagtcatcttaagaggtgacattcagttaaccgatctcggcgttgtatcttcttccttggtgacttggtagggaaggatttgt

SEQ ID NO: 22228 - DNA, 689 bp, Gossypium hirsutum
  Clone ID: GOSHI-09MAY01-C30669_1
tttcacgcgtccgttcgaacttcttctctttcaatcaatttttacaacaaagatggtcccgctcaatacggtccgaccgtcgatttcttgttgttctttttcttccggtttcgatgccggaccgccggtaccggttcccaaagttggtttctttaagttaccaaggtcaaacggcggtaaccatgccaagttgagcttagttcaggcgacggaggaatccaccgttgcgacgacgaatggtcgtgttgctgcagtttccggtgaaaatgcccatcagatggccactaatggaaaggcagggaacatagtatggcacaaaagttcagttgataaagttcatcggcaagagttacttcagcaaaagggttgtatcatatggattacgggtctcagtggttcaggaaagagcacattggcatgcgcgctgtgccatgccttgtattcaaagggaaagttaacttacatccttgatggtgataatgttcggcatggcctaaaccgtgaccttacttttaaagctgaagatcgtgcatagaacattcgaaggattggagaggtggcaaagctctttgttgatgctggcatcatctgcattgtcagtgtgatatctccctaccgaaaagaccggcatgcatgccgcgcgctgttaccagatggagatttcattgaggtgttcatggatgttccaa

SEQ ID NO: 22229 - DNA, 533 bp, Gossypium hirsutum
  Clone ID: GOSHI-09MAY01-C30629_2
attgggctgggaagaattggcatggcaattgctaagagagctgaagcttttagctgccctattagttactactctagaactgagaaaccagaaatcaaatacaaatactatccgagcgttgttgagctggctgccaactgcgatatcttggttgttgcttgtgcactgactacagagacccaccacatcatcaacagggaagtcatcgatgcattgggtccaaagggtgttcttatcaacatcgggagaggccctcatgttgatgaacccgagctggtttctgcattggttgaacaccgattaggaggtgcagggcttgatgtgtttgaacatgaacctgaagtaccggaagagctttttgggcttgataatgtggtgctcttacctcatgtaggtagcggtacggtggaaacccgccaagctatggctgatcttgtcattgggaacttggaggcacactttctgaagaaaccactattaactcctgtggtttagttgtgcctatattagttgattgccatcttcagatcgat

SEQ ID NO: 22230 - DNA, 989 bp, Gossypium hirsutum
  Clone ID: GOSHI-09MAY01-C30629_1
aactggttcacagcccgcaatcaatccccatcactgctctcttttcactctccaggcttattggacttggaaattccaccttactatctctcacaattcaatccactatggaatccattggagttctcatggcttgccccatgaactcttacctcgaacaacaactcgagaaccgtttcaagctattcagattctggacagtgccggacaaatcatcctttctggcttctcacaaggactcaatccaggcggtcgtcggaaacgcctttgccggtgccgatgctaagctgatcgaggcgttgcccaagttggagattgttgccagcttcagtgtggggcttgataagatagatttggccaagtgtaaagaaaagggtatccgagttaccaacacccctgacgttttgactgaggacgtggcggatttggcgatcggtttgatgttggcggtgttgaggaagctctgtgagagtgatcggtttgtgaggagtggcaagtggaagagagggcaatatgtgttgactactaagtttactggaaaaagagttggcattattgggctgggaagaattggcatggcaattgctacgagagctgaagcatttagctgccctattagttactactctagaacagagaaaccagagatcaaatacaaatactatccaagcgttgttgagctggctgccaactgcgatatcttggttgttgcttgtgcactgactacagagacccaccacatcatcaacagggaagtcatcgatgcattgcctccaaagggtgtgctcatcaacataccgagtggccctcatggtaaactgacgcgacttcagaaaatccagcttcgaagcctactgaagggtgatgctgcatcttaaactgttttcccactttgttttattgaatgagaaacttattgcatttcccctggattgtataagatgtatacattcctttaacatgttggctttacatacgtttgtggtgca

SEQ ID NO: 22231 - DNA, 457 bp, Gossypium hirsutum
  Clone ID: GOSHI-09MAY01-C30139_1
cgtttattgaacttgcgggaactcaaaaacaattcgaaattaatggctaccactcacctgacaactcaaattctccggcaagcccctcctgtttgcggaagtgtccgacgtgttaccaccaccggactctcttctagttctcctcttactataacctttaagacaagaaaagaaccaagtccgaagaaccaaaagttcaagtgggcacgtaagttaagcttagtggaggaaagcagcccgccaaaaccaactgttgatgttgaagggttagctactttcttgtacgatgatcttccccatctggttgatgatcaagggattgataggacggcatatgacgaacaagtcaagtttatggaccctataacaaagcatgatacaattagtggttatttgcttaacatttctttgttgaaaagactctttaggcccctgtttcaattgcattgggtcaagc

SEQ ID NO: 22232 - DNA, 797 bp, Gossypium hirsutum
  Clone ID: GOSHI-09MAY01-C30299_1
gcaaacaggctaaagaacgaatatgcagattagttcaatctggcctcgcgtccggtgcaaaactactgcttgatgggagaaatgtcgtggttccaggatatgagcaaggaaattttattggtccgacaattttaactggtgtcacagctgacatggaatgctataaggaggaaatcttcggcccagttcttgtttgcatgaaggctgacagcttggaagacgctttaaacattgttaacagaaacaaatatggtaatggtgcttctatatttactacatccggtgctgtagcgaggaaattccagacagaggttgaggccgggcaggttggcatcaatgtccccataccagttcccttgccgtttttctcatttactggcaataaagcatctttcgcaggcgaccttaacttttacggcaaggctggagttaactttttcacccagattaaaacagttactcaacaatggaaggatttacctagcggcagcggtgtttccctagcgatgccaacatcgcagaagttataaccatgatcggattgttctttcaggagttgtaggtctgccctgtaccaatgtcaagatcttcacttaaccacctttcaactgattccctatactgctagtttataagacgggaaaacgggaaataagattgtccttaatgttatttaactatggttgtggacacatttttgttcgcggtcacatttatagtggttgcggatgtaatgcatgctattactggcaattgtggtaaatatcggttgttaaatccatctcttttggaaaaaa

SEQ ID NO: 22233 - DNA, 503 bp, Gossypium hirsutum
  Clone ID: LIB3120-004-Q1-K1-A6
catagctatatcatatgagggttgtaactcactggtggctgtgcacatagtgtgtgaagaggcttgctgctagaaggaaaacgctgtgcagtatcaatataggctgccaatactgatggcgatgtgacgtctgatgcggccaaagatgctacactaaatgctctagttgctgcttgctatggagctggtgcacaaacgtgcatggcactacacacactaggcattcatggcgactctcaatcatctgtgaatgacctggtacagggtcgcctaaagacatatagtgaatgctggactataacccaatgcagaccttgggacagtgattaacatacaggctagagaacgaatatgcttattcatataatctggagttgagagtgcggcagaactactgctagagggtagaaatatcgtggatacatgatatgagcaatgaaactttattggtccgacaattttaactggaggcacagctgacatggaatgctataacgaggaaa

SEQ ID NO: 22234 - DNA, 382 bp, Gossypium hirsutum
  Clone ID: GOSHI-09MAY01-C30259_1
ctacctcaatagccaggccctctctttccgcgtcaccaccagcgacggcgtgactctcgacttccccaacatagtcccggcgaattggaacttcgggcagacgttcacaagccgggtgcaattcacttaaagatccaagatccgaaatcctgcggcagaggcatgctcactatttttgctaccattgcccgccaaccagtttttttttctttcaaaatttgtttctttctccccgccgacttactatttacacacatcctttcttgggttgctaaatgatgcagagcttgggaggtgttggacattattagtttacttttcaagaaataaaagttgaaagagggggtgatggttgtagccaaaaaaaaaaaaatataagtat

SEQ ID NO: 22235 - DNA, 657 bp, Gossypium hirsutum
  Clone ID: GOSHI-09MAY01-C30269_1
gaaatcagtccccaaggctaccccccagcagcgccgattttcgccatttacagcccagagacgaccccctttcgaactccgatttcaacagagcagaacgagggttaacggcgcaaaaaacaaaggtcactttctcctttcttatttgctttatgtatatgcttatgtgtgtgtaaatagcataacagaggaaagaaggaagagcaatcgaaaaaaaaggataaaaagaaccccaatcgataaaggaaaaaaagaaaaccttctcttgtgtattgatttcgtttttttgatacagtatgcgtgtccccttgaaacaatacagaaatggggtttttatagccccgaaaatacatacatttcccttctattttttctatttttttcttttctgttgctattttgctatttttctttttctctttctgtttgctgctggtttgttgtgcaggtacgggtatggaggtgcgcgagcgcgcatatacggaggctatgcgtgaagaggcaggcgatcgtggggggagcgtacatgtgtgctggcgtcgatggctgaaggggagttggaaaccctagggttttctgtttcagctaggctaagtgttgggcctccgtaattgggctaaggttatttgggcttaggttttggctaattgggtttag

SEQ ID NO: 22236 - DNA, 546 bp, Gossypium hirsutum
  Clone ID: GOSHI-09MAY01-C30229_1
aaaggattgtaggcacagttgtacgttcagtgcaagatgatcaaaaggaacaagacattaaaatcttggatgctgaggttcaagctctggaagagctttcaaagcagctattcttggaaatctatgagcttcgcattttgcaggaggctgctgcttattcacgaacatggaagggccatatgcagaatttgcttggatatgcaggttcagtttattgtgtgtacaaaatgattaagtcattacaaagtgttgttttcaaggaggctggttcagttgaccctgttacaatgtcaattaccatattgttgcagttctttgatattggaatagatgctgcattgttatcacagtatatttccctgctgtttattggaatcttgatcacaatatcagtgcggggtttcttaacaaatctaatgaagttcttctttgcagtttccagagttggtagtggatcttcaagcaatgttgtccttttcctttctgaaattatgggaatgtacttcctctcttcaattcttctgataagaaaaaagttgaggactg

SEQ ID NO: 22237 - DNA, 687 bp, Gossypium hirsutum
  Clone ID: GOSHI-09MAY01-C31939_1
cacataccagcatgattctatgcttctgcagtctgcactccacgtacaatgacaccgagcgaaggccgctgacacctagcgacctgagggctgatggacctacccttagaaacaggttcacccggatttgaaaggcataacacggcacaccctcctggttccaagcatgggtgtaataggatctaggggatgcctttggagggacctaatagagcccctgttgccacacccaaagaatcccctcatcattcggcggtcccaccaaatgtacacccatcagcactggcacccaaacctaaacacaggccaattacctacttagctccgacatccagtccgctgccaaatgtagcgtttgctcatgccaagcctccatcaaagagtgaaccaaataaagaggatcctgataggataccttcagtttcaccatcagcatcggcacctttctgtcttccaactatgcgatggctgctatctttcctattagctattattactttacatttataacaacagggtatatcaacctattctctagttacaatcacttcaaaactgtataatccaagagttttgcggacgagagcgagagcaatgccgaagggtgttggtctcgtgtttcgagtgggggggatatatgctgttttctgtgctgtaaatatgttgattaacacggcaaccattttc

SEQ ID NO: 22238 - DNA, 567 bp, Gossypium hirsutum
  Clone ID: GOSHI-09MAY01-C31509_1
ggggctgtgtgtccatggaagtgctagcaacctcctctgcatcttctacataccctcttttcactttagataaccccaacaaaccattttctttcacattcaaccccatcatcatttctcaggttcatccatggaaatcttttcctgttaagaagattgaagctcgattattgtgtcggattttgtgtaaacggacgaatctcgacaactctggaagttggcgcagcagtactaatgcgatttgcaagcacaagtttgtgtttcacgcactctgcggaccgaataaaaactttacatctcagtctggtttatttgcaataaggcatgggcacttacttagatcctggaatacaagtagtcatcaaaaggtgaatagtcattcgcaaaagatcagagaacatttctcgcgtggtttcgttcgcttagttgctgctatgttgctggttacttctgcttccgtcgctctaagcaacacgccctcatgggcgctttctgaagaaaatctcctctttctagaggcatggagaacgatagaccgtgcatatattgacaaaactttcaatggac

SEQ ID NO: 22239 - DNA, 1060 bp, Gossypium hirsutum
  Clone ID: GOSHI-09MAY01-C31499_1
caaaactctgttctttttttttctaaatttattttttttagtctttgaattaaagtttggatttttcataattaatcgatttattttttggttgggaattaaagaaaattacttttagaaatttaaaaaataataattaatggcttcgtctagtcctcgcactgtggaagagatcttcaaagactatagcgctcgacgctccgctctcgttcgtgctctcacttacgatgtagatgatttctactcgcaatgcgatccagataaggagaatttgtgtctgtatgggcacccaaatgaggcttgggaggtagctttaccggcagaggaagttccaccggagctccccgagccagccttgggtatcaattttgctagagatgggatgaaccggaaagactggctttcactggttgctgtgcatagtgattgttggttgctttccgtgtctttctactttggagctcggcttaatcgcaatgaaaggaagcgcttatttagcatgataaacgatcttccaaccgtctttgaagttgtaactggaaggaagcccgtgaaagacaagcccacagtagagagtggaagcaaatcacgaaacagcacgaagaggtcaatcgatgggcagccaagaaacaatcctaagttagctgatgataattacgaggaggatgaagaagagcagggcgacaccttttgcgggatctgtgggggaggatacaattccgatgagttttggatcggttgtgacaactgtgaacggtggtaccatggaaagtgtgtgaagataacaccagcgaaggcagaaatgattaagttttacaactgtcctttgtgccaaaagaaggtaaggcaatagccgtcaatggagggattaaccccgattggttttattcaccgatggtgtttgtaaagcagctatgggcaaatgagtgcgtaattctgttgttactggcctatcctccctagaatcgcaagccagtcgctttggtgctttaggtacatgaataacatgtagtggcatacaaaatgaatgatgcataggctttacgtttgtgttcggttt

SEQ ID NO: 22240 - DNA, 515 bp, Gossypium hirsutum
  Clone ID: AI727585.1
cttcttctagtcctcgcactgtggaagagatcttcaaagactatagcgctcgacgctccggtcttgttcgtgctctcacttacgatgtagatgatttctactcgcaatgcgatccagataaggagaatttgtgtctgtatggacacccaaatgaggcttgggaggtagctttaccagcagaggaagttccacctgagctccctgagccagccttgggtatcaattttgctagagatgggatgaaccggaaagactggctttcactggttgctgtgcatattgattgttggttgctttccgtgtctctctactttggagctcggcttattcgctatgacaggaagcgcttatctagcatgacaaacgatcttctcactgtctttgaagttgtaactggaacgaagtccatccaagaccagtcctcattagaaagtggaatccattcgcgatactgtacgattagtattttctatggattgtttataatctcttcctctgttctttgacgtccctcc

SEQ ID NO: 22241 - DNA, 380 bp, Gossypium hirsutum
  Clone ID: LIB3165-046-Q1-K1-G8
tcgcatgcgtacaactgagcttcaaaaactccgatctttttttttctaaatttatttttttagtctttgaatggaaggttggatttttcataattaatcgatttattttttggttgggaattaaagaaaattacttttagaaatttaaaaaataataattaatggcttcgtctagtcttcgcactgttgaagagatcttcaaagactataacgctcgacgctctgctctcgttcgtgctctcacttacggtatttgatttccccctgcttccgtaaagcctaattttgagttattgaatttcttctcttttatttcgatttttttttatgttatcgcgttgttttggatcagatgtagatgatttctactcgcaatgcga

SEQ ID NO: 22242 - DNA, 699 bp, Gossypium hirsutum
  Clone ID: GOSHI-09MAY01-C31779_1
tccggtttaatccttgcaaaaccaaacttaataattgtgtttttccttctatgcaatgatctccgacaagagacagcggaaagactggccggaccgacccacgcgttttaatccttgcaaaaccaaacttaataattgtgtttttccttctatgcaatgatctccgacaagagagcagcgaatgccatgggaggcaagactgctagagcctgcgatggctgtctacgaaagcgtgctcgttggtattgttcagctgatgatgccttcctttgccaaggttgcgatacatcagtccactccgctaaccagttagccagtagacatacaagggttaggcttgaaactgcatcttccaggttcaatgcttctgttatcaacaacagtgctactgatcaagatgctctgccagcatggcaccaaggtttcactcgaaaggcaagaacaccaaggcaaaacaggtccatacaggggcaacaaaaaagtgaggggaaaagtatgggatttgaaccctcttgttcctgaggttggttgtgaagacgggtcagctgaagagactgaagaccagctgctttgcagagtccctgtattcgatcctttttctgctgaattacgtgatatggcaaatgaaaacggaatctagtagttgatggttttgaagatgaaggaacatgccagttggatgatggtttacatggtttt

SEQ ID NO: 22243 - DNA, 813 bp, Gossypium hirsutum
  Clone ID: GOSHI-09MAY01-C31709_1
cacacatcctcaaagatatggctcattgcgttttggctccaaccccaattcagtttcagtttcagtttcattcccgcagaactggatttcttagatgcttctctgaatctgctctcaagacttctctgccatatcctattcatcctcgttttcctcctagaatcttctgtaactacgatgattccaatcgagtcggccagacacagtcctcttctcttcagctctatcgcgatattgagaggttactcacggacactgtaaggcaatctcaaggtgcttggggtagttcaagtgattggagccaagtcgagggagcatggattcttaaaccgaaaggctcaaaacctgggtcagtcggtcattttattggtggtatatttggtggagccgctcctcagcttacctatcgtttgtttctggagcgcctttctgaaaagggagttttggtgattgcaacaccgtatgctagcgggtttgattacttcttcattgctgatgaagtccagttcaaatttgatagatgtttacggtttctacaagaaacagtgcgtgatcttcctacatttggtatcggccattctttgggttctgtcattcaccttttgattggttcaaggtatggcttgcaaaggagcggcaatgtattaatggcattcaacaacaaggaagcaagtgtagctatcccattgttctcacctgttcttgtgccgatggcccaaagcgttggaccctttctatcacaaattgcatcaacacccacaatccgcatgggggtaaaaacaaaaactcttagctttttcctgctttacatgc

SEQ ID NO: 22244 - DNA, 1218 bp, Gossypium hirsutum
  Clone ID: GOSHI-09MAY01-C31659_1
cccacgcgtccggtttatcagtttaggatggcacagagcgaaatcgaccggtatttgaagatcgttcctcttatcactctcgttgataatgctcgagtcagggagagactcgaagttatcgagaaagatcaacatgagtacacattagatgaagaggatagaagggtgcaagatgttataatgaaacccccacccgcccgaaatgataccatgatcttgaaaaaaactctttcttgttcatacccaaacatgcgttttaatgaagcgctgcaaaaggaaaatgaaaagcttcgattggagctacaacgttcgcaagctaattacgatgtgaagcagtgtgaagtaatccagcatttgcttgatgtaacggaagttgcggcttctattcccgataagagttcatccccaaaagtgtctaagaaagtggagcgtaattactcagatgtcgataatgaaaacggtcattcgtacaatgataactctcctaagaaacctgattctcgcttgacttcaagaaacacttcttcagtttcatcaggacatgatctactctccgatagaggatcacatcggtatgaagaatggaatgctgatttgctcggttgttgctcggaaccatctctgtgcataaagacattcttttatccttgtggtacgttttcaaagattgctaccgttgcaacaaacaggcatatgtcttctgctgagccatgcaacgaattaatggcgtattcattgatattgtcgtgctgttgctacacttgctgtgtttcccggaagcttcgcaaggcattgaacattacgggtgggtttgtcgatgatttcctctctcatttgatgtgctgttgttgtgccctcgttcaagaatggcgagaggtagagattcgtgggatttacggtcctgagaagactaaaacaagccctccaccatcacagttcatggaatcatgagtgaaaaaagtactgaagagacattttcttgggaggtttgtatcaaagctgaacatagaaggtaactctagttgccacttaccagattgaacctgtactaaaagattgcttttctctttgaacctacatacacgtatatattgtctttgtatgtaaattagtgagattattaatggagattgaacatatgttgttgttgtatgagaaactgattttcatttagcatagcggtttttggataaaaaaaaaaaaaaaaaaaaacccccc

SEQ ID NO: 22245 - DNA, 446 bp, Gossypium hirsutum
  Clone ID: GOSHI-09MAY01-C31189_1
cccacgcgtccgcccacgcgtccggaaaaataatcccatcatcatcaacaacagcaatgcttcacattttcctccttttctcccttatcttctcttccaccaatgtcctcgcccaggacttttgtgttgcgaacacggcttcgggcattgttaccccatcaggttacccttgcataatggaagcaaatgtaacctccgacgacttcgctttttcgggtctcggtctcccaggtaatacgtcgaacatcataagtgcagctgtgacaccagcattcgttggtcaatacccagccgtcaacggactaggcctgtccgccgcaaggctggacttggctccgggtggtgtaatcccaatgcacactcaccctggtgccaacgagctcctttacgtggtccatggtcacatcacttgtggggtcatttcatcggctaataaagcttacttg

SEQ ID NO: 22246 - DNA, 462 bp, Gossypium hirsutum
  Clone ID: GOSHI-09MAY01-C31179_2
ttcttcttttaactggtttttttctttccccattctcatagctttcatcatcttcaggtggcgaaatcacttgtcattgggatgggatgtgggctctgggtacttgctttacttggagaaatccaggcatcaagcccttctcaaaaacaaagacaaggcaaccatggaaatggaatggtactgaaaacttatccaacctcaagctcttcttttgtctttaaccttttgtattaattggttctgcaatgtaaaatgcagtatggtgccacccaagggagccttcgtcctcaaggtgagttaaaaacagttgtgaattatctaatttggtataagtttcaaaggagttgtaaatgttatgatataaaatcaaatttatcgaatatcattaaatttctccgcgactaagatccaaacaagatagataatttccaacaacggatcattcttacatacttgcacatg

SEQ ID NO: 22247 - DNA, 655 bp, Gossypium hirsutum
  Clone ID: GOSHI-09MAY01-C31179_1
cttcttcttcttttaactgttttttttctttccccattctcatagctttcatcatcttcaaatggctaaatcacttgtcattgttatgttatgttttctcttagtaattgttttacttggagaaatccaggcatcaagcccttctcaaaaacaaagacaaggcaaccatggaaatggaatgtatggtgccacccaagggagccttcgtcctcaagagtgtggtccaagatgcacacagagatgctcagctacagcatacaagaaaccatgcatgttcttctgccaaaagtgttgtgccaagtgcttgtgtgtgcctccaggcacttacggcaacaaacaatcttgcccttgctacaataattggaagaccaagagaggaggccccaaatgcccttagatccctaactatatctatgttggtctctagttaaagtgcttaattatccaattataggccatcgatcttcttcttttttccctaaatgatggtaaattgtactagtatttcttttaaaaggaagtatgtgctttgcatttaaaaacttggctttttgggtaaaggtatctaaaaagaatggaaagtggtatgggttaccttttttgtaaacgcaactaatatgaaaaatgaattagtaaaaatacattttctctattt

SEQ ID NO: 22248 - DNA, 748 bp, Gossypium hirsutum
  Clone ID: GOSHI-09MAY01-C31139_1
cgcccgcaggcacgggccgggacttactggctggaccgacgcatgcgtcctcgcattcgtccacgcgtccgggaatggagagcaaaaacccaaaatccgaactgactgtaatgaagttaaagccaatagaagcaaccccagaaagcttcaaagaattcggtcaagtcattgaagcatccccagatggagaaaaattcggtccgactgatgctcagctagacctttccaaaggaattcccaggttttacatcatgaaccttcagaaccggccgctcaagttttcaacgattacacatcatgccagtgtgacacaatgccttggatctatagggggtcatgtttggtatctcggaattgctaagccttccttggtggactcggaagaagttgagagtgagaaagggaagatagcggtgcagcctcgttgtggtcatttctacgtgcctccagccattgaagatgttcgtgtttttagaattgcaggtcctaagtttatcaaacttaatcgtggaacatggcacgccgggcctttgtttaaagctgatgctatggacttctacaacttagagctaagcaataccaatgtggtggatcatacaacacatgtgttcaagaaggaaaacggagtcatcttttcaattgatgagtagctttgttcgtccgatgccgaagatgttgagagatgtgattttggagagtgaaaacttttccaacactatcaaatatgttgattttgcgttttattttt

SEQ ID NO: 22249 - DNA, 492 bp, Gossypium hirsutum
  unsure (1)..(492): unsure at all n locations
  Clone ID: LIB3584-011-P1-K1-E12
tncctcnttccccaactgaaaatgagggtgggggaggggggggggaatcagaactgactgtgataaagttaaagccaatagaagcaaccccagaaagcttcaaagaattcggacaagtcattgaagcatccccagacggagcagaattcggtcctactgatgctcagctagacctttccaggggattgcaggggtttcttttgaaccttcanaaccggccgctcaagttttcaacgattacgcatcatgccagtgtgacacaatgccttggatctatagggggtcatgtttggtatctcggaattgctaagccttccttggtggactcggaagaagttaagaatgagaaagggaagatagcggtgcagtctcgttgtggtcatttctacgtgcctccggccattgacaatgttcatgtttttagaatttcaggtcctaagtttatcaaacttaatcgtggaacgtggcacgccctgccttttgtttaaagcc

SEQ ID NO: 22250 - DNA, 340 bp, Gossypium hirsutum
  Clone ID: LIB3120-017-Q1-K1-B2
cccacgcgtccgatcataataaattgcaaaatttaagtctttccccaaactgaaaattgaagcttgagaaaccaggaatggaatcagaactgactgtaataaagttaaagccaatagaagcaaccccagaaagcttcaaagaattcggacaagtcattgaagcatccccagacggagcagaattcggtccgactgatgctcagctagacctttccaaaggaattcccaggttttacatcatgaaccttcagaaccggccgctcaagttttcaacgattacgcatcatgccagtgtgacacaatgccttggatctatagggggtcatgtttggtatctcgg

SEQ ID NO: 22251 - DNA, 530 bp, Gossypium hirsutum
  Clone ID: GOSHI-09MAY01-C31079_1
cctatgcgtccgcttacactccttatttctaaaaggggagaatcctttaaccctcttggggctgctttactcttcccatagtcatgggggctcacccttgttttcaacctgtttcgaaatgtagcatcgagggaagatcaaatcagacggtggctgctgattgagatggaaccctgcttgtgtcacgtagtgctttcccttactacatgcttattgccctcgaagctggcagcctgttaagagcactgcttctcttactatccgttccagtcgtgtattctacctaccttgttcatctctgaatctttcgccattaataccttcattttcatctcctttgccgggttaaagataagagacatcgagctgggttccaggtctgtgttgcccaagttttatgcagacgatgttcacccgagacttggagagttttcagctcccttgggaaaagatacattattacccgaaatcctagaataatggtgggaccctttgccaagacatttctaagagctgataaggttttgaac

SEQ ID NO: 22252 - DNA, 730 bp, Gossypium hirsutum
  unsure (1)..(730): unsure at all n locations
  Clone ID: AI055069.1
ttttgaattatgcttttgaatattcaaaccatgatgttgaatttgccttatttttctcttaattttcgtttatgaagtactgggaaatcttctctcttagtttctctgtggaaaaggaggatgcttccttatagtttcccatacccttttgcctgttctatgatcttcctcggttaaaatttgaaaaaatctgaggtttaaattttgaactatggtttagtagatttggcattttaagcggttattagctgtacaaattgctttctgcaattctccattcaagtttcgatttagggggtttcttcatgatcatggggatgccgtacccaatttttgctgttcctcgtcatggtttaatctgggttgttgcttggctgtagttgagctatgcgtctcaagaagatattgatggttgaggagcatcanagattcacttgaggattcccttggttacttaaattcttatggaatttcgacacactactgaaggattatttgtagattaccgngattgattgttgcacccagatgaaaataggttctgaatatccgcttgcannatatggactcaggggtgttccctcaggatcgtnaatgcaagtttacaggctaatctttagcacaactcttgtctatcatcatattctcaatatcctgcactactgcttattataatttgaatcacgncttcaatgctttaactttaatctttcattgaggactcccctat

SEQ ID NO: 22253 - DNA, 586 bp, Gossypium hirsutum
  Clone ID: AI729056.1
ggaaaaagaaaaacaaccaaagaaccttaaaatggtttaaattttgaactatggtttagtaaatttggcattttaagctgttattagctgtacaaattgctttctgcaattctccattcaagtttcgatttgaggggtttcttcatgatcatggtgatgcgtagccgaattttttctgttctcgtcagtgttttagtatggttgttgcttggctgtattttgagctatgcgtctcaagaagatattgattgtttgaggagcatcaaagattcacttgaggattcctttggttacttaaattcttcatggaatttcgacaacactactgaaggatttatttgtatatttacctggattgattgtcggcacccggatgagaatatggttctgaatatccggcttgcagatatgggactcaacggtgtgtttcctcaaggaatcgtaaaatgcaaaagtattacaggcttagatctttcaagcaacaaactctatggacatattccatctaatatttctcaaattatcaagtatgtcactacccttgatctctcatctaataatttctctggaaaattccccccgggac

SEQ ID NO: 22254 - DNA, 507 bp, Gossypium hirsutum
  Clone ID: GOSHI-09MAY01-C31379_1
ccgatctcttccttccttattatctaaaacatagatcctccacctttagtggacgaagccaacaccgtcacttcgattgctccatctttccccatgacttctagtaattgttaggcatctctttatccttttcctggtgacctaaacgaagatgatcaacaccaacaccaccagcttttcaacttaatatctcaaccttcttcttcatcatcatcatcatcttcttcttcgtcgccttctacttcacttacttggcctttttccttcagcccaactgttcaacaccagcaagcagctttctatcagagcctaccccagcagttccatgatgatcaacaagatcaggaaaaaatacatgttccacaagatggaccattgaagagggactgtgagctcagttatctatatggaaaaaggaagaaagggttgaaactcatcatcaaagtcatgattctgctaagtgggatgccttcaagatgaggatgatgagctccgatcacaccaatt

SEQ ID NO: 22255 - DNA, 743 bp, Gossypium hirsutum
  Clone ID: AI055140.1
ccagcactttcttctctacgtttctttactcctacaactcttccatttcagctaatatcatcatcttcaaccattgtcatttttttcatctatcataaaccatatatatataagagatgttggtgttgtggattggagctttggttttcattatatacatcacacattgggttaacaactggagaaatcctagatgtaatggcaaactcccaccaggttctatgggtttcccatttcttggtgagactcttcagttcttcaagtccaatactactaatgatgttcctccctttgttaaagagagaatggaaaggtcaattcaatatccatgactttttcctcatgataatcttcgtgttttcttttttcttttttgtattttgtatgcatttcataacattatcgggtgcagatatgggccggtcttcaagacgagcattgtgggacaaccggtaatcgtttcagccgaccgggatctcaatcactgtgtgtctcatcaaggaaggctactgtttcagagttggtatccggatacgtcacagagatctttggacgtcaaaattattttcctacatgatactggacaatacctaaagaactgggcttagttttttggcctgaagcttagaagatctcctgagtggcgaacggtagtaaaggtacgcatgggcatcctagaccgtgatttaagatcaacgcgctgcttacaacttcttccgtataggagagtatatttaggtcgg

SEQ ID NO: 22256 - DNA, 649 bp, Gossypium hirsutum
  unsure (1)..(649): unsure at all n locations
  Clone ID: AI054946.1
gcactttcttctctacgtttctttactcctacaactcttccatttcagctaatatcatcatcttcaaccattgtcatttttttcatctatcataaaccatatatatataagagatgttggtgttgtggattggagctttggttttcattatatacatcacacattgggttaacaactggagaaatcctagatgtaatggcaaactcccaccaggttctatgggtttcccatttcttggtgagactcttcagttcttcaagtccaatactactaatgatgttcctccctttgttaaagagagaatggaaagattgnngccggtcttcaagacgagcatagtgggacaaccggtaatcgtatcagccaccggggatctcatcctnttgtgtttcttcaagaaggcaactgtttcagagttggtatccggataccttacagnagacttttggacgtcaaaatttatcttccttacatgctttcatgtaccaagtaccctaaaacatggtgcttantctctttgccctgaagcctcaaaaaatcccctgaagttagcgaacactgtnnaangtacagcatggtcaatcagaaacattgaatannagagcaccgtgctatatttgatctacaccaaaactgtagtacacaagaa

SEQ ID NO: 22257 - DNA, 743 bp, Gossypium hirsutum
  Clone ID: GOSHI-09MAY01-C31249_1
tccacgcgtccgggtacctcattggctttcaataaaaattgcattttgattttgatccaaagcccttttttttctttttttaattttaccttctttttgctactgggcatttgaagtggataatcaatcaatcaaagaaatatcccaaaaccatgtcggcactcttcaatttccgttcattcttaacggtagtgctattgggaatctgcacctgcacttacttgaagatgcaatttccagctatccttgaacagagaactgggttccgtggtttcttttggaaggcagccagaataggtgaacggttaagtccctgggtggctgtaggatgcttcacaatgggtgtctcaataatatttttctgaacaaggagcacaccctctactgttcggaggagggatccaatctttgccgtgtgagctaatgttcttgttgaaatttaacatgtttaaaagtgtttggatgatgaaaagagttttgttaccactgttggaagaactatgttacaaacttatttcaaaagcaccctagcatttctttggctgattgttctttattgatgatttttcagttagcattttgcattgtcatctaacattacctgcggtgtgcctacaatttaatggtgaattggactactccaattgccctaattttgatttcttttcgtttatataagttaaaaccttttttttctttctcatatttaaactttttctgttctttttctcttttacttttta

SEQ ID NO: 22258 - DNA, 438 bp, Gossypium hirsutum
  Clone ID: GOSHI-09MAY01-C31279_2
tctttttctttagctgccttgttttcctctttgacaatggaggaacaaatactaccttctgcttcagctgctgctgctgctgctgctgcttctgcttctgcttctgctactcagcacgatctatcgccttcagctgcttctagtggagctcgctacaagctggtggctccggctaagctaccgatctcaaggtcggcttgtattacgatcccgcctgggcttagtccttcttcttttttggagtctcctgttcttctttcagatgttaaagcagagccttcaccgactactggttctctcattaagcctcacgcagtgcatggctctgttaattctagtacatattcagtgactgctgcgtgttctaatgcttttgatgaaagaaatccaagctgctttgagcttagaccccatcctagatcaaatctggcacctgca

SEQ ID NO: 22259 - DNA, 570 bp, Gossypium hirsutum
  Clone ID: LIB3582-028-P1-K1-G2
gttttcctctttgacaatggaggagcaaatattagcttcttcttcagctgctgcttctgctactcagcgcgatctatcggcttcagctgcttctagtggagctcgctacaagctggtggctccggctaagctaccgatctcaaggtcggcttgtattacgattccacctaggcttagtccttcttctttcttggagtctcctgttcttctttcagatgttaaggcagagccttcaccgactactggttctctcattaagcctcacgcagtgcatggctctgttaattctagtacatattcagtgactgctgcatgttctaatgcttttgatgaaagaaatccaagctgctttgagtttagaccccatcctagatcaaatctggcacctgcagatttaaaccatcttagaagcgaacaatctctgcagatccaaggtcaataccagactatatcatataattcatcagctttggttaagagcgagatggcacgctcctcacatgagttgagtctctcggtaccatttcatacagctacttctgtggctagtgctcctgttgaagtcgatgt

SEQ ID NO: 22260 - DNA, 602 bp, Gossypium hirsutum
  Clone ID: GOSHI-09MAY01-C32999_2
ccaagaattgctagcaaccattctttttttttctctctctctctctctctttttgaaagccaaagaaattccaggtacccgatctgtttagaagtgaagctaatttcttcgatcgaagcagctgttggaagagttgcagatctgttgtgtggctttggattctataaaacatctgcttttgttttatttttttggctgagaactggactcctataacaacaaccaacgttgttcaacagtgagcataaaactttttttttcttttctgaaaaagagagtttatattctttgttggtaattccaggaacagcttttaatttgttgctaatccaggaacagctgatttattaatgggggtttgtcatttaatagtccttttattaagataaatagtgatgctggtggtggtatctaccatctttagggtcagcagcaaaaaagaaaaaaaagaaaagagagagagctttaaataatttaaggaagaggaaagagagaaagaaagaaagaaaaaaagggggttgggcttcagatcggcatcaaacattcagcaattattgcttttcattagcttaacagtgaagcagaaaaagggtttctttctc

SEQ ID NO: 22261 - DNA, 977 bp, Gossypium hirsutum
  Clone ID: GOSHI-09MAY01-C32999_1
ctttcttaccacttccaattttcttggattttttttccattttttgtcctaaaacttctcttccaacaactcaaccctagctttgctggagctagctaaatggagatgtgaccaaggaaaagtaaaagaaaaaaaaaattacaaagaattactagcaaccattcttttctttttctctctctctcttttttttgaaagccaaagaaaattccaaggtacccgatctgtttagaagtgaagctaatttcttcgattgaagcagctgttggaagagttgcagatctgttgtgtggctttggattctataaaacatctgtttttgtttttttttttttgtctgagaactggactcctataacaacaaccaacgttgttcacgactgtggctgccatttttcgggctatgacttttagaaagtactagaggctgcaaaaggcttaaaacgagagagaagagagagagagagagagagaggggaggggaaggctggtctcctgacttggaccgtatatcaaaccgtaagaaaggtcctttatcactaaacatagccgaactactgtctgtgcggtcgtcatcaatgcataggacatgtcaaccccgtctttctaacttttctccccaatcccagattttctttctcttttaacctgagatagaaggtatattgtttggggtaggtgaagttttgagtttctgagaaaggaatgtaagtggtatggagatagatgagattcagacacaacaaggttctaagttctcaagagttggtaatgggagaagtgagtcgagcaggatgggtcagaaaggtagtgacaaccactaccctgatgatgaagaaggtagtgaggtcatgaaaagggctagtgcaaatggaggtggaggtgatgctctagctgacaccgctgctgctaatacgtttcgaggctggcaccattcttcgagaattattagggttttttgagccttcagtggggaa

SEQ ID NO: 22262 - DNA, 347 bp, Gossypium hirsutum
  unsure (1)..(347): unsure at all n locations
  Clone ID: LIB3120-048-P1-K1-F4
cggacgcgtgggtcaattttcttggattttttttccattttttgtcctaaaacttctcttggaacaactcaaccctagttttgctgtacccgatctgtttagaagtgaagctaatttcttcgatcgaagcagctgttggaagagttgcagatctgttgtgtggctttggattctataaaacatctgtttttgttttatttttttgtctgagaactggactcctataacaacaaccaacgttgttcaaaactgtggctgccatttttcaggctatgcttttgaaagtactgaagctgcaaaaggcttaaaacnagagagagagagagtagagtgagagagaggggggg

SEQ ID NO: 22263 - DNA, 633 bp, Gossypium hirsutum
  unsure (1)..(633): unsure at all n locations
  Clone ID: LIB3825-022-Q1-K6-H11
cggnagcgtgggcggacgcgtgggtgaaccttgtcgagctggtccaagaaatgttgttataactggaagcacaaggggtttgggaaaagcgcttgctcgggaataccttctttccggagatcgtgttgttgttgcttctcgcagtcccgaatctgttgatatgactgtcaaagaactcgaggaaaacctgaaggaaggtatgactgctggtggcttatctagcaagaatctggaacgagcaaaagtggttggcatagcatgtgatgtttgtgaagccaatgatgttgaaaaattggccaactttgccgtcagtgaactcggttctatcgacatttgggtgagttatatggcgtggtgtttgtatatttttccctcctcctgtcactctcttgcatggagatgcactgtagtgtcatattagcatgttgatgctttcaggggaatgatgttaggtaaaattttcaatgaagttgaacgaccttatgtttattatgaattgactcttagccttaagaaatgtgataaaatcatgcatggtgatattattgaacttaattcttggacctgcaagcaaagaggtcctcgcaaatggtcatttcctattgattatgatgactactgncattgttgtgt

SEQ ID NO: 22264 - DNA, 262 bp, Gossypium hirsutum
  Clone ID: LIB3120-046-P1-K1-H8
aagccaatgatgttgaaaaattggccaactttgccgtcagtgaactcggttctatcgacatttggataaataatgctggcactaacaaaggttttagaccattactacagttcagtgatgaagatattaagcagattgtctcaacaaatcttgttggttctattctctgaactcgggaagccatgcgcataatgaaaaaccagccaaagggaggcatatatttaacatggatggtgcaggctttgggggatctaacactcct

SEQ ID NO: 22265 - DNA, 681 bp, Gossypium hirsutum
  Clone ID: GOSHI-09MAY01-C132951_1
ccagacaaagccaatcaatcacccccttccatcaatatagccatttttctcatcacctccacacataaacgcacacaaaatgaacacccattctctcaaacttctcctaattctactcacaatcactttcccatcaacccaatgtgatgatgatcttgtagaccaaatatgcaaaaaaacacccttctatgacctatgtatctccaccttaaaatccaattccaatggcaaagacgtgaaaggtttagccagtgtaatggccgacaccatgttgtctaacgccaccgacacattgagctacatccgagccgaaataaaccgaaccccagatcctaaaattgagagggcattagcttattgtgccgagctttatataccggtggtgaagtataatcttccacaagccattgatgctttgagtaaagggcagttcgagttcgccgccgatgggatatcggatgcggctaaagaagcagattcttgtgagaagatgatttcgtggtcgcaggaattggcggcgttgagtgatcggaataagttgattcatagcttatctgatgtggccgtcgccattgttaagattttgcttaaaggtcaatggactttgaaactgtgggggattttggtgacaaattgcttgtgtgtgtactttttccctggctgtgaattttttttatttat

SEQ ID NO: 22266 - DNA, 415 bp, Gossypium hirsutum
  Clone ID: GOSHI-09MAY01-C32899_1
tcgccacgcgtaccgtacgcgtacgatgagcatggtaggggggttttcgtctttcatctacaaagaattgggatctaggttaggcattatgttttcccgtttatttttggtagcagctggcgcccagttttgataggctgttggtaaaaaaataataataatggaagggacttcttggaggcggcggagctcacagaggaggaaacgacgtggaactgctttgcaaaactcttcaggtggaacacaggctgttctacttcgatctcaaggagaacccacgcgggcgttatttgaaaatcttggaaaagacattggccaccaggttcaccatcattgtcccctcctatggcatttcttggttcctggaccttttcaatttttacgtaaactccgacgacaacgacctttttagcaa

SEQ ID NO: 22267 - DNA, 400 bp, Gossypium hirsutum
  unsure (1)..(400): unsure at all n locations
  Clone ID: LIB3165-039-Q1-K1-C7
aaaacccggcgcgacccacgcgtacgcacaaaatctcctcccccaatcaatcctttaatataacaaaaaaaaaaaacaacagcccgcnctttcttatatggtgcgtgcgccccacaccaatggagatggtaacgaatttggcatccgagagaccggttgtgatcttcaccaagagttcttgttgcatgtgccatacaatcaagacccttttctacgaatttggagtcaatcctacagtctacgatctcgatgagatccctagaggatttgaactctaacaagctcttttaagatttggttgtagcccttcagttcctgtcgtgtacattggtggtgaatttgtcggtggagccaatgaactcatcagccttcaccttaacccaaccttaatccctatgct

SEQ ID NO: 22268 - DNA, 202 bp, Gossypium hirsutum
  Clone ID: LIB3120-044-P1-K1-H10
agcgcccacgcgttcgtacaaagtctgctcgctcatagcacatccttctagtagcaaaaagggagaacggcagtactagctttcttttttggtgcattgtttcgatagcaatggagatggtaacgaagttggcatccgagagaccggttgtgatcttcagcaagagttcttgttgcatgtgccatacaataaagaccctttt

SEQ ID NO: 22269 - DNA, 954 bp, Gossypium hirsutum
  Clone ID: GOSHI-09MAY01-C32559_1
tttagcctcattcccttcagcagttgttccactccacctcacaaaagggaggaacggagaattactttgcaattttgaccgtgttttagtttagatgctaaagaaacgaaacccgagtaactagtgaggaggagggggagcaatcatgtctgattattcgcttcttgagagacgatcagctctcgaagcgcacctcaattttcggtttgcgtttgtgggttgttcttggaatctgcgttggagctgctatcgtcattgttctcttccttatctccctttggtttacttctaaacgccagaacaaagccaccggtagcagccacaacggcagctttaagcctattcataactctactatccccactgtttccaaagagattcaggaaatccgggtcgacccatctcgtcattctaatcctgacgccaagcttcaccaagcttcaaaccctgacccacttccagaatccgaccatgtattggtgcttcattcagaagaagacagcagcgctatctctggccgcaacagaatccacattgagataggaaaggatcatcggattgcatatccggaacgtggagccgggtcgggtcatggatcgggtgagtcccgttctggtgatcaggggacggcgattatggcggttccggaagtttcccacttggggtggggacattggtatactttgagagagcttgaggaggctactgatgaatttgctgctgagaatgtgattggggaaggcggctatgggaattgtttaccgtggcgtcttggaagataatacaaaagttgctgtgaaaaatctactaaataataggggccaagctgaaaaggagtttaaggttgaagtggaaacaaatggacgcgtacgacatatgaatttggtgagggttcttggttattgtgcggaaggagctcataagatgcttgtttatgaatacgttgacaatggg

SEQ ID NO: 22270 - DNA, 1493 bp, Gossypium hirsutum
  Clone ID: GOSHI-09MAY01-C32509_1
cccaccagacgactccaaagaaattttaaggaaaaaaaagaaaaagagaaaaaattagaggaagaagagcaggcattgatggcggagggaaaacaggagaagaacacgacaagcgaagagagcgttaagctgttcgtcggtcaagtgccgaagcacatgacagaagctcaagttcttgcaatcttcgaagagttcgctttggtcgacgaagtcaacatcatcaaagacaaggctactctttcctctagaggttgttgctttgttatatgcccgtcgagagaagaggccgataaggcggtcgatgcctgtcacaataagaagactttgcctggggcatctagtccattgcaagtgaagtatgcagatggcgagttggaaagattagagcacaaactttttgttggcatgctgccgaagaatgtcaaagaagatgaagttgctgatttattttctaaatatggaaccataaaggacctacaaattataagaggttctcaacaaacaagtaaaggctgtgcctttctgaaatatgagactaaagaacaagcccttgatgcgctgcaggctgttaatggaaagcataaaatggagggttcaagtgtccctctcgttgtcaaatgggcagatacagagaaggaaagactagcacgaagggctcaaaaagcccaatttcaagcattgaataaactgaatgtagattcacaacatccttcattgtttggagcattgccaatgggttatgttcccccatacaatggatatggatatcaggctccaggaagttatggacttatgcaggaccgcatgccacccatgcagaatcagtctgcatttcacagcatgattcctccagtaaatcaagcaagtgcattgcgaggaatcacacctgaccttgctcccagggctggacctaaaaattatgctatgcctcctggaagttatgttggctccgcttacccagctgtgcaaggtgttcagtaccccatggcatatcctgggggaattattagccaccatccgttgaccagttcacctggttcactaccacaagcaaatacaagcagtaactcttcatcagcttccagtgtcggtacaagctcgggaagtcagattgaaggtccacctggtgcaaacctatttatttatcacatacctcaagaatttggagaccaagaattgacaaacgcttttcaaggatatggtagggttttaagtgcaaaggtttttgttgacaaagcaacgggggctagcaaatgttttggatttgtaagttacgactctccggcagctgctcaaaatgccataaacatgatgaatggatgccaattaggaggtaagaaactgaaggttcacttaagagagacaacaaacagaacaaaccttattaatcgggaggtgagtcatggaaggcaacaaacacccggtcgaaggaacctggatattcgactgactgcagtatcagcatttcggatggattaaggataacctgtgat

SEQ ID NO: 22271 - DNA, 625 bp, Gossypium hirsutum
  unsure (1)..(625): unsure at all n locations
  Clone ID: LIB3543-040-Q1-K6-H8
ttctttcgtggnaggttcaagtgtccctctgggggggggggggcagatcagaaaagaaagacagctcgaaggcccagaaagcccaatcccaagcttcgaacatgccaaatgctgattcaccacatccttcattgtttggagccttgccaatgggttatgttcctccatataatgggtgtgggggggaggctccaggaagttatggacttatgcagtaccgcttgccaccaatgcagaaccaacctgcgttcaacaatatgattcctcctgtgaatcaaggaagttcgttgcgaggaatcacccctgagcttgctcccaatattgctcctagaaattatgctgtgcctcctacaagttatgtgggctcagcttacccagctgtaccaggtcttcagtaccccatggcatatcctgggggaatcatgaaccatcgtctgttgactggttcacctggttcagtgccacaagcaaacataaatagtaattcttcatcatcttcccctgttggtacaaattcaggagggcagattgaagggtcttaagcgcaaaggtttttgttgaaaaagcaacaggagttagtaaatgcttcggatttgttagttacgactctccagcagcggctgaa

SEQ ID NO: 22272 - DNA, 626 bp, Gossypium hirsutum
  Clone ID: AI055648.1
ggaaagacaagctcgaagggcccagaaagcccaatctcaagcttcgaacatgccaaatgctgattcaccacatccttcattgtttggagccttgccaatgggttatgttcctccatataatggatatggatatcaggctccaggaagttatggacttatgcagtaccgcttgccaccaatgcagaaccaacctgcgttcaacaatatgattcctcatgtgaatcaaggaagttcgttgcgaggaatcacccctgatcttgctcccaatattgctcctagaaattatgctgtgcctcctacaagttatgtgggctcagcttacccagctgtaccaagtctgcaataccccatggcatatccttggggaatcattgaccaaccgtttggtgacctggttaacctgtttaatggcccaagcaaacataaacaggtattcttcaacatcttcccctgttgtacaaattcggagggcatattgaggtccacctggtgcaaatctattaatttatcacatacctcaagaattcgggatcaagagttggctaagctttcaggatttggcaggtcttaacacaagggtttgtgacaaacaaccggagtataaaggtcggtttgtagttcgatct

SEQ ID NO: 22273 - DNA, 516 bp, Gossypium hirsutum
  Clone ID: LIB3583-013-P1-K1-E11
cccacgcgtccgcccacgcgtccgatttttttcaactccgacgacttaaaaaaaaaaaaaaaaacgggggagctagagaaagaaaatcaaataaaagagaaaagagagagagagagagagaaagggagaagaagagtagcaggcattaatggcggagggaaaaaaggagaagaaagcgacgaacgaagagagcgtgaagctgttcgttggtcaagtgccgaagcacatgacggaagctcaagttctcgcaatgttcgaagaggctgataaggcggacaatgcttgtcataataagaagacattacctggggcatctagttcattgcaagtgaagtatgcggatggcgagttggaaagattagagcacaaactctttgttggcatgttgccaaagaatgtctctgaagatgaagtttctgctttattttctaaatatggaaccctaaaggacctacagattctaagaggttctcaacaaacaagtaaaggctgtgcctttttgaagtatgagacaaa

SEQ ID NO: 22274 - DNA, 791 bp, Gossypium hirsutum
  Clone ID: GOSHI-09MAY01-C32459_1
ctttctatttatttcgaaaaggttttggttagagttagtggaactcgagggtgtatcctgtgcgtggagtttcttttatctatgcagaatctactttttcctttttatacatttagtaaagaatgagcttatctaagaaagggatccaaattagagacacaaaactgaatacccctagcaaggtaacaactttgaatcctaatgcagcagagttcgttcctttttctcttaggtcaccatcttcatcaggaagcactattgcggctgatgcaacaaggtttgctatttctagaaccttaggaaaagcagttcttgatcggtctgagtcttctatttcaaataattccgatgatgaggctcatcagttctggcgtcgccagctccctgatgacattaccccagactttaaggttattaatgaggatgattctcaaggtattggagcctgggagcctctccttagcaggtttgtccttgcatggtggtagcgaagcgtcaagggttcctgcttctgctgctggtggctgtgtatttggggatcagcagcaactactgcaccagtatggtaatggtaataactcggatgaaaaatttagatatccttcttcatcctatggagaggagcctatatcagctagttttttgaacttaccactcaaaccttgggatgagcaactcgttaacagtgatcggttgattggcaatgggagggaaggacaactgtatgatggaaattctaggcatgcatttgccagtgatattttggtgagcacacatatatccatgatact

SEQ ID NO: 22275 - DNA, 448 bp, Gossypium hirsutum
  Clone ID: GOSHI-09MAY01-C32479_1
atttttcatcagcaaagctgggggatggagagtatgtgaagggcatggccgtggctgtactagctactcaagctttgctctgccaaacccattgccgggctcttccaagaccaacacccttcacttccaaccctcctccacagcccagccgctacccctgcaaacatcacggcgaaacatggcccacaacctccttttctatcctccattccacgcccattgtttgccgcgcgtcccgccgcaagtccaccgccttgagctccatctcggaagaaagcgatcaggatggtcctcttcggcgagtccttcacctgagtctgtgggccgctgaggctgcttacatcttggggctctttttgcttccctatgctcctggagaccctgtatgggccatcagttccaacacaataaacgaactcatcggctttctctcaacttcttcttcatt

SEQ ID NO: 22276 - DNA, 480 bp, Gossypium hirsutum
  Clone ID: GOSHI-09MAY01-C32409_1
cccacgcgtccgcccacgcgtccgatcaagctctgtttcttcacgcctcaaacccgccaacttcaactcaacacctcgccaattgcaccccttaaaaccactcaacagaccgcgtcacctccctccaccgtcaccccaacgtccccttctcttctccaccaccaaaccaaccactatctccacctctttcacccacaaaaacctcaccgctcctcctatcttcccccaccgcacctcacttctcccttcatcatcccttcatgtccatcgaacccccgccaccggctacgccgcagctctattagacacagctcaatccaccggttcacttcacgaagtccgacgagacgtacgaaagctctcgagactactccaaaacagtcaaattcaagcttttttgaatgaccccgtttttgggtgatcaagagaagggaaaagcatgaaggaattgctaaaaagggaagttaacaacatctttta

SEQ ID NO: 22277 - DNA, 1200 bp, Gossypium hirsutum
  Clone ID: GOSHI-09MAY01-C32709_1
atactgctgtaatctccaaagctagaatggtttcaaaatcacatgatgtgtactcctcttgggatgatgaattcaaaaaactggtgcaaagcttccccaaagagaaaggctgggcaggatccaatctttatttctatcaaggtttttggtgcccctctcttgttctaaaagcttttatttctttccagaaacattttcaagcatttaattctgatatcatcgttgctacttttccaaaatgtggtactacttggctcaaggccttgactttctccactttgtaccgcaatcagttcccatgggatgaaaatccattgctcacctttggccctcaccaacttgttcgtttcttcgagtatgatctttacttgaacaacccttttcctgatcttcgaaatgtttgtgcttatcagccaaggcttttttccacccacgccccttatgctactttgccaacttccattaaggattctggctgtaagattgtttacatatgtagaaaccccatggatatcttcatttctctttggcttttctctgccaagctccgagacaaaaaccaagagtcactatcactagatgaagcttttgacaagttctaccatggaatctctgcgcatggaccattttttgatcatgtattgggatattggaaggcaagccaagaaaaccccaacaaaatattgtttttgaactttgaagatcttaaggaagatatggattcccatttgaaaattttggccatgttcttaggagttcctttcacagatgatgaagagaaacaaggagttgttgaaaaaatagcgaaaatttgtagctttgagaacttgaaagaattggaagtgaacatgaaggacgtacatacttctggagttccacacacacatttttttaggaaaggagaagtgggagattggagcaattatctcacacccttcatgattgaatgtttggagaagcttattcaagagaaattgaatggctcgggtttaacatttaaactgctctccgaaactgctaacaatattgcttctccatgatcgcggggatgtcttctagcttttttgggaatgaaatctcttgtattcccattgtctgtataaataatcctgtactagagtcctcttgtgatcatgatcagaataaattgctttgaggtatgttttgtggattttatgtgaaaataaatgaagttgcatt

SEQ ID NO: 22278 - DNA, 361 bp, Gossypium hirsutum
  Clone ID: uC-gsronu33B058f12b1
tctttttggaagtgaacaagaagggcgtacatacgactggttttccacacacacatttttttaggaaaggagaagtgggagattggagcaattatctcacacccttcatgattgaatgtttggagaagcttattcaagagaaattgaatggctcgggtttaacatttaaactgtcctccaaaacttcaaacaatatcgcttccccatgatcgtggggatgtctattctaggttttttgggagtgaaatctcttttattcccattttctttataaataatctgtactaatcatgataagaataaattgttttggggtatgtttttgtggattttatgtgaaaataaataaaaaattgcatta

SEQ ID NO: 22279 - DNA, 577 bp, Gossypium hirsutum
  Clone ID: GOSHI-09MAY01-C132601_1
cgagatttggacaatgcaagaaggtatattgtttgacaatattttgatagccaaagaagagaatgttgctaagtcgggccgggacaccacatggaaaccgaagtttgtggttgagaaggaaaaacagaaggcggaggaagaagctgcaggttcggatgatctcggtggcttccagaaggtggtcttcgatgtcctatacaagtttgctgatattcctttcttaagcaaatataagctccaaattcttgacttcattgagaagggtgagaaacaacccaacctcaccattggtgtcctggtctccattgtggtggttatcttgacagctatcttcatgctcatttttagtgggaagaaccaacctccagtagagaacactaccgaggtggctgctgatacatctattgatcaccggaagcagtggagataagccccctgatcaggataacgagaatgatactggtggtgctgctcccccgccaaaggaggcctgacacttgaaaccttggcttggctggtgattatccgttccacttttgcgcagttttttttgttgttatttttgcggtttaggtgg

SEQ ID NO: 22280 - DNA, 511 bp, Gossypium hirsutum
  Clone ID: GOSHI-09MAY01-C32119_1
cttggtttcacccaacaagatggagaaatcagaaatatctcaatctgttgctgaattggtgtggcaattaaatgagaaatcttgtgaacttgtggttaaagctgcagacactcgaataatccacgagcagctgggcctgaagatttgtgaatgtgaaggattgcaagaaactgttgcctccttaaagcagcagctctctgatgcactagaatcacaaaatgtcagtcctattgcccctaattctcaacaatttggaggaatgaaaggtctgcagatggacaacgaagctgcggcatcaaaagatagtgatgaagatttgctttcaaaagcacaggtggctgagattgaagaactgaagcagaaggttgttgaactaaccgagtccaaagaacatttagaactgcggaaccagaaactagcagaggagagttcatatgccaaagggctagcctcagctgctgctgtggagcttaaggcattgtcggagggaagtactaaactaatgaatcat

SEQ ID NO: 22281 - DNA, 654 bp, Gossypium hirsutum
  Clone ID: GOSHI-09MAY01-C32129_1
gaaaagcataataaaagattaaaaaaatattgcattcagacaatcatacaatatggggcagttggaattcttatcgaggccttctcttcctaaagtatggatttatttcatatagcatatagaaggaaattgatttcatatagaaagtatagatagattactatgtatcgactgaaccaatgactattcatgattccataattgaatcaatgctccaaactagaggaatgttatggtaaaacttcgtttgaaacgatgtggtagaaagcaacgtgcgacttgaaggacatgatcagctgtggatgtcaaaacccaccactttccgttatgtagaaatgaaggtgctttttgctcgacatcctttgttctattataatccgtctttttgttgggttgtaatgtaaatagtacaggatggagctcgaagagaaacatccatttttcaggggcaaggatctagggttagttaatggaaatcaataagttggaacaacttcgtaagtctatttgtgatatagaaatcgaaaggatccgattcaaactattttcaaatcaaaaagaaaagttgttggaattggtaaaactctttcgatcaaaagtgtatcatgcgggaattaatcgttcatatgattctttgatagaaaaacccaaaaa

SEQ ID NO: 22282 - DNA, 447 bp, Gossypium hirsutum
  Clone ID: GOSHI-09MAY01-C32379_1
tcggccacgcgtccggccacgcgtccgggatctgttgtttgagttgtcaatgtggcgttgcaggcgtgagcttcgggttcgtgcaggcgaacttcatacatcttcaaggagagatgcttaacactacatagagttctggaaaaaagttcctccaaatgaaccctaccgcgttattcttggtgatgttagggacaagctgtatcagacacgtgaaaggtctcgccaaatgttgtctcatggtatctctgacattccatgaggaggaaactttcaccaacattgagcagctttttggaaccgcttgaactatgttataggtcactttgctcttgtggggaccggccaactgctggtggaagtctttcttgttttcttgaggcaagtgtcaacttttggcctctcacttgtcagacttgacattcggcaagagtctgaccgccacaccga

SEQ ID NO: 22283 - DNA, 648 bp, Gossypium hirsutum
  Clone ID: GOSHI-09MAY01-C32319_1
cccacgcgtccgaaaaaaccactgtaattgctcacctcatgcgatgcctaaatagaaacaacgaagaacacgaaggagtaggtttcgttgttgatggatttgactgaaggtgtcggagagagctcatcgccgccgagaagctttggcagcttcaacagctacgatgtcagaaacgacgttttcaatcgcttagtcgaatctggccacgaacaagctatttctaatcctgactttcgcgactttttagattctcacttcaatcgcttgcctgctagctatggacttggatgttaatatggtgagagggagaagaatgttttgttacatcacaagctgcttgcattgcccaaggtatccggagaggcggccagtttatcatatccgcttcttggagaacctttgcaccaaagcagatgctattgatgataaacaatatataaattctttatctccccagtctttggatgtgcgagtgtgggaagggttgttccatcacttaaaagaacgggggatcatccagttgactttgaaccttgctctaacttgaggacctaaattgagtgtcagaaagaatcagtggtgaagagaagtactctgactggaactaccaaaagcaagaatgtcatttcacttatgaggattttctac

SEQ ID NO: 22284 - DNA, 431 bp, Gossypium hirsutum
  Clone ID: GOSHI-09MAY01-C32289_1
ccctcgcgtccgccattttcctctgccaacccaaactaaacctctctaattccctttccttttcgacgaggagagaaatccttcacgttcaaggaggccaatgtgggaaccaaattggatccaagttttgggaagtgatctgcggggaacacggcgttgatcctactggaaggtacaatgctgatggtgaatcatccgataaccacctggagcggatcaatgtgtattataacgagtcttccggtggaaggtacgttcctcgtgcgggtctcatggatcttgaacccgggactatggatagcttcagatctgggccctacggccagatctttaggccctgataatttcgtcttttggacaatctggcgctggaaacaattgggccaagggtcattacactgaaagtgccgagttgattgatgctgatcttg

SEQ ID NO: 22285 - DNA, 669 bp, Gossypium hirsutum
  Clone ID: GOSHI-09MAY01-C132201_1
ggtgtctcggcaaagcaagaaaaagatgctagatttcaacagataaagaaggaagtcattgagatgataaagacaagaattccttcttttgagacaaagatattagagcctccacctggagcttctgatgattttcaagaaactggttctcaagaaagagttaatagaaggaaatttggcatggatgcatcattggagaacaagatttgtgacctttatgacctctatgttgatggattggatgaagatgcaggtcctcaaattcgaaagctttatgtggagcttgctcggtctgtggccaaatggtatgatggacaaccatgagatcaaacgtgcaatttgtagggaaaaggaaagacgaaaagcaaggtacaatagatgtaaggaacaagagaaagtcagaggaaaaaaataatggcaccacgattggaggagagtgttcgagtggagtctgcattgagtgctcagccacagcatactcgagagaggttggctactgattctgctattcaggtttttaccttcaactaataaattaacatcaagccacaacagccgctgccgtccaaattcccggtccctctacaaatggttcccctttgggacagggtaaacaaggataattaaaaggcctttcaacaatgccctggaggaaaataagtttcccat

SEQ ID NO: 22286 - DNA, 480 bp, Gossypium hirsutum
  Clone ID: GOSHI-09MAY01-C33939_1
ttttcgcgtccgcccacgcgtccgcccacgcggccgctggtatctctattctccatttttcattacttcctccattccctcacctctcataaggaagaaaattatggatcacatgattcacaaagctcagccatatttcgcagtcactgatgagaagatgatgaatacgaataacccagaaagtgaacatggtcaacaaccaaacaacatcgtcaccagccaactccagataagatcctcacctcggtcatcccctgaagcgctggagaaagaggctgttcttagacgaatccgccatcacatgtgcaaatacagagtcaaacgtgcttttcaggctttggttggccgcgacggacaagctcaagaaaagtggatggaactgggcgatgctttcacttgtccttaaacattctggaaaaacccagaaaattcatcgggatctgtaaatggcttgaatgttactgatcatggatgatgatg

SEQ ID NO: 22287 - DNA, 631 bp, Gossypium hirsutum
  Clone ID: GOSHI-09MAY01-C33859_2
aaaggagttaaaaatggcttgtcatatagtggtaaaaggtgagcttaagaatggttctgaggactgcgcttgcgagcttgacttattcgaattaccaaggtgctccggtaacgattaaaaaagattcattacccactccatttgcgcagaatatggtagtcgacggtctgtacggaggcctggtgtatgatgttgttagggtgaagtggattattctttggaccactgattgtaaggtggctactaagctcattccgaccgaaaaccagatgggttgggaggatatagtgagcatccttcagccctaccagagctctgacaacttgcccgtatcatgtgggggtgcattttccgcagaagctcatatccatgcaaatggagatggatctctaaacctgacagcacaaatcatgtggagcgggtgcgagtaaatcatatattgctccatgccttatctctatcggtttatgctgtgtgacccatggaggctgtctacttctttatatttataatactattaaataaatgtgacagccacttctacctttcctattcaacattgtgtgccttgtttctccattttcttttcttttctgtaataatatatatacacacggttgtgtgaattaat

SEQ ID NO: 22288 - DNA, 841 bp, Gossypium hirsutum
  Clone ID: GOSHI-09MAY01-C33859_1
cccacgcgtcccgtccggtgaactaaaaaaggagttaaaaatggcttgtcctccaactcacaaagtggtaaaaggtgagcttaagaatggttctgatgactgccttgcgagcttgatgtattcgaattaccaaggtgctccagtaacgattaaaaaagattcattacccactccatttgcgcagaatatgctagtcgacggtctgtacggaggcctggtgtatgatgttgttagggttaagtggattattctttggaccactgattgtaaggtggctactaagatcattccgaccgaaaaccatattgtttgggaggatatagtgagcatccttcagccctacgatagctctgacaacttgcccttatcatgtgggggtgcattttccgccgaagctcatatccatgcaaatggagatggatctctaaacctgacagcacaaatcatgtggagcggttgcaagtaacctgactctctttgcatcatatattgctccatgcttatctctatcagtttgtgctgtgtgacccacggaggctgtctacttctttatattaataatactattaaataaatttgacagccaccccataatatactactggattcctacttcttctaccttacctattcaacattgtgtgccctgtttctcctttttcttttcttttctgtaatagtatatacacacacgattgtgtgaattaataaaaaaatgtctatgtctgtgtctaaaataaaaaaaaaaaaaaaaataaaaaaaaaaaaaaaaaaaaaaaaataaaagaaaaaaaaaaaataaaaaaaaccatattaaaaactattcaaacaaccacataat

SEQ ID NO: 22289 - DNA, 680 bp, Gossypium hirsutum
  Clone ID: GOSHI-09MAY01-C33499_1
gtaaccctacttcagctttgcccttcttccccagtctctcaaaatgccgttcaagaggtacgtggagattggaagagtagctctggttaactacggaaaggactacggcaagcttgttgtcattgtcgatgtcgttgatcaaaacagggctcttgttgatgcacctgatacggtaagaagccaaatgaactttaaaagactgactctcactgatatcaagattgatattaatagggttcctaagaagaagaccttgattgatgctatggaaaaagctgatgtgaagagcaagtgggagaacagttcatggggcaggaagctgatcgtccagaaaagacgggcatcgcttaatgattttgataggttcaagctcatgttggcaaagattaagaaggctggaatcgttaggcaggagctagctaaacttaaaaaggagacggcagcctaaacttttttctatttaagccttgccttgttatacatttcagtttgagatattgtaaacttctaccgactttttttctcataattgttgcttatgactcctgctatcaaacctctatctgaaattatggttgactttttaatctgaccctcatttccttttgaaaaaaaaactgaatgatggaaagaaataagaatgaaaataacccagcactgatagcatagaaaacaaaaag

SEQ ID NO: 22290 - DNA, 523 bp, Gossypium hirsutum
  Clone ID: uC-gsronu33B157g05b1
gcgtccactcgtcgggcaggaacggaaatcctctgaggatgaaaattgccacatgctcacggtctcagatcttaagatagctattgtgggtagacacgctctagctaaacttaaaacggacactgcagcctatacttatttctatttaagcctttccttgttatacatttcagtttgagatcttgtaaacttttaccgactttttttctcataattgttacttatggctcctgctatcaaacctctctatctgaaattgatggttgactttttaatttgaaaaaaacaccataatgataaatgttatagatttctattattttattatgctttttttatacttctatttttatttagggtttccgttttaaaggtcccaaagtttacgtacgtctgattgctacgctatatcttttttattgggtttccttaatttctatacaatgccccttctttttaaaactatcttccctgggaatacccttgcgatacccatcttaattgcttggtattaattcccctt

SEQ ID NO: 22291 - DNA, 378 bp, Gossypium hirsutum
  Clone ID: LIB3135-004-Q1-K1-F2
cccacgcgtccgcccacgcgtccgcccacgcgtccgctcaaaaatgccgttcaagaggtacggggagagtggaagagtagctctggttaactacggaaaggactacggcaagcttgttgtcattgtcgatgtcgttgatcaaaacagggctcttgttgatgcacctgatacggtgagaagccaaatgaactttaaaagactaactctcactgatatcaagattgatattaatagggttcctaagaagaagaccttgattgatgctatggaaaaagctgatgtgaagaacaagtgggagaacagttcatggggcaggaaagctgatcgtccagaaaagacgggcatcgcttaatgattttgataggttcaaagctcatg

SEQ ID NO: 22292 - DNA, 799 bp, Gossypium hirsutum
  Clone ID: GOSHI-09MAY01-C33489_1
ggcctgctccggtagccattgcaggagaaggagcaatatcctgaaattgcgaagacagagagagttggagggaatgtcgtttagagggaagaggaaggatggagagggtctcgcttccgacgagaacgacgatcacgcgcctcctaataaagtctcgaagatttcttctgcagtcgactctgacgattccgacgatgtcgtcgtctgcgagatatccaagaataggagagtttcagtgaggaactggaatggcaagatttgggttgatattcgtgaattttatgtcaaggatggtaaacaattgcctggcaagaaaggtatttctctaagtctggaccagtggaatgttctacgtgatcatgcagaggcaatcgataaggcacttgctgagaactcgtaggaagtagacatatggtataccaagggaatctaaggaccttttcatatattttggaaagttaacttgctggaggcctaggttttgttgtttatgacagatcttaacttgtttttgaagttgctatacttggaagatattttatgcggacctccattttgtgtaattagttgtgtagctttcggctactagactgaatttctgctgtatctttcatgttggatgattctaacatgatctgtgaaatggaaacgtaaaaaaggaactagatggtgaatcttgctattaatgagatgggaaaagaaagaagttaatttcggtttttttgcttctaaagagattttaattaaaacgtctaaagatggacaaccgctgataagcctaccactatcattgggtata

SEQ ID NO: 22293 - DNA, 603 bp, Gossypium hirsutum
  Clone ID: GOSHI-09MAY01-C33449_1
tttcccacgcgtccgcccacgcgtccgctgaagctagcaaaggggttcttgttccagttgatgatgatgaagtgatggttgaaacgtgtaacgctgaagccaatgggacatattgtttcaaggcatcaatctgttgtgattacagaccccaactgctaaccgacttacgacaagctctcgatgctcttccgattaagatggttaaagcggaaatatcaaccttgggtagtcggctgaggaaagattttgtttttaccggttgccgaaccaccgcacatggtgatgacgccgagtcatggcaacatctggcctgttccgttcgccgggccttgaattctgtcctggagaaggcttctatctcgccggaatacttgccatactcgacgtttccaaagaagaggcagaggatctcatactttgattcctcaagctcatcttcataaaaaagatgattgccattgtttcgtttgtgtcaatccactgcgacatctcctttattttctgcaggtgtttgtctgaatgtgcaaaggttggcttggaatgcaaattcagaaaacatgtcatatatatacatatcattagatgtaagagttcactattaga

SEQ ID NO: 22294 - DNA, 721 bp, Gossypium hirsutum
  Clone ID: GOSHI-09MAY01-C33409_1
ctaaaatgtaaagtttactgattttagttgtagtttaaccttaatattttgtaacaattgagatatttatcttttgggtaaactatcaaaataattatttttgtttgctttaaattacattctagtcacttatgtttgaaatgttacgttttagtcacttgtattatcatgctgtaacattttagtcactaagctgttaattatcgttaacgctaatgtggcacattaaattatcatttcaaataaaaattttaggttaaattattacccttatattttatcattttgagctttttcatttggttcaggatttgaatctggtaacggttccaatcccataagcctcgcaattatgcttggtggctaccattgtttattgttgtcatcctcctcatcttcgcgttggtttgcaaataatatggaggcattcgcatggatctcgtggggcttaaggcttcttttggcatcaaagacaactctgctatccagagagagcatcagaccttcccttgaaaaatttccatggcgaccttgcgctactttctttgtactaaaaaacaggaagggggaaaggtgacttgctctaattgctatgcgtgggaagttctgatgccgaatatcggagctcgaatgtaactagagattgcttcgaatggtctagtgacgctgctgcttgcccttgtggttgcttctctaattctctcaatattgttggttcctc

SEQ ID NO: 22295 - DNA, 444 bp, Gossypium hirsutum
  Clone ID: LIB3135-003-Q1-K1-E12
caacgctccaaacttggaaatcttcgtgcggtgtttcagctagtgggatactgaggatcgtctctgctacatcctccggaaaggatttgaatctggtaacggttccaatcccataagcctcgcaattatgcttggtggctaccattgtttattgttgtcatcctcctcatcttcgcgttggtttgcaaataatatggaggcattcgcatggatctcgtggggcttaaggcttcttttggcatcaaagacaactctgctatccagagagagcatcagaacttccttgaaaaatttccatggcgaccttgcgctactttctttgtactaaaaaacaggaagggggaaaggtgacttgctctaattgctatgcgtgggaagttctgatgccgaatatcggagctcgaatgtaactagagattgcttcgaatggtctagtgacgctgc

SEQ ID NO: 22296 - DNA, 635 bp, Gossypium hirsutum
  Clone ID: GOSHI-09MAY01-C33439_1
aaaaatcatatcctcagaaaaaagaaaaaaaacgcaaagaaaagagaaaatggctactttgggtggaattagccaggtcgatggaagcgccaatagcctggagattgaaaacctcgctcgttttgctgttgatgaacacaacaagaaagggaatacgatgctacagtttaagaaggtgacgaatgtaaaacaacaagtggtttctgggactatgtattacataacattggaggcgatggatggtgacaagacgaaagtttatgaagccaaggtgtgggacaagccatggatggatttcaaggagttacaggatttcaaggttattggcgatgctcccgccggttgtacttccaccgcttaaggtgactggagattgtagaggaaaggatatcaggataccgaatgcgggttttaaataaatgtaactgtcttatgttaatttggatttagactactaaattcagtggtattgaacttaagcttatctagaacaatgaatgaataacgtctattgatgcaaagtacataatttacctgtgtcccttgtaccctatttcttctgtaattttagtatgataccattaatctgaagtaaatctacattttgggggatttattctcatgactgtctttct

SEQ ID NO: 22297 - DNA, 414 bp, Gossypium hirsutum
  Clone ID: GOSHI-09MAY01-C33669_1
tgcaaacagagaacgatcagttgtactatcttcagaagcaaagcaggctgcttccgaaattgagcttcggctgcaattgggatcaaaactcagtgatattgtcagcagcaagggggatgtactggcactattcaatctgtataaagatgaaggctacgtactgactgaacaagaaggaaaattctgcgtagtgcttaaagaaagttgttcaccgcaagatatgctgaagtcacttttccaggtaaattatttgtactggttggagaggaatgcaggaattgaatcaaggggtgcctccaatgactgcaggcaagggggtaggctacaaatctctctcgagtatgtgcaaagagaattcaaccatgttaaaatcgacagcgaatcagtacgttgcgtaactgatggacttattgc

SEQ ID NO: 22298 - DNA, 498 bp, Gossypium hirsutum
  Clone ID: GOSHI-09MAY01-C33199_1
ggagagtgcctcacacttataaactggtcagtccaccggatccccggctgagtttaatctactaaagcattcaaaggcagaagaggaaggtgaaaagaagaaagaaaaattctcaagcaagatcttgctgctgatttttctggaggccggctaccatgttcttgatgaatctacacattttagcagtgatcttcagccatcatccaagttcctcaggaagcagagcatagggattctcgaacttgggattttgagtgcaaagaatttgcagccaatgaagatgaaggatggttagttgactgatgcatattgtgtcgcaaagtatggaaacaaatgggtgaggactagaactcttcttgatactctgtatcctcgatggaacgagcagtatacttgggaagttcatgatccctgtcctgtaatcaccattggagtgtttgataattcccacacccctgggagcattgatgatgcctgggttcaaaagaatcgggaagg

SEQ ID NO: 22299 - DNA, 785 bp, Gossypium hirsutum
  Clone ID: GOSHI-09MAY01-C33359_1
tttttatagaagaaaatatagaagaaatagctggaggggtttctaaaaatggtggcgtcgctaactcactatgcaagctcatcgacataccagctgcttcaatggcactacgttactatgcaggtgcagctgataaaatccatggaaccgtgttgaaattaagcaaaggactccaaggctggtgtccctgatggagtgcttaatgttgtgaatggatacggagagactgctggtgctgccattagctctcatatggacattgataaaactgataagaagcaattcgagaaaatcctatcatacatcgagcatggcaaaagagaaggagctactttactaacaggaggcaaacacattggccaaaagggatattacatacagcctaccatatttgctgatgttaaggatgatatgatcgtagcaaaaaatgaaatttttgggccagtaatgtcattgatgaagttcaaaactatggaagaggggattaagagggcaaacaacacgacttatggtctggcagctggggttataacgaaggacttgaatgtggcaaacactgtttcgagatcggtccgtgctggtatcgtgtggatcaactgttacgctgtgttcgatatggattgcccttatggcgggtacaagatgagcgggtttggtagagattatggtttggatgcacttaaccagtatctacaaatcaagtcttgttgtaactcccattcatgattctccatggcattgtacctatgtacgtacacgagtcatgtactattacccaaaaatgc

SEQ ID NO: 22300 - DNA, 527 bp, Gossypium hirsutum
  Clone ID: GOSHI-09MAY01-C33349_1
tcttcacgcgtccgcccacgcgtccgaaaataaagtccatgtattttctctatgttttttcaggtcatatgggaaacaaggcaggaagaagaagaagaagaagaacaagaagattcaattttcaagcagggaaaccttcggcctcggaagaagcagcagagttgctggaaagaagctgcggcagcaccaccgcaggcgccggcttaagcggatggaaaccgaactggcaaagatgaaagcggagatgagggactcggctgagtccctaatggcaggtaaagtagaagctgatcaggctaaggctaaacttcaagtgctgaagttgaagcttttggcagtgaaggaaattgaagcttttctcatgggttttctttgacttattggaggttaggaccttcatgtcctaaactccttgctaggtcacaagcaacgcctccttgacttattggagggctacaatcgattagtataatggactcgagactcaaatatgctgttcctatttattagagtggtcttgggtagtt

SEQ ID NO: 22301 - DNA, 530 bp, Gossypium hirsutum
  Clone ID: GOSHI-09MAY01-C33379_1
gttgaagaaaatgtttcctgatgcaactgagccggtacaatatctggtgtcacattggggaacagatccaaactcccttggctgttattcatatgatccagtcgggatggcaggagatgtgtatgataagcttagagaacctttggataatcttttctttggaggggaagcagttaccgaggagcaccaaggggcggggcacggagcggactcgttcgggagtcctggctgccagaaactgtgagagccatctcttagagagattaggtgactttagaaagctccagctgatctcctttagtggtgatgcattattagaacccatatttcctctccagatatctaggatgtgaactttattttacccattacaaagacctgtctgagttgccgtcattttctaattagatttaaaaaagaaaatcctccatcttgttaaaatactattatatactgtatcactaaatgtgactactgctttcaatttccatccccaaaaagtggaagaaaataaatttcagatgtttgat

SEQ ID NO: 22302 - DNA, 1415 bp, Gossypium hirsutum
  Clone ID: GOSHI-09MAY01-C33369_1
ccgcccacgcccgtccgaaccaaccatttagcttactgccagaaaatccaagcatcaatcttgcaaagcaaagcgtttgctaatggagggtctgatgcaggtgccttatgatgttacggttaggttcatgttgaccttcttggagcgcaatttgttgcctgatgctattatacggaggttgactcggcttctcctggctagtcgtcttcgttctggttataaaccctccactgaactccaactctctgatctccttcagtttgctcattccctaaaggagatgcctatagctatcaagacagacaagcctaaaactcaacattacgaactgccaacctctttcttcaagttggttcttgggaagaacttcaaatacagttgctgttacttttctgacgagtcgaaaactttggaggatgctgaggaagcaatgttggaactgtactgtgagagatcgcaattaaaagatggccaaacggttcttgatgtggggtgtggatggggttcactttctctatacattgcccgtaagtaccccaattgcagggttacagggatttgcaattccaccactcagaaagcttttatagaggagcaataccgggatcggcaattgcaaaatgtggagatcattgttgcggacatccgcccacgcgtccgggaggcatcatacgacaggatatattcgattgaaatgtttgagcatatgaagaactatcacgatcttctcaagaagatatcaaagtggatgaaagaggatagtcttctttttgttcattatttctgccataaagcatttgcttaccactttgaggacataaatgaagatgactggataaccaggtacttctttacaggaggtacaatgccttcagctaatctgcttctatatttccaggatgatgtttctgttgtcaaccattggcttgtgaatgggaaacattatgcaaaaactagtgaagagtggctgaagaggatggaccgaagcttggcttccattaagccaataatggagtccacctatggcaaggatcaggctgtgaaatggacagtgtattggagaacattctttattgctgttgcggaactctttggatacaataatggagaagaatggatggttgcacttttcctattcaagaagaaataaagccgtcgtcaatgctcgtagtcaatgctcatttccaccaagaatcagctttgggcattaggggactaaaataagagcaactgtagaatcgctgaatattttatgcaactcctactcctctcgcacgtctagctacttgttccattggaaagacgaatgcattttgtactttggacgaaaccaaacaactgcatcaagaagcgtcaatgcagagaataaatcatagcaaaaaatttaaataattgatgaaagtataacttcagtt

SEQ ID NO: 22303 - DNA, 326 bp, Gossypium hirsutum
  Clone ID: LIB3135-003-Q1-K1-A3
ggcgacccacgcgtgcgttacgcacataccacattttaaatggatgcatcatacaacacgatatcttccattgtagtgttggagcatatgaagaaccatcacgaccttctcaagaatatatcaaatttgctgaaagaggatagacttctttttcctcattatttctgccataaagcatttgcttaccactttgaatacataaatgaatatgactggataaccacattcttctttacaggaggtacaatgccttcaacaaatctgcttctatatttccaggatgatgcttctgttgtcaaccattgtcttgttaacggaaaacatta

SEQ ID NO: 22304 - DNA, 861 bp, Gossypium hirsutum
  Clone ID: GOSHI-09MAY01-C33309_1
gagaaggacaggatatcacagctcttgctttgaacgaggataacacaaatcttctagtctcaactgcagataaacagttgataattttcacagacccagctttgagcctgaaagtggtggatcagatgcttaagcttggttgggaaggcgaagggctcagccctctgataaagtcataatcttcagttcagccttagaatcttgactgattagaaaatgattatagaagatgcaccattgatcccaccaggttcaatattacaaatatcacaggtgtgtgtgcctcaagcgagaagaaaacctagtcaatagcgcggctttcagcaccagctgccttttgtcatgtatgtaaaatatgtgaattagtactcttcacaagtggaacaaccctataatatgatttaaaaaaggagggttgttaggtagattcttttatttgatttgtggtaagtttattaccattgtgatttgagctactccgaggcttgcgattttcactttttgttcatcgatatagtgagaaaatttgatagccttttctggccttttgtgcttgaattttcctcttccaaagtagcgatgcatttaccagattgaaactgaattaagacttgaacattttctttggaaaaaacaagcaacacaaacacaataaaataaaaaaaataaaattgaattgacaaccccaattacatatagattataaaaatatttttatgaattaaagcaattgggtttagttgcttagtgcttttttggacgcacgaaagatgattccttggggtgttctcaattgctagttgagtgctgctgctctttaccttctcggcagaagcagtggcagggatgctgaaattctta

SEQ ID NO: 22305 - DNA, 540 bp, Gossypium hirsutum
  Clone ID: GOSHI-09MAY01-C33289_1
cccacgcgtccgcaagcgttgaaatttaccgtgtttcatgtgggaatcaattggttcgtttccctttccgtctcagcaaccaacccgatcgttgtggctatccccggttcaatctctcatgcaaggaccaagcccatactgtcctttcgcttccattttccggagaattcaatgtcgtacacatcgactatttggtccaaagtatatggctcaacgaccctgatcattgcacccccaaacgtctccttcatggacttaacctatccagcactccttttgatttgctatatcctcgaagcttcacgtttttcaattcctccgccgctgcatcaacacaacttcatcaagcaaagtatatatcttgtctcagcggcacaaacttttatgtcgtggctctaccggcagcccgactcgatacgactgcatcagtggcaacggctgagcatagcagatagcgacggttcaggatccgagatccggaacggattaggcgaatcatgggaatggtctgatgaagacatggactgaaccgaagcgcct

SEQ ID NO: 22306 - DNA, 630 bp, Gossypium hirsutum
  Clone ID: GOSHI-09MAY01-C28969_1
gatgaatcagggtactacagttggtatgcttacggacgatcaaagcttgctaacatattacatgccaaggagcttgcacggcatctaaaggaagaaggggtggagattactgcgaattcacttcattctggagcaattatttcgaccaatcttatgcgccaccatggtttaatcaacaccgttggtcaaatgttgggaaaatacttcctcaaaaatattccacagggagctgccactacatgctgtgttgcattaaatccacaagtcaaaggtgttagcggagaatatttcttagacagcaacataggtaacccgagcgctaaggcgaaggatgcagatttggcaaaaaagctatgggacttcagctgcaccttgaccaaccccaagtagttagttggttcacaaagccttatcgagacgagctgaagatgttcgatgcttagtgctggtactcttttagctgaaactgtgataaaccgtaatattttcatagacatcccagttttatcgagaagatttgaataaaatgcaaaatatgtatagacactgaaaaaaaaaaataattaaaaatttatttaattatataatttttaaaataaaatattttaattatattttttttaaaaataa

SEQ ID NO: 22307 - DNA, 310 bp, Gossypium hirsutum
  unsure (1)..(310): unsure at all n locations
  Clone ID: LIB3543-066-Q6-K6-B12
cacaatcaaagtgttagcgggggaatgtcgtggggcagcaacataagtaacccaagcgctaaggcgaaggatgcagatttggcaaaaaagctatgggacttcagctgcaccttgaccaatcccaagtagttagttagttcacaaagccttatctagacgagctgcagatgtggcggtggggggggggggtactcttttanctgaaactgtgataaaccgtaatattttcataaacatacaaagggtatatggaatgatcccagttttatcgagaagatttgaatgaaatgcaaaatacgtatagacactg

SEQ ID NO: 22308 - DNA, 647 bp, Gossypium hirsutum
  Clone ID: GOSHI-09MAY01-C28929_1
gaaaaagctgtctggatctcagtaatagggctgatggcaacgaatgggtgtgaaggtaggttgaagatgattgcggaactgaccacaaatgctgagcaaattcaagacgaggtattgggggaaatactaagtcgaaatgcaggaacagagtatttaaggggatacctccatggtcaaaccgagaagcagctctttaagaaaaatgttcccatagttacttatgaagatctcaagccttacatagataggattgctaatggggagacatcagatatccttttagctgaacccattacagggttctttctaagctctgggacttcaggcgggcagccaaagctgatgcctgtcactgctgaagttgctaataagtgggatttatttcgtcgcttgtacgagtctcctgtgataaagcactttgatgacatcaaccaagccggtaaaagattggagcttatgtttgccagaccagagattgaaactcctagtggcctcaaggcagcatctgtttcaacgagcatatacagcgggagtaattttagaaccaggttgcctaagctttacacaagtcccgttgggaccatcttttgcccaaaccccaaccagggcttatactgtcaattactttttggtttaatccaacgaga

SEQ ID NO: 22309 - DNA, 480 bp, Gossypium hirsutum
  Clone ID: GOSHI-09MAY01-C28859_5
gggctagtgcggagcaagctttatcggttctgaacggtaccatttttggaggaagaaatgttcgtctttcatggggacgaagtccttcaaccaaacaggctcaacctgatcctcacagtggaacagcggatattatggatatgctcaaggatatgaagcatacggatatgcacctcctccccaagagcctaacatgtactatggtggctatcctgctgcatatgggaattaccaacaaccaggggcttaccaacaaccccagcagtgagttgcactcgtttcaccatccttcaaaactggttcagttcggtccaggccacagtttggtgttggtttgatcttcacatgtatcaaggcttgaggattttcttagatgatgtagaatttgtggtggctggcattgggagagttctgttccttatttaccctttttttctatatataatatctacatatattatggttggttaacttaacctt

SEQ ID NO: 22310 - DNA, 777 bp, Gossypium hirsutum
  Clone ID: GOSHI-09MAY01-C28859_2
gcaaaaatccagtcagccgggggagggtgcttcaggacaaaattcccgcaaacaggagcggcggttcgtctcacaggcgcaatagaagcagcgcagagcaagggggagatgtgctaaatggcaccattttaggaggaagaaacgctggactttgagggggaagtagtccttcaagcaaacaggctcaacccgatcaggcccagtggaatggtggatattacggctatgctcaaggatatgaagcatatggatatgcacctcctccccatgaccatagcatgtattatgggggctatcgtggataggggaattaccaacagccaggagcgtaccaacaaccacagcagtaaaaagtgtggctggagtgaagctcgttgacattgatccagagcacattagttgttggtgtgatccaatcaaacatgttttaaggttgtagattttcattgtttcctgtacaatcttttttgtgggttaggtttcatcttttccctctctcccatatcgttttagcttcgctttcttggtttcttatcctctgatattgagttttgttttgatttgattttccagtctattgctattcagtgttatattacaccatggtagtttttcggactgatgctttttaatgtttattgtgaacttattatgcttcttaaaaaaaaaaaaaaaaaagggcgccgctcgcgatcttgctgccacgatccactgagattcagccctttgtcgcttcgattcgtctgcaaaggattctacccgccgctcggtgggaat

SEQ ID NO: 22311 - DNA, 1061 bp, Gossypium hirsutum
  Clone ID: GOSHI-09MAY01-C28859_1
cttttaaagctgtttacccatctgttaagagtgccaaagtggttactgataggactacaggccggtctaaaggttatggctttgtaaagtttggtgatgaaactgaacaaattcgtgcaatgactgaaatgaatgggatttattgttcaactagggcaatgcggattggaccagctgctaataagaagcctgtcactgatcagcagtatcagaaagctgcttacccgaatactcaaggaaattctggagagaacgatccgaataataccacaatttttgttggtggtttggatcctagtgtttctgaagaccaactaaaacaaatattcagccagcttggtgaggtagttcatgtaaaaattcctgctaacaagaattgtggttttgttcaatatgctaatagaactagtgcagagcaagcgttatcagttttaaatggtaccattttaggaggaagaaatgttcgactttcatggggacgtagtccttcaagcaaacaggctcaacccgatcaggcccagtggaatggtggatattatggatatgctcaaggatatgaagcatatggatatgcacctcctccccaagaccctagcatgtattatgggggctatcctggatatgggaattaccaacagccgggggcttaccaacaaccacagcagtaaaaagtgtgggtggagtgaagctcgttgacttgatccagagcacatttgttgttggtctgatcccatcaaacatgttttaaggttgtagattttcattgttttctgtacaattttttttttggttatgtttcatcttttccctctaccatatctttttagcttcgcttttcttggtttcttatcctcttatattgagttttgttttgacttgattttccagtctattgctattcagtgttatattacaccatggtagttgttcggactgatgctttttaatgtttattgtgaacttattatgcttcttatttgtcgatttagttttagttctctattttgaactgtttatcaattatatgaataaagtggttcaaacttttcattcagtttgat

SEQ ID NO: 22312 - DNA, 571 bp, Gossypium hirsutum
  Clone ID: LIB3829-005-Q6-N6-D4
aaaagctcaatctaaaacactattataggatataaggagcgtaaattacaatagagtgaaggctgagagagatgggcaagataagaagccaagaaagcaaaacctattagaaaagacgaaacatgaacctctccaaaaaccgaaacccacaaacggtacagcaataaatgaaaatccacaaccttaaaacatgtcggatcaaaccaacacctgaagtgctctggatcagagagaatgagtcttaagtgacagtaaagcaaccgcaacttactgttgttgttgataggcccctggctgctggtaatttccatatccaggatagcccccatagtacatgttaggatcttggggaggaggtgcatatccatatgcttcatatccttgagcatatccataatatccagtattccattgggcctgatcaggttgaacctgtttgcttgaaggactacgtccccatgaaagcctaacatttcttcctcctaaaacagtaccattcaaaacagataaagcttgctccgcactggccctgttagcatattgaacaaacccacagtgcttgttagccgga

SEQ ID NO: 22313 - DNA, 433 bp, Gossypium hirsutum
  Clone ID: LIB3048-039-Q1-L1-H8
caatttcttattcattttgaggtttgagcagatcgatcagttccagagaagtcactcaagggctgggattcccttcaactcaatgctcttttttgatgatgaggataggaacatacaagctggcaatgcggattggaccagctgctaataagaagcctgtcactgatcagcagtatcagaaacatagactcttgtggtttatttcaagttatactttatcttgattgccttatgaagtttgtttggttgtgtatagtttttatttgcaatgatttatgcgtgagtgctttgacttgacaagttgactgctagttggttattgtgtttatgtttattggttttaattttctgaggtggatctgttacaatcttcttaaaattcaagttctttcagttatgcacttgaagatatggcgaaatttatacaaagtca

SEQ ID NO: 22314 - DNA, 605 bp, Gossypium hirsutum
  Clone ID: GOSHI-09MAY01-C28679_2
acggcattgagcgtttcttatggaatgtcgtggggccctgggtagcattgttgaactcaaggaaattcttgttcattctactaattggttagctacaaaagccctcgcggccgggaaaaagcatactgcttttgtaaagacttgcatggcatttagtgaaatcacaattccttctattccgggtcacattaagcaattaaatctttatcttggaacggctgaggttgcactgttaggtggtttagtttctcattctgatggactgatagattcagcaatcaactgtttacagagttctgattggatggaaggctctcggacacttgattctgatgggatgctttcctccattcgaaaattatgcagcctcttgattatggttccaggtaatcctgaagtaggaattttgcatattccaaagagtatattattgatcattcattcccggtcatggtctccaagactgaaggcaagaatattatgcgcaataatttctttatcagctacactttctcaagaaaggctcccataccatgcagatcatacagagattatgggccatgatttgttattttttggggattcatcttatgtgtgtgaacttt

SEQ ID NO: 22315 - DNA, 801 bp, Gossypium hirsutum
  unsure (1)..(801): unsure at all n locations
  Clone ID: AI055176.1
caatgaagttattcacgtgggtttttgaatatttgggcttgatgagtacctgaaggttgtagatgcttatcttgatattgttcttcaaaatcagatggatgaccatctaaagactattctggaagggatctcaaagttggcatctgataaagtgttagctgaagatgaactagcaagtttgcaatccatcttggtgaagcttctttctcattttaaggacttggaacatgtgttttctttgaatcattttcttcagatcttagatatgatgcatgggaactctcggggcattgtcaatatgcatatacttgatatggctacaaggaatggttatgtacatgatccaacaaccatacagttactctttgaaatatcacaggctttacatagtgatactgatcttgtaaacatganaaatgatgataaccaacagcaagcacggctgatttctcgttttgtccgaatggtagatcatggagtagagtatgaacgacatttagcatttcttatggaatgtcgtggggcccttggtagcattattgaactcaaggaaatcttgttcattctaatattggttagctacaaagctcttaaagatgggataagcatactgcttttgtaagacttgctagatttagtggaatcacattcttcttttcggtacataagcattaatcttatttgaactgtgagttgcctgttagtggtatctatttgatgatgagattataataactgtacgagttattgaggagcttgacctgttctaggagttctcttaaatttcactttgatggcaan

SEQ ID NO: 22316 - DNA, 402 bp, Gossypium hirsutum
  Clone ID: LIB3048-032-Q1-L1-A7
ctttttcaatctccagctttgattgattcctacgggttatcttccttatcttgctctgcattgggacacaatcatgggcgatagtatgttgaaccatatattgagtgaatactacatcccaaattatatacttgttcctgaatcagaagcaaagaaaccaccgtgtgtaccttcttgtccagtcttagtctttatcaactccaaaagtggtggacagcttggagggaatcttctttctacatatcgttctgttcttaacaccaaccaggtttttgatttgggagagacgaaacctgataaggtgctacaccaaatttatgccactttgggatcacttaagcagcgtggagatggttttgctttagctattgagagtagcttgagaataatcgttgcaagttg

SEQ ID NO: 22317 - DNA, 284 bp, Gossypium hirsutum
  Clone ID: LIB3048-031-Q1-L1-E11
ctttttcaatctccagtgttgattgattcctacgggttatcttctctacctgcctttgaattggggcccattcttggccattggattgttgacccttttttggatggattcttccttccaaatttatacctggttctggattcagacgcaaagaacccaccgtgtgtaccttcttgtcacagtcttagtctatatcaactccaaaagtggtgcacagtttggagggaatcttctctctacatatcgctctgtttttaacaccaaccaggtttttgatttgggag

SEQ ID NO: 22318 - DNA, 599 bp, Gossypium hirsutum
  Clone ID: GOSHI-09MAY01-C28169_2
gctaaagaaatatgttatttaatgtaactcgaagaaaaaaacaaaaaaattcacttatttactcctgccatgggaatatgttgggagtataaagaccaaataaatatgttgtaaatcatagaatattaaactgttgggatatggattgcaggtggtgtcagacgaagcaagagcaatgtacaatggaggaatggcaggtttgacatactggagccccaatgttaacatattccgagacccacggtggggccgaggccaagagactcctggtgaagaccctgttttagcaggcaaatacgccgccaactacgtccgtggcctccagagtacgacggggatccgccttaaggtcgctgcctgctgcaaacattacaccgcatatgatcttgataattggaatggtgtggaccgataccatttcaatgccagggtaagaatcccaagttgccaacttgttttctacctatttgtaaagcaattaatagcttaaattatttgctgcacaggtagccattttaatattgttttttctcttcagaataatttactcaaccagggaaaattccaaagttatggccaaaactgacaacttgcaatgc

SEQ ID NO: 22319 - DNA, 641 bp, Gossypium hirsutum
  Clone ID: GOSHI-09MAY01-C28169_1
ctcaaacatggccaagacccattctctttccccttcttttcattacgacgaccgtttttctgggtttttttatttcgtcggcggaatctcgtccgccatttgcatgcgatcctaggaatgggttgacgaggagtttgaagttttgccgggcgaatttgccgattcacgtgagggccagggacttgattgggaggttgacgttggcggagaagatccggctgttggttaacaatgcggcggcggtgccgaggctggggattcaagggtacgagtggtggtcggaggctcttcacggcgtttccaatgttggtccgggaacaaagttcggcggcgctttccctggtgccaccagcttccctcaagtcatcaccaccgctgcttctttcaatgaatcactatgggagcaaatcggacgggtggtgtcagacgaagcaagagcaatgtacaatggaggaatggcaggtttgacatactggagccccaatgttaacatattccgagacccacggtggggccgaggccaagagactcctggtgaagaccctgttttagccggcaaatacgccgccaactaccttccgtggcctccagagtccgacggggatccgccttaaggtccttgcctgctgcaaacattacac

SEQ ID NO: 22320 - DNA, 583 bp, Gossypium hirsutum
  Clone ID: GOSHI-09MAY01-C28059_1
gttgtgcaagatgaaagccaatggaggcttaccacacgactgctcaagagtcatggtttgggagctaaatgttgaatcacctaattctttctatcccaaaaaaggtcaatgaagaataatttggacatcattgctccactcgcatgaaactcaatatgtcaaaggagttaattttgatcatcaaggaaagatggccaagaattgtatttaactgccatcgaaggagactcgaaactcaactgatacctaaatcaagtggaagagcattaccaataccttgttgcagtaaaacagagtaatctgcagacaagtgtaaacaaaaccttcgtacggtatctcgttttcccgtttctgcattgcccgttgagagcatttcgtgagactagttgggaaggatggtcaaatggaaagcatccttgtgtaatgctgactgtaatgttattactttgactctcattctcgttttagctaatagcccttttttcggtgggggcagtatgtgtgtgaccaaaatttgctttcaattttactccatcttcgctttggatcagtgatccaaatagcggggtcgaatataaggaaa

SEQ ID NO: 22321 - DNA, 589 bp, Gossypium hirsutum
  unsure (1)..(589): unsure at all n locations
  Clone ID: LIB3829-029-Q6-K6-A1
naaaaaaatgtgaatggaatctcccaacctggtgtggaaaattacccctggagaagtatttagcaccgtaacctatattgaaatgctacatactggtgatggatttcacttcaatattttaagattatttatttgaatttgcaggcaagctcatttattgaacgagttgtgcaagatgaaagccagatggaaggcttaccacacgactgctcaaaagtcatggtttgggaactaaatgttgaatcatctaattctttctatcccaaaaaatggtcaatgaagaataatttagacatcattgctccacttgcatgaaactcaatatgtcaaaggagttaattttgatcatcaaggtgagtgtcaatttctttttcaagtaatcaaagtaaatgctaaattttttttcttttttgttttgcctatgacatgctaaaaatctacatggaaataaaagtaattttatattaacttgaattccagtatattcatcattgaagtgagaagaaagaatatacagngaaaacaaacaacataatgaaaaaccaagctcttttagctgtattacctctttcatattttccttttccat

SEQ ID NO: 22322 - DNA, 513 bp, Gossypium hirsutum
  Clone ID: GOSHI-09MAY01-C28049_1
gttctagatcgcgggcggccgctcgcgatctagacggacgcgtgggccaacacctcctctttccacccccaccaaaaaaaaaaaaatcaaaatcctctctgaaagaaaatcttcaataaacgacgctctttatccgcaacttcaaagatccgtttaagatccgaattccctgcccgtattttccctctcgtgattccacctcagtacgtaccgatttcttgacccgcttggtaatttcttgagtttttttggggctgattttaaaaggagcttgatattcgactgaggatctgtgagattatcgctttttgctttttagtttagtccgatggcttctataggtatggcgcctacttctgggttaagagaacctagtgggaatgcagttggtgttgatagattacctgatgaaatgaatgatatgaaaattagggatgacaaggaagtggaagcagcgatagttgatggtaacggaaccgaaactgggcatattattgtcaccactattggggg

SEQ ID NO: 22323 - DNA, 436 bp, Gossypium hirsutum
  Clone ID: GOSHI-09MAY01-C28009_1
gttctccatagccgcattctttcctggctgcgaggaacggtcccggaaaattcgagaggttttctcgcaaataaaacttgacccaaaagtaagagatgcgttgacttactgtatccaggcaaaagctatagtcaccgaagagtgagaacatgactgctgaaaagcctccctcaagatctctatacgctagacgtcttgagttcgagcctatgacgttgcttttctataaccatacttcctcctgtgaatcccctatggctgttagcagaggttggtcttaccaattccaatgacctgaattccaccgtactcttggactctacatggatatcaaacatcgtcagaactgaagatctcttctgtgattgtctcggtgtttgtgtgcgttttttcctttcgtttggtgaaagatggaaatagacatgactacaacaac

SEQ ID NO: 22324 - DNA, 371 bp, Gossypium hirsutum
  Clone ID: GOSHI-09MAY01-C28219_1
cccaaatggtcgccgcaatgccaaaagatgagaggaggtttctccctccaaaggccaacttctacgacagaggaagagttaccgacgatggaggagcgagtcaactcaggtgttcctctctcttttctcttttttgccttgttttttacacacaaataactggaatggagaaatcaaatgaaccaaacaatcgaaaggaaaaactgagaacagcttcaaaatttgatctcgattcatatttttgcgtctggtttcttgtgtattcccctttgcgagtgtattcgtgaaaaaaaagaaacgacccccctattcgcacacttcctttactggaagcagtgattgatgatgcgcatatgccatggcaaatcaaa

SEQ ID NO: 22325 - DNA, 705 bp, Gossypium hirsutum
  Clone ID: GOSHI-09MAY01-C129551_1
aacaaaaatttccgttcaagtcaaaaacacggaccattgtttccgcccgtagccaaacgagacattagtctgcctcctgcgttctcttctgtctccagtcaacctttcttccttacaatgtccttccccctcacgtcgtcgtttcgttcgcttccctcccattttgcagcttccttccttgtcaactccaattcagctaagctccaatctcccatcttaatgtcactccctcaaaacccttcttcatttccccgccatattagccgtagcttcaccagagctccacccaacagctccgccgtcttccgcccaaacctcagagttcgcgcttcaagcaaaacgccgaaccaggcgaccgacgctaagctaatcgcaattagctccgccgtgaccataacattcgccgttgctaatcgcgttctttacaagctcgcacttgttcccatgaaggagtacccattctttttagctcaattcaccaccttcgggtacgtggcgatttatttttcgatactgtgtctaccttaccgggcggggattgtggctaatgaaatgttaagtttgcctaaatctcgatttgctggcattggtatgctataagctcttggagttgctattggaatggcttctgcagcgatgcttccatgaccagtcattccgatattgaatcagaattttttactgtgtgcactcctattttcagct

SEQ ID NO: 22326 - DNA, 315 bp, Gossypium hirsutum
  Clone ID: GOSHI-09MAY01-C129641_1
gtgatccttatttgaatctctttaggaatataattccgccgattttcgacaccttggatgttagcccgcttctagctttcgccgtgttggggactctcggctcgattctgaataacagtacaggaatgtattgattgcttgcgccgaaaggagagtgagtatagaaaatgataattcaatttttagcattagattatctattttgactatctaaaacttttattctccattaacatataagtcaaaataatttctgcggccctcatcgcggtggagtctctcctccctctcttgatttccattacgctccctcct

SEQ ID NO: 22327 - DNA, 505 bp, Gossypium hirsutum
  Clone ID: GOSHI-09MAY01-C129031_1
tcgttcacgcgtccgcccacgcgtccgcccacgcgtccgggaaggtagcttggttatacccgcagcaggtgactataagccaaatggaggccatacttctgtggctaagtctacagattgtcctatgggagttacatgtggtgaaaccacggctggctctttgatggggctggacactttaatcaaacccaatcacagttccactgctgctgatgaacaggctaaagctgcagacgaattcaagaaaacaatgtatggcacagctgacagtggtagcagcagcgatgaggaaggagtgtcaaaaacgaacaagttacagatcagattacgagaacagccgacgtcaggaaccgcggatgtcaataagacgaaagaagcgacgaagcgacttggtgatggcttgggcctacctatagccaggacctaatcatggactggccaggatcttggccagaggcaacagcaaccttatgctgctacctgggcatctgtgactaataccaca

SEQ ID NO: 22328 - DNA, 1026 bp, Gossypium hirsutum
  Clone ID: GOSHI-09MAY01-C129311_1
gtgggaatcgggtaaagaaggttgcacaatgcatgtgtctcctgatcaactttggcctcataccaagtttttggaagatttcataaatggagctgaagttgcatccctgttggactgcattcggctcactgcaggacctttgcatgctcttgctgctgcaactcggcctgctcgagctagtcctgctccaggagtctctgggccatctggagttatttcttctgtgccaaaacagccaggatactcgccattgcagggacttctgccgagcagctcaaccacaaatgttaatcaggctgctgctgctgttccagcaggaaatactgcatctgcttctgcaagctctatagggaaccatagcatccatggggctgcaatgttagctgcagggagagggggccctggcattgtacccagctcactgttgcccattgatgtttccgttgtattacgtggaccatattggatacgcataatataccgcaagcgttttgcagttgacatgcggtgctttgctggtgatcaggtttggcttcaaccagcgacgccaccttccacaccaccaagggggggatcttatgtctggagggtccctaccatgtccacagttcaggcctttcatcatggaacatgttgcccaagaactaaatggattagattccagtttcacgagtggccaacaaacagttggcccagcaaattcaaacaatccaaacttgagttcaggtccacagctttcagcaaatggaagtagagttaaccttcctacctctgcagcgatgtctagagccgcaaaccagtagctggtttaaatcgtgttggaaattctcttccaggatcaccaaatttggctgttgtgagttcgggattgccaatacgccgaccgcctggtagtggtgttcctgcacatgtaaggggggaactgaataccgccattattgggcttggtgatgatggaagatatggaggtggaatggttcctgttgtgctcttaaaaaagttcttagggtattcttaaatacctcc

SEQ ID NO: 22329 - DNA, 862 bp, Gossypium hirsutum
  Clone ID: GOSHI-09MAY01-C24949_1
cccacgcgtccgcccacgcgtccgaaagaggttagagtggctgtctccccagggaaagcggaaggacatagaagaaataacgaggagtacatggagagagaggatttcagctttgggaaccgaggattggaacgaggaatgaccaacaaccacgaaggtgacaaagtgggggatggcaagcccaaaactatgcctcctgcaagtgtcatcacaaggctgatactgatcatggtttggagaaagcttatcagaaatcccaacacttattcaagcttaataggactcacttggtctctaatctcattcaggtggaatgtacaaatgcctgccataatagccaagtccatttccatactgtcagatgcagggcttggcatggccatgttcagtcttggtctgttcatggcattgcaaccgaggatcatagcatgtggaaattccgttgcagcttttgccatgggtgtgagattccttgcaggtccagctgtgatggcagccgcttccatagctgtcggactccgtggcgttctcttacacgttgccattgtgcaggcagctctcccacaaggcattgtcccctttgtctttgccaaggaatacaacctacaccctgatattctcagcactgctgttatttttggaatgctaatagccttgcccataacgcttgtctactacatagtattgggattatgaaggggccatctctaacctaaatatcaacattttaattaattaattaaatccaatccatgccatcaaattcaaaccccgtttccaaagcaaatccttaatcttccttgtttttttttcctagtaaaatttgtaaaatcttattctgtagtcaaaatatgaggaaaaa

SEQ ID NO: 22330 - DNA, 619 bp, Gossypium hirsutum
  Clone ID: GOSHI-09MAY01-C24939_1
cccacgcgtccgcgaggacgccacaggttgccccatttacctcggttgatgatacggccccacttttggagaatggcagcagtaatgataagttaaattttgatggatccgtggatttgaatgaagatttatgcagaatcagttcattaaatggaaccatggtaggtgaagaaaatgctgtgagcatgctggttccgtcatgcgcccgcccacgcgtcccagaaagttttgtagggcttataatcccagcggggttacattggtgaaatgggtgatgttgaggatgagaccttcaaccctgttgttagtagatcaagtcaaacatgtagaattgatctactcgaagagatcattgaagatgctaaagataacaagaaaattttgtttcaggccatgcaatcaattatggacttgatgaaagaagttgaacttcaagaggcagctgccgaacaagcaaaagaggaagccgcaagggggggcatggatattctcgtcaaggtggaggaacttaaacagatgctgccacatgcaaaggaagcaaatgacatgcatgctggagaagtatatggcgagaaagcaatcctagtcactgaagtaaaagagcttgaaaatcgcttgc

SEQ ID NO: 22331 - DNA, 1200 bp, Gossypium hirsutum
  Clone ID: GOSHI-09MAY01-C24859_1
ggaaaaccaccaagtgaaccaaggttgcaggatgttaactactatggttcctcagggatgccaaatatggaagagaaatctgtttcagtggtttctgatgtaaattctggtagtggtttgattgaatactcttcaagtagtagtaggtcggctagaagtaggacagagaaggagccaattggtaggagcaaaccacataatagggtggccatctttcgggatcgcgagactgaccgcaaggaccctgattatgacaggaactatgataggtacatgcaaagatttgatcctgggtttgggttcaatagtggtccatacacaatgcaacctatgtacacccctgcaattaactacaacaccgaatttccacaacttggatccactcatcggcctcaaatagctactgaacaccaacctcggcctctcccacaacatatacctgggccctgggtcgctccaccaaccgctacaggaatcagttatggtcatcctgaaacaatgatgcctccttttaatccaaatcatgttggagcacgctccacatctgccatatatctgcattcttctcagtatcctcttcagcgtcctggaatgccttttatccaccctcatgagcatgttcaccagccgttttcgcagccgcatcaacatcagcctgatgctagttttggattagcccggccccagtgaggggcttgggccatgcctgcaccctgccagtgaaacaatgatttgaaatgtgatgaaggaatgcagtctcgagttatgtaaactggcaggagtgcaggcatagaggaccggggtgaactggaccataataatgaaggatacatggatcgatccactcccccgcagtcggtttatgttggagcttctataactttggttaaggttggagtgttggagaagctcatttggtttgggcatattcactgccgttgatggtgatgatgaaaaatacaggagctaagaatgtaatcagtcatcaatgatgaagctatacgaggagccaaagagaaatgggaagatcttgttttggagtcgacaaattgcttgggtcctattgcctatgggtaaaagcgttttgccgtgaaataatatgcctttactggaataataaagtggaccacattatgtatcatattactatttgacccaggtgtattttgaaccttttgattactatctcagctagtctat

SEQ ID NO: 22332 - DNA, 1161 bp, Gossypium hirsutum
  Clone ID: GOSHI-09MAY01-C24849_1
ggatgccgttggtatatgttaagctttatacataccagatatttagagctttgtcttacatccaccgcagcattggtgtgtgtcatcgggacatcaaaccgcaaaaccttttggtaaatccgcatactcatcaagttaaactatgtgattttggaagtgcaaaagttttggtgaaaggggaaccaaatatatcctacatctgctcaaggtatccgcgcgcccccgccctaatatttggagcaacagagtacactacagctattgacatctggtctgctggttgtgtccttgctgaaatgttacttggacagcctttgtttcctggtgagagtggggtcgaccagcttgttgagattattaaggtcttgggcactccaacccgagaagaaattaagtgcatgaatcctaattatacagagttcaaattccctcagattaaggctcacccatggcacaagatattccacaggcgtatgcctcctgaagctgttgatttggtgtcaagattactccaatactccccgaatctccgatgttctgctctagatgccttgatccatcctttctttgacgagttgcgcgatccaaatgcccgcttgccaaatggccgtttcctgccgccattgtttaacttcaaacctcacgaactgaaaggcgttccggaggagataacggcaaaactgataccggagcatgcaagaaagcaatgtccatcacttggattgtgattttgatgtgtaactcaactagtagcaaaagtggattatcattatggaagcttttatggtgtttgttgttcatctatgccccagttttttgttcttgttgcatgcatgtgttgttgttggttatgtaaaagcagattttagacataaaaatcgtccatcccactgtcttctatatatttctttcaagatttgtaacatcatcatggagaccaacttatgttctactgtcatatatgttcttgtatgtaatgtaattgtcgagaccctagtagtgaaggaaacatcagtgtttagtttgaaaaaaaaaaaaaaaaaaaaacaattaacaaaataaaatcaaataaaaacaaaaatacaaaaactctaaaatcaacaaaataaaaaaaaatatccttaactttcaataacaaagggggggcctttttaaaggacc

SEQ ID NO: 22333 - DNA, 386 bp, Gossypium hirsutum
  Clone ID: LIB3145-013-Q1-K1-E6
tgtttatgtaaaagcagattttagacataaaaatcgtccatcccactgtcttgtatatagttctttcaagatttgtaacatcatcatggagaccaacttatgttctactgtcatatatgttcttgtatgtaatgtaattgtcgagaccctagtagtgacggaaaaaaaaaaaaaaaaaaaaaaaaaaaaaaaaaaaaaaaaaaaaaaaaaaaaaaaaaataaaaaaaaacaagggaaaaaaaatcaaaaaaaagaaaaaaaactaaaccaaacactaagatcaaacaatcactttaaaaaaaataaacaaaaacaaaagggggggcccctttaaaaaaaccaaatttatattgcccgggttggcaaaggaaaaatttttttttagg

SEQ ID NO: 22334 - DNA, 528 bp, Gossypium hirsutum
  Clone ID: GOSHI-09MAY01-C24869_1
gggaagaacttcgaaaattgcttggccattcggaaaggagttgattttttgcttagaacccaaagagaagatggtggttggggagagagttacctttcttgtcccaaaaaggtatatacacccattgaggaaaaagaatcgaatttagtaagtactgcacaagcaatgatgagtctaattgttagtggccaggctgagagggatcctacacctctacatcgagctgcaaaattgttgataaattctcagttgccaaacggtggttttcctcagcagggactggctggtgtcttcatgaggaactgtatgttacactatgcaatatatagaaatgtttttccactgtgggcgcttgctgagtatcgggaccatgtttggccttcaaaatatatatgcttttgaattataagaatggatcagagaattatatacaatagattgggtaacctacgatctgagtaaaaataatgatgtaataaagttattgaaatcttgcattaaaattagatgtagctttcggtggaatct

SEQ ID NO: 22335 - DNA, 447 bp, Gossypium hirsutum
  Clone ID: GOSHI-09MAY01-C24509_3
caatgaagattaggatgatctagaagatgattcagaacggtttaatgaaaaccggtcctcaggaatgtgaataatattttctatcaaccaagaggttttttagtgcaaaaagattggtggcaatatcttgctatactatgaggctttacttgtttgtgaagttggctacttggtttaatggcccacacttttccaactttcatcagtacgaggagagcacctatacaagtttcatcagtagaggagagcacctatacaagtttctttccttctttctatctaaaataatgtataaacatcaaatattatatcaatagctattatcacagtcattcattatatgagcttgaattgggatccccaattttttgggccctttcctattggagtggtggttttaatatggataaatgacaatagcctggaatctgtatcttgcttctttgc

SEQ ID NO: 22336 - DNA, 423 bp, Gossypium hirsutum
  Clone ID: GOSHI-09MAY01-C24509_2
gaaaatcggtcctcatgaatgtgaataatattttggatcagccaagaggtttattagtgcaaaaagattgatggcaatatcttgctatactatgaggccttgtttgtgaggttggcaacttggtttaatggcccacacttttccaactttcatcagtagatgagagcacctatacaagtttcatcagtagaggagagcacctatacaagtttctttctttctttctatataaaataatgtataaacatcaaatattatatcaatagctattatcacagcatttcatttcgggatctcaataatgatgacctatatatcatataaaaggggggggccactgtctaatgttggtggaggcatgctttctgtccatactacatgggtggcatgtccttgcaagatgctgctatcggacagcctatg

SEQ ID NO: 22337 - DNA, 574 bp, Gossypium hirsutum
  Clone ID: GOSHI-09MAY01-C24509_1
aagaactaggggagccccgggctgaggtgtcgatggcttaagagcttatgttttacacaggaaccaaaccttgtgaattttttgaaacagatcgatgttacaaaccctttgattcttactttgtctggatttccccgaaatccttagattgtatcttttttggaatgactagatcttcgttgtgttcttgatattgcatcggactccagggatgctccttcttcattgcctcaaaaggatgattacagggaagacattcccaatgaagatgagattgatctagcagatgatgcagaacggaataatgaaaatcggtgctcatgaatatgaataatattttctatcacccaagacgtttattagtgcaaaaagattgatagcaatatcttgctatactatgacgctttacttgtttgtgaagttggcaacttggtttaatggcccacacttttccaactttcatcagtagaggagagcacctatacaagtttctttctttctttgtatctaaaataatgtataaacatcaaatattatatcaatagcttttatcacaggcattcattatatgagc

SEQ ID NO: 22338 - DNA, 543 bp, Gossypium hirsutum
  Clone ID: GOSHI-09MAY01-C24529_1
cccacgcgtccgcccacgcgtccgcccacgcgtccgcaagaaatcatggtaagtctcaaatcacttgtatctctcagttcccgatccgctgccgtagcactacttgttttggtggtttcagtggcagtgcagacccatactacaaatgcacaaagctgcccgaccgagctgacgagcctgaacgtgtgcgcacctttcgtggtgcccggtgcagctgtggctaaccctagcattgactgctgtaacgcactccaatcggtgcaccatgattgcctttgcagcactctaaggatcgcttctcgactcccttctcaatgcaatctcccaccactcacttgtgcttgaaagaaaagcagtggtgctgcatgcttaattgggtaggaaaatctaataacgccatggaatatggataccgccctgtttttttctttcttttttaatgggtaataataagcaatggtggtggtaaaatggaaactaattagagccgcagttcttttattttatattcacatattattatatttcttattactattttta

SEQ ID NO: 22339 - DNA, 415 bp, Gossypium hirsutum
  Clone ID: uC-gsflmaxxa090d05b1
ggggcgggggcggatattggtcgcccaccgccgaggtttgtttaatacttgatctctcagtggggggcgtttttgaagcactacttgttttggcggtttcagtggcagtgcagacccatactacaaatgcacaaagctgcccgaccgagctgacgagcctgaacgtgtgcgcacctttcgtggtgcccggtgcagctgaggctaaccctagcattgactgctgtaacgcactccaatcggagcaccaagaatgcctttgcagcactctaaggatcgattctcgactcccttctcaatgcaatctcccaccactgacttgtgcttgaaagaaaagcactggtgctgcatgcttaattgggtaggaaaatgtaataacgccatggaatatggataccgacctgtatttttctttctt

SEQ ID NO: 22340 - DNA, 758 bp, Gossypium hirsutum
  Clone ID: GOSHI-09MAY01-C24499_1
ggaccaactcaggaagaaattacaaacaggtggttcagtcaggatatttttggtgaagctgtacagcaaggggatttagggaagtataacgacagtggtgatgaaatggaggtcgataatcgagatgaaaagccggttattcccgagaagtcaaaagcaaagaaaaagcaggatgaaaaaacttctattcctgacaaggccaaggagaagaaagtaaacaatgctgccggccccaaaaacaccaaactccaggctgcttctaaagcagaggatgatttcgagattgtcccggcaccggctacagattcaagtgacgactcatcttcagatgactcacaggctgacgacgctgaaacgaaggctgagatattagcttgtgctaagaagatgtaaggaaaaagcaaagggatcaaattcttgatgatgcttataataaatatatgtttgatgatgacggtttaccgaaatggttcttagaggaggaaaagaggcatcgccaaccaattaagcccgttacaaaagaagagattgctgcaatgcgtgcacaattcaaagagatcaacgctcgaccggctaagaaagttgcagaggcaaaagcacgaaagaagcggattgcaatgaaaaagctcgaaaaggtacggctgttagcaaactgtttttcagaccaagctgacatcttcgaaaggtcaaagaggaagcaaattgaacaactctacaagaaggctacccccaaaaagccccaaagggaatacgaggtc

SEQ ID NO: 22341 - DNA, 431 bp, Gossypium hirsutum
  Clone ID: LIB3148-029-Q1-K1-B11
cccacgcgtacgaccatgtcatatcttaaaggagctgctgaaatgtttgaaaacggagttctagctgttgtggatgtgaagtttttagctgacgttcatattcgagctttcgaagattcatctaccatcggacgatacttttgcttcaatcaaatagtgcatactgaggaagaagctgttaaacttgtagaaaccctgagccctttgttatcttcacagcccaaatatgaatgccaagggagcgaggcctatgctgagaggttgagaaccaagaaattgaacaaactggttgaaggcactgcataattgtgaaacttgattttaccttttttcctatcgattatagcttcttaactttatcagatgatgtatatatatatatatatgtgttctcattgagaaagacgtgctgattttctcatcagcatttt

SEQ ID NO: 22342 - DNA, 421 bp, Gossypium hirsutum
  Clone ID: LIB3146-005-Q1-K1-C6
gtcctatcttaaaggagctgctgaaatgtttgaaaacggagttctagctgttgtggatgtgaagtttttagctgacgttcatattcgagctttcgaagattcatctaccatcggacgatacttttgcttcaatcaaatagtgcatactgaggaagaagctgttaaacttgtagaaaccctgagccctttgttatcttcacaacccaagtgagtctattgtaactctgttattgtcattaaaaagaaaataaaaatagtgacgtcctcaatttatcatgcctcttaaatgcagatatgaatgccaagggagcgaggcctatgctgagaggttgagaaccaagaaattgaacatattggttgaaggcactgcataattgtgaaacttgattttacctttttttcctatcgattatagcttctt

SEQ ID NO: 22343 - DNA, 470 bp, Gossypium hirsutum
  Clone ID: GOSHI-09MAY01-C24749_1
ggtgctagtgtcgactgtgacggtgaaaaggatgataccaaacgtagtatatgtcaggaagaatatgtaaatggagatgaagtagggatgttgcagcgtgagcataggtatcacgtgacatgcatacagaattggctgcagacaaatgttacttaccgagcgtgaccggtttgtctcttggcaactgcccttttcccattccagatgtttaggcatcagaatgcagaaaattgcaagcattctgcaacgcgaccaacctagcatgatggttctgcaagtgcaacttcatacaggaattctaaacaagggacaacttcatatatatccaatcaacaatcaacaacagtggttttatatctatcaatcaacaatagttgtttgccaattcacatataggacagtaatctttcctttcagtgcccaagacaaaaagttgccttttttttcggacgcgtgggcggacgagtggg

SEQ ID NO: 22344 - DNA, 446 bp, Gossypium hirsutum
  Clone ID: GOSHI-09MAY01-C24769_1
ataaaatagatagttactctctcgcttctctcttcctgtctctgtccacgaccaacaactaagattatccaaacggtacaacataatggccgccctcgcgtccggctactgatagtgaagacccagggcattgtagaaaaacatggataccatcttcttccgcattatgacagcgaggacagaagctgtttgcaaccactctcttgagtctgagattcgatagagtaggaataaaattccataagattcgccatatagtaatagtaattttttatgggagatgtaaattccatagctttttatagaaattttttgtttcagcctgtaataaataagaactaggatccatactagcctcttgtaatagtttataggcacttcggactgaaaattcgccggaatgttcttctcgccagacttgaaagtcatcacgtgcttcttttgcc

SEQ ID NO: 22345 - DNA, 932 bp, Gossypium hirsutum
  Clone ID: GOSHI-09MAY01-C24699_1
ttcgtttcaaaaatggcttcttctttgttagttttagctaccatttttgtgttatgcagctttggtaaagctactcatcctggtctcattttaacagtcgttaacaactgccctttcaccatttatcctgctatccaacccaacgctggccaccctgtcctcgaacgaggcggcttcgctcttcataccctcacccaccgttccttccctgcccccaccgtccactggtctggccgtatctgggctcgaactggctgcacctactctaacggacatttctcctgtgccacgggagattgtggccaccgcattgaatgcaacggtctcggtggagccactcctatcacaattgctcagttcagcctccaccacggtggccataaagatctctcttcctacgaagtcagccttgtggacggttttaacatccccatgactgttaccccgcacgaaggcaaaggcctttgccccgtcgttgggtgcagggctaatattctggccacgtgtcccggcaagttacagtataggtcacctcctcatggtccagttgtgggttgtaagagtggttgtgctgccttcggaaccgacgagctttgctgcaggaaccattacaatagccctcagacctgtagggcttcgagctattcagagtttttcaaacatgcttgtccggccacatttacttacgcccatgatagcccttcgctcatgcacgactgttcttccccacgtgagctaaaagttatcttctgtcactagaggaagacgataatgggtttgagtttgttgaataatctgtagtgctatgctagagatatggtgaatgtttgattgttgggattgaagcattaatggtgtttgaagaagttgaagtgtgtaattgcttatttttagacaaaattaatgaaggttgtttttcatcttcaaaaaca

SEQ ID NO: 22346 - DNA, 293 bp, Gossypium hirsutum
  Clone ID: LIB3146-003-P1-K1-G9
ctagtcagcgccaggcatcctgctacacttccgaccatcacttgctcagttcagtctttaccacggtggccataaagatctctcggccgacgaattcagccttgtggacggatttaacatccccatgactgctaccccgcacgaaggcaaaggcctttgccccgtcgttggctgcatgcgctaatattctgaccacgtgtcccggcaagttacagtataagtcacctgctcatactacagctgtgggtcgtaagagcgtacgagctatcttcaatacccacaagctttgatgc

SEQ ID NO: 22347 - DNA, 653 bp, Gossypium hirsutum
  Clone ID: GOSHI-09MAY01-C24679_1
tacctagtggccctggcaaccagacagaagatgaagttcccctcctacaaaacatatattggaaagagttatcgtcgctcgtgtatgtatggattggttttcttattgtgcagatcattaaggaatatcttccaacttgctcagtcatgtactggattgtgacctccttgcagatacccattgctgcctctgtgacaatctttgaagccatatgcttatgcaaagggaccagagtgattgcatccaaaggaaaggaaatcacaaactggaagatgcatcggattcttctttattgttcctgtggcataatagctggtatgggaggagggctgctaggactaggaggtggcttcatcttgggtcctttattcctcgaactggggatacctccacaggtagctagtgcaacatcaacgttttctatggtgttttcatcttcgatgtcagttgtacaatattatcttctcgatcgtttcccagtcccatatgctgcttattttgtcctagtagcaacaatggctgccattgctggccagcatgtggtcagaaggatcattgcattcattgtaagagcattgataataatcttcatactagctttgacattctttatcaacgcaatcactttatgtggagttggcattgcttgatat

SEQ ID NO: 22348 - DNA, 1041 bp, Gossypium hirsutum
  Clone ID: GOSHI-09MAY01-C24629_1
gttgtgcaggaggaagaagaaagtctttttttgaagaaaacccctttgcagaaaaaattggttgaaattatggccaaagtggtttgaggatataagcatgatgttgaacgatgcttgtccctgagcgtggaggaaagaatgcgtgggctcatatgcaatttaatcagactgtcgaaacagcgtgttgatattgagaagcctaggcaccggacggttatcacctcggatgttcggcagcaaattatgatgatgaaccagaatgctaggggagaatgggagaaaaagcacgctgaggcagagaagctccggaaacttaatgaacccgaggctgagactgcctttgatggtgacaaggagaaagatgacagtcgagtaaaagcagtaaaggtaaataaggaggaggatgacaagatgaggaccactgctgcaaatgttgccgctcgtgctgctgttggaggggatgacatgctgtcaaaatggcagcttatggctgagcaagctcgccagaaacgtgagggaggaacggatgcggcatctggttcacaagcaagtaaagatgcgaaccgcagacctttatctgcatctgggaaaagtacaaaggacaatcaagaatctgaaaagaggggccctctcaatcctcatggatctgggacaagcaagaaatttggccggaaccaaggtacgacactcacggcccatgctagagtggctcgtactatttccattaaggatgtgattgcagttctggaaagagagccccaaatgtcaaagtctacacttatttatggcttgtacgaaaaaacctgctccgaatctaaagcggagtgattatagtgcaccttttatacatttggtgtttcgtgtttgccattacataaaatgggatttgagatgtccatgactgtatctttagaattaatggaagaaaaaacaggtagataactgaatttcaggtgtttaagtgcaagtatcaacctgatcttactacattctgtggaaccttttattttttattttagtgtgtcccttatcatcttatcc

SEQ ID NO: 22349 - DNA, 514 bp, Gossypium hirsutum
  Clone ID: LIB3829-011-Q6-N6-C9
gtcaatgcattaataccttacacaacgttgatatagctagatgtttgagcaatttcataacagtacaattgctctacacatgctcaaaaataatttgtacaaatcaacagtctaatttcctaatttttagtatatgaaagtgcatagtaccatcaggttcaggtttatgaccatgcattgctttcatggttcaatacaagaaacagtttcactgaaaaaacataataggaaccaattctgaattgctcggatgctacagtacacatgatgaaccagatccatgaggattgagagggcccctcttttcaaattcttgattggcctttgtacttttcccagatgcaaataaaggcctgcggtttgcatctttacttgcctgtgaaccaaatgccgcatccgttcctccctcacgtttctggcgagcttgctcagccataagctgccattttgacagcatgtcatcccctccaacagcagcacgagcagcaacatttgcagcagtggtcctcatctt

SEQ ID NO: 22350 - DNA, 796 bp, Gossypium hirsutum
  Clone ID: GOSHI-09MAY01-C24009_1
cctctttagatttcacgcttattattttcgtaacattttgaactcatggaaatgactgcggcttcccttacaatctctccaagaaagcttccatccgatctctactcttactcctatcagaatgatgcaaaaaccccactggtgatgtcagtcctggcttctcttattgagagaacaatggcaagaaacgaaaggatagccaagaactgtaaatgggcattggcaaaagattgcaatatgcagagttttcgagtgccaggagacaccagacatgacgattcaatcctacctagaaagaatcttccgttacaccaaagccggaccatccgtttatgtggtggcatatgtatatttggatcggtttcgccaagcaaatccagggttccggattaatgctaggaacgtacataggctcctcattaccatcatcatggtggcttccaagtatgttgaagacatgaattacagaaattcgtactttgcacgagtaggagggttgacgaccaaggaactgaacaagttggaggttgaatttttgttcatgatgggtttcaaactgcatgtaaatgtgacagtgttcgagagctactgcagtcacttggagagggaagtgagcattggaggaggataccacattgagaggactttaagctttgaagttggggccagtacagaggagtgatgtataaaccataatgtatgtcttctgcttaagaaatgggataccccccatatattatttgttacccccattcccatgttttccatttttggtcaaaaaattttcctatatttt

SEQ ID NO: 22351 - DNA, 711 bp, Gossypium hirsutum
  Clone ID: GOSHI-09MAY01-C24039_1
cccacgcgtccgcccacgcgtccgtttttttagttcttttactttggaaatctaaatcataaacagcatcatcgccgccaaccatgccgccgaagtttgacccgacccaagtcgtcgacgtcttcgttcgagtcgccggcggtgaagttggagctgccagttcactggcacccaaaattggtcctctgggtctctcgcccaaaaaaaattggtgaagatatcgcgaaagaaaccgccaaggaatggaagggtttacgtgtcacagtcaaactgactgtccagaaccgtcaagccaaagttatggtggttccctctgccgccgctttggtcatcaaggcactgaaagagcctgagagggatcgtaagaagacaaagaatattaaacataatgggaacattagcctcgatgatgtgatagagattgcgaaagtgatgaggcccaaatccatggccaaggatttgagaggaaccgtgaaggagattttgggaacttgtgtctccgtcggttgtacggttgatgggaaagaccctaaagacctgcaggaggaaatttctgaaggggaagtcgatgttcccttggagtgaaaaacaaagtgattattatttttgaagtttgtgtttaatgattgctttcccttttgtaagttcttgataaatgttaaaaatgatgattgagttggggtttacgtcttaaaatattaccgtctactg

SEQ ID NO: 22352 - DNA, 424 bp, Gossypium hirsutum
  Clone ID: GOSHI-09MAY01-C24349_1
caagcattgcccaagtgtttgttgctgcttacaacaaacgacttcttaggcttcctgcagagggacaggaatgtggagttttctatgatcctcctttaaaggaatacgtgctgtcaaagctacccctcacctaccagttcaggttcttgaacaaagccgcgattacaaccaagaatgatttagaagacgatggttcccctaaaaaatggcggttgcgcagcatccaagatgtagaagaggtcaaatgccttgtcacaatcatccctatatgggcttctggtatcattagcttcaccgccatggcacaacatggaacattcaccttatcacaagctttgaaaatgaacatgcatcttggtcccaagttccaaatcccagctggttccatgggtgtcatatcgacgctcacaattgggattttcct

SEQ ID NO: 22353 - DNA, 437 bp, Gossypium hirsutum
  Clone ID: GOSHI-09MAY01-C24249_3
aatgacacgaacagcaacaaatttcatttttattccatcgatttcccccgtcaaaagttctgcattcctacgtttgggagtacatgaaatgaaagctatgttgcacacgaatatacattgacggtagctataatccgatactactaccatcaagctacatagcagagcgacgttgcgtgcgaggtcttttcaatccacacaaatacgtcccattcgattgcgtcctaccgcttgtcgcagccatcgataccatcgcgttatcgaacttctcgaacccttggttcaaaggacgaagaatctgctcgaaagtcacggcattgcagcgcttgtcaagccaagccgtgatgtctgcaaaaacaatctcgatgttttcatcaggctctcccgatgttaaaccatgccccatccctggaaaccgttttaatggtttgtccatg

SEQ ID NO: 22354 - DNA, 1271 bp, Gossypium hirsutum
  Clone ID: GOSHI-09MAY01-C24249_1
aaattctaaatatagcaatatgatcagaacttgtacaactttctttttttaatattcccttaattccccctttcaaagacaacgtttagttagcttgatacgatcagcctacattgccgagtgaggccgtgcgcatggtcccttcaaaccacacaaatatctcccgtttgcttgtgttccgccagtggcttttgccatcgaaatcactatattatcactgcattcttccaaaccttgatcgaaaggatccagactttggtctaaagttacagcattgcagcgcttgtcaagccaacctatgatatccgcgaacaccatttccacgttctcatcgggctctccggctgtcaagccgtgccacatccccggatataattttatggttttgtcagtgcttctcgctttctcgtacagtgccttgcttacttctgggtctgtcactgtatctgcttccccatgcaacacaaagaaggggagtctcacctcattcaaaccattttcaatgctcatgctggttctgagcacttccaatgctgttttcagtcttggtttgtcttggtatatcagcttattgttccttaccgcttcacgtttaacagggtctttgaatgctgagtcaatgacatcttttgagggtactatcttccatctaggtataacttcttccattttagtcaatatattcaccaccaccggatgtggcttcactttctctgatatcttacacatgggtgcaacaagaacagcaccattccaaaaggaaggatcctttttatgaagcaataaggccactgcacctcccattgattctccatataagaatctgctcttgtccctgtattcttcttgagcacagatagatttgaaaaaattactgcagtcattaacaatgttttcaaacttcttaatataacatcgagcacccttggaccttccatgtccttcgtaatcaatcccaaacacaccatatccagctgcggctagcctggttccacattctctcatgaatccactgcactccatgccatacccatggcaaaggaaaacaagagccttcggagaagagatcaaaggcaaccatctgcaagtaaaaagcaaagttcctcttgaattccttatatgatcctcctgatattcaaatgccatatgaaactgaaacacttaaaagcaagaaagatctgagcttggaaataggataaaaccaaagaaacggaacaacagctaacaaaggcagaagcttttttcttcttcttttttatttgtggaaagaa

SEQ ID NO: 22355 - DNA, 484 bp, Gossypium hirsutum
  Clone ID: uC-gsflnu33B132h01b1
tgttctcgcgttcgcccacgcgtccgcgagaaagcgagaagcactgacaaaaccataaatttatatccggggatgtggcatggcttgacagccggagagcccgatgagaacgtggaaatggtgttcgcggatatcataggttggcttgacaagcgctgcaatgctgtaactttagaccaaagtctgggtcctttcgatcaaggttcggaagaatgcagtgataatatagtgatttcgatggcaacggccagtggcggaacacaagcaaacggtagatatttgtgaggtttgaagggaccacgcgcacggcctcactcggcaatgtaagctgatcgtattaagttaactaaacgttgtctctgaatattgcaaaatacttgcaagggggaatttacggaataaaaaaaaaaaagaaagatgtaccctattaacattgggtgccttgtttatccttttcttttcttttttggaatagtattataca

SEQ ID NO: 22356 - DNA, 421 bp, Gossypium hirsutum
  unsure (1)..(421): unsure at all n locations
  Clone ID: LIB3149-022-Q1-K1-D3
gcaagtccaagggtgatcgatgttatattaaaaagttcgataacattgttaatgactgcagcgaatttttcaaatctatctgtgctcaggaagaatacaggggaaagagcagatttttatatggagagcccgatgagaacgtggaaatggtgttcgcggatatcataggttggcttgacaagcgctgcaatgctgtaactttagaccaaagtctgggtcctttcgatcaaggttcggaagaatgcagtgataatatagtgatttcgatggcaacggccagtggcggaacacaagcaaacgggagatatttgtgtggtttgaagggaccacgcgcacggnctcactcggcaatgtaggctgatcgtatcaagttaactaaacgttgtctctgaatattgcaaaatatttgaaagggggaatt

SEQ ID NO: 22357 - DNA, 647 bp, Gossypium hirsutum
  Clone ID: GOSHI-09MAY01-C125991_1
aatctccattccaatcttgaaatggtgaggaagcgagtacctgattggctcaacagttctctctggtctacaactccggccgacgatcgtctccaccgctgtgccccttctcccaccaccacaaccaccacctcttccgccaccgtttccgagccaactcttcagcctccggctccagtgcctcctcccgccgcagcctcgaaacctcagtccactcctacttctccgaaactcgaaatcagagatccagttaatagaaatagtaacaacaatagcggtggtaacgatcaaaacggcgactcttctggcgtttctcccgatgatatctctcgccaggctcagctcttggccgagttatccaagaaggtgataaatatgtgggaattacgaggattgcgtcgcaggggattcctgatggtgcaggaatcaaatctactgtctggaaattgttgttagggtatttaccacctgatcgttcgcagtggtcttctgaattactaaaaaaaggtctcagtacaggcattttaaaaaaaagctcttgatgaatccttcaaaaatcacaaggaggttggagaatctgtgggttgtgacaatgatgaatcaaaacctgaaggcaggggtctgctatcaaaatcacaaataactct

SEQ ID NO: 22358 - DNA, 424 bp, Gossypium hirsutum
  Clone ID: LIB3048-020-Q1-L1-H2
catgaacaagactgtgtgagaagaagagttatgaaatcggtgatggctaaccctttctgctgcgaaacagccgcataggatgccatggaggctgtgtgggatatctagtataatgacacatagccctttgacagagctccttgaaagaccagtttttacttagcattttatttcaatcaattctcaaacgaatcctgtttgtatcatagagtaggaaaatgccctgttttttcaattacatgcacatttcaatcttgaagagaaaattcatttccctaagaaaatattttgcgcctcttggaaaaagctggacaggaaaggattcgaccattgctaatgatatttgaagtcatgtttgagagaatgagagggccttattataccatttcaacctagttgagtcaatacgatgctgggttcagat

SEQ ID NO: 22359 - DNA, 341 bp, Gossypium hirsutum
  Clone ID: LIB3048-005-Q1-L1-E3
ttaacctttttggttcgaaaccagccgaaagggttcccttgaaggttggttggaaatctggtattaatgccccaaagccttttgacagagctccttgaaggaccagtttttactaagcattttatttcaatcaattctaaaacaaatcctttttgtatcatagagtaggaaaatgccctgttttttcaattacatgcacatttcaatcttgaagagaaaattcatttccctaagaaaatattttccgcctcttggagaaggctggagaggaaaggattgtaccattgctaatgttatttgaggtcaggtttgagagaatgagagggcctcagtataccatt

SEQ ID NO: 22360 - DNA, 654 bp, Gossypium hirsutum
  Clone ID: GOSHI-09MAY01-C25919_1
accctatcgtgccttgacttccttgactgcagatccacctccaccgatccacctccagtcctccacccacttccagaatcaagcgtttaagggtttgtttcttcccgaatcgccaagtagaagcaagcatacaagaacgaggagtttggtataggcattaggtaccagattcactcaatttgtacagcctgtatttcagaggtgcataaatatcatccagactcaacaattggctaagaaacaatcgacattgaaatcgatttggcataccttagcttcctttcctgcatcaagctacctccgtcctccatcgatccacctccggtctacctctggtcctccacccagttccagttccagaaaatcaagggtttgtttattcccgaatcgccaacaaattcgtatttaaggtgaaaaattatcaaatttgacaggatgagcatgaggtagcagatacaaatattaaacggcagaaggtgctttatttgctacatgaaattctgcctctgcttcgacatatacaacaggagcaacatgctgacctgaggtggaagcagtatcaggtgtgcaatgacagacatgacataatgtatcaatgatgatgataggatcatgattggatcactcagcttttgttcaagagaaactgtgttt

SEQ ID NO: 22361 - DNA, 436 bp, Gossypium hirsutum
  Clone ID: GOSHI-09MAY01-C25899_1
tctttgaaagatcatatcctcgtatctaccatggttaactgcaaataggcttttgtagtaaatttgtcgatattataggctacctcaatatccgaatcgaatcgtttcaacggagaaaaacatctaaacggtttcgtttatgcctttgatctctatttatgaacggtttcgattgttttagatgggaacgaactacaaggcagcgctaattccgcaaaggatacgggatacaatccatggatggggcaaagcagcaaggagaaagaggaggctcggacgtttcaccgatgattcaaccatacatacggaaactagcacggtaatgtcactcgaggaagatgaccaccagttgatcgatattcacgaagatgacaaggacacatacaatgaggtagagttgcaaccgccaccaaacgttacatccactccttccccg

SEQ ID NO: 22362 - DNA, 398 bp, Gossypium hirsutum
  Clone ID: GOSHI-09MAY01-C25819_2
gcggcttccacttgtgtaggaaggagcttttactcgagagggggggtccttgatgctctcaattctttcactcagttcgcaaggattgcctcggttgaggattctaggcgtgagatcgctgcttcctttgctcatgcttcccatgtaactggacgtaagcatctcttcttgctcgtaatcttctgattaaaacctgtcgagacacgtcccgtatagggtttgaagtgcctatgctgggttttatgtctaatgttgtctttcacccttgtcgacaacatgaggaggtgactggctcacaaggtctttttcttaatgagcgacgacacgccttctctgtgaactcgtaaccttctcgagctctcaacagagtcaaatgccaaatgtgttgagagctccac

SEQ ID NO: 22363 - DNA, 929 bp, Gossypium hirsutum
  Clone ID: GOSHI-09MAY01-C25819_1
agactccttattgctttccttgccctctcttaaatctataaataactcctaaatatccagcaaatctccatatccaaacacacaatttcaattccagcagggaaaaaaaaaatggcgacttccaccatgaaaacaagcttcatagccattatcctagcgggaatggttgctggaatggtgaaagctcaatgcggcaacacttgctcggcgaccgagtgttgcagtcggttcgggttttgcgggacgggagacgatttctgcggagtgaattgccgagggggtccttgtgttaacaatggggtctccatagctgccattgttacgcaggaattcttcgatgggatattgaaccaggcggcttccacttgtgtaggaaggagcttttactcgagaggggtgttccttgatgctctcaattctttcactcagttcgcaaggattgggtcggttgaggattctaggcgtgagatcgctgctttctttgctcatgctacccatgaaactggaagtaagcatctctttttgctcgtcggtggagcctccaggaatactgtgacgagacaaaaccgattatccatgcaacccaagcaaaggttactacggtcgtggaacactgcaactaacatggaactacaactacggacaccggttccgatatcgggttcaacggcttaaaacccaccggaaaccgttggccaacgaacctctttatcttccttcaaaggctgccattttggtttttggaataaacaatggtggccaggcgttgattaaacccaaagggtccccggggccactaattccaaccccattaattgggagaacctttgaatgcccaccgggtgttggattccgaacttaaagatttcagttctccggaattaacttactaaccactccattatttgttagccccacttgggggttta

SEQ ID NO: 22364 - DNA, 713 bp, Gossypium hirsutum
  unsure (1)..(713): unsure at all n locations
  Clone ID: AI055037.1
ggaattcttcgatgggatattgaaccaggcggcttcaacttgtgtaggaaggagcttttactcgagaggggtgttccttgatgctctcaattctttcactcagttcgcaaggattgggtcggttgaggattctaggcgtgagattgctgctttctttgctcatgctacccatgaaactggaagtttctgtcacattgaagaggacggtggagcctcaaaggactactgtgacgagacaaaaaccgattatccatgcaacccaacaaaggttctacgggtcgtggaccactgcaactaacatggaactacaactacggaccagccggttccgatattcgggttcaacgggcttagacgcaccggaaaccgtggccaacgaccctcttatctccttcaggctgcantttggttttggatgaacaatgttganngcgtgatgaccaagggttcggggccactattcgagccattaatggagaccttgaatgcaacgtgtgggatccgactaaagttcagtctcggattaactactacactcatattggagccaactggtgtcgctcctgggattatctcagctgctgagttattcctttattatgtcctgaaattgagctttaattcctaccatatgttacccatatgtttaggaaaaagatcttggacggngggtaatttcaaaaaaaaattttgttagaagtcccttaatcttt

SEQ ID NO: 22365 - DNA, 482 bp, Gossypium hirsutum
  Clone ID: GOSHI-09MAY01-C25509_1
ggagggtcgcaggctagcccgaggaggaattaggtagtacggtacttccatgatatgacctagactggggactggataccatatagagtgccacatcacaatcactagactattgcatctagagatatggacatggctagaaggacaaggactgctcaaactgtgagtgattacagttgtaatggtcgtcatgctttcactcgcacaagggagctgcagaggccgcttgttggttcaattttacagagtatgtggggagtgtcgcctactcatttgttatggagccctacacataacagtacacttgtggattatacatggactgttggtcaaacaccttttggaccattttcaaaggttatgtcattgtcttttgtgcaaaaaggatgcaactcggaaaaattttctcttgacatcattgaattacaatttaacaagtgctattgatgttcttgaatctattgatgcacaagggggggtta

SEQ ID NO: 22366 - DNA, 261 bp, Gossypium hirsutum
  Clone ID: uC-gsflmaxxa040c07b1
tcgggattatcataccattttgttgctggatcggtatcatcagtctattgcatttagagatatggttatcgctgttaggacaaggactgctcaaactgtgagtgattacagttgtaatggtcgtcatgttttcactcgtacaagggagctgcagaggccgcttgttggttcaattttacagagtatgtggggagtgtcgcctactcatttgttatggagccctacacataacagtacacttgtggattatacatggactgt

SEQ ID NO: 22367 - DNA, 415 bp, Gossypium hirsutum
  Clone ID: GOSHI-09MAY01-C25489_1
ttatctgccaaacttcatgcggaatgcagttcttgatcatagaatcagcggtctgtatcatccagacctacttctgaggaacaacaatgataagggaaatccggttactgaagaatccattcttaaattctttcagcttgccatgacttgttgttctccttctcctactcttagaccgaatagcagacgagtgctcatgatgctcgaagaaatcgggaagtaggaactggtagtagttcatttcttcattggtcttggtcggagtttctaaatttacattttgttaatcacctttgacggccacggttataatggtaacaacaaaaacaatgatttataccggaatagcaggagtcgggtcatctcttgaaagctaaaaagtaagaacattgtgttgatactcgtggagaaagag

SEQ ID NO: 22368 - DNA, 626 bp, Gossypium hirsutum
  Clone ID: GOSHI-09MAY01-C25469_2
ctttttcaccaactcctctcccgttttcttgctctttttcttcctttgcatttacttctgatttgtaggttccttttttccgattcccttgagtaatcaagctttttgtttatttgttttactttctgggttttccatcctgtttcattgcttgcttatattctatatgtatatattcttcaatagccatggttatttgagttggaattctgaatgcactggaacacttttttttctcttaaaaaaaaactcagagaccagagaaggcaaaaagcaaaccaatccttttccccccagtggatcccaccagcactacaaccatgattgtgaatgtgaaagaatcaacaatggtaaggccggcgggggagactccccggcggagcctctggaacgccaacgtggacttggtggtaccaaggttccacacccctagcgtttacttctacaggccgaacggagcggccaatttcttcgatccgcaggtgatgaaggaggcgttgagcaaggccctggtgccattttaccccatggcgggcggctgaagagggacgaggatggaaggatcgagatcgattgcaaatggcgaagggtgctctttgttgagctgaaactaattctgttattga

SEQ ID NO: 22369 - DNA, 669 bp, Gossypium hirsutum
  Clone ID: GOSHI-09MAY01-C25469_1
ccctctcgttcgcctttttcaccaactcctctcccgttttcttgctctttttcttcctttgcatttacttctgatttgcaaaaagcaaaccaatccttttccccccagtggatcccaccagcactacaaccatgattgtgaatgtgaaagaatcaacaatggtaaggccggcgggggagactccccggcggagcctctggaacgccaacgtggacttggtggtaccaaggttccacacccctagcgtttacttctacaggccgaacggagcggccaatttcttcgatccgcaggtgatgaaggaggccgttgagcaaggccctggtgccattttaccccatggcggggcggctgaagagggaccaggatggaaggatcgagatcgattgcaatggcgaaggggtgctctttgttgaggctgaaactaattctgttattgacgattttggtgattttgcacccaccttggagctcaggcagctcatcccaaccgttgattattccggtggcatcttcacgtattcactcttgggtttgcaaggtaacatatttcaaatgtgtggagcatcactaggtgttggatgcaacatatgcgcagatggatatctgtctcactcataacacatgtctgtatggtcgtgtctgacttacaattcacatcatgatcga

SEQ ID NO: 22370 - DNA, 724 bp, Gossypium hirsutum
  Clone ID: GOSHI-09MAY01-C25439_1
gagagagagagaactagtctcgagtttttttttttttgagttaaattcttgaagttactgtgtaggtatcttgaataagaattaaattaccagatatttctgaagaaacctttatggcagtggtcagcaatccacaaaagtccaatttttgaatcgttgagcaaaacattattgaattcttcacatactttctggggctttctgaattttcttggacttcgagctcgggttaagcttccttggctttttctgggtgatattctggatagctgatttgacaagctttgatgaccgtggaggaagccgatagcagctccaagtggagtagggagcaagataaggcatttgagaatgctcttgcatcttatcctgaggacttttcagatcgatgggagaaaattgcagctaatgtacctggaaaaactttggaagagattaaagaacactatgagcttctagaggatgatgttaaccggattgaatctggttgtgtgcctctgccgccatataattcttccgagagttcagcaggtgatgaaggagctggtaagaaggggagcagccattcagggaattgtaacagtgagtcaaatcatgggagtaagaattcaaggtcagatcaagaacgtcggaaggggattgcttggacagaggatgagcacaggttatttcttcttggtctggataaatatgggaaaggtgactggcgaagcatatcccggaa

SEQ ID NO: 22371 - DNA, 392 bp, Gossypium hirsutum
  Clone ID: LIB3493-026-P1-M1-D10
gaaaattgcagctgatgtgccggggaaaactttggaagagatgaaagagcactatgagcttctagaggatgacattaaccagattgaatctggttgtgtgcctctccctccgtacgattcttctgatggttcagccggccatgctggtgacgaaggaactggtaaaaaaggaagcagcaatttagggcattataacagtgagtcaaatcaggggagtaagagttcgaggtcagatcaggaacgtcgcaaggggattgcttggacagaggatgagcacaggttatttcttcttggtttggataaatatggaaaaggtgactggagaagcatatcccggaactttgtggtcacaagaactccaacgcaagtggcatgtcatgcacaaaagtatt

SEQ ID NO: 22372 - DNA, 442 bp, Gossypium hirsutum
  Clone ID: LIB3165-050-Q1-K1-H11
tcttcttttacctaacatccactctcttaaaaagcaaatggccaaactctctttgggctccacattttctatcttccattcccgccacatccgtcctccactcgccggctgccacgtcaccaaaatgacagtggccgatcaccacccatcgttggaggtcgtaggcggagcacgtgatcgcttcctcccatctctccacaccaacctccgactaccctacaaccctttccccctcatcgcctggaaccgtcacgtcgagaccatcttcgcctccttcttacgctctattccccaagtcagattacgacgggagtgcctccgagtcaaagacggcggctccgttgccctcgattgggtctccggcgaccaccgacgtcttactcctgattctcccgtcctcattttactcccgggtttgactggaggaagccaagattcatat

SEQ ID NO: 22373 - DNA, 470 bp, Gossypium hirsutum
  Clone ID: LIB3493-026-P1-M1-D8
gtagatcaacttaacttctatttattcaaaagtcaaacgaataaaccgggtccctgctccacatacgtctatattaacattgtcgccacattctttctctattaccctgctgatatgataccaaaatgacagcttgccgatcaccattcatattaggaggtcgtatcgcgagagcacctagatacccttccttccatgtgtccacaccaacctccgcctaccctacaaccctttccccctcatcgactggaaccgtcacgtcgagaccatcttcgcctacttcttacgctctattccccaagtcagattacgacgggagtgcctccgagtcaaagacggggggtccgttgcccttgattgggtctccggctaccaccgccgcttttcttctgattataccgttctcattttactcccggatttgactggaggaagtctggattcatatttatgacatatgttaactaaag

SEQ ID NO: 22374 - DNA, 423 bp, Gossypium hirsutum
  Clone ID: GOSHI-09MAY01-C25749_1
gatttttgaaggtcatattctcatagttatgtgtcaggcatgattaccagacatggttacttaaagaaaaatgacaagtcggcagtaacatagaatcatacagctcaaggaacagtgcatcgtaaattttttggtttgtcttttccttttggtcccactaacctttcaattctttactttctggttatttccaggtttatttacatactgctcccttgtgccacattggtggtttgtcctcagccatggccatgctaatggtaggagcttgccatgccttcataccgaagtttgaagctacactagcccttgaagccatagaacaacaccatgtgacttctcttattactgtcccagcaatgatggctgatctaatctcatcagtcaggctgaagcgaattcagaagggatgtgacagtgtga

SEQ ID NO: 22375 - DNA, 396 bp, Gossypium hirsutum
  Clone ID: GOSHI-09MAY01-C25699_2
tgttctagcggaaaaggaaatgttccatttcattcaagcattgcaaaaagtaatggattattaaagtattaagacaagacaccaatgtgatgtatgaagaactatgttaaagaagctcctccaactcgattggaatcattactttgtaccttgtatggtgttgggtttaatctcctgatgtgatcaggcctcatttgctcaagctgtttgatgcaatggtccctaatgtccttcagagctggtaactcttcccttactttacctgattttccaggccagtaacacttaagaagctcctccacacgctttggtaccacatatgctctttgggattcactaaaagggtgacggcatatgattcgttctccaacctttggacatggttcattttcccct

SEQ ID NO: 22376 - DNA, 922 bp, Gossypium hirsutum
  Clone ID: GOSHI-09MAY01-C25699_1
gcgttcttttttaattgtaaaacctaaataatttccagttcaatgacaaatccataatatcaaaatttcacatagaaattggcatctaacattagtgcctcaaatttcgtgttatgggtaaaattcaattactagggctataagatgtatttcatttgtatgcaaattttacacatgatctttggttccaaaaattttggacagcgaaaaagtaaatgttccatttcattcaagcattgcaaaaaataatggattattaaagcataaagtcgacaacaatgtgatgtatgaagactatgttaaagaagctcctccaactccattggaatcattactttgtacctgctatttgtaagctatatcatatcaatttatctgggattctcactgcagctccccgacaggggcctcattgagccataggaaatggatgaaatcatacagttttgcacttacgctcaccttgtatggtgtggggtttaatctcctgacgtgatcaggcctcatttgctcaagctgtttgatgcaatggtccctaatatcctgcagagctggtaactcttcccttactttacttgacttcccaggccagtaacacttcagaagttcttccacgcgctgtggtactacatatgctcttttggattcattaaaagggtggcgacatagaatacgttctcccacctttggacatggttcattttcccctgtcattatatctaccagcgaatatccttcccttccatataacctgtaacatcgttttttgcatggtatagagaccttggatacatcctctgaaagtttgatgcgtggctgattattgatctcaacaagcttgaaaacacaacctaaagctgcttgagcatagcaagtgaccaaataggttaatattccataacaatccacctcatgaccctgc

SEQ ID NO: 22377 - DNA, 757 bp, Gossypium hirsutum
  Clone ID: GOSHI-09MAY01-C25689_1
caattttcttgttggatttgaagcagtaatccttttccgaatcgttgaattcctctgtgaaaatttctgatcggtgtttcatcgctccgttgaagaatgccgtcgtcgccacgaaagaattagtaaaacggaaaacaaacggataaaactagaatgcgaaccatttgcgacgtctgcgacagcgccgccgcgatcatattctgcgccgccgacgaggctgctctctgccgttcctgcgacgaaaaggttcacatgtgtaacaagcttgccagcagacatgtcagagttggtttagccgaccccagcaatgtcccacgctgtgatatatgtgaaaatgcacctgctttcttttactgtgaagtggatggtagttccctttgcctgcaatgtgatatgattgtacatgttggaggtaaaaggacccatgggaggtatctcttgttgaggcagagagttgagtttccaggggataagcctggtcgtttggaggaaccaggtttacaaccgctcagtccggatgaagtaaggaaggatctgaatcagcagtcaaagcttgcagtgagagagaaccggcaaaaccgtggagtctctcatgttccattgcttgatgataatgctaagggtgatggagaggtaggaaatgagttgattgatctaaatgccaggccacaacaggtgcaggggcaagcttctatcaatcaggagcaagccatggatgtttcgagtggcaataatcatgactctacagtgggatccc

SEQ ID NO: 22378 - DNA, 450 bp, Gossypium hirsutum
  Clone ID: GOSHI-09MAY01-C25659_1
gctgacttgaagtttatagtgattaagagtctacccaggcgtcagggttttattccttctttaccagaaaaaacatatgcgggagacttgcgacatcttgtgttggagttaaataaccaatcaaagtttcctgtcaagaatctaaagatgaagatcagcaacccgagatttctaaatgctgggaatcagagttatttaaatgtagaattttctgcttgcttagaaaagaagttgaatgttgagcaaagcgttgggcatgctaatgctaagaaaatgttgcagaatgtgttccattttcctgaggacatatcagtgcaggaggaaacatcattatcttggcctctttggtttcatgctgctgttcctggcaatatttctttgtacattactgtatattatgaaatggaaaatgtatcaagcattatgaaattccgcactctacgtatgcat

SEQ ID NO: 22379 - DNA, 384 bp, Gossypium hirsutum
  Clone ID: GOSHI-09MAY01-C25139_1
gttcgtgctctcagatacacagatccaaattattccttcgtcaaacaccctttctccggtcttctcacggccaaaattttaaacagcgatgtcgggaaatgctaaattgcggcggtcggtgatgttccaggcggtgctattagtggtattgatgttagcttcgagtaatgctccggtcggtgacgccatatggttgaacgttcctccgactggcactaagtgtgtttcggaggaaatccagagcaacgtcgtcgttttgtctgcctacgtcgttggttccgacgatcacggtcccgtccctcccttttcggccctcgtgtcattcccttctggccacaatcttcatctcttggtgaatgtgacacatggtcaattcgcattcac

SEQ ID NO: 22380 - DNA, 1096 bp, Gossypium hirsutum
  Clone ID: GOSHI-09MAY01-C25009_1
tggtacgcctgcagtaccgtccgattcccggtcgcccagctccgatccttatggttctttgtgagaacccttaaacctcccggaaacacaatgatccgaatcgccaaaaaccccaaacctctaacaactctgactcaccaattcctccaacgctgcaccgtcagtggaaccgccaaaggcaaatccaaactcaaagccggccaacctttgaaacgctccaaaatctccactaaaaaaggaaaaggcggcgcttctctcgacgattccctccccaaagcggcagaatccccgacgagaagcaaaaactctacgaccaatgcctcaatgcacccacaccggtccgtcacctctcaccgaaagagcgagcccgcgaagcccgaacgagaaaaattgggattaataagcaaggagcggcaacgggaaatggagattttgaagaagggaggaagaaaggcaatgggagtccctgacgagcctatgattatgggaactccggggctggatttgattacattgggccttgtcgatgccgataagatacccaaatatgagctgacggtggaggatggccggagattgtccaaggagtatagtcgggttttgatgaggaagcatagggcaaggcaggctgctgagactaatttgttgagaatgaaaaaggaggcaattgaagcgttgccggagaaacttaaggaggcggctatgataccagatttgaccccatttccggcaaatcgattgatggcgtctttgactccacctattgaagggtatattgagaaggttaaggaagcggctaagaaaagttcctccaagcagaagcttaggtgaaggcgaggtggaagtaggcaagggacaaacttcactcagtgaaactgatgatcaattacagctgcaatgtagtgtgattttctctgatggcaatgagtctcaaaacaagaattattcaacattgaaattgagcaatgccatattttccggtttaacattgaaactagcatgatgtgttgtgatccaagcataggcagcaacttacaattattgcttcctctttgaggacttgcttgctataataatctgatagcttgaattattg

SEQ ID NO: 22381 - DNA, 561 bp, Gossypium hirsutum
  unsure (1)..(561): unsure at all n locations
  Clone ID: LIB3828-004-Q1-N6-C6
aattcanagctatcagatattatagcaagcaagtcctcaaagaggaaataataattgtaagttgctgcctatgcttggatcacaacacatcatgctagtttcaacgttaaaccggaaaattgacattgctcaatttcaatgttgaatacttcttgttttgagactcattgccatcagagaaaatcacactacattgcagctgtaattgatcatcagtttcacgagtgaagtttgtcccttgcctactgcagccgcaaaagatcttccacctcgccttcacctaagcttctgcttggtggaacttttcttagccgcttccttaaccttctcaatatacccttcaataggtggagtcaaagacgccatcaatcgatttgccggaaatggggtcaaatctggtatcatagccgcctccttaagtttctccggcaacgcatcaattgcctcctttttcattctcaacaaattagtctcagcagcctgccttgccctatgcttcctcatcaaaacccgactatactccttggacaatctccggccatcctccaccgtcagctcata

SEQ ID NO: 22382 - DNA, 516 bp, Gossypium hirsutum
  Clone ID: uC-gsronu33B099h02b1
cccactgcgtcctttccacgcgtccgtattccttcattgggttctttgttagaacccttaaacctaccggaaacacaatgatccgaatcgccaaaaaccccaaacctctaacaactctgactcaccaattcctccaacgctgcaccgtcagtggaaccgccaaaggcaaatccaaactcaaagccggccaacctttgaaacgctccaaaatctccactaaaaaaggaaaaggcggcgcttctctcgacgattccctccccaaaggcggcagaatccccgacgagaagcaaaaactctacgaccaatgcctcaatgcacccacaccggtccgtcacctctcaccgaaagagcgagcccgcgaagccgaacgagaaaaattgggattaataagcaaggagcggcaacgggaaatggagattttgaagaagggaggaagaaaggcaatgggagtccctgacgagcctatgattatgggaactccggggctggattggatacattgggccttgtcgatgc

SEQ ID NO: 22383 - DNA, 602 bp, Gossypium hirsutum
  Clone ID: GOSHI-09MAY01-C25349_1
cggacgcgtgggaaacgatgaatctccccgcaaaatgcaccaaaggggttaagacaatgagggagattgagggaacccttttcccaaatcatgaaacctcaatcccaaaacctaacaaagtaaactaactcacggtgggtcaagccaacaccaatcctccactgcaacttcctgacctctaaagggcatcttccacccagaatcggtcaattgaatatctccgacccaagaaaaaattacatcatcggggctcgaatttgaaacgacaacttaaattttctcaaaagagctttcacatcccaggaccgccattgcctccaccatacaaattgtagaagcccaggtatagatacgatactctgatcttaaaatttgtcccatatcatcctgtacaataaaccctgaactcactttatttcttggtccggagcgtgtccatattaatcttgacccacaatggcagtggggggaccaatggactaccgcagtaggaggagggtgtctcaacacaaatctcagtcctcgatattcactttcatagctatgaataaagatcacgaggtcggaaaaaaccagcagaacccagggggcgccttataaaa

SEQ ID NO: 22384 - DNA, 627 bp, Gossypium hirsutum
  Clone ID: GOSHI-09MAY01-C125291_1
aattaagcctactctaccaccgcgacattcgaaattttccagctccagccaaaaaggaaaatggcgaattccatggcaaatgggtctagaagggtttatagatctcttctctgtaaccccagaacttctcaactttcaatgcccttttgcaccaccaccccgatttcctcctctgctgaaacttccgactcggactctgatccatttcccgacttttcttcttcgcaatcctcaacgccgttagaatctgccaaggactccaacactaagagtcgtttatacgacctcccgcttgagaatggctttgatacgggcatttacaaggcaattctggttggacaggtagggcagaccccaatccataagaaactgaagagtgggctatcagtgacattattttccctggggacaggtgggattcgaaacaacaggaggccacatgggaatgaggaaccagtggagtatgctaatcgctgtgctattcagtggcatcgtgtttgtgtttaccaagagcacttgggaggtgtttgtcctgaagcatgctcttcctggcacgactctatatctagacggaaatctggagatgaaagtcttcactgatccaatcatggtatggttcgacgcctg

SEQ ID NO: 22385 - DNA, 575 bp, Gossypium hirsutum
  Clone ID: uC-gsronu33B055d06b1
cccactcgtctgttccagccaaaaaggaaaatggcgaattcgatggcaaatttatctagaagggtttatagatgcctcctctgtaaccccagagcttctcatcttttcaatgcccctttgcaccaccacccccgatttcctcctctgctgaaccttccgactcgtactctgttccattttccaactcaccttcttcgcaatcctcaacccccttagactctgccctggactccaacactaagagtctgttatactactgcccgtttgataatccctttgatacctctcatttacccgcctcttctggctccctccgtcacttctcaccctctttcacatgactccccctctcccccttcctctctctcttctctctcctccaccccacctttctttcccattctctcccccttcctcctcaccttcctttccctctctcctttcctccctcttattctccactctctattcttcttctaatctttaccttctctctctccccctttccccctccctccttctccctcctcttatccctctctccccctctctctctccctccccttctcctcccc

SEQ ID NO: 22386 - DNA, 1931 bp, Gossypium hirsutum
  Clone ID: GOSHI-09MAY01-C25219_1
gctaccagtgatattttcctttaccgggatagctctttaatgccacaaaacaaatctcttcggagggcatcgaattggctcactcccggcaaaaataatgcattcttaacatactggctcaatgcacgacactgtattgggacaacacgtgagccattttgtgtgactgtcaatccagaccataccccgaagaataccttgcttaagtggtcgactggccatgcaattccctctgttgctgcatcaaaagcttcacttgagcttggtcagattcaggggaagagaggaatctggttctgtggctatgacttcaatcaggatgaactaaaggctggtatggatgctgcacatggtatcttgggaaagcattcttctgttctgcatagtccaaagagtatgtcaccctctttcatggaaacaacggcacgcctctttgttactaaattctttcaacaatatatatctatgggctgtgtaattctctcagaggaaggaggcagaattttcactttcaaaggaaacatggaaaagtgtcctcttaaaacagttctgaaagtacataatcctcagttttactggaggatcatgaaagaagctgatataggccttgcagatgcatatatccatggagatttttcttttcttgatgaaactgaaggccttcttaatcttttccggattcttgttgccaataaagagaactcagctgcctcagggtcgaataaaagaaggacttggtggtcacctgctctgttaacagctagtatatcatctgcaaagtattttgtgaagcatctcttgagacaaaatactattacacaagctcgtaggaacatttctcgtcattatgatctgagtaatgaacttttcactctatacttgggcaaaatgatgcaatactcttctggagtctttaggacgggagaagaacatttggacgttgcacagcgtagaaaaatcagttctctaattgagaaagcaaggatagagaaacggcacgaagttctcgacattgggtgcggttggggaagcttagctattgaaactgtgaaaagaacaggatgcaaatatactggcatcactctatcagaacagcaactgaaatatgctcaagaaaaagtgaaggaagctggactccaggataacatcaaaatacttctctgtgactatcgccagttacctaaggaacaccaatttgacagaatcatatctgtagagatggtagaacatgttggtgaagaatatattgaggagttttacagatgctgtgaccaattactgaaagaagatgggctttttgttcttcagttcatatctatcccagaagagctttccaaagaaatccagcaaacagcaggttttctaaaggaatatatattccctggaggaaccctgctttctttggataggaatttatcagccatggctgctgcaacaagattcagtgtggagcatgtggaaaacataggaatgagttattaccacacactgagatggtggagaaaacttttcctggaaaacacaagcaaagttctagctctggggttcgacgagaagttcatgaggacatgggaatactatttcgattactgcgctgccggttttaagacaggaactcttatagattaccaggttgtattttcaagggccggaaatttcggtacactcggagatccatacaaaggtttcccttctgcatattccttcatcgatgattgaacaaagtgtggttcaacattgatccaaagaagcaaacaaaattatcaccacatgccagtgttaagaacaacctatctccctagtccctacttttgtttattatggctatgtttgcaatgcaagaataagcaaacattgtaatgttaataaagtttgcacttttgtagactggatggatgttatcaatgaagtacctagtttatacgttttaa

SEQ ID NO: 22387 - DNA, 461 bp, Gossypium hirsutum
  unsure (1)..(461): unsure at all n locations
  Clone ID: LIB3582-060-P1-K1-H1
cgtctctgcccacgcgtccgntggtngaaacatgnnttggtgaagnaatatattgaggnagttttaccattctctacagcatatgatctctgacgaagaggggcttctttgagctacagtaccatatctcatcaccagaaagagctttgccaaagtaaatccagctaaatagtttgtttatttaaaggaatatatattgccccggtggggcggtgctttctttggataggaatttatcagtcatggctggtgcaacaagattaagcgtggagcatgtggaaaatataggaatgagttattactacacactgagatggtggagaaaacttttactggaaaacacaagcaaagttatagctttgggattngattagaagttaatgaggacatgggaatactatttngattacttgtatgngggttttaagacaggaacctttatagattattaggttgtattt

SEQ ID NO: 22388 - DNA, 400 bp, Gossypium hirsutum
  Clone ID: uC-gsronu33B032e09b1
atgttcttaaggtgcctacctagtaatttctggttatttttaactcttaacaatgattcaattttaattctgcaagataaattcctttagtttagggtggaatggaaggtccaggattcacagcatttttcttagggtctctttttttctcaagctggtatggatgccgcacctggtatcttgggaaagcattcttctggtctggattgtccaaagaggatgtcacccttttttatgggaaccacgggacgcctctttggtactaaattctttcaacaatatatatctatgggctgtgtaattttcttagaggaaggagggagaattttcacttttcaaggaaacatggaaaagtggtctcttaaaacaggtctgaaaggacattatcctcaagtttact

SEQ ID NO: 22389 - DNA, 395 bp, Gossypium hirsutum
  Clone ID: GOSHI-09MAY01-C25229_1
atcaagatctgaattttcatgctacagaagaggatcctgttactaaaaagagtataaagaggttgattcttaacataaagccaaaagatatcagttcaattattgttggctctccaggtgaggatccaaagatggtagccaacttcaaagaccttctacaaaaaatttttgtgcttgatccacagaagagaatgacagttactcaggcattggctcatccattcatcacgggcaagtgaaacatgttgctgattttatgtctccagaaatgtgttccgctagatatttgtacattatgacctaactcatatttagatatctaatcattgggaattctgtcttttatcttctctgtgctggacaaagagctttgggcacttgttttggcatggttg

SEQ ID NO: 22390 - DNA, 717 bp, Gossypium hirsutum
  Clone ID: GOSHI-09MAY01-C26989_1
cgacgaactggtaagaggaaaatttattctacttctaacccaaaaccccaagttgtctcttctgccatatctcacttcagtagggaaaacaaggagagtatggataaaatgaaactagctcaatggggtgagaaattgaaaactggtggagctcaaatgagtagaatggttagtgggaaaatgaaggaaattctacaagggccgacacccgaatcgaaacttgtagatgaagccacattggagaccctagaagaacctaattggggaatgaatatgaggatatgttctatgatcaatagtgaggagttcaatgggaccgaaattgttagggccataaaaaagaagatatccgggaaaaatgctgccagccaaaggttgagtcttgatttgttggaagtttgtaccgggaattgtgagaaggtagcttccgaggtggcttcggagaaagtgttggaagagatggttaagatgatccagaatccgcaaacatatcaccagaatagagaaaaggctttggacttgattcgtgcttggggacagtctgatgatcttgcatacctacttgtgtttcaccaaacttatatgagcttgaaagacagaagcgcacaactgccagtgagatgatgatgatgaccactcgtctgccttgtaccagacattggaatcttatatgggagagccattgtctacccctgaaaattatcctgctgattacac

SEQ ID NO: 22391 - DNA, 432 bp, Gossypium hirsutum
  Clone ID: GOSHI-09MAY01-C26949_1
gaggagttacgagagttacgtggtggttatgaaagtgagcgcgccaatcgcgacgcatcgtgggttgaaacgtgccgcgattgatttggttacggtgttggatattagcgggagtgcgatgaggttgcagatggtgaaacgggcgatgcggttgattatctctttgctcgacgagaaagaccgtttgtcgatcgtgattttctcgtcgagctcgaaacggttgttgccattgaaaagaatgagttccggcggacgacgatcggcgaggaggatcgtcgatgcgttgggaagtaaccgacaagggatgagtgtcaacgacgcgctcaaaaaggcggccaaagtgttggaggatcgtagagaaaaaaacgccgtcgccagtgttatgatcttatcggactgtcatgataaacagtcacagtccaatcccactaa

SEQ ID NO: 22392 - DNA, 672 bp, Gossypium hirsutum
  Clone ID: GOSHI-09MAY01-C26819_1
gttatattctctttctctctctcatttataccttttggggttgtggcagtctcatagcctagaagaagaagaaaagtctcatcttttatgttgggattctaaagggttggagatacccaaaatttaaaggggaaagagagagatgggttcatgtgcatcagtacataaaagctctcaagagtcagccatgaaagttggactttctttagggtctaaaacagacaatatcatcatcccaccttcacctgttaaagagaaatctgatgctgtcaatggtagtaaagatgaaactttttttgattccagagcatatttggattcggattgggatgacgatttcttaagtgtcagtggtgatttcactccatctcgaggtaattcccctgttcaccataatagcatctctattggggtacctaaaattcacaaggccattgatgaaggatctcctggctcatgttcggaagcgtccccaggaaagaaaaagaagctagtcgaactattccgtgacagtgttaaagaagaccaagatgttaatgagctaaatacctcgatcaaccagcacactgccaacggaaagcttgaatgcaaaccaacaatccaagacatactacctcaaaatctgccaacggtaccccttatgtcactcaagctaattctcagtgcatagtg

SEQ ID NO: 22393 - DNA, 578 bp, Gossypium hirsutum
  unsure (1)..(578): unsure at all n locations
  Clone ID: AI726915.1
ggggacactcttctttaccccgcacatcccaggcaccaaggtgcngatgggtgccngaggttcccgcacatccaagcaccaagttgcngatggtgtcngaggctcccgcacttcntagccaccgaggtgccgatgctgcccgaggctcccgcacatccgagccaccaaggtgccgatggtgcccgaggctcccgcacgaccaagggccgaggtgcngatggtggccgaggcccccgcacgaccaagggcctattttgccgatggtgcccgagcctctcgcacgaccaagggtttaggttgccgatggtgcccgaggttccggcacatccaagcaccaaggtgtcgatggtgcacgaggctcccgcacgacaaagggcctagtttgccgatggtgtccgaggctcccgcacatcccagcacctaggagccgatggtggccgaggctcccgcacgaccaagggcctattttgccgatggtgcccgaggctcccgcacgaccaagggcttagtttgccgatggtgcccgagcctctcgcacgaccaagggcctaggttgtcgatggtgcgcgaggttctcg

SEQ ID NO: 22394 - DNA, 384 bp, Gossypium hirsutum
  Clone ID: LIB3048-015-Q1-L1-F11
aagggcctaggttgccgacagtgtccgaggctcccgcccatcagagcagcgaggtgccgatggtgcccgaggctcccgcacgaccaagggcctaggttgccgatggtgcccgaggctcccgcacatcgaagcaccgaggtgccgatggcgcccgaggctcctgcaataccaagggcttagtttgccgatggtgtccggggctcctgcacatcctaacaccaaggtgccgatggtgcccgaagcttccggacgaccaaaggcctatgctaccggaaccgttcaacggaacaccgacgggaccgttcgacggagcaccgtcgggaccgatcggccgagcaccaccgggaacctaaccggcagttggggggcaccgacgtccgggca

SEQ ID NO: 22395 - DNA, 425 bp, Gossypium hirsutum
  Clone ID: GOSHI-09MAY01-C26529_1
cagcatttgatatgctacatctagctgatgctgttggggtcgatgataagttctgggtgttgggctactcaggtggaagtatccatgcttgggctgctcttagatatgttcctcacagaattgcaggtgcagcggtggttgctccaatgatcaatccgtatgagcctagcatgactaaggaagaaatgagaagtatttggggagagtcattaccaagaaggaagctaatgtactacttagctagaagattgccaaaactgctgtcatgtttttaccgccggagtttcctatcaggcaagcatggtcgagttgaaaagttgatgtctgtgtcacttggaaggccggatgagattctgactgaaggagcaaccctttgaagactttctggcacagagatggggaggagtcagtccgtcaggggaata

SEQ ID NO: 22396 - DNA, 753 bp, Gossypium hirsutum
  unsure (1)..(753): unsure at all n locations
  Clone ID: AI054605.1
tctccctcgacgacatccgatctcngggctgtatgaattcggcacgagggcagactaaggatgcctgatgtaaaattgaacttgtttctgattattttcatgccatagaatgaaattatggaattggtttctgttttttcttttaactttaagaccatagaagtaggtacctttttgttgctactataggcttcctgagttcacaccaggctgaagagatttcattgattgtagtggaaaagtacttcagctcacttcccgggctcataattaaacctgaatcttttgttattacttgaataacatacttgagtttaactattacattttataattgccttgtttttttatttggtggttctctacttagcattcatcatttgtggtagtccttaattgagtcttcccaggtataaaagcatggtagagctattggtttagactaatgtgtgcactaagacattaacttatgtagctttctaccattggaaccatgttgctttaattttcttttatttttatttgcctgatatacttaatattaggatatgaagagtcatttgccaaattcatatttaccttttgtttatatatggatgcttacatttcatggtgatatccatttactgagagtgctatgtatgtatatcattgtatgttatgatctttgtcttgcatcttacaatcatttattttccttaggttttttaaattcagatttacttaatttttagtacatcttttattatggtg

SEQ ID NO: 22397 - DNA, 332 bp, Gossypium hirsutum
  Clone ID: LIB3048-011-Q1-L1-H4
gcttactgagttcacactaggctgaagagatttcattgatgatagtggaaaagtacttcagctcacttcccgggctcataattaaacctgaatcttttgttattacttgaataacatacttgagtttaactactacattttttaattgccttgtttttttatttgttattacttgaataacatacttgagtttaactaatacaatgtttatgttaagattaagttggtaaaagacctattaaacttgtggttgggaagataaaagaagagtagatatgatgcacctaagccataaaccctataccttggatactcttaaacagaatttgaaa

SEQ ID NO: 22398 - DNA, 962 bp, Gossypium hirsutum
  Clone ID: GOSHI-09MAY01-C26699_1
cttcactctcctttacttttaagttcttttctttgcttgatttcattttgtagccaaaaaaaacatggggttctcactgaaacttcagtattgcctagtttctgtcatggtgctattacctgcagtgtgttactctcaggactatttcgtcaagtccagagcaacttactacggcagtcctgactgcttaggcactccaagtggagcttgcggatttggagaatatggaagaagtgtcaatgatgccaatgtcgccggggtttccaggctctacaagaatggaactggctgcggtgcttgttatcaggttaggtgcactaaccctcaaatatgtgctgataatggggtgaacatagtggtgaccgactatggcgaaggcgacaacaccgatttcatccttagtccccccgcatatgcaaggatggcgcgaccagacaccgcggcacatctgtttgcttacggcgttgttgatgtagagtaccaaagaatcccctgccaatacggtggttacaagacccaggttaaggttcatgagcatagcaaatacccaaattacttggccattgtagtgttataccaagctggttaaagtgaaatcctatccgtcgatatttggcaggaggattggtaagaatggataggaatgacgagggcatatgtggaccgttttcgacatggcaaatctgccatcgggagacatcaattttgatgttcccagtgcggggcatcgccggattgacattgttgcaggcaccgaatggaattcctaaatactggaaagctggagttgcctatgaaactgacatttaactttatttactaactgagacttctcttagtggattactttctcattatagtgggtctgaattggtatatgttctaattggtagtaataattggcaacaaatgctcaactttgctatactgattacttcttatatgattgggattgtatttag

SEQ ID NO: 22399 - DNA, 646 bp, Gossypium hirsutum
  unsure (1)..(646): unsure at all n locations
  Clone ID: AI054544.1
ttcagcttcactctacttttaagttcttttcttttcttggtttcgttttgtaggaaaaaaaaaacatggggttctcactgaaacttcagtattgcctagtgtctgtcatggtgctattacctgcagtgtgttactctcaggactatttcgtcaagtccagagcaacttactatggcagtcctgactgcttaggcactccaagtggagcttgcggatttggagaatatggaaaaagtgtcaatgatgccaatacggtggttacaagacccaggttaaggttcatgagcatagcaaatacccaaattacttggccatngtagtgttataccaagctggtaaaagtgaaatcctatccgtcgatatttggcaggaggattgtaaagaatggataggaatgangagggcatatggngccgttttcgacatggcaaatctgccatcgggagaacatcagttgagggtccaagttgcgggcagcgccggattgcatgggtgcaggcaccgatgtcatcctagtactggaagctgnagttgctatgaaacgacatcagcttattaacacctagactgcctnagtgatacttctcaattagtggtngatngtatcagncataggtggtatttagacacaatgctanactgcttn

SEQ ID NO: 22400 - DNA, 629 bp, Gossypium hirsutum
  unsure (1)..(629): unsure at all n locations
  Clone ID: AI054456.1
caccggggcacatctgtttgcttacggcgttgttgatgtagagtaccaaagaatcccctgccaatacagtggttacaagacccaggttaaggttcaggaacatagcaaatacccaaattacttggccattgtagtgttataccaagctggtaaaagtgaaatcctatccgtcgatatttggcaggaggattgtaaagaatggataggaatgaggagggcatttggcgccgttttcgacatggcaaatccgccatcaggagaacatcagttgaggttccaagtgcggggcagcgccggattgacatgggtgcaggcacctaatgtcattcctaagtactggaaagctgggagttgcttatgaaacggacattcagctntattaaacaacctcagaatacacttggtggattactttctcattatagttggtttgttattgtatcatgtattaaatgtttgtttattataggacagcaagtgctcanacttggcctatgctgaatgacaaaataanaagattgggtattgnnattntgttgatgttggtattgatgaatgatgataaagtgctcctagaatnntctattcaaaaaaaaananannataaaaaaaaaaaaaaactcaggggg

SEQ ID NO: 22401 - DNA, 593 bp, Gossypium hirsutum
  unsure (1)..(593): unsure at all n locations
  Clone ID: AI055270.1
cctcattcagcttcactctcctttacttttaagttcttttctttgcttgatttcattttgtagccaaaaaaaacatggggttctcactgaaacttcagtattgcctagtttctgtcatggtgctattacctgcagtgtgttactctcaggactatttcgtcaagtccagagcaacttactacggcagtcctgactgcttaggcactccaagtggagcttgcggatttggagaattggaagaaagtgtcaatgatgccaatgtcgcgggggtttccaggctctacaagaaatggactgcttgcggtgncttgtatcaggtttaagtgcactaaccctaaatatgtgctgatattgggggacctaantgggtgaccgactatgnncgaagcgacacaccgattcattcttagtcccccgctatgcnangatggcgcgacagacccgggcacatttgttgtcgggcgttgnnatgtnnaagtacaaagaatccctgcatcaatgggtacaaacccagtaagttcagaacttacaatcccaattctggcatgagggtatccagctgtaaagggaatcttcgcatattggggagatgn

SEQ ID NO: 22402 - DNA, 584 bp, Gossypium hirsutum
  unsure (1)..(584): unsure at all n locations
  Clone ID: AI055299.1
ccgactatggcgaaggcgacaacaccgatttcatccttagtccccccgcatatgcaaggatggcgcgaccagacaccggggcacatctgtttgcttacggcgttgttgatgtagagtaccaaagaatcccctgccaatacagtggttacaagacccaggttaaggttcaggaacatagcaaatacccaaattacttggccattgtagtgttataccaagctggtaaaagtgaaatcctatccgtcgatatttggcaggaggattgtaaagaatggataggaatgangagggcattggcgcncgttttcgacatggcaaatccgccatcaggagacatcagtttgaggttccaagtgcggggcagcgccggattgcatgggtgcatgcccggatgtcattcctaatctggaagctggaagtgcttatgaaacgacatcagctntattaacaacctagatacactgggggatacttctcatatagtggttggaatggatcaggcttaatgtggtattatggacgcaatgctaaactggctatcgatgacaattaaaaagtggtttgagtttgctgagtgggatgat

SEQ ID NO: 22403 - DNA, 385 bp, Gossypium hirsutum
  Clone ID: LIB3145-015-Q1-K1-G10
attcagcttcactctcctttacttttaagttcttttctttgcttgatttcattttgtagccaaaaaaaacatggggttctcactgaaacttcagtattgcctagtttctgtcatggtgctattacctgcagtgtgttactctcaggactatttcgtcaagtccagagcaacttactacggcagtcctgactgcttaggcactccaagtacatacatttctcctataattcatatatgcttgtttgttttgtcattaaatatttgcatatatgagctaacaatcacgtgaatctaggtggagcttgcggatttggagaatatggaagaagtgtcaatgatgccaatgtcgccggggtttccaggctctacaagaatggaactggct

SEQ ID NO: 22404 - DNA, 1381 bp, Gossypium hirsutum
  Clone ID: GOSHI-09MAY01-C26659_1
ctttctttctttctcatcttcattccccttcattgtcagataatccaaacagcagaaattgaacacacagagagaaattatcagagatggggatttctaagagattgctctcttcgtttgctttgcttgtaacgtgtattttgcttttcgtttgtgtcaaggcctcagcagagaaaacagagctgaattcaaggctcagtgaagaaaacaagttgcagggcttgaaaaactcatcaatggaagaggggttggaggatgagcaatggataaatgagcactcagtcgacaatccagaggaaattgcttcaatggtgcatatgagcataagaaatagcacagagaggaggaaattgggatatttctcatgtggaacagggaatccggctgatgattgctggcgatgtgatcggcattggtatctcaggcgaaagaaccttgccaactgtggcattggctttggacgcaacgccattggtggtcgtgatgggaggtactatgtggtgactgaccctagggatgacgaccctgtgaaccccaaaccaggcaccctccgccatgctgttatccaggaccgtccactttggatcgtgttcaagcgtgacatggtcatcaggttgaagcaggagcttataatgaacagttttaagaccatcgatggtcgtggtgccaatgtgcatatcgctaatggggcctgcatcaccatccagtatgtcactaatattatcatccatggaatccacattcatgattgtaagcccaccggcaacgccatggttcgaagctccccatctcattacgggtggagcgaccatggctgatggggcatggcgctcccgtgctttggggcaagccatatttgggctgaccataattcactctctaactgtgctgatggactcattgatgctataatgggttccactgcaattaccatctcaaacaactacttcacccaccacaacgaggttatgttgttgggacatagtgattcttacgtaagagacaagcagatgcaagtgaccgttgcttataaccatttcggtgagggtcttatccaaagaatgccaaggtgtagacatggatattttcatgtagtgaacaacgactacacccactgggagatgtatgccattggtggaagtgcaaaccccaccattaacagccagggcaaccgataccttgcccctttcaaccgctttgctaaagaggttacaaagagagtggagagatcgaagagtaaatggagacattggaatggaggtcagaaggagacatgttttaatggagcatattcactcattcagagccgagccacaccagctcgctaagccttagctacagccaatcgcttcctagttgcacataactcattgcagcgcct

SEQ ID NO: 22405 - DNA, 372 bp, Gossypium hirsutum
  unsure (1)..(372): unsure at all n locations
  Clone ID: LIB3048-028-Q1-L1-E1
ggactcattgatgctataatgggttccactgcaattacgatctcaaacaactacttcacccaccacaacgaggtcagaatattcacatcggtttatcaatattgaactaaatttatgtttttaaacgactaaactaattcgtccaagtacttcgatgataggttatgttgttgggacatagtgattcttacgtaagagacangcagatgcaagtgaccgttgcttataaccatttcggtgagggtcttatccaaagaatgccaaggtaaaaaaaaaaatataaaagcatccttaaaattggtcgctactgtaatttctcttttttaaccttgactcaaccatctttgccaaattcatgggaagtcattcaac

SEQ ID NO: 22406 - DNA, 659 bp, Gossypium hirsutum
  Clone ID: GOSHI-09MAY01-C26619_1
aaatcacaaaagtatcaccactaaacccagttctctgctacttggatttggaacccggattattttgactcgtttgtccatttccttttgaatattcatcgagatcccaaaaatcccatcaacaactttgtttttccttttcggttttattccgttttctccacgttcaaacgtctcaaaacgaattacacatatctcgaagaaatgcaggaattcaagaccatcaagaaaaaaatgtggatgttttcttgttaaccttcacatttgcttcaactatctcccctactcctctcgcgtaatggaagctatcatcataacagccatagcaccgatcatcagaaacaacaagaagaaagtcgttaaccaacacaacttctctctgcaaaagctctccttctggtttgctcccaccacacgtccacctggtctactctctttcactcccggctcctaaaatataaaaaacgaatagggaaaaaaaaacaaagaattctgcttttggttttgggtttctgtatggctgcttactctttcaacaacaacttttcatccggaattggtattctggtatccttgatccattttcccccattggtctatcatgaagctcctgtgggtttgtcgtctcgtgcccattctggttgatctaaatgaactgg

SEQ ID NO: 22407 - DNA, 831 bp, Gossypium hirsutum
  Clone ID: GOSHI-09MAY01-C26199_1
gttacaggcaaaaccccagcaaattcccccctttggaataaaagaaatagaagacatggtgaggcaatcgaggttgatcctttcactacttggcgcagttttggtgttgctggtgattggaaatgctctgaggctagccaaagccaacaattcagcctccgcctttgtccaaaacgccatcttctccaacaagatcgttatgttctccaaatcctattgcccgcattgcatgcgtgccaagcgcattttcgctgagttaaatgagaaaccttatgttgtagagcttgatctccgagatgatggagctgaaatccagtatgtcatcctggatttggtaggtcgtggaactgttccacaagtgtttgtgaatggcaagcatattggaggctctgatgatctcagtgatgcagtccataatggtacattgcaaagccttctagctgcaagttaatgtaagaaagaaggaaataaattgacttgtgaactgtaaagctgcctgtggattagaagatcatttctgggttgtgaacttagtacgttcactgcaagattttgttgagtgcgctgtgataatggcatgtctctttgaggttatcttatatttcatcttcatcatggaagagaatgactatgttttaggtctaaagttcattgtaaatgtaggtgtggggagggagcagtgactttgatttagttttcacataatcttacttactgtcaatggatcccttttttctattttgttgtttcttggtataggcatgctttctttgaagtgggatttttatggtgttggatccgacactatggatttgacagaagaatcatatg

SEQ ID NO: 22408 - DNA, 402 bp, Gossypium hirsutum
  Clone ID: GOSHI-09MAY01-C26189_1
gcgagagagaatttcaggctgaagttgagatcattagccgcgtccatcacaaacatctcgtctcattggtcggatactgtatttctgggacaataagaatgcttgtttatgagtttgttccaaacaacaccttggagtttcacttgcatgggaaggggcgactgaccatggattggccgacaaggatgaaaattgctttaggatctgcaaaaggactggcatatcttcatgaagattgtcatcctaagatcattcaccgtgatattaaggccgctaatattctgttggatttcaagtttgaagcaaaggttgctgattttggactagcgaaaattgcttccgatgtcaacacgcacgtcttcaccagggtgaattgggggtactttcgggtatttaacccct

SEQ ID NO: 22409 - DNA, 432 bp, Gossypium hirsutum
  Clone ID: GOSHI-09MAY01-C126181_1
taaatcttagttgttgtccaaggcacactttacgtcggttttgttacgtcaaacccagataatcgtctcttcaccaaagtgctataccctggagatgtctttgttttcccactaggtctgattcacttccagttcaacatagggcataccaatgcggttgcctttgctgctctcagtagccaaaacccgggggtcgtcaccattgcaagtgcagtgtttggctcagacccggatatcaatcctgatgttcttgccaaggcctttcaactggacaagaatattgttaaccaacttcaatcccggttttggtcggataacgacagtaggaattaatgttgacttctacagccccatcaaacttaactgtgtacccaattctctgctattgctaattttattttacattttaattcaaatttaattactcttttt

SEQ ID NO: 22410 - DNA, 441 bp, Gossypium hirsutum
  Clone ID: GOSHI-09MAY01-C26159_1
aacacagcccgcattattatcattgttgttgcttcagttggtggaattcccatactaattgcttcctccatctgcatcattcggagggccagaaagaccccacaacaattacttagaactgatgatgatgaggtcattagggctgactccttgcagttcgactttgccactgttcgggcagcaactaataacttttctgatgcaaataagcttggccaaggtggatttggagctgtttacaagggtcaacttccaaatggagaagaggttgctgtgaaaagactagccagggattctggacaaggggacctggaattcaagaatgaagtcctcttagtggccaagcttcagcaccgcaatttagttaggctccttggtttctgcttagaagggcatgaaaggcttctcatttatgagtttgtgcccaacactagccttgat

SEQ ID NO: 22411 - DNA, 378 bp, Gossypium hirsutum
  Clone ID: GOSHI-09MAY01-C26129_1
gcaatggctcctggcttatgtggacttgtcgagggatgcgatggctttggatcctccagatttcattggtggttgtgaggtgcttgagagggctttgaagctgttgcaggaggaaggtgccagcagtcttgctctggatttgcagtcacagattgatgagacattagaagagattaccccacgttgtgttctggaacttctagccttgccccttgatgatgcatatcggacaaagagagcggaaggtctttatggtgtacgcaacatattatgggctgttggtggaagaggagctgctgcaatcgcaggaggttttacccgtgaaagatttatgaatcaggccttcttgtgtatgacaacaactgaacagggtgatct

SEQ ID NO: 22412 - DNA, 605 bp, Gossypium hirsutum
  Clone ID: GOSHI-09MAY01-C26099_1
aagaaagtaagaaaaaacactaaaacctccctgaaatctgagtccaggacataaaatatgaattcaaatcacttgcttcttgaagagcccataagaatggcttccattcttgagccatcaaagcctagtttctttcctgcaatgactaaaattgtggggacacttggtccgaagtcgcgatctgttgaaataatatccgattgtcttaaggctggaatgtctgtggcgaggttcgatttttcgtggggtgatattgaatttcaccaagagacattggaaaatttgaagactgctgttaaaagcactaggaagctttgtgccattatgcttgatactgggggtccagaattgcaagtagttaataaaacggagcaccccatttcccttgaagcagatacaaaagttatcctcactccagaccaagataaaccagctacttcaaatctgctaccaataaattatcatgggctatctaaggcggtcaagaagggagatactatatttattggccaatacctgtttactggaaatgaaactacttcagtgtggttagaggtagatgaggtgtgcagtgaagatgtggtttgcctaatcaagaattccga

SEQ ID NO: 22413 - DNA, 416 bp, Gossypium hirsutum
  Clone ID: GOSHI-09MAY01-C26089_1
gagaagtatgatgctaaaggctggacagagaaaggggcgcataagtatggtagactgaatgaacagtcatggtgggagaagtggggagagcattatgatggaagtggatctgttctcaaatggacagataaatgggctgagactgaattgggaactaaatggggagataagtgggaagagaagttctttgccggtattggctcgcgtcaaggggaaacatggcatgtatctccgagtggtgaacgtatgtatagtcatttcattttctgtgtgtgaattgtgacgcttttacaattttccaaagttttttggtttctagtttaggttgtacataatatctcataggttggataagtaaaccctatttgaatatccttaagcaaaaactattctatatatttgtaaaaagtttgcat

SEQ ID NO: 22414 - DNA, 455 bp, Gossypium hirsutum
  Clone ID: GOSHI-09MAY01-C26399_1
ttaagatgctatatgatgggcgaccagtggatctaactcctgaacaagaggaggtggcaacaatgtttgcggtagtgcaagagactgattacatgagtaaaccacagttcaagaagaatttctgggaggattggagtaaattactggggagaaaccatgtcattaagagcttggacaaatgtgatttcactccaatctatgagtggcatttgcaggagaaagagaagaagaagcaaatgagttctgaagagaagaaggctttgaaagaagaaaaattgatgcacgaggaaaaggatatgtgggctattgtagatggtgtcaaagagaaggtaggaaatttcagagttgaaccacctggacttttccgaggtcgaggagagcatcccaagatgggaaagttgaaaagacgtattcgtccatgtgacattaccattaatatcggaaaggatgcccca

SEQ ID NO: 22415 - DNA, 774 bp, Gossypium hirsutum
  Clone ID: GOSHI-09MAY01-C26339_1
gttcctaaaaccccattgtctcccactcttcattacattattctctttgtctttgtcctcctgtctaggcagttacagagagcatccattacacccgaaaccctatcatccatattttcacacctttggcgtttctaacaaaccaaactaccctactctaaactctgcagacctgttcaactataacattgaaattcgaacgagtgctcccaaggtagtcaatgtagatgatttcggagctaaagctaatggaagagacgattctcaggcatttaagaaagcttggaactatgcttgttcttcatctcaaggggctattatggtggtccccaagaagaagatttatcgtcttaagccaattaacttctcaggaccctgcaaatctcctcttctattgaagatctatggaacactcgaagccactgaggatcactcggattaccaagataatggaagacgatggctttactttgataatgttgaaaatttacgagtcgaaggtggaggcatcatcgatggtaatggcaaaacatggtgggaaaagtcctgcaaagtcaacaaagccctcccttgcaaggaagctccaactgctgtaaccttcaatgaatgcactaacctgagagtatcaagtcttcgtataaaagatgcacaacaaatgcacgttatatttcaaaaatgtgtgaatgtaaaagcatttaaccttttggtgacggcacctgggaacagtcccaacactgatggcccccatggcacgtgaccggaacccagaatatt

SEQ ID NO: 22416 - DNA, 432 bp, Gossypium hirsutum
  Clone ID: LIB3048-023-Q1-L1-C4
aagcacccatctaaaagtgaagttacatggtgttcctaaaaactctttgtctcccacttgtgattacattcctttctttgtcctcctattgctttggccttggcaggtacagagaggaggacccatttcacgttgattttcgtcgaggccgtgcttatcaccacccgacatcgtatcgccatccttattttcgcaccttcggtgttcgcggtcagcgaaactatcataatccctactataataacgaaatccagtcgaggcttgatagaccaagtggtgcagcgactccgaaggtagtcaatgtacatgatttcggagctaaatctaatggaagagatgattctcatgcatttaagaaagctcggaattatgcttgatcttcatctcaaggagctattatggtggtctccaagaagaagatttatcgtctta

SEQ ID NO: 22417 - DNA, 1052 bp, Gossypium hirsutum
  Clone ID: GOSHI-09MAY01-C26219_1
gtttctaacaattatccgacccgaacttggatccgacgacccttttcctttgatctagggctccattttcctttcttcttcacatcgccctttgttttcgtgaactggaatcccagctccggttcttagatccggtttactcctgttttgggcttcagatccgggccacaaacagaagggatcggattacgtctcttttacttcattttttttggaatcaggttggtgaagagtaaatggcgtcgggtgagggatttcttactgaggaacaaagggaagtcttgaaaatagcgagtcagaatgcggagacccctttaccatcccctggattgtcctcatccccaaagtccccgacttctttactttctgatcaacaattaaaggttcctgttggtggcaaggcgccaactggtggtattgcagtgagacatgtccgtcggtctcactcagggaaatccattcgtgtaaagaaggatggtgctggtggtaagggtacatggggaaaacttcttgatactgacggggaatcacatatagatcgaaatgatcctaactatgacagtggagaggaaccatatcaacttgttgggtcaactatttctgatccactagatgagtataaaaaagctgttgtttcgattatagaagaatattttagcactagtgatgtggaagtggctgcatcagacctcaaagatcttggctcaagtgaatatcatccttattttattaaaaggcttgtctccatggccatggacaggcatgataaagagaaggaaatggcatcagttctgctttcttcactctatgctgatgtcatcagcccaccccagattcgggatggttttgggatgcttcttgagtctgctgatgaccttgctgtggatatactagatgcagttgatatcctcactctgtttgtatctcgtgctgtggttgatgagatactgcctccagctttcatcacaagggcaaagaaaacacttcctgaatcttccaagggatatcaggttctccaaactgccgagaagagctatctctcagctccccac

SEQ ID NO: 22418 - DNA, 607 bp, Gossypium hirsutum
  Clone ID: GOSHI-09MAY01-C26209_1
gaaatattagagtttcggaggaaaatcctatatgtaatattgctctgaaagcagaggacaaggattttgagacaaatctttctgattcatctgcctttgagaatcaattgcttgaggaggaggatgagagtcaagaagttttatcagacaggtcaattgttccaggcctcatcgcttccccttggttgcacgcgaaaatgacctgcaatcctggtctggctggtggttcatctaaaagaaaaaggatgaacagctttgcattgctatcacgagctaataccaagaacaattctcccacgaagcaggctcatcaaggactcagccaagtggttatttggaataagaaagactcattacagcaggatgtgctatacacaaatgatagttctactcagagatcatacggtaacaatgtgagccttcctccttgccgaactagtacaggtcgtgctagtgatgcaatgactagtaggaacaaagtaagagagatattacgcctattccaagacatctgccaaaagctcttacatgaagaagaatcaaagataaacggagaaggaaagactcttaagagggtggatttcctagctgcaaagattctcaaaga

SEQ ID NO: 22419 - DNA, 956 bp, Gossypium hirsutum
  Clone ID: GOSHI-09MAY01-C126201_1
cttggtggggtgcataaaagcataatattgaaaggaatttgctgcaacacaagcaatcccccgcgcccccgcacgcgtgggccgctctctgatgtcatgcccgtcgacagtcccaacattcttcagacatcccaagattgcacgagcacagacgttcgagaattccttggagaatttactcaaaagctaagaaacattaaggccaggcctccattcaagattctcagcaaactctggtcacctaccgtactttctccagcacctgctcgggactagtaaaacatacctttaagccatggacttcacagggctgatagcttttcctttttctttattaccctgaaacataaaaataaaaaataaaaaaaaatctaaatatatatccctgatatttgtacattccttaaaaaatgtcctttttctgtttgggttttgcagcatataaagtttgaataccagcttgttgaacttgaatttataatggggctgttgaatcattaaaacaaatataacttcttcttatctcattttctatatatatctatttgggttgccttttataggatccagttatctacccgtgcatgcgttgttaactctttttattgttacacttaaaattatttacgtacgtttatatcatgcttgttcggtatatctgtgtttccctatttttcctttatctttctccttttctttgtataaaacaattgcttactctttcttactaattttatatctatggtattgcatttctttctccttaacttattcttgtttcttttattaaatgacatattacatttatttcaatttttttttcattttcatattttcttatcttatcataatttttatattcatatcatacttcataatctaactcttcttcttctcaatatttttactatttcatattctttttatattgttttatttttattttgttttctatt

SEQ ID NO: 22420 - DNA, 424 bp, Gossypium hirsutum
  Clone ID: GOSHI-09MAY01-C27989_1
agatcatcgtgaatgggctttcgtttccataactttgctgctttgcttcttcgtgctgatcttcaatggctccaactctttgctttcttctgatcctttatagattacctatcaccggcattcacctcctccttatattcctccattctctcttataactcttccttctcaccggttttcccggtttcaacaaaatccctgatctttctttctttccgaaggtgaaccaaggggaaaaaaacactcagatcttttatttagaaacaagtattctcagtaaacaaacggaaaatttaaggaatggcatcggtgctgttgtaccatgtagtgggggatctgacggtggggaagcctgagttggttgaattctgcgatgttgagacagttgaatcagctataagagcaataggtggatcaactgagt

SEQ ID NO: 22421 - DNA, 412 bp, Gossypium hirsutum
  Clone ID: GOSHI-09MAY01-C27749_1
gcaagcacgagtttcatcttcagtgcattcttgaatggtggcaaaggagttctcagtgcccgatgtgctggcagccaatcagcctgaaagatccaaccagccaggagttgcttgaggctgctgaacgtgaaaggagttttaggtttaatccttctagaaatgcagccatatttcatcatccaacgctggtcgattttgaactacagcatttgccattggggacaaatgatgctgaacttgatgagcgcataatccagcacttggctgctgctgctgcaatgggacgagcacgtcacattgcatggagggaaggtatgaggaataggtcatcaattcaaggtcgtcctcaattcttggtattttcaacacatccaaatgcaccttctactgttcctatatcctcactagttgc

SEQ ID NO: 22422 - DNA, 809 bp, Gossypium hirsutum
  Clone ID: GOSHI-09MAY01-C27719_1
caagggaaaattggattcactccaaccagcacaactacaagccttattccaggctctacaactctgagtttttctccaggcaccacagctgggatgttttctctaaacactacaactacacgcttgactccagctgatatgactaaaaaatttcctccattgggtactactactagctttacctcagctagttcaactacaagcttcactccagttggtctgacaacaagctcaatcgcagctggttcaaactcaagcttttcatttggcctttcaaccgcaaattttacttcctccagtgcaacaaatagcttttcttcatctaacatgacctcaagctttgcatctccttggagcactggagcattctctaatagtcagagccctttcttgtttggaactcagagctcagtttcagtggacaacaatgcagcagatgatgcagatgatgaaaatgagttgccacagccaagcagtccatcagtgaagaagtcggaagagaagggtattgttgttgttcacgaagtcaaatgcaagctttatgtcaagtcaactgatcctgaagataaagattcatggaaagataaaggcactgggcaactttccataaaatgcaaagagggtatcagcaagggttcgaaagattccaagccaacaatcgttgttcgaaatgaggtgggaaagttgttactaaatgcattgctatatcctgggatcaaaacaagcgcacaaaagaattcccttgttgcaatatttcatacctcagatgaaggtggcgataaccaagaagtagtggcccgtaccttctt

SEQ ID NO: 22423 - DNA, 950 bp, Gossypium hirsutum
  Clone ID: GOSHI-09MAY01-C27609_1
acaagtagaactagactttatttaggggaaggttcagtttttgctgacgaaaaatttcttctttatattccctttttgttaatttgtgagaaaggatagacaaaatgagcaatactcatcaggaagctataaagcaatttctgtctttgatgggaaatgttgacgagaaattgaacgacacgtttcagaacatgcaccatgggtatccaactgaaactctagcccggtttctcaaggcgagagattgggatgttccgaaagcccataaaatgttaattgattgcttacaatggcgactacagaatgagattgacaacatattatcgaaaccaattatccccgctgacttatatagagcagtgcgagattctcagcttgtaggattgtcaggttactcaaaagagggtcttcctgtcattgctatcggtgttgggcttagcacatatgataaagcatccgtgaattactatgtacagtcacacattcaaatgaatgaataccgagaccgtgtagtattgcctacggccactgagaagtatggacggcatatcagcacttgtctgaaggttttggatatgactggcttgaagctttcagcattgaatcaaataaagatactgaccactatatcaacaatcgatgacttgaattatcctgagaagacacagacatattatattgtcaatgcgccatatatattttcggcatgttggaaggctgtaaaacctctcttgcaagaaaggacaaagaggaaaattcaggtgcttcaaggttctggaaaggatgagttgctgaaaataatggattattcatcccttccacatttttgtagaaaagaaggttctggatcaacaacgtcacagcagcgatggaactggagataattggttctcggtggatcacacctaccatcaacagctttacacttacataaagcatcaagctacaca

SEQ ID NO: 22424 - DNA, 521 bp, Gossypium hirsutum
  unsure (1)..(521): unsure at all n locations
  Clone ID: LIB3584-011-P1-K1-D11
tcngtgattactatgtacagtcacacgtggggaatnagtnaggtgtagagatcgtgtagtattggcctgcggccacacagaagtatggaaaacatattagcacatgtttgaaggtattagatatgactggcttgaagctttcggcattaaaccaaataaagctactgactactatatcaacaatggggggggggggttatccttatttgacggagacatattatattgtcaatgcaccatacatattttcggcatgttggaaggctgtaaaacctctgttgcaagaaaggacgaagaggaaaattcaggtgcttcaaggttgcggaagggacgagttactcaaagtaatggattattcatccctgccacatttttgtcgaaaagagggttccggatcatcacggaacagaagcaatggaaccatagataattgtttctcattagaccactcctaccatcaacaactttacaatnacataaggcatcaagctaatcttatagagagtggtaggccaatcaaa

SEQ ID NO: 22425 - DNA, 429 bp, Gossypium hirsutum
  Clone ID: LIB3493-048-P1-M1-E7
ctgcacgctacccctcacatgtaattccctgcggtccgcacccactgcctacgctggcataacacgcgaaactgtgcggtctccacttactgatctatagcaactccatatattgagcttgtatcattgtctctaactcaaaagagcatcttcctgtcatcgctatagatgtacatctcaacacatatgacaaaccatacttgaattactatgtacagtcacacattcaaatgaatgaataccgagaccgtgtagtattgcctactgccactgagaactatggacggcatatcatcacttgtctgacggttttctatatgactggcttgaagctttcagcattgcatcaaataaagatactgaccactatatcaacaatcgattactctaattatcctgagaagacacagacatattatattgtcaatg

SEQ ID NO: 22426 - DNA, 423 bp, Gossypium hirsutum
  Clone ID: GOSHI-09MAY01-C27139_1
cgtatgtgtatatacgggtgaccgacaagtgttgggggctgaatatgcatgaacctatcatttgggcattggttgatctctataacaatcttcatctagagcaaattcctcaaagttccaatggcactcaagttgacccagagatacctgttgacctgacacatatttcagaggtgaggctcaaagctgtcattggagacagcacccgcccaaaggcctcatggagttctccgtgtgcggagtcctatactttctgctcgtggaaacgcatttagaattcaggggcatctaacggagggggatgcgcaaagacagattcatgcggagaagttccatagctcgtgcagttgtaaaccgtatttggcaagatttgattcataaccctcttcacttggtattttcagtagatgtacttggtatgac

SEQ ID NO: 22427 - DNA, 469 bp, Gossypium hirsutum
  Clone ID: GOSHI-09MAY01-C27129_2
cttcgcttttctcactttgtagcccagtttagagttttcttcgaggtgggtttgctcattccgcatttcgtctctcgaattcgccggcttgtgaatctcctctttgttctcggatcaaataattgaagtcttgaccttaaacttgaaggttagtggttgaaacagctatctacatgggaaatgtgtgagtgtcgaatcggtgaatgctttacttggatctgtgagattggcaagaagatatatgagttctgtttgataatgctgcttattcgtcttctcacgcgattaatcttagtatcatccagtgttggttcagtaatagcttctagaaataattctcaggaggtcgcttgtacatcagaggatcctttgtatccatgctagcagagagcatgcgtggaatctgtgtttcgggtaatgcccctgacgagatattctgccgaagcattcggtgtgttgacaatttgtc

SEQ ID NO: 22428 - DNA, 709 bp, Gossypium hirsutum
  Clone ID: GOSHI-09MAY01-C27129_1
cgaatcttcatttctactttcgccaccagtttttagggtttcttgatccttttctttgattctccgtttcgtcttcctacctcgacggatcaagattcctctctttgtttttggacaaaatcattaagtttgagctaaaccttcaagttattggctgaaacagcagccttaatttgaaacttgtaagttctgaatcagttggtgcttgacatacatggatcttgtagacgggcaagaagatacatgagtttgtttgataatgcagcttaatcatcttctcccatagttaatcttagcactgtccagtaataattcagtaatagcttgtggatataattctcagaaggctgcttgtacacattcagaggatcctttgtatccatgctggcagagagtatgcgtggaatctgtgttttgggtaatgccccagacgagttattctgccgaagcattcggtgtgttgacaatttgtctagttgctctgttggttcttcttggtttggtgtgcattgcatacttgttttacttgcattcacatgttcttagacaaggatttattcagcttagttatttcaatgggccttggatcatccgaatcacgttattttgttcaccatctggtggggttttggtgaaattatacggttaaattttctaagacggcaaggaagagtgttgaatgcactcaaattgaaatggcaagaaaaca

SEQ ID NO: 22429 - DNA, 416 bp, Gossypium hirsutum
  Clone ID: GOSHI-09MAY01-C27369_2
gaactgcttaatatatggagaaatcccagagtatattggagatgtgaagaaattgaaaaccctggatctcagctataataacttgaccggagaaattcctggatcattccacaaattgacaaaagcagatttcttgtatttgaccggaaatcagctcactggttcagtgcctcagtggatcgtggaaagaaatacaaacgcggatttgtcttacaataatttcacatgggagcctgcaagtccaatagaatgtcctcgagggagtgtgaacttggttgagagctactcaacatcagtagataaattgctttcctatcttggtgcacaagtagggttccttcatgtctaaggcacaagttcccatgttctgtctcatctaaacaatataagtactcattgcacatcaattgtggagg

SEQ ID NO: 22430 - DNA, 656 bp, Gossypium hirsutum
  unsure (1)..(656): unsure at all n locations
  Clone ID: AI054571.1
gttcagtgcctcagtggatcgtggaaagaaataaaaacgcggatttgtcttacaataatttcacatgggagcctgcaagtccaatagaatgtcctcgagggagtgtgaacttggttgagagctactcaacatcagtagataaattaagtagggttccttcatgtctaaggcacaacttcccatgttctgtttcatctaaacaatataagtattcattgcacattaattgtggagggaaggaactaaacatcagtggtgataccacatatgaagctgatattgaacccagaggagcttctatgttttacccagggcatggctgggcattaagcagcagtggaaacttcatggataatgatattgatgcgggatcaatacaatcgtacccaatccttcttcttttgtccaatgtttcttgcattccattcagcactatatacaacagctcgtattcttccctttctctaacttatatggactctgcctaatgaaaggaactacactgttagtctactctttgctgaaatatntttatagcgatcgatcattttacacccttgtaaacggatatttgaggctttatccagatgaatggtgctgaagatttaatattgaaagaactgtgtactgtgaaccatgtaagaattacgtttcag

SEQ ID NO: 22431 - DNA, 441 bp, Gossypium hirsutum
  Clone ID: GOSHI-09MAY01-C27249_1
gcatccttggttaggttccgtgagaaaaggaaagagagatgttttgacaagaaaattaggtatacagtacggaaagaggttgcacagaggatgcaccgtaaaaatgggcagtttgcatctttaaaggaaagtactagtacttcaagctgggattcctcgcaaactgaccttcaagatggtactcctcgtccaaaaactgttgtccggagatgtcagcattgtggtgttagtgaaaataatactccagcaatgcgtcgtggtccagctggtccaaggactttatgtaatgcatgtgggcttatgtgggccaattagggaacgctgagagatcttagtaaaggaggaaggagtatttccatggaccaaaatgaacctgaaacaaaaattgatgttaagccttcaattatggaagggaacttccctggtaaccaggatgaacat

SEQ ID NO: 22432 - DNA, 408 bp, Gossypium hirsutum
  Clone ID: GOSHI-09MAY01-C27239_1
cagcgaggaagagtttaagtacttgcttgttcagcatagacagccggttgagcctgagcacatgtcgtttcgatcgagcgaggatgatggtgttgacgtgggatcgatggtttcgttcggggatgagtcttttgaggagtcagcacgtatggatagtgtcagccgaacatcagaggagtgtatcatcgatttggttcatcctgatgtgattcatgacctcaaattcattgccaattcaatgttcatgtcgaattatgatcatgagtgtcgccaagcgtatgtcatagttcgaaaggatgcattggatgagtgccttttcgatctggagatcgagaaatttagcattgaagatgtgctgaagatgaagtggggtacctttgattcgaaaatcaagagatgggttcgagc

SEQ ID NO: 22433 - DNA, 774 bp, Gossypium hirsutum
  Clone ID: GOSHI-09MAY01-C20959_2
gtcgtctagaaattctaggggtcttttttttcctaatctaagaaagaagaggaagaatcaagcttggttttctctcaggatgtcagaggcaccattcagaccctagggaaaagcttatcgagtatcagaaatattttcaaggcatccacaaacacacttacttgaaaggtccttacgataagatcacatctgtcgccattcctgccgctctagctgcaagttccttgtttttaatcggacgagggatctataacatgtctcatgggattggaaaaaaggattgagagctctcactcgtgaaaatgagcctgggactgggtgacaattggctagtttacgaaggagaagaaaccatggcgattcctcgactttcagtcaagaaatcactgaacatctttaacaacaagtgcttggcttacgttaccgccggcgagagtgatggtcggaataacaaaacaatgtacgagatcgaggggtcttattcccgacggcgttgcgccgtgttggatgacaggcggaggttagcggcagagataaagcggaaagagggtggcagaggggtcgccttcggaaccgacattttccgccttgttgttcagcctaataatatcaggacggattttgcaatggctttagttttcttcttgatcaaatgttctaaactttagattcatacatatatatacacatgtatctctctattaattgtaaaattatattttgctctttttattaaataaaaaaaattacatacaaaatttctgaaaaagaaaa

SEQ ID NO: 22434 - DNA, 647 bp, Gossypium hirsutum
  Clone ID: GOSHI-09MAY01-C20959_1
ataatacaatacaccattttcccgaactgaatccatttccgtcgtttctcaattctagcggtttttttcctaatctaagaaagaagaggaagaatcaagcttgattttctctcaggatgtcagaggcaccattcagacctagggaaaagcttatcgagtatcagaaatattttcaaggcatccacaaacacacttacttgaaaggtccttacgataagatcacatctgtcgccattcccgccgctctagcagcaagttccctgtttttaatcggacgagggatctataacatgtctcatgggattggaaaaaaggaatgagagctctcactcatggttagaagacatgtttttcttttttgggtttcattttagcatgaaattgcttgtttatttgctctaataattgtttggtttttatgccaaatggagatcttaaaagataccctttggggttatgttttttagtttggttttggattctcttgaaagctaaatgataagaagctcaaggattcaacatgatattttatgattattattgcataatttggatttggattctgagtttgtaaaaaaaatgaaagaccagtaaacacaaataaggaaggattctcaacatatccaaatgtaaacttacaattacaa

SEQ ID NO: 22435 - DNA, 526 bp, Gossypium hirsutum
  unsure (1)..(526): unsure at all n locations
  Clone ID: uC-gsronu33B005e10b1
tttntgtccaactgcgcccgtttttcaggccaaaaaagaacccaaggcgacctggggggctattttaaaaaagaaggggctttttccaccttgattttctctcaggatgtcagaggtaccattcagacctagggaaaagcttatcgagtatcagaaatattttcaaggcatccataaacacacttacttgaaaggtccttacgataagatcacatctgtcgccattcccgccgctctagcagcaagttccctgtttttaatcggacgagggatctataacatgtctcatgggattggaaaaaaggaatgagagctctcactcatggttagaagacatgtttttcatttttgggtttcattatagcatgaaattgcttgtttggttgctctaataattgtttggtttttatgccaaatggagatcttaaaagataccctttggggttatgttttttagtttggttttggattctcttgaaagctaaatgattagaagctcaaggattcaacatgatattttaggttt

SEQ ID NO: 22436 - DNA, 400 bp, Gossypium hirsutum
  Clone ID: LIB3272-019-P1-K1-G5
taaaggctcaaaaaagtcgcatagaaattctaggggtgttttttttcctaatctaagtgtgaggaggaagaatcaagcttggttttctctcaggatgtcagaggcaccattcagacctagggaaaagcttatcgagtatcagaaatattttcaaggcatccacaaacacacttacttgaaaggtccttacgataagatcacatctgtcgccattcctgccgctctagctgcaagttccttgtttttaatcggacgagggatctataacatgtctcatgggattggaaaaaaggattgagagctctcactcgtggttagaagacatgtttttctttttttgggtttcattttagcatgaaattgtttgtttatttgctctaataattgtttggtttttatg

SEQ ID NO: 22437 - DNA, 809 bp, Gossypium hirsutum
  Clone ID: GOSHI-09MAY01-C120931_1
tcctttcgtccggcagggtacatcatggaactacactgctcggagaagaatgggatgcaaatgacgaaaaagttcgtgtactgcactgatcacaggagcccaaatccagatgcagttgttgtcatgcatactccttcaggggtttttgctgccagaaatgttcttcagaatgtaaacgattgtcctagaggttcgaggctaatttcatccaagaatgctgagctccctgaatccccagctctggataccaatgactttgatgcatgctctgctgctagatgccgcgtttttgcaaggtcaaaatttaagggagctgaaactgagccaatattccacagtccgagtgggccaagtcatcatcatatagatgcattaagagcattaagcacatataaagaagtagatgattctactgttttctcgtcattcaaggatcgactgtaccagttgcagaggactgagaaccaccgagtttgttttggcaaatctggtattcatggatggggcctttttgcacgtaaaaacattcaggaaggagaaatggttgttgagtattgtggtgagcaggttaggcgtatgttgcaaatcttagggaggcacagtaccgttctgaaggaaaagattgctatctgttcaaaatcagcgaggaagtagtgattgatgccaccaataaggggaatattgcacgcttaatcaatcattcgtgcacgcctaattgctatgcaaggatcatgagtgtttggcgatgaaaaaaccggatagttcttattgctaagaccgatgtctctgctggtgatgagctaacatct

SEQ ID NO: 22438 - DNA, 589 bp, Gossypium hirsutum
  Clone ID: AI725706.1
agaaatgttcttcagaatgtaaacgattgtcctagaggttcgaggctaatttcatccaagaatgctgagctccctgaatccccagctctggataccaatgactttgatgcatgctctgctgctagatgccgcgtttttgcaaggtcaaaatttaagggagctgaaactgagccaatattccacagtccgagtgggccaagtcatcatcatatagatgcattaagagcattaagcacatataaagaagtagatgattctactgttttctcgtcattcaaggatcgactgtaccagttgcagaggactgagaaccaccgagtttgttttggcaaatctggtatccatggatgggggctcttcgcacgttcaaacattcacgaaagagaaatgggtggtgagtattgtgggaaccaagttacgcgttctgttgcaaatctaagggaggcacagtacccgtcctgaaggaaaagattgctatttgttcaaattcaccgaggatttcttgattgatgcccccattcaaggggattattgccccccttattccattctttctttgcccccctaattggttttgccaggttcatcc

SEQ ID NO: 22439 - DNA, 1339 bp, Gossypium hirsutum
  Clone ID: GOSHI-09MAY01-C20909_1
tccgctaaattataaccaaagttctacttcaagaaagctgatctaagtcctagttatgcagcttctggtccagggtgaggaattcgctgctgattactctggtcaccagtatggttttccaaatgcgacaagaaaaactgatgaagaagatgaaccgaagtggaagtcccactttaagagtggtatccctcctccttatgttaaaccaagtaccaaaccaaaggatcacaggcatgatgccaatgtgggatcttctcttgctggttttgacagcaatggggtgtccgatgatccttcaacacatgacagggcatatgtggttaataggacagataagtacaaggaagggttagatcatcctggtaaagaagagcagataattccgcctgttagagtgaatagtcatgatcgtgatcgtgagaaagattattactataatcatgatgcaagtgatgcccctgtaccaagacgaagatcatcgagaaggcgacattcgaaatcaacttctggtcttactgaagttgataatgctgaagatactgaatctgcaaggagaaaacacagaagcaggagaagagatgactcaagacgaggtctgcaaattttattcgatgatgagcagcataaagacgatgaggaggaaaggataattgacaagctgttgatacattacagtaagaaaccgccatctggtgaagagggaaagataagaagaaagtctaaaagtcgtcatgcacatcatatgggaagtgatgtgtgtgaagctcctcagaaatcaagtagggatacatccgatgatatgtccgagaccatttcccgtccagcccgatcaatatctctccctcctgcacaaacagctgaatcaaaaggaaccaaagtttatgctcgtgctagctcattcgagtctgataggtcgagtgcagcccagcatgtgcatccaaaattaccagattatgatgatttggccgctcactttgcagcaatgaaagggagataaagctttggaccttactgtgtcatttttttctccgatcactattgcattgcttctatcttaaaacttcatttatttgcttagctgagttggcgctgctgctgtcttctagtacccctgcctgcatattgttggtccatcgcttgccattgctattgcttggtagtttgagcatattttcttctgtgcttatagcacttttattactacttctatgaccaacggctgtaactagcatttatatacttgctgattctttttattttacatgattaaggtggtaattgtgggctccaaaaaaaaaaaccccaaaaaaaaaaaaaaaaaaaaaaaaaaacccaaacc

SEQ ID NO: 22440 - DNA, 350 bp, Gossypium hirsutum
  unsure (1)..(350): unsure at all n locations
  Clone ID: LIB3148-032-Q1-K1-A6
gcgttgcttccatcttaaaacttcatttatttgcttagctgagttggcgctgctgctgtcttctagtacccctgcctgcatattgttggtccatcgcttgccattgctattgcttggtagtttgagtatattttcttatgtgcttatagcacttttattactacttctatgaccaacggctgtaactagcatttatatacttgctgattcttttntaaaaaaaatgaactaggatcataataagtgaaatcgaatatataaatgtaatgtttaaataaactttaaatgataaataaagctttttttgtaataaatttttaaataaaaattgtgaataaaaaaacaataaa

SEQ ID NO: 22441 - DNA, 579 bp, Gossypium hirsutum
  Clone ID: GOSHI-09MAY01-C120901_1
tccttcgcgtccggagccttttgctctctccccctctcccttcttcctttcggctagggtttttaaacccatcatcgccggcagtccttcattcatccaccatggacagtggtcgtggcagcatcaaacgggcttttcagcccttgatcaagccacgtttgaaggccaagccttcaaggcctgggcaatcgagattgggaggcttccccctctccctttggagtttgaacccgatgtcggagggaggagttccggcgacgcgatttgattcgagcggtgtgaacgctggtggtagcagggaggcacatgggtggtacggtgcaaagcagaagggctagggttagggtttccaaaaattttaaaaggattgggcctatcaggctctattttgttgggtttgtgaaattaggtagtgcattgggccatagagtatttgggctttgtatatggactttaaacaaattttttatgaatttggactgttttggttttgttatatcgggcccgggcaaatttgggcccgtacatgtgtgagttgtatacttcgatttaaataaaagcttgaattctaaaaaaaaa

SEQ ID NO: 22442 - DNA, 404 bp, Gossypium hirsutum
  Clone ID: uC-gsronu33B163f11b2
ttttaaacccatcatcgcaggtggtccttcattggtccaccgtggacggtggtttgggcagcatcgaacgggcttttcagcccttgatcaagccacgtttgaaggccaagccttcaaggcctgggcgatcgagatcgggaggcttctccctctccctttggagttcgaacccgatgatggagggaggagttccggcgacgcgattcggtaagttcctgttcccctccttttttatttatttcaaacctcttttttataaagaaaaagatttgcaaaataactaaaataaaaacaaatggaaaaataaaaaataaaaagataaaaaaaataagaacaaacaccttttagatttcttttctgctttcgatttctctgaaaatatgtgtaatacaaatttttttaaa

SEQ ID NO: 22443 - DNA, 1250 bp, Gossypium hirsutum
  Clone ID: GOSHI-09MAY01-C20929_1
gaatccttgcatattctgaatgagcttatggtcaagagggagaaagagaaggcagagctcgaaaaggaacttgagatatatcgcaaaaaggtgcaggatcatgaggccaaagagagaatgatgatgctgagaagaaggaaagaggacagcattcgaagtgcaagttctgcgtcttgcagtaatgctgaggacagtgatggagtatcagttgattggaatcatgaatcaaaggaagaagatagcttcgagaaccatcaaatccgagaggatgttaaccagaatacccctgctgatgcagttttgtatttagaggaatcattggctaacttcgaggaggagaggctatccattcttgagcaactgaaggtcttggaagagcaattgatttcattgaatgatgaagaagaacaacaacattttgaggatataaaatcagttgagtatttgtacgaagagaatggtaatggcttccatgagattcataatttcggccatgaaacaaatggggttgccaatggtcatttcaagggagtgaatgggaagcatcaccaagacaaaataattcccgtggctacaaaggcaaagagacttctcccactttttgatgccaccgatgcagaaactgaagaaaagatactgaatggacatgaaaacggcttcaattctgttgccttgcaacatacgttacctgaacttgagaacaaaatgatcacaatagaggaagaagtggaccatgtttatgaaagattaccagcacttgaggcagatagggagtttctaaaacattgtatcagctccttgaggaaaggagataaagggatctatcttcttcaagagattttacaacatcttcgcgatttgaggagtgtcgaacttcgagtaaggagtaatggggatgctgctatatagttgcattcttcagaacacactcggaaatctaatcggtatatcacaatctacagttctttggatccatatcatagtgaagttacaagtaatggttgtttattctttgttgttctttaagttaattgcagaatgctcaattggagttgcttagcccctacaaatcttgttttaggaaagaaaaaagaaaaggaaaacaccaacttgggcgatgaccaacaatacaggcggcacagttccatatattcaacaattggtatggtcattttggaggttctagggtccaagtaatcccaaattttttgtgggttttcaaactagtcatcacctttttgaaggggggg

SEQ ID NO: 22444 - DNA, 1046 bp, Gossypium hirsutum
  Clone ID: GOSHI-09MAY01-C20859_1
ggtgaaagtaaattacatataattgatataagcaatacatattgcactcaatggcctactttactcgaagccctagctacccgtagtgacgatacgccgagtttaaggcttacaactatcgtcaccaacaaaaacggcggcgtttcaacatccggcggtggagccgccgtccaaaagtgaggaaagaaataggtaaaaggatggaaaaattcgctagattaatgggagttccttttaaattcaatgttgtacaccataccggtgatttatatgacttagatttatcaaaccttgatgttaaagacgatgaagctttagccatcaactgtgttggcacattacattcgatcatggatactagtcgggacatcgttatatcgagcttccggcgattaaaaccgagggtaatcaccgtcgtagaagaagaagccgacctcgatatcggtgtcgatggggtcgatttcattaaaggtttccatgaatgtttaagatggttcagggtttattttgaagctttagatgaaagtttcaatagaacaagcaacgaaaagttgatgcttgaacgagccgccggccgggccatcgttgacttagtggcttgttcgccgtcagagtcgatagagcggcgtgaaccagccgcgcgttggtcaaggcggttccatgcaagtgggttcagtcctgtgggtttgagtgatgaagtgtgtgatgatgtgcgcgccttgttgagaaggtataaagatggttggtcgatgacacaatgccctgacgccggaatattcttgtcgtggaaagatcaggtggtggtttgggccagtgcatggcggccttgacgacggcgaccggtggcagatggcgtttttcttttcttttcctttttgttgcatggcaaggggagtggttcacacgtgtgttatggttttttttctcgtacgtgtaatgtggattggcgtatttttttctttataatatggtattggggagtgccaagaatttgcttttgattttcaataggattgggagtaattaaaaatttattttcactaatt

SEQ ID NO: 22445 - DNA, 271 bp, Gossypium hirsutum
  Clone ID: uC-gsronu33B027c07b1
tgtggatgaaagaagactgctcccggggggttttttatttttttaaggactcaacccaacggttcaaattaaaatgtaatttaaatgacgatgcttttatcaatccgacggtcgaaccattcctaacttaatggcatgcatcgccggcagagtcgatagagcggcgtgaaccagccgcgctcatgacatagaggtatcatttaaagtgggttcagtcctgtgggtccgagtgatgaagtgtgtgtatgatgcgcgcgcattgatgagaagg

SEQ ID NO: 22446 - DNA, 466 bp, Gossypium hirsutum
  Clone ID: GOSHI-09MAY01-C20589_1
gaaaagtttatcgccggatacaattgatactaacgaagttgaagatggagaactcaatgaacctcaggttgctacaaatgaagagggtgatgctacagacgaacttctaatgtactcgaacgaggatgaatatgaagaattcaacttacgaattgttcataggaaaaacaggaccggattcgaagaaaacaaggacctgcctattgtgctaaatagtgtcattgctggaagatattacgtaacagaatacctaggttcagctgcttttagtaaggtcgttcaagcgcatgatcttcttacgggaatcgacgtttgtttgaagatcattaaaaatgacaaagattttttcgaccaaagtttggatgaaatcaaacttttaaagcttgttaataagcacgaccccggagatgagtaccacattttgcgcctctatgactacttctatcatcaggagcatcttttcatc

SEQ ID NO: 22447 - DNA, 425 bp, Gossypium hirsutum
  Clone ID: GOSHI-09MAY01-C20579_1
cgattttgtcggattatttatatatatttatattcaatagaaatgaataagaaagcactggccattttgatgcgagctagaatgagacctaatcatctcaccaacttcgccctttctcccatttccaatgagttgaatcaaattctgtcaaattctcatggaaaccgatccggtgaaaacggggagcatcatgccatggaacatggaaaagaaacgctcaatcatcaaagatcatttgaggttgtacgagaatcaatgcactccgtgatatcaatgaataaaactgaagttggtgattctgtacttaatgagtttttggaaggttattggagcctttcttttgagaaccggaggaaattattgctcacacttgccaaagagtattatctcaacaaggcacaaattcgtgagcttattaaacaata

SEQ ID NO: 22448 - DNA, 1140 bp, Gossypium hirsutum
  Clone ID: GOSHI-09MAY01-C20499_1
cgggggagccccacgcttccgcccacgcgtcggcccacgcgtccgcccaccccgcccgacaaatctaagatttctatgttttgcagaaatctagggtttttgtatctcataatttgaccacataaatactcaaacccccacactcaattctcccctcttttcagctttgcttcaaaattcgatcacatttcccctaaattccgtcttttttcttcaaattccccacaaatggccatcactttctcagatctccacacggaatctggccttaaatcccttaatgacttcctcaccggcaaatcttacatctctggggataagctgactaaggatgacataaaagtttatgctgctgttttgaaaaatcctggtggttcatttcccaatgtgagccaatggtataattgtgtgtcttcccatctcgcttctagcttccctgggaaagctgttggcgtttcacttggtggcaaagctgatccagctcaatctgctgaagctaagtctcctgctgcggacgatgacgatgatgacttggatctgtttggcgatgaaacggaggaggataagaaggcagcagaggaaagagaagcagctaaaaagtctgctaagaagaaagagagtggaaaatcttcagtactgatggatgttaaaccatgggatgacgagaccgacatgaagaagttggaagaagccgttcgatctgttgaaatgcctggacttttatggggagcatcaaaattggttgcggtcggatatgggattaagaagctccagatcatgcttacaatagttgacgatcttgtttctgttgatacccttatcgaagaacacttgacagtcgagcctcgcaatgaatatattcagagttgtgacatcgttgcattcaacaaaatttagacaaggacgacccggtttttcttcttcttcttcaagaaatgttgaagcgtaagccgattttccgccatgttttaacctttttgttcgttgctttacccttattattagttttattttgcaatctgaattgctacttgatttgctttagatttgagaattagatgtatgggtaaagaataacttcttgtttttgctgaaatggtggtattgtggtattaatgctcaatgttttgtattattttt

SEQ ID NO: 22449 - DNA, 598 bp, Gossypium hirsutum
  Clone ID: LIB3829-019-Q6-K6-A3
tcggagaaagtctgcacacattgctctctaatagccgtcattcatctaaaacatccaccgactgtggcgcactaactcaaatctccacacggtgctcaggtcttaatgccctcattgacttcctcaccggccaaacttacatctgtggagataagctgcctaaggatgacataaagtttatgctgctgtttagaaaaaccctggaggttcatttcccaatgtgagccaatggtataattgtgtgtcttcccatctcgcttctagcttccctgggaaagctgttggcgtttcacttggtggcaaagctgatccagctcaatctgctgaagctaagtctcctgctgcggacgatgacgatgatgacttggatctgtttggcgatgaaacggaggaggataagaaggcagcagaggaaagagaagcagctaaaaagtctgctaagaagaaagagagtggaaaatcttcagtactgatgtattttataccatgggatgacgagaccgacatgaagaagttggaagaagccgttcgatctgttgaaatgcctggacttttatggggagcatcaaaattggttgcggtcggatatgggattaag

SEQ ID NO: 22450 - DNA, 232 bp, Gossypium hirsutum
  Clone ID: LIB3149-029-Q1-K1-A2
ttcccaatgtgagccaatggtataactgtgtgtctttccatctcgctgctagcttccctgggaaaggcgtggcgtttcacttgctggcaaagctgatccagctcatttggtgaacttaagcttccggctgcggtggccaccgatgatacctggaaccttgttgcggttgaaccgggggaggataaaaaggcacctaaggaagaaaaaccggttaaaaggccttttattaaaa

SEQ ID NO: 22451 - DNA, 464 bp, Gossypium hirsutum
  Clone ID: GOSHI-09MAY01-C20429_1
cggtccgaaattccggggcgacccacgcgtccgcagcgttgcagcgacgagcacaagtcgaaaaaggaaattcctctcaacatcaccagaccacgacctccctgccgagctccctccctctccgttggtgatggcatctcagagctccaaggccgcgggcaccgccgcgcctccgccggaggttgcagccaccggagaggcggctccgggcgcggcttcttcaacaccggcacagaaccctaacgctgctgcaaccgcagtggccggggccacggctctagagaagatgatgcgccgcgcggagcggtttgggatgccagtactgatgtcagacgaggaaaagcgcagccagtcgccgccgtagaggatgtttttggggggactggctcttcaagtgtaaaggaggaagagaagaagaagtccagggctgagacgtttggccttgcctcgccctcttcttcaga

SEQ ID NO: 22452 - DNA, 774 bp, Gossypium hirsutum
  Clone ID: GOSHI-09MAY01-C20789_1
ggtgaatctgctccagatcctgggttgatggatgaggttgttccagatgaaatagatagagaggatcctctcaatgacagccgagaaatgttgtctcgctctctaggaagggatgacagcggatcaaaagttgatggctctgccaaggcagagtctattgagagtggtgaaaagataagccaaagctgcaaagtaatcctggataacaatgctcatccttctctttcttgcaatgcaaatgtgtactctggtaatgaaacaaccaaggagataaaaaatgctggaaaatcatcttgcataaacaactgtacatatccagattcagatcttgctgtcgcaactgggatagggccaccaaaaggagaaagcaattatgaagaagctatagaatttgatccaattattcatcacaaccagttctgcctctgggtgaatgggaatgtagctgctgctggctgcagtggctactccagctccacctcctgctccaatgctgatgttgttgcactttgtgggtggcagctgaccttggatgctctggatgccctgcgatcactggggcatattcctgtacagacagtacagtcagagtcggcagcatcattgcataaggatgatcagcaaactcctggtagaagtctccttcaacggcattctgtgaacaaaagtcatggccaacattgatagtcgaacatgaagtgcaaggaaacctgcaatgaaacctgcatggagcagtgtaattacgatttccctctggctttcatgtatgcacca

SEQ ID NO: 22453 - DNA, 1073 bp, Gossypium hirsutum
  Clone ID: GOSHI-09MAY01-C120791_1
aggaaaaaacaaaatccttttgtttgtttgctagggtttcataccctgtctcagccgccgtcgtcatcaaaggccctccatggcttccatcgatgtcccggtctccgattgtgacggaggagggtacaccgcgacagcaccaagtatgattttctctcttttttatattttaagcgaaaaataaataaaaacaaaagggaaaatgatatgaaaaaaaatcgaatctaacaatgatgaacacccgaaaataaaacgaaaaattcacctttagtattcaaaagcctctttttttatttttcctcccccttgtacagtattcgtattggctttttatagccggaattacagaaaaaaatcaaaataaaaggcctccaaaatccaatctgttatcccccttttctcgtatttttgttgcctttttctgttgttgctgtttgtttgcagatttggaggccagcctggagcaacggacggaggtgcacacgcgcgtgaaggcgcaactcgcgcggaggaaactctggccgctgcggcgctaggggtcgtgcgctgctactagggtttctgaaggcttgttttgggtcacattgtatttgggctagggtctaatatttgggctgatgtaatttgggtcttttggacaaatgtaaatggactttggaattgttggccttcttttggtttatgcatgtgggcccgggcaaattgggcctattacaagctttatttaatatacaatagtttcatgttctgaaaaaataatgctattaaaataaacttgaggggtggccggtacccaattccctattgtaggcgaatccatttaatggccgtgtttccacttgtgactggaaaacctgcgttaccacttatcgcttggataatacccttttcactgtgtatactaaaggcccccctttcctttcaatatgctctcgattggaagtaatttacttatattttaagcaggttattgtatagtatttatcattatttacgtttcacttatatagaactcctttggtgttatttgtataaattatattatcgaatttatttatatttaatttatatat

SEQ ID NO: 22454 - DNA, 471 bp, Gossypium hirsutum
  Clone ID: GOSHI-09MAY01-C20759_4
gattctttcattttgttatattcttctaagtcgatgtcgatgttctttgtccgttttttgtatgcattgtacaatgtcttctgattgaatacagtcccaaccgaacggggcaggatccttttcccatttcttatattttgcctcggctgcctcttgagtatcgagcatatacgctttttgcaaatccaacccatttgcatccaaaagtttcccaatctttttcttcctttcctcgagccatttttgcttagaaattcctctagattctggtggagcttccattcgtttcttttcagccaccatagccgtttgattagcttttcttgcctcgttcatctttagtctcaactcgaataattttttctgtctaccggtaagttttgtaatgtctccttcaatgttctcctcagctagctggttgttattgtcatcatcgcaaatttgttctggttctggtgccccactttgtac

SEQ ID NO: 22455 - DNA, 678 bp, Gossypium hirsutum
  Clone ID: GOSHI-09MAY01-C20759_3
aaatgagtaattaccaaaggaaccgtacgatcttctatttaaaatgctcgttacggtcattgttcgaatcgatatccttctcttcgtgaaatttcctcctcctactaaatgacttgcgtttttcttcccggtccttaagttcctttagattcaggtggagcttccattcgtttcttttcagccaccatagccgtttgattagcttttcttgcctcgttcatctttagtctcaactcgaataattttttctgtctaccggtaagttttgtaatgtctccttcaatgttctcctcagctagctggttgttattgtcatcatcggaattttgttctggttctggtgctccactttgtacatcttgttcttggtaagcaacacatctaacaggttgatcatgctcgcgttgcacggtttctggtttttcttgatcctttttttgccttggcttcaacaatctttctaaagcaatattcaacacattcatggtacggattcgatgcgttgatacaatccgggtgaactcggcggtcttcttccattttttttggttagcctttaccttactaaacttcttggtctattggagactttaaggtaagagagggtttgggtcatgcactgtagaaggaggagaattgtgctgactggaggaacaaaaggacgaggccgggacagag

SEQ ID NO: 22456 - DNA, 516 bp, Gossypium hirsutum
  Clone ID: GOSHI-09MAY01-C20759_1
gaccaactctggattttacataaaagaacagaagtaaatatggtacagacaaaacaagatcaagcatcgaattgagtatcatcaaattaaaaccagaaagccaagttggagaatctcagaaaaataaaatgcatagccataactttaaataagcactcgatgcagtgctcgttcaacaacaacaaaagaacatttgcaatgagtaaaagtataccttaatcaggcaatgcggttcctcgttcgagattatttttgatttccaatgtgtatttcccgaaggcccgttcgatcttcttattgaaatgctcgttacggtcattgatcgaatcgatatccttctcatcgtgaaatttcctcctcctactaaatgacttgcgtttttcttcccggtccttaagttcctttaccatcttatcaatcttatcttccgaaaccttaggtgccttcccatattggaggctcgaagcttcacggaagaactccgggtcagattctttcattttgttatattcttct

SEQ ID NO: 22457 - DNA, 631 bp, Gossypium hirsutum
  Clone ID: uC-gsronu33B055f02b1
cccacttcgtctttagacattacaaaacttaccggtagacagaaaaaattattcgagttgagactaaagatgaacgaagcaagaaaagctaatcaaacggctatggtggctgaaaagaaacgaatggaagctccacctgaatctagaggaatttctaagcaaaaatggctcgaggaaaggaagaaaaagattgggaaacttttggatgcaaatgggttggatttgcaaaaagcgtatatgctcgatactcaagaggcagccgaggcaaaatataagaaatgggaaaatgatcccgccccgtttgtttgtgactgtcttcaacaaactatattgtttatttgattcatataattgataatgaatatttttatctttttatatgtttcttataaattttattgaattttatccatatttctctctcttaactttaattatacattttttatcagcatttatattttactttatttattctttttatttattaataaatatcatttcttcatatattttttttattatatttcatttttaattcgtttttcttatttttatctatttttatttcattatatttacctcttgtcattttcatattccttttatacatctgttacttattttaatt

SEQ ID NO: 22458 - DNA, 628 bp, Gossypium hirsutum
  Clone ID: GOSHI-09MAY01-C20739_1
cacaaaacaaacagacccttcaattccccaagatttcaattcttacaacactacctgtataaagaaactacatactacattttcctaaacatattttttcaaaatttctttgaccaaagctcaatcaaactcgaactcttacatgattttcctttttttaatttttacagatgaatacaagcattcaacaactatcaacagcaatcacatatttttcacatttcagagctctgcaatagagtcgggaccatagtattcaaggcaaacattatgtcacctaggaccagaaagctccatggcttcgagcacaagtgatgattcttctataaaatccgagtaccgttgaggagggttatcgttatcgcatgatcggagcttcggcgtctttatcatttgtgatgcttcccatttctcggctaaaccatcaccttctagcatccttaatacttcagacatcctcggacggtgtaacggattgaattgagtgcacaatagggcaacttgaaccatttcttccaactcaatcctatcaaaatttccctttagatctttatccaccagcaggctcagtttaccatcctgatgtagcttctttacccaatcgagcattacacccttctgatttact

SEQ ID NO: 22459 - DNA, 504 bp, Gossypium hirsutum
  Clone ID: GOSHI-09MAY01-C20689_1
tcgattaaaacagcgcagatttctggttgtgagaggaaaggagatatggctgagagtaacgtgaaggtattgggtacatgggcaagcccgttcgtgatgagggtgaaaattgcccttcacctcaaatctgtccgctacgaggacgtggaggaagatttgttggcacccaaaagcgagcttcttcttaaatctaaccctgtttacaagaaaatcccggtcttcttccatgctcataaccctatctgcgagtccctaatcatccttcagtacatcgatgaggtttggaccacctctgcttcttccatcctcccttccgatccctatgaacgttcccaatcccgattttgggctgcctatgtcgacgataagtttttccccgccttaagaagactgttgataggtgcaacggaggaagataaaaaggcagcgtttgctgaagtggtgggaggtacgtgtttgtggaggagctttttgagaggttatcaaagggaaactttctttggt

SEQ ID NO: 22460 - DNA, 445 bp, Gossypium hirsutum
  Clone ID: GOSHI-09MAY01-C20649_1
gagaagcatttttaattctctcatcttttgctcctgggctagttcaagctacttgagcagcatagtagtgaatgttgtgcatcatgtcaccggaggccacggccaccccgactggttgactaatgatattaatgctggcagattggattacttttactacattctagcagtgatgagcgccttcaatttcctttatttcctctatgttgctcatcggtatcgttgcaagggccaagcacgaatagaaccgaaatctgaacccgatgtagagctaagttcgatgtaaccatgaaaccaattaagctgttgtagttttaatgtatatcacatgctaccaaataataaaaaacgtactcatttgaggttaaaaaaaaataatatatataataaaaaatattatttttatttatttttatttatttttatattatattttaattaaatg

SEQ ID NO: 22461 - DNA, 1114 bp, Gossypium hirsutum
  Clone ID: GOSHI-09MAY01-C20159_1
cggaaatcggggaggacccacgcgtccgacagtcaggaatgttactatcctggctcccatatttgaagccccaaatactgatggaattgatcctgattcatgtggagagatggtaatagaggattgctacataagtgttggtgatgatgcagttgcaataaagagtggctgggatcaatatggcatagcttatggacgaccctcgagaaacattcttatccgaaaccttattatccgctccatggtcagtcccgccttttctttaggcagtgagatgtctggtggggtatctaacgtgactccggaaaacgtccttgtctggagttctaggcgtgcagttcgaatcaagactgctgctggaagaggtggttatgttacagatataacctatcgaaatcttacatttgataatgcccgagttggaattgtcatcaagacagactacaatgagcaccctgacgatgactttgaccgaaaggccctcccaataataagggacattagcttcaccgagatacatggtcacggagttcgtgtacctgttagaatacacggaagcaaagatattcccatcagaaacgtgacgtttagggatatatctattgggataacatataagaagaagcatatattccagtgtgccttcgttgaaggccgtgtaatagggaccatcttccctgctccttgtgaaaaccttgatagatacgatgaggaagaaagactcgtaaagctctctgcggcccagaatgtaacagatatagattatgacatatgagaaagcaggtgttcaccgtcagccagccattctttccgggataaaaaacgctgtaagtctgtttctaagcgatggtgttgcaaaacgatggtggagaagaagagtaagcatgttttatttctttccagtgccctttttggctccacttttatgacttcttttctgattcacttgagtgtgtgtacagaaattctcttgtagttatatagttttccctcagcttactaaaattcaagtcatagtatgcctttcctatgtaaattggttagtactttcaagttcaacgctcaacaaaaattcagtttgcaatttgatatagggataatgtaatttttgact

SEQ ID NO: 22462 - DNA, 239 bp, Gossypium hirsutum
  Clone ID: uC-gsflnu33B025a11b1
ttttagttggaattgtcatcaagacagactacaatgagcaccctgacgatgactttgaccgaaaagccctcccaataataagggacataagcttaccgagatacatggcacggagttcgtgtacctgtagaatacacggagcgaagatttcatcaaacggcgtagagaatatcatggataacatataagagagcttattcagggcttgtaaggccggtaatagggaccatcttccctgc

SEQ ID NO: 22463 - DNA, 492 bp, Gossypium hirsutum
  Clone ID: GOSHI-09MAY01-C20049_2
gttgccgtcaaatatattgaaagaggaaagaagattgatgagaatgttcagagagaaatcattaaccaccgatctttacgacatccaaacataatcaggtttaaagaggttgtggtgactccaacacatttagctattgtcatggagtatgctgccggcggtgaactcttcgagagaatatgcagtgcaggtcgatttagtgaagacgaagctaggtttttcttccagcagctaatatctggtgtcagctactgtcattccatgcaaatttgtcacacggatctgaaactagaaaacacactcctggacggaagtccaacaccacgtcttaaaatatgcgactttgggtactccaagtctgcagtgctgcattcacaacccaagtcaactgtaggaacaccagcctatatcgccccggaagtcctatcacgaaaggaatacgatggaaagattgcagatgtttggtcttgtggcgtgacattatacgtgatg

SEQ ID NO: 22464 - DNA, 607 bp, Gossypium hirsutum
  Clone ID: GOSHI-09MAY01-C20049_1
tagaaagaaaattttctcttttcataggtttttgatctctaaaactcttgtttttagtgaaagttttcacattttctttttaatccctttcctctcctttttttttttttggtgtgatcgatggaggagagatatgacccagtgaaggagcttggatcagggaattttggagtcgcaaggctggtgaaagataagaagacaaaagagcttgttgccgtccaatattttgaaagaggaaagaagattgatgagaatgttctgagagaaatcattaaccaccgatctttacgacatccaaacataatctggtttaaagaggttgtggtgactccaacacatttagctattgtcatggagtatgctgccggcggtgaactcttcgagagaatatgcagtgcaggtcgatttagtgaagacgaagtgagtttatatctacattcaacatgttgagttgatctttcttccccacctgttaatttgcattaatgttcaactttacgatatttgtccatccgacaggctaggtgtttcttccacagctaatatctggtgtcagctactgtcattccatggtatgttatatgattatcacttttgtcacagtctt

SEQ ID NO: 22465 - DNA, 1681 bp, Gossypium hirsutum
  Clone ID: GOSHI-09MAY01-C20389_1
cctactcgtccggtgatcttcctggatggattttcaagtcgggtctgaatgaagtctctctttcagagaataagcttggtgtaaatttgagcaatcccatttcagcttcaccaagaaccccacttcaaaagattcaagtcttggatttatctcacaattcgttttctggggaattaacatacgatattggggttttaagcagcttgcagttcttgaacctgtctagaaactctctcattgggcctgttccaggaactgttggagaattgaaggctttggatgttcttgatttgagtcataatcagcttaatggaagcattcctatggaaattggaggagctttctccttgaaggatctgaggctcaatgcttatttcctaggtgggaaaattcctacatcaattgagaactgcacctcgctatctactttgatcatatcacaaaacaacctgagtggcccaatacctgctgaaattggaaaactgaacaacctacaaaacgtggacctgtcttacaacaaccttgctggaaccctacccaagcaattggccaatctaccccacctcttatccttcaatatttcccacaacaatttacagggagaactgcctgctggtgcattttttaacaccatatcgcccacggctgtctctgggaatccatcactttgtggctctgcagttaacaaatcttgccctgctgttcttcctaaacccattgtgttaaatcctacctcctcttctgattccatttccgaggaaccgcctacgactgtcggtcataacaggataattctcactatctctgccgtaattgctattggtgcatctgctgtaaatgttgttggagtcattgccatcactgttcttaatctccgtgtcaggtcatcaacatcccggtctgcagccgcccttactttttctgctggggatgactttagccattcccctactacggacgccaattctggcaaacttgtcatgttttctggcgagcctgacttcagcacaggtgcacatgctcttttcactaaggactgtgaacttggccgtggtggttttggagctgtgtataaaacagttttgcaagatgggcgctcagtggcaatcaagaagctcacggtatcaagtcttgtcaaatcccaagaagaatttgaaagggaagtgaaaaaacttgggaaaatacagcactcaaatcttgttgctcttgaaggctattactggacaccgtcactgcagcttctcatttatgaatttgtttctggtggaagtctgtacaaacaccttcatgaaggatcggttggaaattatctttcttggaatgacaggttcggtatcattctagggacagcgaaaagcttggctcacttgcaccaatctaacattattcattacaatctaaagtcaagcaatgtccttattgatggctcaggtgaacctaaacttggagattatggcctagcaaggttgctccctatgctagatcgctatgttttaagtagcaagattcacagtgcacttggctacatggcccctgaatttgcctgccgaacagtgaaaataaacgagaaatgtgatgtgtatggatttggtgttttggttttggaagtggttaccgggaagaggcctgttgagtacatggaagatgatgtggtggtgctttgtgacatggtccgaggagc

SEQ ID NO: 22466 - DNA, 446 bp, Gossypium hirsutum
  Clone ID: GOSHI-09MAY01-C20379_1
tggaaactttgttgttcaagcattaatttcccatgcaagaacaaaagatcaaatggagctgatctgggaagagcttgggttgaaatttgcagatcttctcggaatggggagatcaggagttattgcttcccttattgctgcttgtcaaaggcttcaaactcatgaatataagtgttgcgaggcacttgctaccgctgttggttcaaaaaatgagacttccaagttcattgttcctcggatactgtttcttgacggttacttcagctatgacgataagtctagttggagctggcctggcggtgctaagatgcatgttatgggttctttgattctgcacgctatttttaaattccaaagtgaatggatacagccttatattctgagtgttacatccatggacgctgagcatgttcttgaggcacctcaagatgctcgaggagcggccc

SEQ ID NO: 22467 - DNA, 663 bp, Gossypium hirsutum
  Clone ID: GOSHI-09MAY01-C20299_1
aaatatagaatagtcaaatataaatattaatcattatattataaataaaaaatacataccaaaatgaaatttttataacattaataaataaacaagtcatagacaaattgataaacaaatttgttcatgagcataaataaaccaaatacacatctattcgtgttcgttcattaaacaaacataaaaaatttgttcatgctcgtttatttagcttaataaacaaacattataccaataattcacgaacagttcatcgctctgtttatctacacccctacacccctatgataagatttgaccgtaccatcccattaaaaaacctcttaaaatctatttgaacatgtctttttcattattataataagagtgaattaaacaaagactccatcagcccgcttaaaatccacttctagccgctgaataccgttaacatgcgtagacacttaaacgttttgttattaatatattatctcttttcagaaaccaataaaatatcttccatcccgaaaacatgaaaacaggggtacctcaaaaatcagtttctcacaaacagtttaggatcattaaggaaaacgtgagcaccatgacaagcactgctttcttctcaaagggcttgtccgccagctgacgacgaagacatcactgacagaacctctgtcacag

SEQ ID NO: 22468 - DNA, 551 bp, Gossypium hirsutum
  Clone ID: GOSHI-09MAY01-C20209_3
atgggcaaaaaccaaaattttaacatcatggatgacataccactatgacactatctcacaagagaaacgtgtgggacatcacactgtcgtgacgattcatggtaaaacacatcttcctgttcatggacattaggttgtaataataaaagtacaaaatgatgataaaaatcacaaaagcttagtttgtgtaaattcagaaatctcaaaaacaaaacaccaaaaccaacttaagatgcagcaacagctgccttcttccttggagttgcttgagtgccttctctaaaaccagttttgaaccttcgcggcagatgacggacgtacctcatgcggcctgtcccactcgtctttcttctaatagccttcacactccagctatattttcggatgcggctgccagggtagccacaagcactgcaacggctcttctggacatggaagctacggcgcccacatcgaacgcaaagtgtgtgggtcttattccttcgctttccaaagcttccagttccttttcccatttcttctgtcggagctgctaacaaaaaccctagaac

SEQ ID NO: 22469 - DNA, 466 bp, Gossypium hirsutum
  Clone ID: GOSHI-09MAY01-C20209_2
gaaataaagtcgtgacagctcataatataaaacaaaacttcccgtttgtagacatttggtgaaaaataagaaagtaacacagttgaaagaaacccaaaaacctatcgtttctaaattcaggaatctctctgaacaaaacgaaaacatcacaaattaacttacgaagcagcaactgctcccttcttccttggagttgcttgagtaccttctctaaagccagtcttgaaccttcggggaacatgtcggaggtacctcatgcggccagtcccggtggtctttcttctaatagccttcacgctccagttatattttcggatgcgactggcagggtagccacaagcaccgcaacggctcttctgtagatggaagcttcggcgaccacatcgaacgcacagcgtgtgagtcttgttccttctctttccaaagcttccagttccttttcccattttctttcgttcttcgtggg

SEQ ID NO: 22470 - DNA, 570 bp, Gossypium hirsutum
  Clone ID: GOSHI-09MAY01-C20209_1
ttatatattataatattatttaattttttttaaatttataatttttttatttttttatttattattttttttattttttttttttttttttttttaacaaagtaaaacttcccatttgtaaatattacttgaaaaataaaagtaacacagttaatacaaacacaaaacttgtgtttataggaatctgaaaagaaaacaccacaattaaacttatgaagcagctacagctgccttcttccttggagctgcttcagtaccttctctaaagccagttttgaaccttcggggcacatgacgaaggtacctcatgcggcctgtcccggtcgtctttcttctaatagccttcacactccagttatattttcggatgcggctggcagggtagccacaagcaccgcaacggctcttctggagatggaagcttcggcgtccacatcgaacgcagagtgtgtgggtcttgttccttcgctttccaaagcttccagttccttttcccatttcttctgttggtggtgccgcaaaaaccctagaactgtgaggggcttgcggacgcgtgggcggacgcgaagg

SEQ ID NO: 22471 - DNA, 503 bp, Gossypium hirsutum
  Clone ID: GOSHI-09MAY01-C20229_1
aattaagattaaaactccaagattgaaacatttgtcaacaacacaaaaagaagagagaatggaagccaaaaaagaaaaaaaaccaagatccagggcctttgagatttcttcttcctctactaacctacattaaccggtgcaataagaaacaaatatgatctcaaacccctgatgtttttactaagaaatggccataataagtaaacctaaaaaatagaaagaaacaacatagcaaaacccacaatgcattatcccctcaatgttttttgccattgaatacaagctctttttggatcatatcaccaaaatatctccctttagcccttatttgcaacatcccttccatatttcataatcctaatatgaaatacgaaccatgaactgatctaatcctgagattcactgctcttgccacttccttcaccttccctctcttccaacaatctcccaccttcttcatctccgtcgcctggcttcttctgtgcttctttggccttcaaagc

SEQ ID NO: 22472 - DNA, 303 bp, Gossypium hirsutum
  Clone ID: GOSHI-09MAY01-C121961_1
tttttttgcatcgctagaacgatgttcttgcatccgtatagccaccgtggacagatggcgaggatgcaaacgatgtgcccttgattcaaagtgatgggaatgtgaggcatcttgctggaactaccagcaggaagagaacaaggaaagggaacaacaaacaaggctaaagtgctgctccttatatatatatatatgttcattttctaatttggtaagtcaaaatatatgatgggctttcttggatttgtgaatgttttaatggagtttacgggtttacagttcatggaaaaaaaaaaaaaaaaa

SEQ ID NO: 22473 - DNA, 616 bp, Gossypium hirsutum
  Clone ID: GOSHI-09MAY01-C21599_1
tcgagttttttttttttttttttttttttggcataattccttttctgggggggaaattgtttgaaccaacctttagtcacttgtccaaaattcatatccaaacatgcagcaacctcacaaaatcatctgtcttttgatttgataggaactcctttgtacatttctacacgatccttcaatgcgtctcgccttgggcgtgctatcttattattaggatcgaaaagcaatactttcttcaaatgcttttcagtgcagacttgtagtcttttttcttcttcgtatgcatcgccaagattgttccaagctgtgacatatcctggttgaatcttcacagcagtttcaaattgattgattcctttctcaagcttcccatcccgaacgtaactgacaccaagggcattgtaaacctgggcaagatcttgatcatctccatcccatttttcgattgcctgaagcaaaaacttatttgcagctgggtaaaatttccttctcaacataacggcacctagctcaaaaagctctgttgcactggcatctccacttctgacttgctcctcgtaaacagcatctccggtagtaatttcacttgcgtttgctagttgtgcagaaatcaacc

SEQ ID NO: 22474 - DNA, 593 bp, Gossypium hirsutum
  Clone ID: GOSHI-09MAY01-C21589_1
agcaaattgcatgtgcttgaggattttatatctagttatccatatttgtagaatcctcaaaacacagaagtcaaaattttaatacaacaaagtactgaccaacaatgtcgcagagcttgagcaagaacttttgaaaaagaaaaataacttagacggagaagaacatagttgtttccgacttgtaagtttaacagtccatggatacccgtcaagcactaactttcttcctaaggagatggtccaggttcaagtggtgttgatcttggcagcaagtatgaagtcattttccgtaagtccaccaacagcatgcgtccatatttcaactgttacattgttccatccgaccagatgcagatctggatgatggccttctgctcaacagatatcagatataagctgaaacatctccagtcctttggtgaaactcttaactttccaagacctttttagcttcaatgtacccccttcatttgccatattccatccatccacctttggaattagtttacttgcagtttcttcagtcatggcccgtagatcattcgtgttgcatggcaagcactccttagccgacaaatctttagcagtggcgg

SEQ ID NO: 22475 - DNA, 755 bp, Gossypium hirsutum
  Clone ID: GOSHI-09MAY01-C21569_1
caagcttggtcgaaagacgggaatggatcatttggtgaactttatttaggcgttaatgttcaaagtggagaggaagtggctgttaagctggaacctgtcaagaccaaacatcctcaacttcactatgagtcaaagctgtacatgcttcttcaaggagggactggtattcctcatttaaaatggtttggagttgagggtgaatacagtattatggtcattgatcttcttggaccaagccttgaagatttgttcaactattgcaaccggaagttttctttaaaaacggttttgatgctggcagatcagttaataaatagagttgagtatatgcactctcgtggttttcttcaccgtgacataaagcccgagaactttttgatgggtctagggcgcaaagcaaatcaggtatacgtaattgattatggccttgcaaaaaagtatagggatcttcaaacgcacaagcacgtaccatacagggaaaacaagaatcttacaggaacagctcgatatgcaagtgttaacactcaccttggagtcgagcaaagcaggagggatgatctcgaatctcttggttatgtgcttatgtacttcctcagggggagccttccatggcagggtttgaaagctggcaccaaaaagcagaagtatgacaaaattagtgaaaagaagatgcttactcccatagaggtcctttgcaaatcatatccttctgagttcacatcatacttccattattgtcgatcactacgatttga

SEQ ID NO: 22476 - DNA, 759 bp, Gossypium hirsutum
  Clone ID: GOSHI-09MAY01-C21539_1
ccctaatatcataccgtgatttggttggtgttgcgtattcggatgaggagacgaaggctatggcagctgagattgaggtggttgacggtcctaatgatgagggtgagatgtttactcgtccgggtaaacttagtgaccgctttcctcagccatatgcaaacgaacaagcagctaggtttgcaaatggaggagcttatcctccagatctaagtctcatcaccaaagctcgtcataatggccagaactatgtgtttgcgcttctaactggttaccgtgaccctcctgctggtgttatgattcgtgaggggctacactataacccatactttccaggaggagcaattgccatgcctaaaatgcttattgatggtgctgtagagtatgaagatggcacccctgcaactgaagctcagatggggaaagatgtggtgacatttttgtcatgggcggcagaaccagaaatggaagaaaggaagctgatgggttttaaatggatatttgtattgtcattggccttgcttcaagctgcttactaccgacgcttgaggtggtcggttctcaaatctcgcaggctggtacttgatgttgtgaactagcctcctcccccccaagtttctcgctttttgtggatttgattcggcaataattgcttatcaggatgttctaggttctgccatgaccaaagtggtggagtaagtctttttttcagagttgagaagaaataagctgctcgacacacatgcattaaatatttttttt

SEQ ID NO: 22477 - DNA, 1089 bp, Gossypium hirsutum
  Clone ID: GOSHI-09MAY01-C21489_1
agattgggggtggtttttttttttaagacaaagaaaattttcatatttggatatttttattaaaaaaatggtttttttattatacaacaacaaatttttgccaactccaattttgtccccctgcttccttggcccttcgcccccgtctgcttccctccgttatctatttatttggtttttcgggcggcaaacacttcttttcagtccttaataaattgcttcaaatgacatctgcttggtttatttgcttcaattgattcactcatttcgagctctgtaaatattggtttattataagcatcttggtgatcatccatgggttcaggaaactggcttagatcattcatttgtttaaagaaatataaaccaaacagatccaaacaagcaaagaccccatcaatacaggtacactcgagtaatgaaaaatcaaatggtgatgaaagggtagaagaacatgagggtcctgaagtggcagcggctgggagttcacaaagcagtcctggaattgccgttgaacaaagagcggctgctaaaattcagaaggcatttcggtcttacagggcaagaaaagcagtccgccggctgagagatgcggggagattcaagaacatattgatacagggacatacagtgaagaaacaaacaacaagcacgctaagctatttacattcatggtgcaatgtccagtctcaaatccgagctcggagaatatgtatggttacagaaggcaggcttaagcaaaagaaaatggaaaaccagatgaagcttgaggctaaactccatgaactggaggtagaatggtgtgctgggtctgaaactatggaggaaattctttccagaattcaacagagagaagaggcagcggttaaacgcgaacgagccatggcatatgccttctcccatcagtggagggcaaatgcgagccaatatcttggacaagcatcctatggtgcaggcaaggagaactggggttggagctggatagagagatggatagcggcgaggccatgggaggtgaggattcattctcagcctattcacccaaagaaaactcatggcaggcaggcaagcaaatcggagaaagagatg

SEQ ID NO: 22478 - DNA, 447 bp, Gossypium hirsutum
  Clone ID: GOSHI-09MAY01-C21459_1
cgagaatccctcccgcctgcccactctatttgtcttgacgtcttgcggtcctggggttaaatcatgctgttcctccggtgactcgatcattcgccggttagtgttgcggctgcacatccaatgtggagacgacgtatgttgcagtccgttctctggatgaaaaccaccttggtacatatcacacttgttttcgggatactcttttgcctacacatctatggtaccctcttccccgtttcttgcagacatggctactaaactaccttgctgggactttgctttacctcatctctggtttcctttggtgcttctatatttactacttgaaacgcaatgtctatgttcccatagatgctatccccacaaataaagccatgctcctgcaaatctatgttgctatgaatgccatgccatggtactgtgctcttccatctcttccgaatacat

SEQ ID NO: 22479 - DNA, 419 bp, Gossypium hirsutum
  Clone ID: GOSHI-09MAY01-C21769_1
aggaagtacataagaaaaagcacgaaaagaagtcatcaccatcaagaaaggttgtcatccgtaatattaattacatttcttcgaagaggaatggggataagggcagtgattccgaagataattctgatgaggatgagttcattgatggagattctctcaaacagcaagtagaggaggctgttggatcactagggaaacggcacaagtctacctcacaccatcataagaaacacaatggaagcaagcatcgaaacagtgtgtcctacgatgaagatgaactggtaactaaaaatccggagggagaaaaacgaagcaatccctgggatactttccaaaaccttctcttgcaagacaaggatttggattcttctgaagtagataaacagcctgcaagattccaagacaaatattttgcagca

SEQ ID NO: 22480 - DNA, 342 bp, Gossypium hirsutum
  Clone ID: LIB3083-071-Q1-L1-H1
aagctcgattagaagtcatcaccatcaagaaaggttgtcatccgtaatattaattacatttcttcgaagaggaatggggataagggcagtgattccgaagataattctgatgaggatgagttcattgatggagattctctcaaacagcatgtagaggaggctgttggatcactagggaaacggcacaagtttacctcacaccatcataagaaacacaatggaagcaagcttctaaactgtgtgttctactaatattatttacttgtaacctaatatttctcatggtgtaaaacctatattaatccttttgattcttatcaatattttttttttgctagacat

SEQ ID NO: 22481 - DNA, 539 bp, Gossypium hirsutum
  Clone ID: GOSHI-09MAY01-C21719_1
cgtaatttaacatggggcccgtgtttttagttcactgctggaaaaaacctgtaaattagtgcttctcaaggaaataaaataaaattcagggtgtccgagaaacggcagtgaagaagctttaaacaaagagccttttctcttcttcgttaatggcagatctttcgttttcttgatttgcatgttgagtttacggcctcgttagtgacttaactgagtttaattgttctgctgagttgaattaggaagtcatcggagatgctggacggaatctggggccgtggttttgcctccaaatgtaagtcattgataaaactgataaagagtcggatcgatgtaataaggaggaagaggagtgcgacgcttatgtttttgaagaaagacatagctgatctgctcgctaatggccttgatattaatgcttatggcagggtggaaggatatatagcttgaatcggtcctttcctcttgctacgattttgttgagaaatgctgcgagttcgtgtcgaagcatgtttcacttatgcaaaaactgagtgact

SEQ ID NO: 22482 - DNA, 465 bp, Gossypium hirsutum
  Clone ID: GOSHI-09MAY01-C21619_1
cttttccacttcaatttttttccctctctctaacagcgacgatcgatttttattaattttctttgccgtcggatctttggttttccattttgattcaatcaggattgcttcgttttgaacccaggcgacgatgaagaaggctatcggtcaaactgttagagagcttaagagagaggttaataagaaagttctcaaagttcctggaatagagcagaaggttcttgatgctaccagtaatgagccatggggtcctcatggatcacttcttgcagatattgcaatggctacaagaaactatcatgagtatcagatgatcatgacagtgatctggaaacgtctaagtgacactggaaagaatttggcgtcatgtctacaaggctctgactgttctggagtaccttgttggtcatggatcggagcgtgtcatagatgacataagagaacatgcttatcaaatatcggctt

SEQ ID NO: 22483 - DNA, 414 bp, Gossypium hirsutum
  Clone ID: GOSHI-09MAY01-C21639_1
aaatagtttcccttaaaagtcttatattcttcaatcggtctcttttcactcactcattttctcgctaccccaaaccctgatttctttttctttctaattttaattttagtttgtttcctctcttttactcaggccattagatttccggaaagaaatggaacccaaagcctcgatgaaaaacaatcaaactctcgatgacatcatgaaacaatcctcttcctcaaactccgactcactgtctcacctcgactcgccccactcacctctccgatcagaccacggtgactccgtcccacccgatccccaaaatacctcctctcctcatgttcctccggcagtctcccccccagttgacaactgcaaggcactcgtcgccttcgacaagtccacccagttcaacgccaattcttcccc

SEQ ID NO: 22484 - DNA, 1222 bp, Gossypium hirsutum
  Clone ID: GOSHI-09MAY01-C21139_2
aaggagtacatgctcgctttcggtcacgggtcagccaaactagccgggcaggcacagagtaaggagaagacattggcaagatggagcgaggtggactcacggagaaggtagtcgccgacccgcgcctgcggtttcgatttgttgatgtcggaaaacttcctccaccggtactgcagtttgtggaagttactttcggatacacgcctgagaatctgatctacaagaacttggactttggggtagacttggactcaaggatagcattagtaggacctaatggtgcagggaagagtacactgctgaaactgatgacaggtgaattgactcctattgatggaatggtccgacggcataaccatctgcgaattgcgcaattccatcagcacttggcagagaaactggatatggaaatgtcagctctccagtacatgataagagaataccctggaaatgaggaagagaagatgagaggtgcaatcgggaagtttggattgtcagggaaagcgcaagtgatgccaatgaagaacctatccgatggacagaggagtcgagtcatcttcgcgtggttagcatttcgacaaccccacttgctgctgctagatgagcccactaaccatttggatatcgagacgatcgattcactggcggaagcattgaacgagtgggatggtgggttggtactggtgagtcacgatttccggctgataaaccaggtagccgaggagatatgggtgtgtgaaaatcaagctgcaacacgatgggaaggggacatcatggacttcaagcagcatctcaagagtaaagctggtttatctgattgaaacaaagcagtaattagcatataactttaaagcagatggtgtccaccatcccagatgggttattctcgcgcggtggattaagcttagtagctgctatttagtatttttatggagcagtggtaacgaggaaaggctttgttattgtttgaagccatcgagttttcgtgacctctgtttggtgggtttcgcaaagcaggcatttggtgccttttgcttttcaagccctgggtttgctttctcccgaggggttggtttttcggtgatacttataatataaagaggtagcttaaattttggcgtttattttatagatacttattgcaattaactctacgaaacactagtatttctgttaattatatccctccaaaaaaaaaaaaaaaaaaaaaaaaaaaacggac

SEQ ID NO: 22485 - DNA, 652 bp, Gossypium hirsutum
  Clone ID: AI054556.1
agaaaacccaagatttctctggtggttggagaatgaggattgcattggcacgagctctattcatgaatcccaccattcttttgcttgatgagccaaccaatcatttagatttagaagcttgtgtctggttggaagaaaatttgaagaaatttgatcgtatccttgttgtggtatcacattcccaggatttcctgaacggagtttgtacaaacattatccatatgcaaaacaaaaaacttaagttgtacactggcaattacgatcagtacgttcaaactcgttctgaattggaagagaaccagatgaaacaatacaagtgggagcaggaacagattgcttcaatgaaggagtacattgctcgcttcggtcacgggtcagccaaactagcccggcaggcacatagtaaggagaagacattggcaaagatggagcgaggtggactcacggagaatgtagtcatggacaaggttctggtgtttcgatttggtgatgtcggaaaacttcttcaccggtctgcagtttgggaagttactttcggttcacgcctgagaattgatctacagaacttgacttgggtaactggactcatgatgcattgtggacctatgtgcaggaaagtcactgtgaactgtgacagtgaatgactcatggt

SEQ ID NO: 22486 - DNA, 274 bp, Gossypium hirsutum
  Clone ID: LIB3146-010-Q1-K1-D10
cccacgcgtccggtgaattgactccaatggatggatgggccccggttaccattttgaattggcaattcattccatttggagagaaactggatatggaaatgtcagctctccgtacatgataagagaatatcctggaaatgaggaagagaagatgagaggtgcaatatggaagtttggattgtcagggaaagcgcaagtgatgccgatgaagaacctatctgatggacagaggagtcgagtcatcttcgcgtggttagcatttcgacaaccccac

SEQ ID NO: 22487 - DNA, 756 bp, Gossypium hirsutum
  Clone ID: GOSHI-09MAY01-C21059_1
gaaatagatgacactccacctgtaactagctccttatctcatgaagctgttcaggcgaaaggaggaaaagaaacagacagggaaaaactgctaggtgcagcagatgattcaacacccagggttagaacagctcaagaaattattgcaaaatatagaaaagctggggacgcctcttcagcagcagcgcatgcgagaaataaactggtagaaagacgggaaaagctggagagaatcagcagacgcaccgaagagctgcagagcggggcagaaaactttgcgtcattggcagatgaactggtgaaggcaatggaaaatcgaaagtggtggcaaatataactggacacaaatggggaattatgtctcgtgatcatttcttcatactccatagtagttgatcacttccgagctcatgatggcgccattgttgttcacagtaaaaaatattggaatcatatgagttggttggtgaaatagtgaattgaagcttcaatttacactgtgtgtcttgagagttgtttggttgctgatgtaaagtagcatatagtcaacatttcagctccttaaaaaaaaatccattattgataagaaattcttgggttgaaaatcatagattttgttttccatgcaatatgcatgtttaaatatcgaatgtaaagagttgatgttgatttagtatagagtttgtaaaatccttactttgaaacagtcaaaaaccatccgtgttattggtaaaagtattgattttctattctaagg

SEQ ID NO: 22488 - DNA, 826 bp, Gossypium hirsutum
  Clone ID: GOSHI-09MAY01-C121051_1
cccacgcgtccgcccacgcgtccgcccacgcgtccggggtgctgctaaaggactcgcttttctccatagtgctgaaataaaagttatatatcgagacttcaagacttctaatgtcttgcttgattcgaactacaatgcaaagctttcagattttggattggccaaagacggaccaacaggtgacaagagccatgtttcgaccagggtaatggggacttacggatatgctgctcccgagtatttagccacaggtcatttgactgccaagagtgatgtttatagtttcggagttgtgttactagagatgttatccggtcgccgagcggttgataaaaatcgaccttctggagagcatagtctagtggattgggccaaaccttacctagccaacaaaagaaaaatgttccgtgtgttagattcccgtctcgaaggccagtactcgatggaaggagccttcaagggtgctacccttgctttacgatgcatttctactgaacccaaattccgaccgagaatgaacgaagtcgtaatagtattggaacaacccccaaattccaatgaatctggaagtaatctgagcaacaacactagcagtacaccccggatacgtaggcgaagtgcagaatatcctagtggtggaaggagtaccactactacggcgtaccctcggccatcggcttcgcctctttatgactgaaaatgaaaactgaagttcatctctggcggctccgggatgatctctgcaacccgaggcattcaccattttataacctgttagtgtacagttttgtttaaaaatggatgtaaaaaaaaaaaaaaagggcgg

SEQ ID NO: 22489 - DNA, 804 bp, Gossypium hirsutum
  Clone ID: GOSHI-09MAY01-C21259_1
attagtgctgccaccttccttagtcgatccacttcatatgcaatacctcccacattcgtttagcagcacatatggtgcttctgttcagcatggtcatttgtcatcaactggtgcttctgggggccaaattgattcttttgtgcagaaagagtcaagtggtgctgcttatattggagatccaaaagttcagcctcctattaatgggaggctaagcattccaaatcctgggaaagttggaagtattggtggtggcttttatggaggtcaccacagcatgggtgttattgcccaataccctacatcaccagttgctagtccgctgatgccatcatcaccggtaggtggaatgactcctctaggtcgcagaaatgaaactaggtttcctccaaaagcaggaccttattctgcatggcaaggacagagagtcagcagctttgaggactccaaaaggcattcctttctcgaagaactgaaatccagcaatgcccgaaaatttgagctctctgatatatttggtcgtatagttgaattcagtgttgatcaacatgggagtcgatttatccagcagaagctggagcattgctgctttgaggacaacgagtctgtttacaaagaagtccttccgcatgcttcaagattaatgactgatgtttttggtaattacgtcattcaaaagttctttgagcatgggagttgccagcagcgaaatgaacttgctgatcaactggttggaaatatgttaaactttagtctgcatatgtatggttgtcgcgtgatacagaatgcgttggaagtgattgatct

SEQ ID NO: 22490 - DNA, 983 bp, Gossypium hirsutum
  Clone ID: GOSHI-09MAY01-C21269_1
cccacgcgtccgcccacgcgtacgatcccgtaacaggctcttgatatttgcacgactcagtcagtaataagaagcttataattcatctatggcagccgacggtaacaagagaaagaggcccaacatattggtgacgggcacgcctggaactggcaagacgacgacctcttctgctttggcggaggccaccaatctgcgccacatcaatattggtgatttggtcaaagagaagaacttgcacgacggctgggacgatgatctccagtgccacattatcaatgaagacctcgtgtgtgatgagcttgaggatgtgatggaagaaggtggaaacattgtagattatcatggttgtgatttctttcccgaaagatggtttgatcttgttgtagtacttcaaactgacaacaccgtgttgtatgatcggttgagtaaaagaggttatgaaggtgctaagctttcaaacaacatagagtgtgaaatcttccaagtactgctagaggaagcaaaagaaagttactcggaagatattgtaaaagctttgaagagtaataatatcgacgacatcacaagaaatgtttcaagtttaactgattggatcaggagttggcccccaacatcttgaacgcttgctattttccgcaatctaccctctgcatatgctttgtttcaccatgcaaaagaagctctggtgagtgccttaatcaagtatgtctctatcaagtatcggtttaaatctctattgcttttaaagtttagctcgaacacgaaatcagttaattgtggtagttttggttattttcgtgggctaatctccaggtctgggttcgagttatgtgagattggtatctttaattttagtatttttggtgatgatgtttgtaactgatagttcaaggatgtattgtgatcagtgaagagacaattgttatgtaggttttctttttccccttttaaaatatctttgcccctattggttgatagag

SEQ ID NO: 22491 - DNA, 646 bp, Gossypium hirsutum
  Clone ID: GOSHI-09MAY01-C22929_1
cttacgctaccggcgcctctcccgattttttcttcttcactttgaggtttgagcagatcggatggcaccaaagaaagataaggcccctccaccttcttccaagccagcaaagtctggtggtggcaagcaaaagaagaagaagtggagcaagggaaagcaaaaggagaaggtgaacaacatggtgttgtttgaccaggctacttatgataagcttttatctgaggctcctaaatataagctcatcactccctcaattttgtctgatcgtatgaggattaatggatcccttgctaggaaggctataagggaattgatggcaagaggatcgattcgtttggtgtctgcccattcaagccagcagatttacactagggcaaccaacacctagatgctttgttatagttttgcttaaattagttctatgtagtatttgcctttcttgactttctgtgaacgatttttccttttgctaaagacctccatctataatgtgtgagctacagtttcttgttgttctggtttaatggataattttttgttcctcacaatgagattgatatctggtctatttagtgttcaatcgcatattggattgtcatacatatatgtgtgtattgtgtgtaaagtttatgggatatttgtgatg

SEQ ID NO: 22492 - DNA, 367 bp, Gossypium hirsutum
  unsure (1)..(367): unsure at all n locations
  Clone ID: LIB3145-047-Q1-K1-B12
gaggatcgattcgtttggtgtctgcccattcgagccagcagatttacactagggcaaccaacacctagatcctttgttatatttttgcttaaattagttctatgtagtatttgcctttcttgactttctataaatgatttttccttttgctaaagacctccatctaaattgtgtgagctacagtttcttgttgtactggtttaatggataagtttttgttcctcanaaaaaaaaacananttaaaaatataaaaaataaaaataaaaaaaaaaaaattaaaaaaaaaaaaaaaaaccccatttaaaaaaaaaaaaaaaaaaaaaagggggggccgttttaaaggatccaagtttacttccccgggct

SEQ ID NO: 22493 - DNA, 342 bp, Gossypium hirsutum
  unsure (1)..(342): unsure at all n locations
  Clone ID: LIB3148-007-Q1-K1-D11
actaatttataattaacttttangaatgttcttgatcccatcgcaccaaagaaagataagccgccattttttaatggcaagccagcaaattaataatagtggcaagcaaaataagaagaagtggatcacgggaaagcaaaaggagaacgtcaacaacatggtgttgtttgaccaggctacttatgataagcttttatctgaagctcctaaatataagctcattactccctcaattctatctgatcatatgaaaattaacgcatcccttactaggaaatctataacggaatttattgcaataagatccattcgattggattcttcccatacaaaccaacaaaa

SEQ ID NO: 22494 - DNA, 422 bp, Gossypium hirsutum
  Clone ID: GOSHI-09MAY01-C22859_2
acgtagtgagtgaaaattgactttcacagattgtgtttattaaacatacaaactttgaagaaaacataaaaacaaaggggggtcagcagatacatatacagatatactcttgctctagcaagtccttgatgagtgcaagggccatacccgtaacacgagtccttatcctatgaattttttcttctcatatggtgaagaatgagaggtgatccttcaaataaatccaatagataattttccagatcctctggggtatacttaatgtattttccagaattccttccactctctatctgactcccaaatctccccatgaaggatcgataagctggaattactttctctgatatagaaattcgaagctcttcacgaagttgaggatcagggaccttccaacctgtctgaatcctatatatttcttc

SEQ ID NO: 22495 - DNA, 627 bp, Gossypium hirsutum
  Clone ID: GOSHI-09MAY01-C22859_1
ctgattaaaaaaaatacatatataggtaaactcttgctctgattagtcctcgatgagcggaagggccatacctgcattgagaaactttgtatcctatgtactctttcttctcatatggtgaagaacaagaggtgagccttcaaacaaatccaatagatagttttctaaatcctctggtgtatacttaatgtattttccagaatgccttccactctctagctgactcccgaacctccccatgaaggagcgataagctggaattactttctctgatatggaaattcgaagctcttcacgaagttgaggatctgggaccttccaacctgtctgaatcctatatatgtcctcaaaacatgcattgaaggtcttaaatctctccttcaaggtcacacttggaggccattgttcgaagctaccacccattccttcatccttcagacaatacagagctttcatccaacaagcccgaagataatttgtagcatactgtcgtacttggccacgccgcttacgaacccaattgtctcccaaaagcttacccagctcagaatccttcaccttttgcactatatacagaatattattcatcaaaaatatacaatgcaacgcaccatcctcatacagttt

SEQ ID NO: 22496 - DNA, 607 bp, Gossypium hirsutum
  Clone ID: GOSHI-09MAY01-C22869_2
gtcctttccttgctgaattgctacgtcttgaagaacaggccaaacaacaaggcgtgggtcgatggagcaaggtacctggtgctgctgaggcttctatacgtaatttacctccttctgccattggtgacccaagtaacttggatgccatgggtcttctggctgcaaataagggcagtccaatgcaaggtatcgttgagcaggttcgcgatggtagtactgttcgagtctatttgcttccagattttcagtttgtgcaggtctttgttgctggtatccaggccccttcaatgggtagaagggctgctgccgaaactgttgttgaaacagatttgacttctgatgaacaaaatggagatgcttcagctgagccacgggctgccttaacatcggcacagaggcttgctgcatcatcgacagcttcttctgaagtttctcctgatccgtttggaccagaagcaaaatattttacagaagttcgctgtttgaatagagaggttcgtattgtcctcgaaggtgtagacaaattcagcaatttgattgggtcggtttattatcctgaaggtgatacggcaaaagacctcgctttggagcttgtggaaaatggtct

SEQ ID NO: 22497 - DNA, 640 bp, Gossypium hirsutum
  Clone ID: GOSHI-09MAY01-C22869_1
ccccgcgtccgccccgcgtccgcccacgcgtccgcccacgcctccgcccgcgcctccggttgaaacagatttgtacttctgtggaccaaaatggagatgcttcagctgagccacgggctgccttaacatcggcacagaggcttgctgcatcatcgacagcttcttctgaagtttctcctgatccgtttggaccagaagcaaaatattttacagaagttcgctgtttgaatagagaggttcgtattgtcctcgaaggtgtagacaaattcagcaatttgattgggtcagtttattatcctgaaggtgatacagcaaaagacctcgctttggagcttgtggaaaatggtctagcaaaatatgttgaatggagtgctaatatgatggaggatgatgccaagcggcggttgaagtctgcagagcttcaagccaagaaagctcggctgaggatgtggacaaactatgtaccgccagctacaaattccaaggcaattcgtgatcaaaacttcacaggaaaggttgtggaggttgttagtggggactgcattgttgtggctgatgattctatcccttatggcagtcctcttgctgagcgccgagtcaatctttcaagcattagatgtccaaaaatgggcaatcctcg

SEQ ID NO: 22498 - DNA, 585 bp, Gossypium hirsutum
  Clone ID: GOSHI-09MAY01-C22569_1
caaagttcctggatgaaaagctccgtgctggtaataagggtacttcggaagaggaattagagggtacactggataaagctttggttttatttaggttcatccagggcaaggatgtctttgaagcattttataagaaagatcttgcaaaaaggctgcttctaggaaagagtgcttctattgacgcagagaaatctatgattactaagctgaagactgagtgtggcagtcaatttacaaacaaacttgaaggaatgttcaaggatattgaactatcaaaggagataaatgaatcattcaagcagtcatcccaagccaggacaaagcttccatctggaattgagatgagcgtccatgtcttgacaactgggtactggccgacatatccacctatggatgttaggattccacatgaattgaatgtctatcaggacatcttcaaggagttctacttgagtaagtacagtgggagacgcctaatgtggcaaaattcattgggtcattgtgtgttgaaagcagattttcccaaaggtaaaaaggagctggcagtttccctgttccagactgtagttctgatgttgttcaacg

SEQ ID NO: 22499 - DNA, 380 bp, Gossypium hirsutum
  Clone ID: GOSHI-09MAY01-C22509_1
gtgaaataggtggcggtcaagggcccgcattgttccctgctaacatgggagatcaggttggttcaagaatgtcctccctttataccacttcaatgcaacatgaaaacatctctccacatatgtcggccactgcattgcttcaaaaagctgctcaaataggttcaactacaagcaacaacactacttccactttgctaaggggattaagaagctcattatcaggtgcgactaaatccgacagacctgttttctcccctaacttcggcagtaatttcgagggtggcaatggaagtgaaaccctacgatcaaatatggaggatgatagcaatctgcagggataatgaactcacttgcagcaaatggtaactcttccattttcg

SEQ ID NO: 22500 - DNA, 739 bp, Gossypium hirsutum
  Clone ID: GOSHI-09MAY01-C22429_1
aaaaggccagccccaatatatataaaaataaaaagaaatatagatataaaaaaacaataaaaataataatataaaattagtaaatcccctagttttcagttacttcataaatgatttattgtcatacaatcaatagaacttcaaaattcccccactttgagcaaaattaaaaggaagaggcagcaaaaaccagcctccatcaaatctctaaattcaagagttcttttaatgctcagtttaaacacattatcacaacatgttttttttagtaaaatttttcattatcttgttaactcacattgtggtatgagccaatgatggcgtctgctagatattcacacttagccaaagataatcctgcaagtgatatccttccatccttggtcatataaacatgccacttgtttgtcatattatcgcactgagctttgtttaagcctgtgaacgaaaacatcccgatctgcttaagaacgaaagaccaatccttcccacttttatctttggaagaaagactatcaaacaatttatgtctcacattcttgattctccctgccatcatttccatctcagcattccattccttgaagagagctgaatccccaacaatgttggcgacaattcttgccccatgaacaggaggattcgagtacattggtcgagctattcttttcagttggctctttacccttgcagctgcctctggtgatgagcaaacaacattgattgcccgacgcgtggg

SEQ ID NO: 22501 - DNA, 399 bp, Gossypium hirsutum
  Clone ID: GOSHI-09MAY01-C22779_2
attaaacactaacgggtaaaataatttcaaagactttcacacccactctcatatatatattttgaaaagaaaaaagaaactaataatccggtcaacatagcagttcaacagcaatgcttaaaaaatacctgaaagacaaaatattaaagtagaaaccatatactactgaaaaataccttactcatagtagaggagattttattgatcatccaaagacactcacaagcttgaaatctggagatttggagaagcaaagtttaggaattcatgatctttttgtagtgcagacattctggtttcatctaaggttatccaagcttctattcctttcccacatttgggttcaaggagaatagttaagtttccaaattgccctatttttccaagtattgcccatga

SEQ ID NO: 22502 - DNA, 596 bp, Gossypium hirsutum
  Clone ID: LIB3493-048-P1-M1-B6
cgaatccagccgagacaggcaccgagttatccacattggtcgagttgatgagtcaatccattgctgttttcgacgacgaatacatgagatcaatccaaggtgaacaagggtttgaagccatcgctgagcacttgaaccagctggagctgttgttttcctttgaaaaacctgatattttcgccttcaccagctggatcaatactgattttcacaaactagatttcggatgggggcaaccttgttcatttgcaatactgggaaaagcagggcctgaatttagaaacttcactgttctcgttgaaaccaaatatgggaaaggaatagaagcttggataaccttagatgaaaccaaaatgtctgcactacaaaaagatcatgaattcctaaactttgctttttcaagtcccaaatttcaagcttgtaagcgtctctggaaacactttgatgatcaataaaatctcctctactatgaataaggtattttcagtagtatatggtttctacttttatatttcgtctttcaggtatttttaagcattgctgttggattgcttatgtggccggattattagttttttttttctttccaatttttt

SEQ ID NO: 22503 - DNA, 668 bp, Gossypium hirsutum
  Clone ID: GOSHI-09MAY01-C22189_1
gtttgttgcatcgaccgtctcaactctgtgtcttgcctgacaaaagctggccagctggaaactccaatcgctgccaccaaattccacatttgatagttgggacacctagtctcaccgtttaagacaccccaccaagccggtcctaatataaatcagccatgggttcccttctaagctccaacaggttaagccaggaagatacccaaatggcacttgacaaggtcaagcacatcgtttcctccaacccccgttgttgtcttcagtaaaacctattgtgggtattgtaatagggttaagcagctgtttgctcagttaaaagcttcttacaaggccattgaattggatcaagaaagtgatggtggtgaaatgcaagcagctctggcagagtggactgggcaaaggacagtacataatgtgttcattgcaggaacacatattggtggctgtgattctgttattgccaagtatcaagcaggtcagcttctgaacctcctgtcagatgctggtgccatcactgtcgatatcaatgcctgaccccaaacctttctgcacacaataaatagcaaagcgttttctttgcagtggaaccataccagacttcatatcccttttcaatacataatgtttttacttaaaactgcttcaataatgatatgcgacaatttggt

SEQ ID NO: 22504 - DNA, 557 bp, Gossypium hirsutum
  Clone ID: GOSHI-09MAY01-C122161_1
ttttacgtgattctaactcctactggactccaaagcaaaacaagctatttgaaagggcacttgctgtatatgacaaggacactccagaccgctggcaaaaggtggctgcagctgtgggggagaaatcagtcgaggaagtaagaaggcattatgagatcctagtgagggatctcatgtatatagaatctggtcaaatccctatacccaattacaaaagcactgggagtaacagaagatgaattgctggggtgcaaaggtttatgaagaatctaaggctccaatgaagcacaagtttcagctgcactgtcagagaatctgtaaaaactaaaataaaaagaataaattataaagaactggagaatttgcatcgtgattctccctgtcttattttacattgagtgatcgagtcagtttggttttttctttttgtgtgtgtgtgtcagtttgttaatatgacaacaaaagttgaactctacaattattaagtttgtgagtattgtactgaagttaccagttttaaattaaaaaaaaaaggtattactactaaatgctgtata

SEQ ID NO: 22505 - DNA, 1011 bp, Gossypium hirsutum
  Clone ID: GOSHI-09MAY01-C22009_1
cggccgcgtcgtccaaagacattcattttcacctcagcttcttcttttttctctttgtttcatcatggcttctttggctacatttaattttgttatgtttcttattgtcttggcctcttcgctacatttcaccgccgatgcaaggaggctcgttgagtcagaccaacctgaccagcctttgctcttccaataccacaatggtcctcttctgtctgggaaaatctctgttaatcttatttggtacggcaagttcaagccttctcaacgtgcggttgtgtccgatttcgtcacttccgttgcgtcttccaagcctacaatagctcagccctcggtcgccacatggtggaaagccacagagaagtactatcagctcagcaagaaaccttattctcttgccatcacattgggttcacaaatccttgacgagaactactctttgggaaagtcgctaacaaatcaacagatcatggaattagcatcaaagggtggtcagaaaaacgccattaacgttgttttgacatcagctgacgtggctgtcgaagggttctgctcaagcaggtgtggaacccatggttcaggtttgggcggatcaagcaagggtcacaacagtaacttccccacgcgtccggttggaaactccgagacacagtgcccaggtcaatgcgcatggccattccaccagcccatctacggaccacagaacccacctttggttgcacccaacaatgatatcggtcttgatgggatggtgatcaacctggcaagcctcttggctgggacagtgaccaacccgtttggaaatgggtactaccaaggtccaaaagaggcaccactggaggctgcatctgcttgtcccggtatttatggtaaaggagcatacccaggctatgctggagaccttccggtggacgccacaactggcgctaactacaacgcacatggtgtgaatgggagaaagtatctgcttccggctttgtttgacccttcaacctcaacttgctctacactggc

SEQ ID NO: 22506 - DNA, 820 bp, Gossypium hirsutum
  Clone ID: GOSHI-09MAY01-C22029_1
cgaataaagtgttggttaaatgtctgggaatgaatgggaaattgcttgttgatgctttagctcatggcagttctcagcctgttcatcttgaaatagatattagtaactatgttggagagaatggaaatggaaattactctgctcagtataagaatttagataagttggtgagtaatttggataaagaagttatatccaagttatatggttcggtttcgacttcgggttcatcaagcaatccatctagcttagaaacagggtcaaggcgcaatgtgaacggtgatggtgttagaataaatgaaccgacaggccctcagcctcatccgtcaggggtagttattcctcccgttaatccggtaggtggtagatatttgtttcctgggcctggtgctggaatgtatcctaccaggggtgatttcggtggcggcgacatgcttctaggaccaaatgatcctcgttggttcggtggacttggtggagatcacggtttccctggcgcacaaccgggtgggtgttcctcctggtgctcgttttgatccatatggtccacctggtgttcctggttttgagcctaatcgatttatcagaaatccgccacggaggcctggtggtggtactcatccggacctagagcattttgggggtggggattttatatagattagaatttagggtccttttggtttgtccatggatttgatatcttttactattctgttaaatataagtgaaggatctaaagattatacttaaaataatatattaagcatgttaatagtgctttttctttgataacaaatatacagcaaattgaatagta

SEQ ID NO: 22507 - DNA, 1178 bp, Gossypium hirsutum
  Clone ID: GOSHI-09MAY01-C22399_1
aaggtcactctcggacaatacgagagtcacattgttttcactcttccagggctctaccgcgttgttgatgggatcgatgtttttgatcccaaattcaatattggctgccctgcagctgatatgagcatatacttcccttacacggaagagaagcgtaggttgatgaagttccacccggagattgaagagcttgtttacagccctcccgcgaatacagagcacttatgtgtactaaaagaccgcaacaagccgattctgtttaccatggcaaggttggaccgagtgaagaacttaactgggctcgtagagttctatgccaagaacagccggctgagggaactggttaacttggttgtagtaggtggagataggagaaaggaatccaaggacttagaagaaaaggctgaaatgaagaagatgtatgaacttatcgaaaaatacaagttgaatggacaattcagatggatatcgtcccagatgaaccgagtgagaaatggtgaactctatcgttatatttgcgacaccaagggagcattcgttcagcctcctatatacgaggcttttggcttgactgttgttgaggcaatgacctgtggactaccaacatttgcaacatgttacgggggccctgctgagattatagttcacggaaaatcggggttcaacatcgatccttataacggtgatttggctgccgagacccttgccaatttcttcgagaagtgcaaagcggatccatcttattgggatgagatctcccagggagggttgaaacgcatacaggagaagtatacatggcagatttactccgagaagctattctctctcaccggagtttatggcttttcgaaacatgtagcttaccaggagcaacgtgggcgcaagcgttacattgaaatgttgcatgcatggatgtataacaatcgggtcaagactgttccactagctgttgagtaaagaaaaagcaaaaggctgcttggaaaccaaggaatttccaagaatgattgctattgaagttttatttttgcttctttttttcaatttcgtaaatgtttaatttcaactttggggtttccccttggaatgttttgaactctgggtttggtcccattgattgcaataaagttttaatttctgttgaatgatgtttgtatttaagttttgagtttgaagaggat

SEQ ID NO: 22508 - DNA, 892 bp, Gossypium hirsutum
  Clone ID: GOSHI-09MAY01-C22369_1
aatttttcatcttttaaaattttaaattaataaaataggggataggtgcatttttgtgatcttagttctgtttcttaaactaccggtagggaaaacagagaccgataaaacgaagaaaggaatctatccttactcccggatctcagtcttacagtttcatccaaagtagtgagaatcaagggaagcgagagaaagatgagtggaacggggaaggtggtatgtgtaacaggagcatcaggttacattgcttcatggctcgttaagtttttactccaacgtggttacactgtcaaagccactgttcgtgacccaagtgatcgaaaaaaatcggaacacttacttgcgcttgatggagcaaaggaaaggctccgtttgttcaaggcacagctgctggatgagggagcttttgattctgtagttgatggatgcgtaggagttttccacacagcatctcctttttatcacaatatcaaggatcctcaggctgaaatgcttgacccagctgtgaagggaacacttaatgttcttaggtcatgtgctaaggtcccatctatcaaacgggtggttataacatcctcaattgcagctactgtgtataatggaaggcctcttggtcctgatgttgtagttgatgagacttggttctcagatcctgctttttgtgagaaatcaaagctatggtatatgctttctaagacgttagctgaggaggctgcttggaagtttgcaaaagagaatggcattgacatggtgacaattaacccagggttggtgattggacctctcttacagccgactgtcaatacaagcgtggagccaattttgaaacttattaatggggccaaaacatttccaaatgcaacttttagactaatagatgttagagatgttg

SEQ ID NO: 22509 - DNA, 781 bp, Gossypium hirsutum
  Clone ID: GOSHI-09MAY01-C22219_1
tgaccaagttcgctgtaaagtcctaaaacccataggagtcagatttgtcctccctgtacttcctataagtttgatattcgctggatattcactagctgcacttgaggaacgtggttctcgaaatggtgaaaagaaaagatcttcgtgcatttgcaacaaatggcgttccaaaaagcaacttgccatattcttcttgcttgcatccaatattccaatggccctgtatatgagtttgattcaccagagaggaactgaggatgcgatgaactatctatctaaagaagctgcaaaagggaaagtgaaaagtatcgttttcctaatgccttgccatgccacaccctactattccactctgcataacaacctgcctatgcgtttcttggattgcacacccaataagggaatgcctactgaatcagaccgtttcatgatggatccagttagttttgcagtagattttgcaaaaaattggtctcaccctagtcacattgtattgtttgattcagaggagaggcacttgaaggattttctaatttcacattcttttagagaggttagaaggttcttccatgctcactttaaggtggaccgtgatcttcaagcatccgttgttgtatacgctgactgacacgtaaaagtttttaaaacctgtttcgcaatctagccttgatctttctgagccttttttgtttccagatgatggaattcatttattctttttagaaattttgttttttttaaaaaagaatttgaactttggaaaaaaaaaccatagctgctg

SEQ ID NO: 22510 - DNA, 466 bp, Gossypium hirsutum
  Clone ID: GOSHI-09MAY01-C123841_1
catccgctgggccagactacatacctggcctaggcacttggcatgttatcagagagcttccaggcacattgcactatgaacatcgtgagagacactgtcctgatgaagctcctacatgtcttgtccctctgcctgaaggatacaagcgctcggtaaagtggcctaagagtagagataaaatatggtactacaatgtcccccacaccaagcttgcagaggttaaggggcatcaaaattgggttaaggttactggtgaataccttacctttcctggtggtggaactcagtttgtgaatggtgctcttcattatatcgattttattcaagagtctgttcctgaaattgcttggggaaaaagaacccgtgttgtattggatgttgggtgtggagggggcctgccttcgaggcttccggttcgaaagaaatgttcttgcaatgtcatttgcacctaaggatgagcatgaag

SEQ ID NO: 22511 - DNA, 658 bp, Gossypium hirsutum
  Clone ID: GOSHI-09MAY01-C23819_1
tctaccagaagctttttcatcagagttgcagaagaagtttgctggcgagtacaacagtggcagaattgccaggtaagaaagggcttgaggttcttatccaaggtggggtcattgatgatgttgcgagacatctgcttgagcaatatggaatcccaaagagatacattgaagttcttgataaaaccaggaaataagatgtgcttcctggttttgcgagttaaatacatcgatggtgttgagataagatagtacggtataagttagcggcattttctatgtcgaaatctctcggaagatgatcattgtggcgcttgttgcaactgcaaaaggagctttgattttgtttcatcatattttgtgatacaacagtaatgggaagaacggcttgaaatatcaaaactactatcatctttgttatatcactaaatctagcattctgctttagcttaaagacagtctgttaggtctctgctcctaatatacttccagttccagtggtttgcatgcctcgtttgctgtttgcactcttcactttggcactttctgttttacaacttcaacagcaatggatggcattttttgtgttccaagtactattttgttctgtaatctgaacagttcttttgtgcgtatataagcgaaggagttgattttgccc

SEQ ID NO: 22512 - DNA, 428 bp, Gossypium hirsutum
  Clone ID: uC-gsflnu33B091f01b1
tcttcgcgtccgctttcctcattgatccagaagcattggcatcagagttgcagaagaagtttgcttgcagtacaacagtggcagaattgccaggtaagaaagggcttgaggttcttatccaaggtggggtcattgatgatgttgcgagacatctgcttgagcaatatggaatcccaaagagatacattgaagttcttgataaaaccaggaaataagaagtgataaatggttagtttctcttctgttaagtattatgtcatccataacttgttaggacaaagttgctaaggttggtgcatgtgttttgtttatctattttgtcaatgtgtacgcgtatcttttggtggtggtttttctttttctcttagactactcctactgatgatgatgatgttgatgataagggaagttaaaggcttattttgttt

SEQ ID NO: 22513 - DNA, 421 bp, Gossypium hirsutum
  unsure (1)..(421): unsure at all n locations
  Clone ID: LIB3146-005-Q1-K1-B6
gctacaactgcaagaatggaaaggtataaaattttggaggagcttggagatggtacatgtggtagtgtgttcaaagccttcaatatagaaacatttgagattacggagaaagcatttctcaaacaacccaaggtgtttttaagaatgtgaaaagccaatgaagcaaggagttctcactcctggacgtgttcgtcttttgcttcacaaaggtctgtggactttgaaatatttttcagaggtattaatttttctctttttcttttcttctttgctgagtttttgaattcttcctgtcttttcttttctgtgaatctgatggaatgcaagtggtattggtcatgtaattacgattagaaatatntcttgtgaatnggatattgaggtgatttttctctggttttttatagctgaaagtttggat

SEQ ID NO: 22514 - DNA, 290 bp, Gossypium hirsutum
  Clone ID: LIB3083-105-Q1-L1-B9
taagaatgtgaaaagccaatgaggcaaggagttctcactcctggacgtgttcgtcttttgcttcacaaaggtctgtggactttgaaatatttttcagagcattgcactagagctgtgtatactgctccaattaaaacaattagcaaccagaagtatagagatttctatgggaagtttgatgttggccttctcacaggtgatgttagtttgagaccagaggcttcttgtctcatcatgacaactgaattgttaaggtcaatgctttatcgaggtgcagatattattcgtga

SEQ ID NO: 22515 - DNA, 650 bp, Gossypium hirsutum
  Clone ID: GOSHI-09MAY01-C23529_1
gaattaaacattctctgctatgataaaaaaatggtaataataacaaatgcaaggtacaatgttggtcgtctaatacaatgcttcaaattcattttactctaccagctcaaaaagtccacattccatatttcctcaacatcttatacctgaaccggactgtcaaaattactatcaaggctcctcaaagttcatcatgttcccgaggttgttctttgttcatcaaatctagtttatgttgcaactcctttagcttatcttccagacaaacagctggggtggacagtatcgctacgtattcgcatcggctgggttcgtcaacatcagtgatctcattcttcaaaccacatctcaacttcaccttcatacttctatcagggccattccagcaattttctccattagaaaataccatcatcctgtaggattcctcgaattggtcccaattccccaaactggttgatgtgtagccctcctcttgagaagcttgtttgtatggacacactttgtaaacgtacttattctggttggtctcaaaacaatgaccatagaatgcatagaactccttctctggtccaaaatcgtgtcttacgcttttctttcaattttgatatccttgattgtattttagataacttggtaccggaatcaac

SEQ ID NO: 22516 - DNA, 425 bp, Gossypium hirsutum
  Clone ID: GOSHI-09MAY01-C23419_1
atttcttttagcgtaagaccacagaagtttgttcaagaaatagaaacaaatcgattgcaatggcaagcaagagctcgtcgtcgcattcttcaactcgggtctgccggtgcgctccgaccaatcaccctgggtctttcaggtgcagcctccataggaattcggatagagtttcaagcaaatcggcggcgacgccccatgttaatagacagagggagcgtcagtcgaaggcggcgatgatgttgatgatgtctaacgtatcatcgtcatcgtcgaaatcaagcttgatcaaaagcctttctgatgcagatcattagaccttcttccacccacatcgatcttcaaaggaggcgcaatttccaccccaaaccttcaaaggtttagttcactcaacacctctgctaatggagtgaccggttcttgatcat

SEQ ID NO: 22517 - DNA, 458 bp, Gossypium hirsutum
  Clone ID: GOSHI-09MAY01-C23429_1
gtgcacgcccacatggcagatgtcgaagaacccaagaagcttgaatccgaaatcccctccgaccctccgccgccacccaccgaagccgccgtggaaaaatccgtgactccacctcctcctactgaagaaaagcccgccgactctacggataagcctcccgaacccatcgaaaaggcggctgagtcgacggagaagaaaagcacggaggtgtctgttgatcgagatgctgtgcttgctagagttgcgactgagaagcgaatttcactaatcaacgcttgggaagaaagtgaaataagcatagctgagtacaaagcacagatgaagctttcttctattgcggcttgggagaataccaagaaagcagctatagaggctgagctaaaaaggactgaggaaaagttagacaagcagaaggccgagtatgtggaaaaaatgaaaaacaaggcagccttaatcca

SEQ ID NO: 22518 - DNA, 581 bp, Gossypium hirsutum
  Clone ID: GOSHI-09MAY01-C23789_1
gtggaggttcctagtgcagtttatcaagcttcttcacctgttgaaacgaataaaggaaacttgagcactgtagcaagtggtaatagtggatccgggtcattaaaatcaactttgaagagctcttctctaaatccgaatgctttctataaaggagggggattgtcatcaggtaatctatctcaaggttatccggatccgagatttagctatgatggggttcagtcaccgattccttggttagatatgtcaatgtcttgtaatggacaatccgaacatgctgcaaatggtgggttttcatattcaagcaacctttcatctggcaggaatcagaaccttcatcccttccctcatgtcatgaatttgcacaatgtaagaccatcatcgggtgtaggccaaggatatggatacatgtaccctaacaacatggcctacagtcattacagaggtggttcgggttttggatcatatggctatggtgctcgaaagaaaggactaggttggtataatgttggcagcaacaacaagtataggttccaaggttatggaaaagagaatatggatggtttgaatgagctaaacag

SEQ ID NO: 22519 - DNA, 915 bp, Gossypium hirsutum
  Clone ID: GOSHI-09MAY01-C23659_1
cccacgcgtccgctgcactaacgcaattacaaaaaggaaaagagagatgttcctatgatcaccctcgcgtccggtcagttttcatgcccaagcttcgagggaaattttttgctacagaaaatttctgctatacctcaaagttctttaggttgcgccaaagggcctttctttccgatctaattatggcgggaaagcatttctgtgaagaggattggtcaaaattgaagaagaaacaccaatcactcaatgaggaagatctattgcgctattgtttttcttcagcatattttgtggccttgcttcacgatagccttgaaattgctttggatgatgaaaggatcagctttgctaatcaggtcaacgatataccattagattgggccttgggagctttcatattgcaaagcacatccatctcagatgtgcaacaaactgactggataactattattatgagcagtgattcatccacactaatttcaatcaccgctatttctgcaatattgatgtttgcagcctggtctatatcaaaatggaggaaaccccaattgaagactgtgtatgatctagagaaaggacgatatataatcactcgtataggtagaagttgatctatcattgtccagaggagatttgagcacgtcattatgatgttgcagccaaggaggagagtgcatgtctctagggtatttactttttttaatgcttccttggtttctgcacccccttaagggcatctcattcatggcagtgggaaatgtaagattgtatatcaatggagttccaacatggcttattgtaacattttcttgggcggggaacttggacaaaatgatattaaattcccactttgtatgttttggggaacgaaaatccttagtttgctatccccctttcctatgtcctgggaatatt

SEQ ID NO: 22520 - DNA, 335 bp, Gossypium hirsutum
  Clone ID: LIB3083-105-Q1-L1-H1
gagaacagaggacccccggctgcatgaattccctttagtttagaagaggattggacaaaattggtgaataaacaccaatcactcaatgaggaagatctattgcgctattgtttttcttcagcatattttgtggccttgcttcacgatagccttgaaattgcttagcatgattaaaggatcagctttgctaatcatgtcaaccatataccattagattgggccttgggagctttcatattgcaaagcacatccatctcagatgtgcaacaaactgactggataactattattatgagcagtgattcatccacactaatttcaatcaccgatatttc

SEQ ID NO: 22521 - DNA, 845 bp, Gossypium hirsutum
  Clone ID: GOSHI-09MAY01-C23189_1
gactcaggggtaatcaatggggagaggaggttatatcaggatggaaagaaatctagccaatacagcaacaggcaaatgtggaattgcaattgaggcctcttatcctatcaaaaaggtcaaaatccccctaatcctggcccctctcctccatctccaataaagcctcctactgtttgcgataattattacagctgtcccgaaagcaatacctgctgctgtgtctacgagtactatggctactgctttgcttgggggtgctgcccacttgaggctgccacttgctgtgacgaccactacagctgctgtcctcatgactatcctatctgcaacttaaatgaaggcacctgcttgatgagcaagggtaacccaatggcagtgaaggcactgaggcgcactcctgctacgcctttctgggcccatggaagtgttggcgtaaagaacaatgcttaaggagaagcctgggattttatgcagaaaatgatactacagggagaagggaacagtgcttgaccgatctcctctgttttgtcatactgcaatcctttctttcattctcatttcagcagatggatggtttataaatgttgtgcacatgccaactatgtatatagcttcctaattaatccatgctgcatttctgaaacagacggaacattgtcaatttctattgttttctgtatatcatgtcattcagcaataacttgcaagaattgatctgtcaatcttaccctgccctcatggttagttcattatcatttcaatattttgacagtccctgcatgattttaaatttgaagtggaagatatgacagcattggaaaccctggttgcagggcatccctcat

SEQ ID NO: 22522 - DNA, 1404 bp, Gossypium hirsutum
  Clone ID: GOSHI-09MAY01-C23149_1
cccacgcttccgcccacgcgtccgcccacgcgtccgcccacgcgtccgcccacgcgtccgaaagaaagagaaaaggttgatttcaggaatcatgtaattcagtggtttgaagttctggatggattgttggggaaacattggagaaacataggtctatttttcaactgcacttttctgctgtttggatcagtgattcagttaattgcctgtgctagcaacatctactatataaatgacaaccttgataagagaacttggacgtacatttttggagcctgctgtgcaacaactgtgtttattccttcattccataactacagagtttggtcatttcttggccttatgatgacttcttacactgcatggtacctgacaattgcctcccttctccatggacagattgatggagtgaagcactcaggtccaaacaagatggttctctacttcactggagccaccaacattctttcctcctttggtggtcgtgctgtctctggggagatcatgcatgctatgtggaagccacaaaagttcaaaatgatatacttgatagcaacacttttatgtgttaaccctaactttaccatcagcttctgctgtttactgggcttttggggatttgcttcttacccattccaatgctttatcattgctaccaaggtctggtttcagagacactgctgttattctcatgctcattcatcaggtctgtgtttatgaacttcagattcattcatggtagtgaaaaagtatgtaaactaacttcttttttttttcagtttattacatttggatttgcctgcactcctttatactttgtgtgggagaaattcattggggtgcatgaaaccaagagtgtgttcaagagagcactggctagactccctgtagtgatcccaatctggttcttggctattatcttccctttctttggccctatcaattcaactgttggatctctccttgtcagcttcactgtttacattatcccttcattagcacacatgattacttttgcaccttcatccgcacgagaggttagccatactttttgttcaattatcatcatcattaccctctcaataactattactgatgttttcttctttgttttctgttttgcagaatgcagtggagagaccaccatcattccttggagggtgggcgggcatgtactccatcaacatctttgttgtagtatgggtgttgattgtgggatttggatttggaggatgggcaagcatgcttaatttcatacaacagattaatacatttggtttattcaccaaatgctatcaatgccctcataaggcttgaactatatggatttattatcatcttcttcccaaatgattaacaaagttttaagatacttttctttttaagtgtgtaaagaggttggca

SEQ ID NO: 22523 - DNA, 563 bp, Gossypium hirsutum
  unsure (1)..(563): unsure at all n locations
  Clone ID: uC-gsflnu33B114e02b1
ctggacgcctgccgcccggggcccgaattccgaattcgacccacgcgcccggcattggtgtggaaacactggagaaacataggtctatttttcaactgcacttttgtgctgttctggatcagagattcagttaattgcctgtgctagcaacatctactatataaatgacaaccttgataagagaacttggacgtacatttttggagcctgctgtgcaacaactgtgtttattccttcattccataactacagagtttggtcatttcttggccttatgatgacttcttacactgcatggtacctgacaattgcctcccttctccatggacagattgatggagtgaagcactcaggtccaaacaagatggttctctacttcactggagccaccaacattctttacacctttggtggtcatgctgtcactgtggagatcatgcatgctatgtggaagccacaaaagttcaaaatgatatactcgatagcaacactntatgtgttaaccctaactttaccatcagcttctgctgtttactgggcttttgggatttgcttcttaccca

SEQ ID NO: 22524 - DNA, 387 bp, Gossypium hirsutum
  Clone ID: LIB3083-097-Q1-L1-F1
gttatctgggattttgttccaacttttttatggcttaatgggaagctggacagcataccttataagtttactttatgtggagtatagaacaaggaaagaaagagaaaaggttgatttcaggaatcatgtaattcagtggtttgaagttctggatggattgttggggaaacattggagaaacataggtctatttttcaactgcacttttctgctgtttggatcagtgattcagttaattgcctgtgctagcaacatctactatataaatgacaaccttgataagagaacttggacgtacatttttggagcctgctgtgcaacaactgtgtttattccttcattccataactacagagtttggtcatttcttggccttatgatgacttc

SEQ ID NO: 22525 - DNA, 627 bp, Gossypium hirsutum
  Clone ID: GOSHI-09MAY01-C23179_2
ctggaagaaggcctttctccaccgttacaacctctctctcagtttctttagctttcttttttaaactccctctatttatataaacctttcaataatataagagcaaaatttctgtgctgggtttcgaatttggtgatctgggtttttgttctttctgtgctagagacagagagagagagacagagggggagagagagaggggtgggggagagtgatggaaggaattcctctggggtgttttcgatctcttctacgattctcctatggtggggtttctctgttactgttatcttcatgatcctctggatctttcagacattggatttcaagtctcccctttcactatcatgcgtgcacttcatatgctcgtcgatcggagcatatctggttatcaaagtgctaaagctcattcctctattacccgttgatcctcaagatcgctggaaacggatatttcctatgtctttcgtgttctgtatcatcatagtgttgtggaaatgtttgcttacgctatatcccggtttctttcctgctcaccatcggatcattctctccggcttccgcggtttttccccgtttggttgtttggagatcttattcgactcgtcatttttggtctctttttcc

SEQ ID NO: 22526 - DNA, 1455 bp, Gossypium hirsutum
  Clone ID: GOSHI-09MAY01-C23179_1
gattaatttataattcaacccataatattagagggagagaaatgagggagggagagagggggtaattcaccagggaagaaaagcctgcttccaccgttacaccctctctcacattttcgttaagtttctctttttgtttttgtctttctctctctctttctttatttacatcttagctaccctttttttttaattcaatgctctataaacgaaaattttgaaggtgggtttttggttcttggttttgaatttggtgatctgtgttttttttttgtgcgtgggaaattgttgggagaaggagagggaggggagagaaatggaggaagggagattatgtcagtggagtgtttgcagatctcttctcgcaattgtccagtggtggggttttaatgttaccgtcattatcattaacaaatggatctttcagaaattggatttcaagttccctctatcagtatcatgcgttcacttcataacttcatcatttggagcatatatggtaatcaaagtgctaaagcttaaacctctaatagtggttgatcctgaagatcgctggaaacggatatttcccatgtctttcgtgttctgcgtcaacatagtgttgggaaatgtcagcttgcgctacatcccggtttctttcatgcagactatcaagtcattcactcctgctaccaccgtttttctgcagcggctagtttggagaaagtactttgacaggcgaatttgggcctctttggttcctattgtcggaggaattctgctaacatctgttacagaacttagttttaacatgtttgggttttgtgctgccttatttggatgtttagctacttctacaaagactatccttgctgaatctctactgcacggatacaagttcgacagcataaacacggtttactacatggcaccttttgcaaccatgatcttggcagtcccagcactgttactcgaaggaaatggggtaacggattggtttcatgctcaccctgccccgtgggcagccctcatcattattttcagctcaggagtgctggctttctgtcttaacttctccattttttatgtgattcactcaactactgctgtcacgtttaacgtcgccggaaacctcaaggtagcagttgccgtgttgatttcatggctgatattccggaaccccatctccggtcttaatgccgttggctgttgtatccccccgttggggatgttctttttacggataacttgcggcaatatcctctcttcaccagactcccaggaaccaccccgggacacctccggacacctaggagagatgaatggaactacttcccccttgttaaattaatgacaagtcagatgagtaggggtggtttcgttttttgttacctccggtcgttggggtttggagacagggataaaacacatatggcatattttgcagaggatgctctgagttcccatgtgaggatt

SEQ ID NO: 22527 - DNA, 391 bp, Gossypium hirsutum
  Clone ID: LIB3272-043-P1-K1-D11
attttcatcgaatggctgctcttatcccattttcttctgaagactagtaccctcatttcaaaatcataaacgaaatttccatggcaatatataacgtttaaacttcaatccaggcaaagagagagagagagaatcacatggaagaaggcctttctccaccgttacaccctctctctcagtttctttagctttcttttttaaactccctctatttatataaacctttcaataatctaagagcaaaatttctgtgctgggtttcgaatttggtgatctgggtttttgttctttctgtgctagagacagagagagaggggtaggggagagtgatggaagaagggagatttctgcagtggggtgttttcagatctcttcttgcgattctccaatg

SEQ ID NO: 22528 - DNA, 595 bp, Gossypium hirsutum
  Clone ID: GOSHI-09MAY01-C23169_1
gaattcttaaggggtaatcaatgtgaattcttgaaatgcaattgatcttttcgttgaagtgaagatccaaggagaaaagattccaaattacctttcaaccgaaaatttcaattgccaaagcattctaatctgaataagagccacattaatcatggccaaaagatcaaatagttgttctctacgatacaaaaaggatcagttgggctgtatgtggggcttgattagtatgcttgacttccgccatagccgatcaacgcgcagactgctggctgataggaggtgcggggacagaaatgcagttggtgctccaaatgcaagaaataaacctgaaatgttgactagttccgctgaagattgtcccagaccacttgatggtgaagaggaaagaacagctattgatgcgtgtaagccaagtgtgaagaaactcctagaagaggaaatgtctggagaggttgcaaagaaagaagcaagtaatactgaagttgaagtgaaacagttctattctggggatggagacgaatggaaggaagaattggaacagaaaaaacaaaacttgcaagaaaagttccagtagcagtcttcatatggatgtggt

SEQ ID NO: 22529 - DNA, 727 bp, Gossypium hirsutum
  Clone ID: GOSHI-09MAY01-C23049_1
gagaagtacagatttttcagaccgttagctgttagatagaaatcagttcaggaaaaaaaatcggaattctaaaacagatggagaagagatggggaaagaagtgggctttgatttgtttgtttctttttaattgggcgagaaacgtttcctccctttcggtgaccgtaagtgacatggaatgcgtttatgaatacgtgctttacgaaggcgacacaatttcgggcaactttgtcgtcgtcgaccacgatattttctggagttctgatcatcctggcattgatttcaccgtaacttcgcctgggggtaatacagttcacagtttgaaggggacatctggggacaagattgaattcaaggccccgcgaagtggaatgtacaagttttgttttcacaatccatactcaacaccagagaccattgctttctatattcatgtcggccatattcccactgatcatgaccttgccaaagatgaacatttgaacccaattaatgttaaaattgctgagctgagagaggctttggagtctgttacagcagaacaaaagtacttgaaagctcgtgatactcggcatcgtcacacgaatgagagcaccagaaagcgtgttataggttacacagttggagaataccttctgcttgttgctgcaagtgtacttcaagttatctatattcggcgtctcttcagcaaatcagttgcctacaatcgagtttgaacaatttcatc

SEQ ID NO: 22530 - DNA, 842 bp, Gossypium hirsutum
  Clone ID: GOSHI-09MAY01-C23039_1
cggcgcgtgggctttcctccctattcctctttcccataccctttcacccttgctaataaaaccaccttattaacatacctaaccatgtcgtggcaaacctacgttgatgagcacttgatgtgtgacatcgatggcactggtcatcacctttctgccgctgctatcgttggtcatgatggcagtatctgggctcagagctctaactttcccaagtgtcagcccaaggagatcactgacatcatgaaagatttcgacgaaccaggtcaccttgcccctacaggcttgcaccttggtggcgcaaagtttatggtcattcagggtgagcctggtgctgtcattcgtggaaaaaagggatctggaggggtgactattaagaaaacagcacaagcacttgtgtttgggatatatgaagaaccagtgactccggggcaatgcaacatggttgtggagaggttgggcgattatcttgcagaacagggcctgtagtcgaccacctagcttttcatattcaatgccttaattcccccatatgtttttgtttcttcttttttaagtcttggattccgagtaatttgcgttttcttccattgaaaaactatatacggtttgataagatggtttgactggcatttggacttgggttgatctgagttgttttcttttcaccatatccgtttgttttggtttcttaatttttccgtcttgggttctgtttgtatttataatcccccatcagccatcagtgattgcggggtttttgtttttggttttatttttttccttttgggtggcactatttgatgccactatatatatataaagaacgtttgaattttttgaat

SEQ ID NO: 22531 - DNA, 252 bp, Gossypium hirsutum
  Clone ID: GOSHI-09MAY01-C98529_1
gcccgtctaaggtgaaaaaatctggtgctaggaaaaagctttgatcattttaattcttgaaaacaggattttagtttcattttgcgaggcaaccctaagaaatctccggccgggtatgttgaatgcagccatgtattcttaatatcggtaggagtatgtattttgttgaagggcttagaaagcatattctttttgaggtaactctcgtataaacttcttaaagattaatgtgatgacacaaatttgggaatt

SEQ ID NO: 22532 - DNA, 556 bp, Gossypium hirsutum
  Clone ID: GOSHI-09MAY01-C98729_1
tggtgaatgggagtatggataggaggtatgttgggaacttgaacttgtccttcgcgtatgtcgaaggggagagtttgttgatgggattgaaagaagtggcagtgtctagtgggagtgcttgtactagtgctagtttggagccatcatatgtgctgagagccttgggtgtggatgaggatatggcacatacttcgattaggtttgggattggaaggtttactactgaggaagagatagatagggcagttgagcttactgtgaaacaggttgagaaattgagggaaatgagtccactttatgagatggtgaaggaaggtattgatattaagcagattcaatgggcgcagcattgatgaaatgttgaatattggtgaggcagttttggatatgaattcagtgccaaaagaatattttgcactgccagccaaagttgcttaagcagagctagaattgtatggctgtatcctggttttcttttcttgtccatgtacatgccttgagagctttcttagataatttatatgattagagagtaattcttgcatcctattttgat

SEQ ID NO: 22533 - DNA, 593 bp, Gossypium hirsutum
  Clone ID: GOSHI-09MAY01-C98029_1
cggccgcgtgggaaaggtataccgtccaaccttccttgcagcaaaagaaacacccaaagttatgttcagcggcaacttctcgaacaaagctcaccaagcaaatcttctgctggaacaactccaaagcacgaagattattgccaatcaaattggcaacaatttcaagccactggcttggaagagtcaaggctccaggagcaagcttgtggtgagagaatcaatggaccttcaaagttagagtcccttgctgatatgataaccaagcaccagagcacttacaaagagtttatacagatgtcagacacagattctccatcaaaaaccgaatccacgggtgaaaaagagtgccatgctcatgggttttgcagtaacaaaaaagaagcttcggaacaagatcaagctctaggggatcaatgtgagaaacatattaccattttgagaacttgcttgaggaaacatgacagtgcccggaagttgcttcatttgaaagtttccttttacttgtctcccgataatgaggaaaggaaaagaaaagttgcagaatctgaaggttttattacttgttgaacttagtaaatcaatggatttctccg

SEQ ID NO: 22534 - DNA, 590 bp, Gossypium hirsutum
  Clone ID: GOSHI-09MAY01-C98209_1
agcctaccttgtaaaaatctttaattgttagttgatcctaatggcatctgtttttttaccttttacatctgttcatctgcaatgtcaggttattgtccggccgattagagcctcagtgtcggggaaaccatccgtatcagagccgcccgtgacgacgctttccgaaaagcttccgctgaagaaaatcccagggaattatgggattccttttgttggtccaatcaaagaccgacttgactatttctacaaccaaggtcgagatgaatttttcaagtcaaaaatccagaaataccagtcaacggtgtttcggactaacatgccaccgggtcctttcatctctcccgacccaaaggtaatcgccttactcgacggtaagagtttccctgttcttttcgatgtgtccaagattgaaaaaaaagacgttttcaccggtacttacatgccctcaaccgacctcaccggcggctaccggatcctgtcttatctcgacccttccgagccaaaacacgccaagctcaaacaacttatcttttttctcctcaagtctagcgcaaaacgagtgatacctgagtttgaagcttgttacaccg

SEQ ID NO: 22535 - DNA, 929 bp, Gossypium hirsutum
  Clone ID: GOSHI-09MAY01-C99939_1
gcaaactcagggtctctatgaggagttcaaagatcatccaaactgtagccgtcttattgcggattccctagatccttctggtggagttttgcctgctcaagtttcaaacaagcttaaacagttaggacttaaagttgcaccaaagaaaaggataaggaatgatggtagaaatttcacttccagttctgatcaacaagggggtggaagcactcttaatgattcaaataatttagaaggaagttcacagaggcaacctctgaacaccaggaaaagagtctctgcctttagcaaggatcaggaggcaatgattaaagatctatttgagcaatttaaagaccataagagatgtagttacatgatcgcaaatgcattggatgctgataataagtttactgctgcccaagtttcacccaaactcaagcaactcggtttatatgttcctaggcagaaaaagtctgaagagaatcatgcgtttgagggatgaggaactaaatgatttatctgcaaatgaaatgcatgactcggacaatgagacattgctatcatttaagaacagaaagaaggataatggcggattgttcaatcaagaatttccaggacagaacatggaaagggaagcatcagatgacgctgatgatgaaactttaagctctgttttcaagaaaaccagaaagctccctttgaagtcaaagaatgagaagcttgctgcagtagctactggggaaaggtacaaaatctctggagctgtagttgcaaatgatgtaactgaaaggaaaatggatttcatggtttccaaagctcagcgatatgtgaatagcccagaaggaaacgatactcaaacaatgattaatggtaatggagtagtgagcagccagcttcagatcgctggatcttcccctgaaggcctagacaagcaagttgtttttagg

SEQ ID NO: 22536 - DNA, 572 bp, Gossypium hirsutum
  Clone ID: GOSHI-09MAY01-C99489_1
gacatggctattcttgtacctctgcatatgatgtattttagaaaatttctagaaacacactgatgttaaccgggtcaataactagcaatcgtcaatgtaaattcaccaacatgaaaaaaaagcacatcattgactcaaggtcactaacattgaaacctctattaatagcataatctatgaagctatagagtggcgccacacagtcaccatacttttcaaagccatccaattcgttcttagccttgcttcgaagctcttccataatctccatcgacttctcgatcccatacaacctcacataacctttacctttcttttcctgcccctcggttccttctttttctgtcgattttgacagcaaaacatcattcaccacttcatacaatacacccacagctctcccgtacctcctcaacctttctatctcgtcatctctggcaccggccaacaatcccccgcacaccgcagagcattcacccattgcaccgtattttttctcttggataaaatcaacagtgttgccgcctttaaggtctaggaactgcccagcagccatgccagaagaccccaca

SEQ ID NO: 22537 - DNA, 560 bp, Gossypium hirsutum
  Clone ID: GOSHI-09MAY01-C99459_1
taccgtccgcattcccggtcgacccagcgttcgcggccgcgtgggcttacacatgcccctacgctcagcgtgtttggattacacgaaactgtaaggtgccagcattggaacacaataatgaagtgaaaggagagagtctagacttgatcaagtatatagacagccacttcgaagggccttcacttttccccgatgaccctgcaaagaaacagtttgcagatgagttattatcctgcattgactcattctataaaacagtgacttcttcattcaaaggagagggcactgaagcaggcattgcatttgacaacatcgaaacagctcttaccaagtttgaggatggacctttcttccttgggcagtttagtctgatatgtgactaaaactgtatcattgctcttcagttattgatatgcgcctagttttcatcaagtttcagaaagtagattgttaaacattgacttcctttccaatgtaatatgtatgcatgtatgtatgtgtacataaataaatatatctgtgtcatcttcaggtggatatagcttatgcaccgttcattg

SEQ ID NO: 22538 - DNA, 606 bp, Gossypium hirsutum
  Clone ID: GOSHI-09MAY01-C99609_1
tcgctctttcgtatttggttataaactagcaaagaaaatgtgcctaaatgaaatgctctgtgtatcaattagagtcaatcccatgtttgatgcatgaattgaagaatcttggactgccataattaccatacaaatccaaatgatttcatcctttttctcccattcactatttactagctcaaattttcccttcttcctttaacgtgggggtttcatacagtttttattttcttttaaagccccctctctttttcaacatatatagctagtgaaaattttatgcttttgtgtggctatgattaaaaagcttattcatgagtataccgacatgcaaagcgaaaggtacgttgggagatagttgtaagcaagcgttgcttgggtagctgctatttgtgacccattaatttgcttgattatggaataaccaaatgacacaagacagggtgtttaacattttcatacatttcttgagcaaatgttggcaagttggtctttgtttttatgctctattcttggcactcttacatgtttagatttaaccttaaatatccaaaaatagatccattttgaacaagaagtatgcatatataataaacaggtgtttgc

SEQ ID NO: 22539 - DNA, 850 bp, Gossypium hirsutum
  Clone ID: GOSHI-09MAY01-C99059_1
gttaatggcatggatcttcgtgcacttagtgcgtgccttgttgcagttgtttgttcttcggagcaaccaccacttaggcctcttggaagccctgctggggatggtgcttcggtgatcataaaatcagttcttgaaagggccagtcaacttctaagtcatccatctggaaattgcagcatgcctaattatactctctggagggcttcattcgatgaattttttgcccttcttaccaagtactgtgttagtaaatatgagacaataatccaatcaatacataaccagcctcagccaaccacagaagtcatcggtttagaggctataaggcgtgaaatgccttgtgaacttctacgagctagtcttcctcacactaatgaatcccagaggaagcttttgatggacttttctcagcgttcggtgtccatgaacggatccagttcgcctgctggaagtactagccgaatcaactctgaatcggtaagggtctaataaagaagggaagggtagcatgcaaattttgtgaacaatgcagttgataggatgtagaatgagagaacagaggggaagaggtatgcattattgtcctccttcctctcttcttcccttttcctaagatcatgaaagttgatcgaatttattctagcaacacaaatgaatgtgtggtgtgatgggggagagttggtgattggaaattgttattgtacctgtggggagctttattttggtgctctgctttgagacgctccgttggccagggggagtcgtattattagtgggttggagtgaagatgaatgttccgttggtccccttctgagccttggaaacactccttttctatactgttccaac

SEQ ID NO: 22540 - DNA, 646 bp, Gossypium hirsutum
  Clone ID: GOSHI-09MAY01-C99069_1
tttaatttggaagattttgggaatcggcgcttaattaagattcgggttgtttttaagcctacctgcttgcttccatgaatttgatgttgaaggcgaaccctaaccctaaccctaaccctaaagatgacgctaaaaagacccgaactgtcgatcttggaaacggaagcagtgtaatttacgttcccaggtttttagcatatgatgtcgcctgggaattcttcaattacctcgacaatcacatcccttggaccagacccacccttcgcgtctttggccgatcttgcactcagcctagagacacatgttatgttgcaagtgcagggttgccggacttgatttacagtggatatcagcctcatgctcattcttgggatgatttccccccacttaaggacattttggatgcggtccataaaatgcttcctggcagtacatttaacagcttgcttttaaatcggtataaagggggtaacgactatgtaggttggcatagtgatgacgagaagctctatggatcaaccccggaaattgcttctgtttcctttggatgcgaacgggattttatcctgaagaagaaaagtggcaaatcatcccaagagagaagatctgatgacaaacctccattgaagaggtctaggaagagcag

SEQ ID NO: 22541 - DNA, 1341 bp, Gossypium hirsutum
  Clone ID: GOSHI-09MAY01-C94869_1
gactgcgaaaacgccaccgcaacactaaaaacccgccgtctcaaatcaaacgaagaaaccaaaagcttcgatggccatcgccgccgccatttccctctccctcccgccacaaactcgccgttcccccgcctccatcgccgccccttttcgatcaacttcttctcttcatttcgattctcttcgttccaacttttcttctcttaaaaaccctaaccttcgagtctctgcatcttccatgagcatcggaactccagagaaaatctccacgacgtcgttccttgaccgaagggaaagtggatttcttcacttcgttaagtaccacggccttgggaacgatttcattttggttgataacagggactcgacggaaccgaggattacgccggagcaagcggtgaagttgtgcgataggaacttcggtatcggagctgatggagtgatttttgcgatgccgggagtcaacggtaccgattatactatgcgaatcttcaactccgatggcagcgagcccgagatgtgtgggaatggggtaaggtgctttgcgagattcattgccgaacttgagaatttacacgggaagcaaagttttactgtgcatactggtgcgggattaattgttcccgaaattcaagaagacggaaaggttaaagttgatatgggttgaacaattcttaaagcatcagatgtgccctacaagttaccagcaaataaagatcaacctgctgtgaaagcagatatcaatgtagatggagtaacttggaatgtgacttgtgttacaggggaaatccgcattgtgtgacttttggcaacagacaaagccagaatttgaccgttgatgaactaaatttagctgcaattggtcctaaatttgagcatcatgaaatgttcccagctaggaccaacacagaatttgtggaagtttttttctcatgaacacttgaaaatgcgtgtttgggagcgtggagcaggagcaacactggcttgtggaaccggagcttgtgctgtggtggttgcagctgttctcgaaggacgtgctgggaggagttgcacggtggatttggccggaggtccgttagatattgaatggaaggaggaagacaatcatgtgtacatgactggcccagccgaagtagtgttttacggatcggttgcagtgtgatgattctaatattgctaagccaattttcatgtagctaaaacattgtctatttgcttggattctgtataagacaatttggtagtcttatgaattccacattctttttggttgtcttaaatgttggcttttgtttcaaaaaaaaaaaaaaaaaaaaaaaaaaaaaaaaaaaaaaaaaaaaaaaa

SEQ ID NO: 22542 - DNA, 645 bp, Gossypium hirsutum
  Clone ID: GOSHI-09MAY01-C94509_1
acttttagattctaggaataatctaggtttaaattatataaataataaaaatggcgttgttttggagagggcttattatattacctctcctatttgtgtatgcaagcagccattttatatatactaaacgacatttcgataaacccgaggtagtcgggtttaaggaccttgattacctccacggcgatggcggtggtttccttagtggccccatagaagccgatgatggtgtcaaagcttcgaagaccgtcgttgaagctgagagtgacgatgatgacaatgacgatgacgacggtgataagaagagtaaaaagaagaatgaaaagaagaataagaagaataagaaggagaaaaagaatagcaagaaagacaaaaaatacgatgaaagtttccatacattgccggtcgaaagccttgtaaacgaaaagggtggtgacgggaataccgacgattcgtctcaactcgtcggctataatgtagtgacggctcaaactacgtttaaggggagttgggaattgttcgttgaaaactctggtgtttccgctatgcatgtggtgttgcttccgaatatcaatcaagctttgatttttgatgccacggtgtggaaggtgtcaaagctgaaattaccgggaccaccatgccgac

SEQ ID NO: 22543 - DNA, 293 bp, Gossypium hirsutum
  Clone ID: GOSHI-09MAY01-C94409_1
cgattggcagagtgtggtggttgtgatggaagatgctttggagaacttgagattattggacgatgaggaggaagcgtttcaagaggttgaatgagcgatgggttacggtcatcaactttgtttggtgggtcgatgtctaacagatagtgttgtttattttccctcactgcgtaataggggagaaacaacacctttttcatttttttatgaagtggatattgaaagggttgttgcgggtataccgtggttttttaataaccatttaattatcttacaaaaagcggacgcttggg

SEQ ID NO: 22544 - DNA, 493 bp, Gossypium hirsutum
  Clone ID: GOSHI-09MAY01-C94769_1
ttagagctcgagcatggaacgtgtttatgcattactggtcaaactgctcagaaatggggttgactaaattctttgaaatgttccaatatttagcaggtcagtctgcaaagctcaatcaagctgtcaagcaagtcaatcatgtcgatcaagtccataagaaatctgatgatcgaagtctaaacgttccaccgccaccgtctccaaatggtttacggagtccgatggcgaggaacaaggcttggagttcagcagcgataaaccgagtcaactcacccaggttcagtcaatcccaagaggacaccagcccagcggagtacgagttcgacaacgatgatgactcgattccctattccccatgtaactctaggctccaacaggctcgtctcaagctccgccgcaccaaaacacataattaatttaatttgtaataaaacaaaccaaatttgtccgaagatttttttgtttcttgaataccaagtccgtaatcccactc

SEQ ID NO: 22545 - DNA, 764 bp, Gossypium hirsutum
  unsure (1)..(764): unsure at all n locations
  Clone ID: AI726545.1
agctttgttctttaaactctcttcgatcatcattctcccccatcttgttgaatcaaatctttattttaaaaaaatgggaattctgtcagaaatgagggatgtttgggtacagagaagagcaaagttcttcataattccttctcccgctgaagaacagaagaaattgagagcccagcaatcctcccaaggttttttttttttttggctcatcattctcccccatcttgttgaatcaaatctttattttaaaaaagtgggaattctgtcagaaatgagggatgtttgggtacagagaaaagcaaagttcttcataattccttctcccgctgaagaccagaagaaattgagagcccagcaatcctcccaagaaagtattcgtgccggtctcaaggctgctgccattaccggcatttttaccgctgtgcctacattgattgcagttcgtaaggttgcttgggcaaaggcaaacctcaaccatactgctcaagctcttatcataagtggaagtgttttctgaaacctatactacttaaaatttattancgttactcaaaagcaatcatattctcactagtcctaacttgtgatatgcattatttctatgtcatattaatgtatgaatccnattaagacatttgattataacagtttttctcgtcgtaatatgtcttaactgttatcggttaaacaacatcaaatgccgcttacttcattactgttaataaaaccgtgtttggaaacgctaggaagaaatctcgagcttc

SEQ ID NO: 22546 - DNA, 586 bp, Gossypium hirsutum
  Clone ID: LIB3828-009-Q1-K6-D6
gcggctcgagagccggtgaataaattttaaaaggtgatggcattggcaggcagcctgccaaatcaaattacgcctcttctctctttgttctttaaactctctttgatcatcattctcccccatcttgttgaatcaaatctttatttaaaaaaaatgggaattccgtcagaaatgagggatgtttgggtacagagaagagcaaagttcttcataattccttctcccgctgaagaccagaagaaattgagagcccagcaatcctcccaagaaggtattcgtgccggtctcaaggctgctgccattaccggcgtttttaccgctgtgcctacattgattgcagttcgtaaggttgcttgggcaaaggcaaacctcaaccatactgctcaagcacttatcataagtggagcatcgattgccgcttacttcattactgttgataaaaccgtgttggaaagcgctaggaagaattctcgagctcaatttgacaacaaaactgcttgaatacctcatccgaaggtaatgcaaaatggactgagagcaactttactatatgtgttacagtttaatgatgtcggtcacattatgc

SEQ ID NO: 22547 - DNA, 608 bp, Gossypium hirsutum
  Clone ID: LIB3828-005-Q1-N6-H9
tcgcgaactagaacctttgtatttttccatttatttcttctctcttagaaaaccccattcttgttcactcttcatcaatgccttgacagggataacaatggcgatgggactgttttattatggtcttcgagacacaacagcaacatattccaccaacttcctcaacataattcccattgtcacctttgttttctccatctttttacgaatggaaaagctgggattaggcagcaaagcaggcaaaatcaagactgtgggtgcaattatatgtgttggaggagcgctgacaacgagtctttataagggaaaagcgttctatctcacgcatgatcatcatccccattaccactcacctgctgttgctgctaccatggcagtctcgagtcctcactggactcgtggtactttcatgcttgttggtagttgcttgtgctatgctacttggtacatattgcaggtgaagttgctggaagtatttccgtcgagatatcgggcaacgctgataacatgcatcatggcgtccgtacaatcaacagccataggcctgtgtttagacaggaataaggctgctttgcagaatagagtgggaacttgcagctagttactat

SEQ ID NO: 22548 - DNA, 590 bp, Gossypium hirsutum
  unsure (1)..(590): unsure at all n locations
  Clone ID: LIB3828-019-Q1-K6-C11
gtcgccgctctctgtgtcactccttttgctttcttactagnaagaagttcattcaaataagaggctgggtcgacatggttatggctcttcatcaatgcctcgacagggataacaatggcgatgggactgccttattatggacttagagacacatcaccaacatattccaccaacttactcaacataattcccatcgtcacctatgttttctacatctttttacgaatggaaaagctgggattaggcaacaaagcatgcaaaatcaatactgcaggtgcaattatatgtgttggaggagcgctgacaacgagtctttataaaggaaaagcgtcctatctcacgcatgatcatcatccccattaccactcacctgctgttgctgctaccatggcagtctcgagtcctcactggactcgtggtactttcatgctgagcggtagccgcttgcgctatgctactaggtacatattgcatgcgaagtagctggaagtatctccgtcgagatataagacaacgctgataacatgcatcatgggagtgcgtacaatcaacagacctaggcctgtgtataaacatgactaatgctgctt

SEQ ID NO: 22549 - DNA, 795 bp, Gossypium hirsutum
  Clone ID: GOSHI-09MAY01-C94349_1
gagcactcgtcaagcagtcatatccattcatttaaaggcaactaggttttcagttactgataatcaatcaatgtccagtcaattgaaagaaatcttgggcaagcacagcacagttgggatagcaaactataaccatgtccaattcggctcccgaggccagaaactgacataataaaccaaaataaataaatgaaactaatataccaatgcgatggcaaggattgcaactcacaacaatccacgggtgaaattagaatataaatacataatttgagtctggaccaccagattactgaagcctctcaaaagagagaccaccatctcctacccctgctgcccctttggtttagtgatgatgcatttgcaacctgaatttgatgctggccccatgacggtattgatcctcttcttccaattagtggcttgcctaaccataagataagaacaacaccaataataccagcaacgggagcagcagcacggaaaagccagtctctaccaatcctccctggaagagctattgatggtaggatccacatgtggcacatcatgtgattgatgtggaccaaattcagaagcttcatctgcatcagcttcatcagagttctcagaggaactgtcctcacttgcattttgctgctggctttcatgcatcctcatcctactattcaattttgtttcccttgttcataatttgtaacacaaactcccctcgcactccccccacagtagaagctcaagcggcaaagagggcatgaattccgtgcactcaaccaggcaagatacaagaagggt

SEQ ID NO: 22550 - DNA, 557 bp, Gossypium hirsutum
  Clone ID: uC-gsronu33B154e11b2
ccctctcgtccgcccaaattgagcctgctaaaaagctggatatgaacaactatttgattggacaagagattctgtcattagctgaaacagatgttcccccagaagatcttgtcttccacaagttttatatgaacaaaatgaattcctcgaagaaaccaaagaagaagaggatcaataccgtcatggggccagcatcaaattcaggttgcaaatgcatcatcactaaaccaaaggggcagcaggggtaggagatggtggtctctcttttgagaggcttcagtaatctggtggtccagactcaaattatgtatttatattctaatttcacccgtggattgttgtgagtgcaatccttgccatcgcattggtatattagtttcattatttattttggtttattatgtcagtttctggcctcgggagccgaattggacatggttatagtttgctatcccaactgtgctgtgcttgcccaagatttctttcaattgactggacattgattgattatcagtaactgaaaacctagttgcctttaaatgaatggatatgactgc

SEQ ID NO: 22551 - DNA, 796 bp, Gossypium hirsutum
  Clone ID: GOSHI-09MAY01-C94269_2
aaaataaataaataaatttaaaacccaagttttataacagtccaattacatggccaataataagtcctattacaagcccaaagacccaaaacagtccctctggcccaaaccagtggcccaatatttaaaacgagcccaaacggccctgaagccaagccaaatctcggcaaaccctagggcaaaggggtcctcgcgccgcagccttcacaagcagcaaccacatcgcgccacgcccaccctccgtacgatgccgacgtctcagcagccatgccacgcccaaaccatcgtacctgagcgcgcacccgtacctgcaagaagacaaacaaaataacagcaaataggaaaaagaattggtattcgtatttttatttttatttttgggatctttttgattctgtttcggctataaaagccatgtaatagcctaggtattttttttgaagcaaccaaaaaaaaaaaacaaaaatacaaagacatattgtaagaacacgcatagaacacaatcaatcgaaaagcagagaaggtggttttccctcttcttttaatcccctgttcttatacctatttcagttgattcgttttcattttacatcaaaaaaaaagaagggtaacgccttccctagaaaacgcgccacgagatcccttcctcttcgccggaatcgaactgtagagggggtcttaagactgaaacagggactccaaagttcgaacggcttagtctccattcatggtggtagaccggagtcaagaggaactcttgggattcggctaaggagcacaaagaggggaggttaaa

SEQ ID NO: 22552 - DNA, 720 bp, Gossypium hirsutum
  Clone ID: GOSHI-09MAY01-C94269_1
gtttttgacaattttggcccgagcccgttaaaaaccccaaatataaatataatatgtacaaataaataaataaatacataacttcaaccacagtccattagtgtcctatggcaagcccaaagacccaaaacagtccctttggcccaaatttagtggcccaatacttaaaatgagcccaaacggcccgaaagccaagccaaatttcggcaaaccctagggcaaaggtgtcctcgcgccgcagccttcacaagcagcaaccacatcgccccacgcccaccctccgtacgatgccagcgtttcagcagccagcacagccccgtacccgagcgccacgcaccgtgtacttgcagaaaagggacaaacgcacagcaaaacaaacaaaaacaacgaagaacattgtattttcgatttttcttttttatgtttaccccattcggctataaagccaggggatttaatcagttgtaaggttttttttttacgcgcaaatatgcaacaaaaatcacgaaagcaatacaaagtaataaaaaaggtgactttcgaatcaaaaaaatccctcaatactttactccctccgtctctttttttttctttcgtgggtttgtgattctggtactcgaaaaagagaaaggaataagaggcttacctcgcgagttcgccgttaactcctccttgcttcgccgaaatcgagggcagaggggtcttgaggctgcaaatgct

SEQ ID NO: 22553 - DNA, 735 bp, Gossypium hirsutum
  Clone ID: GOSHI-09MAY01-C95999_1
ggagaaatggggatattatattacgaacttgaaaccaaagctcaggaataattctctgactcagtttacaattcttgagcttcatccaaatctgctcaagttctaaaaggtaaattcagatctagatccaagctcatatctaggcttgtgctaaaaatatgaaaattagtaagccactgcgaagctgccactggatggaaagcaggaggcttcatgccaaaggacattttcagccaccagcagcaacaagatggcggttcaaacttcaaatacaaccatcttgctttgattaatgaatccactatcttgtttcatctctccatcccacaagaaccgaggatacttactccagctcaagtacataatttatgtaattacattaactaatagagctgaagcagcagatgttcccttcaaattttagataatccacgcttgcttgcatctcttcttcaatagctttaaagcgcatacatccttttatattcattattcaggatctcagaatccgaagccacagacatagagaaagaccgggaacgactctcagctttccttatgctccttaactttgactcctccattctatgtaaaatgacaaaatagcacatcgagccaattgtagtaagcatgattgtgctgccaattacagttgcacacacagcaagccatctagactcttttcccaccaccacgtaagtcagcgaaataaatgcaactgaaatgaaaaggcat

SEQ ID NO: 22554 - DNA, 332 bp, Gossypium hirsutum
  Clone ID: GOSHI-09MAY01-C95959_1
atggaaacagcttcacagtctggtgaacgtgaacttgccgaggagttgcttgtttacttcattgaacaggtactgaactcattccaaattacataaaaatatatatatgctgactgattatctgtttggactttggaggtagaaagcaatacacctttttggccaattgctactcctaattatgttattgtgctctcttccacttgttcctttccggtgcaaatatgagttatgcttttctactctttcttcttgaaatatctgtgtctgacacttatttccagcgcatatttggacacggttaatgggatatgaccttccaaggactgttc

SEQ ID NO: 22555 - DNA, 586 bp, Gossypium hirsutum
  unsure (1)..(586): unsure at all n locations
  Clone ID: LIB3825-004-Q1-K6-E11
ggagggtcaacggggngtgaaaaccggccattttggtgcagggnaagcagccatcgggcgtcgtgcgtgccgagggcgcacatgggaggggggtacggcgtgagggtgacctagggtttccattctcctaaacatgagtttaggtcttgggctaacaggcctaatgtgtaatgggttagtggtttaagttaatgggtctgtaaatggggttttggaaaaatgggccgatttaactttgtaactagacatttaatggtcttgggactttatttggttatttttggtttctaacgggccgggccaaaatagggctcttacacatgcaactgtcataccacttaatcggacaattttgtatttgtatgagagacataaaaagaaaaaaagaaagaaaaaaaaagtccaacagagctttgtccgaatctcacaaacaaaaagatacagacagagaaagagaatcaaagtttgagttttccccttttttttatttttttttctgacaaaagttaagattgttgtagaaaaaaaacaagaaaaaagaacccgaaccctgtttttagtttttttttttactctgcttgctctt

SEQ ID NO: 22556 - DNA, 511 bp, Gossypium hirsutum
  Clone ID: uC-gsflnu33B144c04b1
gattaacttccctcccgatttgtgctctattaggggttgaaaagaaaccgatcgtcaccgtcatgcacaataccaccgagggcggtggttgaggccgtgcgaagggattttttgactctggcttagggcacccgaagatggtgctttacttggctcgagaactcgagagaataaacctcctttttccttttgggaatcggtctcaacgacaaaacaggggctccgacgaccgacaaccggctccgggtttccaggtccatggagggtcaacgggggtgaaaaccggccattttggtgcaaggaagcaaccatcgggcatcgtgcgtgccgagggcgcacatgggaggggggtacggcgcaagtgtgagctagggttttcattttcctaaacatgagtttaggtcttgggctaacgggcctaatctgtaaagggggtaagtggttaggttaatggtttataattgggttaaaactttttgtaagtggactgatattttttgggtttttattt

SEQ ID NO: 22557 - DNA, 681 bp, Gossypium hirsutum
  Clone ID: GOSHI-09MAY01-C95719_1
ccaccaattgttttgtatgtaaattttttatagatatattaagtacatgattttttttcacctacatctagagtctgccacattgtcaatcctcaaaatgctatacaattgcaataaattagagaacaagagctgcataaaatcttcacacagcctgaagaagttgaccatcttcgttataggcaatctttggaggcgatctcatcacctttacccgcaatgctgccttcttatcggaaccaaactcaataacatccgagggtcggagtcgaatagcaacatttgaaggtatccaagatcttctcccttcatgctcgatataggtcccatgttcactctgcatgtcaattaggaagaatgcaccttctttatagatgatttgagccatgtgtttttgatacctgaggtgaacgtatcaccactgattttcctggaaaattctcattcttttcacttccgatcacaaacgatttgttctcatccctacttaaacaaataggttgtgaggtagctgcttcgttcccaactgacaataagaaccactctccattaatagtctgctcgagtgcgtcattgtcttcaaaccatgtctgcaattggtcacttgccttgtctgagagtctgcaacttaaggacctcccttcaagatttgagctgttaccacctaagacccaattgagc

SEQ ID NO: 22558 - DNA, 949 bp, Gossypium hirsutum
  Clone ID: GOSHI-09MAY01-C95629_1
gcgaattctagctgtagagctccagcctcctaaaatagggtcctaaaataatgatgtgcttgttgtggtctgtctggcttctgctgacataaactgtctttaacatcagagaacgcacagttgcttcccttatttcattgggtgcagctcccggagcattaacagatccaacaccagaatatcctttaggcagaacgcctgctgacctggcctcagccaacggacataaaggaatttctggttatcttgctgaatgtgatttgagttcccatcttctatccctcaatttggataagcaaggcagtgccagtaccacagattctagaccagatgtcatacagaaaattttggagctaaacacagctccactcaactatggggatgcttctgatggcccatcactaaaggactcattagctgctgttcgtaatgccatgcaagctgctgctcgcatccatcaagtcttcagggtacagtctttccaaaacaggcagttaaaagagtatggtaatgataaatatggcacgcctccggagcgtgcactttcacttttagcagtcaagtcaaacaagcccggacaacatgatgagcgcgtgcatgctgctgccagtcgcatacaaaataagtttcgtggttgtaagtgcagatattagatttttttaattctttttcgctattgttatattcatttcttatttttaggttatcctttttgtaatactattattattttttcattcttttttctttttcctcttttttttttatatatttttatatttcttttatcatcatacctttttctattttttttattttattatcactcttttttttatttttattttttattctcttttcctttttaatattttatctaatttcttctctttttctttttatctttaatatttcattcttttttttttctctttttattttactcttt

SEQ ID NO: 22559 - DNA, 715 bp, Gossypium hirsutum
  Clone ID: GOSHI-09MAY01-C96819_1
atcaaatttaaacctcataattctttcattaatgaaaacgatctcatctgtatctttgcaaataatgtaaaacccctttttatcaacaaatctatacatgcaaaattgatgccaagcaaagtttcaatattttgaaaatgctcaaattaatcgtcttttgaatcctctcctagaaggtcttcatatgaaacagggaccctaattctatcatgaacagatttgcgtgctccttcggcacggaactcttctgccgggtcattaggaataagtccagcaccttgtggaacacttgctgcagttccattcgagagtgtagtttcttgagaagagatctctttcctctgtgctggtgcttgtctgacattttgttgcttaaagtgcttctcaaattccttggcctttttcattatttctcgataagcagctggttctcgtgcttttatgatattccataatatgccaccacctgtccgacatcgtcggccatcagcagtcatctgacctccacaagattgaattgcatccacctctgtaccttgagctccctctgccctccccccctgacatcccacagcagtgtacaccatgtatgacttcttctcttttaaccgtctacaagtatctaacacgaacctgtttatatccaaaggtttatgtcctgaaccactcttttttttcttgttcttcttcttattacctctccgcttcttatttt

SEQ ID NO: 22560 - DNA, 544 bp, Gossypium hirsutum
  Clone ID: uC-gsflnu33B111d03b1
tgtgaaccagctgcttatcgagaaataatgaaaaaggccaaggaatttgagaagcactttaagcaacaatatgtcagacaagcaccagcacagaggaaagagacctcttctctagaaactgctgctgttttttttttcatccttttaactcagtccctgaaaattgagccgttaacgtcaacccgattcaggcggaaccgtttcctcactcaaaatcctcgcacaaactcagcagttaattaaacacttcataaagttgagtcgctttattagcacagttgccgttatagtgataatcaaaggtgttgattctgtaggaagaaggaaaaaagtaatggagaaatctgtttttgttaaagatgtacaacaactcaatggaaatctccaccattctttttcctctgtttctcaaagagatgtaacttacagctgtggttcttgtgggtatgagctaaacctaagttcctctagtagaaacaccgcaacaatcggctctaaatatggaaaattgattaagcgagggatgatatcattcttcaatata

SEQ ID NO: 22561 - DNA, 625 bp, Gossypium hirsutum
  Clone ID: GOSHI-09MAY01-C96589_1
aaacaaaatgaacattgtacatcatcaccagaaaagaaaacaccatccaatacaataccataaactgttgtaacagagttcatatacttctacccgaagcatacaatgaaccgaaccatatatatttgttccgaaagcatgctccaaagctatctagaaatatcaaagacgagccaattccaaatcacaaacaagacaagatataatattgaaccatgaaaaccctccgcaactagacatattgaaagacacatgtatccagggaaaaaggttattattcccccttaattctgttcatagtatgaggggaaaaaggtatcaacctacgtgaagaaagctaatacaaacaaatgaatcataaagaccttctagtccgccattttagccaagcgatggacagtacttcttgcaattctattaccaggatcaatcttcagaacggttctcagatcttctgccccaagcttgtatttctccatgctttcgtacaagagtgcacgctgtacgaggacagacacattgctctcatcgtgctctaacacctttgaacagtcagctacagccttcttatactccccaacttctttatagcatgaagccctacatgataaagcctccgtagtgc

SEQ ID NO: 22562 - DNA, 603 bp, Gossypium hirsutum
  Clone ID: GOSHI-09MAY01-C96679_1
agcgccgctctcgatctatgttctagatcgcgagcggtcggacacaccaaaatgaatggagatttccattaccatcaaaaataaaattacagggttaaagtttcatgttccattaacagcctcataacagaatttgactatctaaagattttccaatctcaccaagacactaacggaaactaatagtctacactagtgacaaattacaaccaatatacaacacaaattctatcagattttaatcctctaaatgctgcaatgcaagtagtctcactgtgataatttggagttacttcaccttgtctgcactcaattaagtacttgtcatgttgcaatcacaaaagaatcaaagcaaaacatgggcttgatacccgcttgacagaagccatcagaatgaagagtcataaagcccagaatggttttcgaactgcatccgcactgttcttattatttagtgattcatcactgctctcctcggaatcatcatcttcgtccccatatgacattaactgcatcaaggtgtcagggacagcatcaagtttagctttactggtaactttgatcttgtcatgcaatttcctaggtgatgtggaggatgtgaac

SEQ ID NO: 22563 - DNA, 186 bp, Gossypium hirsutum
  Clone ID: GOSHI-09MAY01-C96619_1
ggcaatttggagctgatggcaacgaatgtttcattaattataacccagttagagtgtcatagaatgttcatatatagctttctgtatggccctttccttttccttttttcccttttaaggcggtaaaaatttctcccctatactctgtaaatacaaccaatctactcttttttcctcctcccctgg

SEQ ID NO: 22564 - DNA, 607 bp, Gossypium hirsutum
  Clone ID: uC-gsronu33B012c07b1
tccacgcgtccgagctgcaaggctgtgagtggcagctaatgagaaggcagaggctgagaaaattttgcaaatcaaacgagctgaaggtgaggctgagtccaaatatttgtcagggctgggtatcgctcgccaacgacaagcaattgttgatggtttgcgagatagcgtgcttggattctccgttaatgtcccggggactactgcaaaggatgttatggatatggtcctggttacccagtactttgacaccatgaaagaaattggtgctgcttgtaagtcctcagctgtgtttatccctcatggtcctggagctgttcgtgatgtcgctactcacattcgtgatggactcctccaggccacacaccagtaactatatgattttttcttaagacaagacaagacaagcattagtagttttttaaggataatacctggttttaacgtttacctgtttagttctggatgtcatttttacattatgagcatctgttgtacatatggtgtgggcataacggtttgtgaacgcataagatatttatactctatagatgtgagtgatcttatatggatattctggttctatgtcggcatgatgaggatgacaatc

SEQ ID NO: 22565 - DNA, 235 bp, Gossypium hirsutum
  Clone ID: LIB3825-007-Q1-N6-C8
gaaccaagaaaaatccataataaagatcactcaacatctataagagtataaaatatcttacgcatttcacaaaccgtttatgcccacacaccagtaactatatgattttttcttaagacaagacaagacaagcattagtagttttttaaggataatacctggttttaacgtttacctgtttagttctggatgtcatttttacattatgagcactgggtgtgcatatggggtgggc

SEQ ID NO: 22566 - DNA, 951 bp, Gossypium hirsutum
  Clone ID: GOSHI-09MAY01-C96119_1
tcgcgatccccgcgtccgattttttatgcagaaattcagaaggaaagggatgaaaatcttaagctgaagtgccaacttggctttcgaaccaagttggtcgaagattatatatcttgtaatgataacgatatggaacgaagtagcttgttgaatgaaatggaagggccgaaagagaatgtggcttgccaagatcttattgaactcgagaaaactacaagcaagcagattgctgctctaaagaaagagttggaggaaaaatcagaagcgttgaaagatatggaaaaccaaaacagttgtctaacggtgaaacaagtcctaactaatcaagagctgcaagatgctcgaaaagaatccatacgtggcttgaacgattttctgaataaccagacaaatcttaagagtgaacagaatgggagagattgatcaaaaagcattcaaagttgcttgctcgttgaagttccaggacgaagattggcgagaaccgtgtgctaaagcatgttcattatggcaacataatgtgcaggatccgaaatggcacccgtttaagatgatcaacatccgaggcaacttgcatacaccgattgctcagaaaaccgaaataatagacaaggatgacgagaagctgaaggagttgagaaatgaatatggtgacacggcgtacgaggctgtcagcactgcactgatggaaatgaacgaatataatgccagcggaaggtatttggtcccggaagtttggaacagaaaggagggaaggaccgctaccatgaaagaaatcgttcagtacgtaatcgagcaactgaagattcacaagtgtaaacgaaagcggcgattttcttagtgctgagcttagcagtccattgctttcatggaaaataagtagaactatacagaattcttaggtaggtattaaattttagaattatatttgacattaaaaagagccatttgttc

SEQ ID NO: 22567 - DNA, 561 bp, Gossypium hirsutum
  Clone ID: GOSHI-09MAY01-C96349_1
attctacaatgaccaaatattattgaactgttttaacttttttttttaaacccttctacttaaacaggtcagtgagtcaaaagctacaatttttttttctataaagtccatgaatatgatcttctcaaaatgggcttcatttgtttatcttcttcaatcgctatcatacctaagtgagatgggtcttccaacatcatcttcgccactaagtaaccagcaatcgaccacgtttgagctttacgtgattgcttaccgatgtatcggcccagctttccgtcgtaatattctggccaatggtctttcagcaacctggcttcggctatttcgatggcacgtcttgcaatttggggacgtccagtcttcacacaagcggctgtgagaagccatagtaacactggccatgatcctccattgtggtaactccaccgggtgtttttggggtcacatcctgttataatccgccattcatgagtttccatggctggataacaaacctttaacggcatttctccgaccaactcttcccagcgtgattctataagatccatgatggcagttgat

SEQ ID NO: 22568 - DNA, 660 bp, Gossypium hirsutum
  Clone ID: GOSHI-09MAY01-C96379_1
aatgaagcaacttacagtctttaaaatttaaagcaagcctttacttacaactgtatttccaaactggaatgtctatgtattgggtatattggtttcagatcttctaatcaaacgtaacaacaaatataaaaataacatcatggattacatatcaatctccgtcttcagcagtaaaatcaggttccggaggcttttgtagtttcaccaactcctttgcgctcttagcgttccggttccgatgaatgccacgaagtgcgtttgcagcaaacttggaagctaagaaagtagcaccgatgctgtatgaacctccaccgctgttattgcgggttccatctgatcctgctgctgctgcttcctcttcttcttccttacgacgaagctcctccatgatcttcctcttggaataacgccgccaagcagcttggataaagcaagctgcccaggttctccactgctgtgaatgaaaacggaatgtatgttgtacctgtctactgtgaagacgcctgaattgaccggcaacaaattttaattcctcagctatgagggcaaaagcttcgacctcagttaaagccttcactgtccgagtagatgttggaaggctagcaccggttttgggatccaatgcccaagttagacggacgcgtgggcggacgcgtggaa

SEQ ID NO: 22569 - DNA, 290 bp, Gossypium hirsutum
  Clone ID: uC-gsronu33B178d04b1
tcttctcgtccgcccacgcgtccgcgttccggttgggatgaatgccacgaagtgcgtgggcagcaaacttggaagctaagaaagtagcaaaggagttggtgaaactacaaaagccttcggaacctgattttactgctgaagacgcagattgatatgtaatccatgaagttatttttatatttgctgctacgtttgattagaagatctgaaaccactatacccaatacatagacattccagtcttggcacaaaaagcttacatggatatactcgctgggaacttgccacat

SEQ ID NO: 22570 - DNA, 539 bp, Gossypium hirsutum
  Clone ID: LIB3825-033-Q6-N6-A2
agaataaatgattaaatcgtcaagtattaaagatgctcgaattttgaagaagaaaaaaacatgtaatcaactgctcttaactgcctctacaagacaaatatgttacaatgaacaaaacaatgtgtattaacaaatacaaatgcctatcaacaaatacacctgttttctttttcacatcataaaacccggaaccggagaagccgaccagctccatgatttacatgttgggatcttttacactttccaaaatggcatcctcttccagtttctaacaggaatcatatcattcaatgctttccatacatgatcaatgattctgaaacaccattaggtgccatcccttttttaacatttcgattctttaaggtttccaagagtttacttactataccgatcttttcttgtatcggctttgcacaaggcttaacaggaagtccgtaaatatatgttcgtaaccaggcattttcccgtacccgggaaagtagttgatgtcgatgacgtaaaaatgatccctccttccatgttcccggataatatct

SEQ ID NO: 22571 - DNA, 466 bp, Gossypium hirsutum
  Clone ID: LIB3825-008-Q1-N6-H6
gctcgaatctaggaagaaagaaaacattaattaaccgactttacaagacaaatatgttacaatgaacaaaacaatgtgtattaacaaaatacatcaaatgcctatcaacaaatacacctgttgtcttttttacctggaaccggaaaagcccaccggctccgatgattaacatgttgggatcttttgcactttccaaaatggcatccttttccagtttctagcaggaatcatcattcaatgcttccatacatgatcaacgattctgaatcaccatttggggccatcccttttgaacatttcaattctttaaggtttccaagagtttactttcttgtatcggctttgcgcgaggcttaacaggaagtccgtaaatatatgttcggacccaggctttttccctttcccaggaaagctgtccgtctcgatgacataaaaaggatcccttcttccatgtaaccggaaaata

SEQ ID NO: 22572 - DNA, 836 bp, Gossypium hirsutum
  Clone ID: GOSHI-09MAY01-C96329_1
atctcaaaaagctgttgcaatttaagaaaacatctgattcaacaagaaatccatactcaaaatgatgctttgatgcttaaggatttctatacaacacccagagaaatagaaaaagcaatgcaaaaaatgtggtgaaaatgaatgtaaaagaagttttgaccacacaacaaaatcaaaatgttagagatggttagctactaagccataagtaaattaacctgcttgccactaagaatttgatagctaagtcaagtgttttgatactaccaacattttcaactaatacaacctaccaagataattgtatataataatataattttcataaagaaaggcattttagaagttcataccttgagctatgaatggcttaacctttcttttctacatcaactttcaccatactataagccatcatcaagtagtattttcatcttcacgtgtttcacccaccctgattcgcttcgttgaaccggtagaagctttagttggtgcaacagctagtcgtttcaggcggtaactaacaagtgagggaccgaaaatgctgtactttccggaactgctgaaggccatttctgcatctgctcggcttttgaaaaccactttgggctcgggtgctcttttttgaacacttcagcacctggtgaaaccaatggcccgtaagggctaaaggttttattaaggtcttctaccgagggaactgaatcgatgtctgaaaagttcagaatcagggcagttggagtttgatccttcgtaaaactttcatctgagtctgctatctgctgcttcttgtttctgttccaagaatttcacctccactgtatgtttcggttcag

SEQ ID NO: 22573 - DNA, 827 bp, Gossypium hirsutum
  Clone ID: GOSHI-09MAY01-C97969_1
acgcgttcgggtgaataaataaaatggggggctgtctaagttttcaggccttcggctgcttaatttttttctcttgtatgctattctgctcatacgcacccactttcgcattaaccgacgtctaacaatcttacatcgctcgtggtcaactattggcactccgtgagaatcgtaaactccccgatgggtatgaatatactgtgaaaacgacagagaaattcgagaatgtatggcttaggggggctttcattgctcttcaagcatggaagaaggctatgtactctgaccccaagaacatcacgagcaactggtttgggcccaacgtgtgtgattacaaaggtgtttattgtgtccgagcaatggatgaccccaaattaaaagttggggctggtattgatcttaaccatgctgacatcgccggttaccttccggtggagttggggttgctgaccgatgttgctttgatacatttaaactctaataggttttgtgggatcatccccgagagcttatccgagcttacacttatgcatgaatttgatgttagtaacaaccggttcgtgggggctttccctaaagttgtactgtcatggccgagcgtgaagtatattgatctccggttcaataattttgaaggttgtttaccacctgagctcttcaaaaaggatctggatgcattgtttctgaacgataatcgcttcacttgcaacatccctgaaacaatcggcaaatcgaccgtctccgttgtgacattcgccaacaacaagttcaaaggatgtattccacgtagcattggaaagatgtcgaacttggacgagatcattttc

SEQ ID NO: 22574 - DNA, 402 bp, Gossypium hirsutum
  Clone ID: GOSHI-09MAY01-C97469_1
cctactgttcaatctgccactggagcttactgctacgggggccaacgttatggatatgggggatatgggaggcaatcgatggatcttatgggaacgctggttatggggctgctggaggtcggtctggtggtacaccaaatagtaatgctagtgcacgtgggggagatctacaagggtgcggtggtggttacatgggaggtggatttggtgatgtggcgtggaggttcagggtatggaaatgcatcactggaggtctgattcatcccaacgttcaggatattatgggggtcgtcaggccaatggtcctcatggtggacaaggtggctatggtggtgggtttggtggtgctctgggccgcccgctcaaccgcggtgttcctatcggttgaacgacaccttgatc

SEQ ID NO: 22575 - DNA, 655 bp, Gossypium hirsutum
  unsure (1)..(655): unsure at all n locations
  Clone ID: LIB3828-006-Q1-K6-D10
cggccgcgtgggcttcttgctgggttctttgtgtatttcattgtcattttcttttcatcaccccctgtcaatgtnnnnnnnnnnnnnnnnnnnnnnnnnnnnnnnnnnnnnnnnnnnnnnnnnnnnnnnnnnnnnnnnnnnnnnnnnnnnnnnnnnnnnnnnnnnnnnnnnnnnnnnnnnnnnnnnnnnnnnnnnnnnnnnnnnnnnnnnnnnnnnnnnnnnnnnnnnnnnnnnnnnnnnnnnnnnnnnnnnnnnnnnnnnnnaatcacaactccgaagatatcaggcatttgaaggtaagcttggtctctcatctttagggaacccatcttagtctatacacatttcagaaagaagaaagttttgtaaaattagggtttctttgcttgccattgccacaatatggtataaacaaatagctgaatctttgctaaaaacttgtttttctttgataaccatgaaccaaaaaaaaaaaaaaaacttttgaatgagtcagtcaaaatttgatcgtgtatatcttattccatccatggcgatgtagttcatggnaagaaaaaatatatattttacgtttcttgatacatccatacatcagcgcgcgcacagacatctccatatattctttccacttctgtatataaaaatttaacttctt

SEQ ID NO: 22576 - DNA, 417 bp, Gossypium hirsutum
  Clone ID: uC-gsronu33B154d03b2
cacagctttacgttgagaatgttttgacaagcgagagggagagaatgagatgctgtaatattgaattcaaatacctgatgcattcttcccaaactttcgtctatggaggaattcttcttgctgggttctttgtatatttcattgtcattttcttttcatcaccccccggtcaatgatctcaactccgaagattatcaggcatttgaaggtaagcttggtctctcatctttagggaacccatcttagtctgtacacatttcagaaagaagaaagttttgtaaaattagggtttctttgcttgcattaccacaacatggtataaacaaatagctgaatctttgctaaaaaaaaaaaaataataaatataaaagcattaagttttgataaagggaataaaaaaatttatttttattattt

SEQ ID NO: 22577 - DNA, 344 bp, Gossypium hirsutum
  Clone ID: GOSHI-09MAY01-C97349_1
cgaaaaaaccttttaagggaaaccattgttgatttcttcatcggttacgtgatcgaatagtcggtttatcgacaccctcctcattattggtcgacaacaagtagaaggaaaatatcttccttgtagattcaattttgtacttgtttgcatcagtttgttcttacaaatacttggtccaactgatatcagttttcttaacccatgtatttgataatattactaagggataatttcgctaaactcattaagttattgtttatattcttaaattggtccttcaagtagacttcaaaacattataattgagccttttaagtgttagtcttttaaaaaataaatatatt

SEQ ID NO: 22578 - DNA, 635 bp, Gossypium hirsutum
  Clone ID: GOSHI-09MAY01-C97379_1
cccggttcgcccagtcttcgaaggaacttttcctcataccgctgctgctggctggcgtagtcagtattttgtactggaggttttttgatgacctccgaccctacgccgttgttcagtttgttccttgcattgtcatccccctcatggcaatcttgttgcctccgatgtacacacattctacatattggctttgggcggcaggattctatcttttagctaaggtagaagaagcagaggataaagtaatatccaaatggccccctcatattgtgagcggacacccccttaagcacttgtgtgctgccatggttccggtgtttttgacacttatgctggcaaagaggacgactgaaacaaacaggataagcctcctgaagacatggaaggtttcatggacaaaggtgaatgaaaatggtcccagggtggaaagtggggagtatgttctaccccagtgttcaatctgaggattcccattgacttgctattctcctattttctttctaactaaattccatgcaccaatagaaatgggtctattactttgtttgggaatttgaacaaatttggttactcaagagtaactgccaaatgtctgtaaatacttttatagcaaagaaagttaccccttatttttt

SEQ ID NO: 22579 - DNA, 618 bp, Gossypium hirsutum
  Clone ID: GOSHI-09MAY01-C90819_1
ggcggcacgaggctaaatctctctctctcttcaatggattccctcaattcttaaaacctttctccattgttttccttttcatcttccatgatctcagaccagcgcccaccgccccaaagctccctccttttctttttcaccttctctccaccatggtaaccaccatccctcaaaccccaaacaccccaattcaaagcgttctcattgtcggtaactactgccacgatgtccttctccaaggcggcgccgtcgtcgccgaaacccttggtggagcagcctctttcatctccaacgtccttaccggcctttccgtttctttccatttaacctctaaagttggggtcgattttaaataccctgttaaccacgaccccatcgtcggtccccactttccaaaaccaccgtcttccacgcctatttcgaccagggttatacgaaaatgctcatcaggaccgggtcttgaaacgggtcgaagtctgcgatccgattaatccatcggatctacccgatagaaagttcgatttcggaatggcggttggggttggcggggaaatattaccggaaacgctggaaagaatggtggagatatgcgacgccgttttcgttgatatccaagct

SEQ ID NO: 22580 - DNA, 777 bp, Gossypium hirsutum
  Clone ID: GOSHI-09MAY01-C90709_1
ctactcgtccgtgataaatcatccccataccgtgagctagcagatttgtcaagttctagaagcctgaatttgagtaggagcttgagttgtagagcagatgtcatgaggggtacatcttctccttatgccgaccgaaaacattttgaaagcaccccgcctaatggatgggagaaaatttttcctggaagaccacatggttatggaaagaatttccctttattaaattatggggccaataatggagtgctctcaaggaataattctcaatcttctcttgggagtgcttccatcaagacttctgtggatgaggatataactagcattcaatcttttgttgcaggatttaagaagcaacttgctaatggtcagattcagagcacggaacttgaagtagatgagtccagaaagagtatgaaagatgtaggattggacccaatgcatgacgcatcaagcactcctctgcattggcctcaggaattcgagaggctgcagagagcaatacttgaactttggcaagcttgcaatgtttccttggtccacagaacatatttcttcctgctctttaaaggtgatccagctgattccatttacatggaggtggagcttaggagacttaccttcctcaaagaatcattttctgaaggaaatcaagccgcagaagatggtcgcactcttacactggcttcaagtgtgagaagtcttcaccgtgagaaacaaaccttgagcaggctgttgcgtaaaagatttacggaagaagagagagagaaattgtataag

SEQ ID NO: 22581 - DNA, 1393 bp, Gossypium hirsutum
  Clone ID: GOSHI-09MAY01-C90639_1
ctggtggatcattatggaaagaaattagaagacatagaggagaatatgagattagagcgatctgaagtttcattggcaacacaagaagttcgagcagcttttgtctctttcaagtctcggtatggtgcagcagttgctttccacatgaaacaatcaattaacccaacagagtgggtcacagaactagctcccgagccgaatgatgtctactggcccttttttttcatcatcattcatgagaagatggctttctaagattgttgttattgttgcatgcatactactgacaattctattccttattccggttctggttgtgcaaggcctcactaacctaaatcagttggaaatttggtttccgttcttgaaaagcattctaaccataacatttgtcagtcaggtaattacagggtaccttcccagccttattcttcagttgtttctcaagattgtgcctccaataatggagttcctttcctccattcaaggatacatatgccacagtgatattgagaagagtgcatgtaacaaagtgctatggttcactatatggaacatattttttgcaactgtattttctggatcagttttgtatcaggtttctatcttccttgatcccaagcatatccctgcaaagctcgcctcagcggttcctgcacaggcttctttcttcattgcttatgtggtgacgtccggatggacgagtacttcatcagaactttttcgcataatccctctcatttggagtctgatacgaaaacccttctcttgttgctcagacgaagagtttgaagttccatcgattccttaccacagagacattccaaggattcttttcttcggacttcttggaattacatatttcttccttgcaccattaattttgcccttcctcttggtgtacctctgtcttgcttatatcatctatcgaaaccagttcttaaatgtatatgcaccgaagtacgagaccgcagggaagttttggccaattgtgcacaattcgatgatattctccctcgtactcatgcaagctattgcaattggactctttacactgaagaagctcccattagcatcaacgttaattttccctcttcctgtcctcacacttctcttccatgagttctgccggaaacgtttcttgccaaatttcttcgcttaccctgccgaggttctgataaagagagacagggaagaccggtatgtatccgaaaatggccgatttctacgataacttagtggctgcatatcaggatcctgccttgctaccaattcagttttctgcaaattctgatagtcttaatagccctcttatatctgctgctcaagttcgacattagccatcggatgtatttgagaaaagctatacttaatacctgcttggaacttattt

SEQ ID NO: 22582 - DNA, 354 bp, Gossypium hirsutum
  Clone ID: uC-gsflnu33B070g04b1
tccctgcaaagctcgcctcagcggttcctgcacaggcttctttcttcattgcttatgtggtgacatccggatggacgagtacttcatcagaactttttcgcataatccctctcatttggagtctgatacgaaaacccttcacttgttgctcagacgaagagtttgaagttccatcgattccttaccacatagacattccaaggatttttttattcggtacttcttggaattacatatttttttcttgcaccattaattttgtccttcctcttggattcccttttgatttcttattaaatttatccaaatttgtttctatatttccttttctcccattttcttcctatttttctt

SEQ ID NO: 22583 - DNA, 853 bp, Gossypium hirsutum
  Clone ID: GOSHI-09MAY01-C90109_1
ctcaaaatttgcccccaaatttcccatttcctgcaacacaagtcaatacacctacaccaatcacacttctttttccttttcatttcttcaaaggtagtagtagaaagaggagttctaggaaatctggtggagattcggctgagaagaaagagccaatgctcatgctagggttttgttgattgtttgatttttattgttttgtttatgtgctcgttttttgtttgggatttcactttctgatagacctaaatggaagcagtttctcatttgctcttctgggttcttctttggttaccttgtcaatggcatttgcgaggaatatgtatacaatagactccagttcagctatggctgatacttcacatttgtccaagggttcgtctacctttttctgatttaccttcaaggtttcagtccgaagaaaatggtgaacccatggaagacttatgtgaaactctctgctgttctcatgggctctcacggcctcacaaaaggatctttagctttcctcaattacccagcacagctcatgtttaaatccaccaaagttcttccagtgatggtaatgggtgccttcatacctggtttgagacgaaaatccccagcacacgaatatgtttctgcaatacttttagtactgggtttgatccttttcaccttagctgatgcacaaacttcaccaagcttcagtgtaattggtgtaataatggtgattggtgctgttgtaatggattcttttctgggtaatttgcaagaagttatcttcaacatgaaccctgaaacaacacagatggaaatgctgttttgctccactgtcgttgggttgccattattgatcccacccagggtttta

SEQ ID NO: 22584 - DNA, 743 bp, Gossypium hirsutum
  Clone ID: GOSHI-09MAY01-C90049_1
ggctaagtggtggtcttgggtgggtgtggggggattctatatatcagattgagatgattaagttcattaaaaagacatatcctcaattggatgtgattggtgggaatgtggtgactatggcacaagcacagaatttgattcaagctggtgtagatggattaagagttgggatggggtctgggtccatttgcaccacacaagaggtttgtgctgttggacgaggacaggcaacagccgtttacaaggtgtcatctattgcggcacagcatggtgtgcctgttattgctgatggtggcatttcaaactctggacatattgtcaaggctttggttttgggggcatctactgtgatgatgggaagctttttagctggaagcaccgaggctcctggagcttatgagtataagaatggtcaacgtgtcaaaaaatatcgtggcatgggctccctagaagcaatgactaagggaagtgatcaaagatatttgggtgataccgcgaagttgaagatcgcacaaggggttgttggagcggtcacggataaaggctctgtactaaaatttataccttacacaatgcaagcagtcaagcaaggattccaagatctcggggcttcctctctaccgtctgcacatgaactcttgagatcaggcacactgaggcttgaggttcgaaccggtgcagcacaccccgaaggtggagtgccgtgtttggtttcttatgaaaagaaattccttcgagatttt

SEQ ID NO: 22585 - DNA, 787 bp, Gossypium hirsutum
  Clone ID: GOSHI-09MAY01-C91939_1
gcctaccaatctattttcattcactctcacatgaatatagcatggggtacaaataaagaaagcatagaaaaccaaccttttcttttcttttctcttttttagttacaatttggtcacaattaagattcatgtgaacttaggtttaagcatagatgaagcattactttgaaggtgcacgggaccgagcttttgaatccgatgaagaagccctttcttatggtcttggcaagttaggttcggtaccgaattcagggttccgtcttgattaaatgatgactcgaattgttccaacacttttactatctgccagaattctggccttttttctgcgtgtaatgaccaacattgctcgattaatgctcgcatggcaggcggacagtctcccgggactaccggtctcaaattcttgttcacaactgcaaatgcagcttggataggattcatatcctcgtacgggatcgtaccggctaccatttcccacaagattagtccaaagctgtaaacatccactttccgtccatacggtttccttttgatcatctcaggtgccatccatcgataggtccccggatcatctgctaatagatcacaatgtgcctcctcacaggctataccggaaatcagcaattttcaagtgggaattcctcgtcgataaggatgttttcaggcttaagatcacgatgaatgactccttgagaatgaatgtattccattccacgagcaacttcgagagcaatagctaaaaatctttcgcaaaggaagggacttgtgatcaagcttgtgtaat

SEQ ID NO: 22586 - DNA, 804 bp, Gossypium hirsutum
  Clone ID: GOSHI-09MAY01-C91929_1
gatcatccagtttatagccataaaaacactgccaactgaaccaaatccgaaacagaaacacaagtcatatccatatctataagtccgtttaccgatgtgatgcacagttttcaccttctctactaatgatttttcatttttgagatatgtcccatttctcaacgatggcagttcctaatccacataattcagcaatacttcgtttattgctaacatataccaggggaagtcagttgccggtcatttcatcattgagaagaaactaccaaatagttccgatgtcaggttaccttcccacggttcctggaggttcccaccctgcgctgctcagttcttatgaagtagatcatagaaaaccttcggctttctatactccgagatgcacaaggcctgcattgcatatgctacatgcattaatgtaggctccgaccaaggtttccccataaattgaaggccaatcggcaaacctgctttgtcataaccgacaggcacagtcacagcaggtactcccccaaagtttcctgctatctgataacggataggggcagctccatttatgcagtctacttcaccagtctttagagcatcatcgactatcgagtatgcagtccgacctgttgttggagcaactatgacatctgccatggcaaatatattgttatgaatttgcatctggcggttcctcattttctgggcctgtatatactctttgccatggaaagcaccacatactctaagtgctacccttacatcccatcctatttctgcaaaatgagttttccatatgagaactcagtgaagtgc

SEQ ID NO: 22587 - DNA, 709 bp, Gossypium hirsutum
  Clone ID: GOSHI-09MAY01-C91879_1
gaattgtaggtgattttggataattttaatctgaatcgaatccttctaacccacccaaattccttttgagaatccaatagcttcaacgcggtaagaataacaaaacctcaatttgtcaatgataaaaattgcatttttaccactaactctcaattccaattagcacactatgtccagtccaaattctaaatcatattcccgaaaaaccttaataaatttactacttgcacaactttgataattccacgaaaaaacagatttaaaaacatataaaaataataaaataaaagtaaagtaaataatgtaaaaatcaaaggtttactgtttaagagggtcccgattatcatgatgctcctccctcttgattgggtcacctaagccaaaaactccattggcctgtgatgaaatggcctcaaccaactaggttattgattcccgtaaaagaacccgagagttgcctgctgccttgaatttgctccccttcccttgaacaaccttattaatatttttagaaaattgagagcctgtcaatctcttcctcaagcctttacccatagtttttgtcttccctttccttgaaattactccggtatcccctgctaacataccgttgactgttggttcttggctttttagaagataatcaccaagtgtttactcggatcaagacaggtcccgatttggactcgcgaacgctgggtcgaccggg

SEQ ID NO: 22588 - DNA, 811 bp, Gossypium hirsutum
  Clone ID: GOSHI-09MAY01-C91829_1
cagttctttccgtatcttatggtcttgaggaatacgctgcgactgttgtgaatgcgattcgggttgtttgtgatcgtaaatcggtcaaacatccgattatttgtagcgaaagtgggagagctattgtttcccatcattcgattttgatattcgaggccatgtctacaactgatacggcaccatcgatgaaccaaattaaccttccttttatcgagctgtccgaggatgctcgtagtgactattggaacatgagtgatgcagtaatgagacatgacaatgagacatgtttgttttatgctgatcaattgaaacaaagatgtgtagaacaatttaaagaagggagtttggggatcgaacagttagctgctgtcgacgggttattcgatttggttacgaaaattattgacggaactgaacttgtcaggacatacctcataaacctttcgattttcacttcgatcccagattttagagtattggtcaaaattttcctatcgtccctgtaatacccaaattttgctcggcccgagcccaactattaaaacccagatatgaaaaataattaaaataaaaataaaatgtccagataatgtccatagttacaagcccaattcactccttaacccaaatactaaacctatcagacccaccaagcccaacaacccgaattacatcaaaccgagcccaaaatactctaacccagtttacagggcccgattccaagtgaaaccctagccttcagcaactttctgcccttgcgccgcagccaaaccaaatcgccgtgcgtgctgcgcctccgtgccaagtccgc

SEQ ID NO: 22589 - DNA, 484 bp, Gossypium hirsutum
  Clone ID: GOSHI-09MAY01-C91589_1
cggccgcgtggggccgtagcttccacttgtgaacggtggttgaagccgcaggaacccgggtttttaactctcttaaaacaaccttgaaggccatgccttcttagccccccaagaaaaaaaacgacagaaaaggcccctcccccttttggattcgacttcgacgacggcgtagggactccgccgacatgaccccgggtttcaggtctttggaggtgcaggcaattggacggggcgcctgtctcaggtgttgaaagagctgacaccaagtggcgagcagtgcggtgctagagaggggaaccctagggttcctccgaaaaatgttaaacattttaggctatagtttgggtccttattttgggcttatgcgtaggcttacaaaattaggtagtgaattttgaatccaggcttgtaactttggtattgggcctgtagcctgttttgtaatttggaccttgtaataatggactgttgttatttatttttt

SEQ ID NO: 22590 - DNA, 726 bp, Gossypium hirsutum
  Clone ID: GOSHI-09MAY01-C91629_1
ctggtccatttaaagatttcaagattaatgggatttgagtaaaatattttgtttcagtgtgaatacagaatcaattgcgtacatgattacttacggacttagtgctgcagcaagcacgagggtttcgaatgaattgggggctgagaatccgaggaaggcaaagaccgccatggttgtgtcactcaagctttcaatccttctggctctaacagtggttgttgcattagcatttgggcataacatatgggctgctttcttcaccaacactgcttccattattaaccaatttgcttcaatcacacccttccttttaatctccattaccatcgattcttttcaaggcatcttatcaggggtggccagaggaagcggatggcaggtgttggctgtgtgggccaacttggggaccttttatttaattggaatgccagttgcagggcttcttgcttttaagttcaagctttatgctaagggtttgtggatagggttgatatgtggtctttcatgccaagctgctgccctcctgcttcttactttgtgtagaaaatggactaaaattgagctttcctgacaaattaatattcaaccatagttcaatcttaactaatcttcatactttatggggtatttattttgtcgggactttatttaaaatagtgaacttgacatttaaatgatttgagtttgttaatacgtgaaataaaggagggaaagggttttctagtg

SEQ ID NO: 22591 - DNA, 803 bp, Gossypium hirsutum
  Clone ID: GOSHI-09MAY01-C91199_1
cttagtttactatgtgagtgcaatgggctccctgaggtggccacttacctggaaaaagtgattaaggtgaatgactaccaagaaacccggttcgtaaaccggattgtgtcgtcgatgttcaatacggtgtcggggaaaaaagatcgcggtgctgggattcgcattcaagaaggacactggggacacgagggaaaccccggcgatcgatgtgtgcaaagggctgataggggacaaggccaaactgagcatatacgacccacaagtgaaccaagaccagattcagagggatctttcgatgaagaaattcgactgggaccatccggtccatcttcagccgatgagccctacttcggtgaaggacgtaagtgtggtttgggatgcatatactgcaaccaaggatgctcatgggatttgcattctcaccgagtgggacgagtttaaaaacctggattaccagaagattttcaatgacatgcagaagccggccttcgtgttcgatggccggaacgtcgtcgacgcagagaagctgcggaaaattggattcatcgtctattccattgggaagccattggatgattggcttaaggacatgccagctgtggcttagagatattctgaaccaaacttgtttcaaggttgggctactctaaatatatgtttttcctattgcatttatttgcatctagttttaagattctgttacctgagactgtgttgtctctgggattgtctttttagccggtagaatctctgatttgtattggctttaatgtaataaaatatttaccactcagcagttttcc

SEQ ID NO: 22592 - DNA, 954 bp, Gossypium hirsutum
  Clone ID: GOSHI-09MAY01-C91169_1
gcgaaggcttctgtaggaactgcaatgaaatcctttaacagtgttatcttaaaattccctaaaattgatgagagcttaaggaattgtaaagccgtttttgagcagtttgatgaggactcaaatggtgcaatcgacaatgaagagctgaaaaaatgtttcaacaagcttcaaatttcattcacagaggaggaggagataagtgatctgtttaaggcatgcgatttcaatcaaaatatgggaataaaattcaacgagttcattgtacttctttgcctggtctatcttctcaaggacaatgctcctggacatgaaggtaaatcacgaatgggaatgccaaacttggaggccacattcgaaacctttgttgatgcattcgtgttcttggacaagaacaaggatggttttgttagcaagaacgagatggttcaagccataaatgaatccggggagcgttcgtctggacgaatagccatgaaaagatttgaagaaatggactgggataaaaatggatcagtgagtttcaaagagtttctttttgcattcacaaattgggttggaatcgacgatgcggaagatgacgaagatgaggaagaagggacggtctgaatcaacatatatacatatcaagtgatgatgacattaattggtagctcagcaatgaagtgtcctttgtttctttgttttccaataatcatatgaatggccaagttgatatacaagtttccatataggataagagagtaaggtgtgttcattcatgagatgaaggtctgtagaatggagtcttgattaaaaaaaaaaacatttacttgcttatgcggggaatgacgagaacaaatattcagctaatgaaggtgaatttcgcatgttcggttacgaaagcatttaacgatttggtccttgttttagtaataatatttaccattttatctgcaaaacataaattggtctttt

SEQ ID NO: 22593 - DNA, 753 bp, Gossypium hirsutum
  Clone ID: GOSHI-09MAY01-C91349_1
ttttttttttttttttttttttttttttttttttttttgggggaaatattttttatttttcaaaatagtgtcaaaaattagtatgtaaatttttagggcgttcggaaaaaaatttacccattgaatttttttttcaaataacgttttggtaaaaaatttgttttgaggcttttttggtgtaaataaatttataaagacccaaataacccctaaaatgctcaaaaaatagatgcccactttcgggatccccctggaataggatcataagtttgtccaagtcgcgaatttgatttagggttttagacaaatgaaaggaaacttgaagttcgagtttgactcaacctgagcaatccaagtttgaattgaaaggaaaacaaccaaaatcaagttataataaaacaaggggattgaattaagaattaaggcttctaattaagtgaatgccaacaattaaaacatttttgaagaacctagactaaaaactggatgaaatcaccagaataattaaagagaaggttcggtcagccaagaacaatgaaaacccaggtgtttggagtcatttaggtcgttcttgatgaaaaagaagctgtcgaacaaggatctaaacaaaaaaaaaacatattagaaattgaaagaaaacaaatgaaagaagaaatccagcatcaaagaaaggtaaggcgaccaataggagtccaagaatgagtagaacaaggtttttggaagataagaactcgtttttgaactttaaagatg

SEQ ID NO: 22594 - DNA, 508 bp, Gossypium hirsutum
  Clone ID: GOSHI-09MAY01-C91329_1
cacagctgaaaggctgatctccttactattattggaaataaattcaatttatgatggaaaaatataaacataaaattgcaaaagattttcagcttctacagactagaaattaatcagcctatattatacatctgcagcaatatagtaatagaagtttcaagaactcgacacacccgaaatttgagattgatcttttctttgatcgttgcctcaagtatttttgtgctgtttctttttggtaactctccagcacatcttccttgtaaagcaaatctctggtgtctcttatatcgtcggtgccgaaaaatacgtctccgatggtgccgcgattgatagacgagtggtacaaagaatcggaaggagaagatgtggaaagggaagaagattgggtaaagtattggcctccactgccaccaccaccgcctgtatgatcatagaagctgccaccgtcgtcataatttgggattcctctggccatggaaaaaggtttatgggaagaagagaggag

SEQ ID NO: 22595 - DNA, 431 bp, Gossypium hirsutum
  Clone ID: GOSHI-09MAY01-C91299_1
gcgagaacagctcaaaatgttgaggaggccttcgtaaagactgccgcaaagatccttcagaacattcaggaaggagtcttcgatgcatccaatgagtcatctggcatcaagatcggctatgggcgtgcccaaggtccatcaggtgcaagagatggagccgttgcacagagtggtggttgttgtggttaatacgaactgaaacaatctgttgcatgtatctgatccacatttccagtttatctctatatgatctcattgctttgatgaatctctctccttgaaggtgttgtcgaactcggtaaggacactgaatgtatagaactatgtctttcatttgtactgaactaggaactcatttgttcacctcgtttcgattctatttgactcactgcactgtaaaatataaaccaatgtcatcccattttaccttc

SEQ ID NO: 22596 - DNA, 592 bp, Gossypium hirsutum
  Clone ID: GOSHI-09MAY01-C91219_1
ctccccaaatcaaactgatcctttagtttttatcatcagtttgtttcagagggtttttggttttttaaactttccttatttttggagccatacatcaggagacttcattaattcatttggtgtttcatccttttttggttgcggaaacaggaaaattagcacgggtgatagcagaaaaaaagataaattaaaaaaatgttgggtgatttcttgaacagattgctattgttggtttttggatatgcttatccagcatttgagtgctttaaaatatacattcccaccgccaccaccatctccttctccaccgccaccctcatttgaaaatacgccactcccaccaattagaggagtatcatacgcatctcctcctccgccagttattccctactactaaagaactgcttttacacgacattgagttgtagttcaaaatcttcaggtgcaaccatgatggcatgttaacctgcgtgttgtttcttcagcttttttgagaactattttttcccctaaatatataataacttaatattttatttgtattgtcttttttatttcctttgtattgttctgctaatatatatggtaatgt

SEQ ID NO: 22597 - DNA, 403 bp, Gossypium hirsutum
  Clone ID: uC-gsflmaxxa009e06b1
atttctttcaattttttttctccccagaatcaaactgatcctttagtttttatcatcagtttgtttcagagggtttttggttttttaaactttccttatttttggagccatacctcaggagacttcattaattcatttggtgtttcatccttttttggtttcggaaacaggaaaattagcacgggtgatagcagaaaaaaagaataaattaaaaaaatgttgggtgatttcttgaacagattgctattgttggtttttggatatgcatatccagcatttgagtgctttaaaatggtggagaagaacagggttgagactgaagaactcagattttggtgtaaatactggatccttgtggcgtttttgacaattattgagaggataaccgacatattcgtttcct

SEQ ID NO: 22598 - DNA, 930 bp, Gossypium hirsutum
  Clone ID: GOSHI-09MAY01-C92989_1
ccaaatcaaaagaggaaattacattagtagatccgagccagaaaaacatgacttaatacagatctatcagttgctgaacattacaactaaattcttgaactgcaaacattttgtacaaaggaacagctaaacaaccaaatcctaagacgttaaaaaacaaaagaaaaataagaacagtaaaatcccaaatgaagcagagaaaaaaaaatcaaaccaaccccactattacaaattaatttagatcttcaaaaaaaaaaaagaaaaagaaaagaaagccaccctccaatcttcctttaaaaacatactccatatttctacaagttatgatgcccttcaaagaaatgtaactatattccaatctccacattcctgtaacctgaccctccttcagtcaaaagttcctgtgaagttttggcgacatgggtgtcctcatgaacaaaagcaaaccttttattgtcacccattctctccatggacacttcattaatcttatcagcttttttggaaccaatgtgggttctcttgagccccagaaatcccttccaccttgtggaacccttaggaggcgttagtgtcacattattatcatcatcatctccagcaagaagctcttccctcaaagtcctttgcatttgattattacaattatctttaaatggaaaaagcttacccttaaaaaaaagctcatcagcactcatcatggagtagtttgatactgagaattcaaagtctgacgacactggagcctcccttgagttcctctcttgcttcataacctgctgagtctcaacaaaatcatttgagaatgagattcttggactcattggggggcagtgatgatgatgacctttgtgctccgaattatacatgtctaagcatgccatgagctttcaaaacaacatggaaaacaaggaaaaaaattaataaaac

SEQ ID NO: 22599 - DNA, 721 bp, Gossypium hirsutum
  Clone ID: GOSHI-09MAY01-C92909_1
gtaaaaagaaacaaaaagaaaaatgaacagaaaacaagagacaaatatcaaaagtgtcaaccaaacagagatcaagtgcatccattcaaatatcaaataaataagaaaatttactactcaatttatcccgaaggagatctactttcctttgtaactcagtcttcagtttcataacatcttctcgagctaaccgtaattcatagtcactaagtgctaatttttcttctattgcttctttctcttctagcaaattttgagggtctacaactgaatttcaagaactatattagatgaaaccatcagtaagattcacttattccagatctaaattgaaaatggacttttgctctagggcttagagcattgataaatgggtagaaacatgcaacaccagcaaccaacgattatttctttaagcagatactttaatctcacgctctaagcaccccaacccccaaactatcagaggtgcaatctaatttctgtatttaattgcttaatttgatttccatgtcaactggaattaagaaccatttccttttctcctatcttggatgaagttttcataatttgctaattttctgcttgtacttctaatatcaccggaacctataaatccatttggtaatcataatagtttacataaaatgctactttctggttgtagttccaacattactggaaccacaagctcatgcagtaatcataatcactaattaag

SEQ ID NO: 22600 - DNA, 1063 bp, Gossypium hirsutum
  Clone ID: GOSHI-09MAY01-C92559_1
gcacctttctatacccttggtcctttgacaactgatattgctcctggatacgatcatatcacttctgcaattggtgcagccaatattggggctcttggcacagcacttctgtgttatgtaactccaaaggagcaccttgggttgccaaacagagatgatgtaaaggctggtgtaatagcttataagatagccgcccatgctgctgatttagccaagggtcatcctcatgctcaggcgtgggatgatacattaagcaaggctagatttgagttccgatggatggaccagtttgcattgtcactggaccccatgactgccatgtccttccatgacgaaaccctgccatccgaaggtgccaaagtggctcacttttgctccatgtgtggaccgaagttttgctcaatgaagataacagaggatgttcgaaagtacgctgaggagcatggttacgggaaccccgaggaagctatgcaacatgggatggatgctatgagtgctgaattcctggctgctaagaaaacagttagcggtgaacaacatggtgaagttggtggggaaatctacctgcccgccagttatgtgaactcttctgacaggtgaaagtaaagcttacatgaataaggggaaatgcttcagaatttctcggacccctgatgcatcactagctctataataatagctatacatgcagtctgtttactataatgctttaggggtgcctgtatctgccatttagctctttggcattttggcagaatgaggctgagaaagtccctttgaacctgatcaggataattcctgcgtagggagtgtgcatttttgttgctgttgcttgaacagggatggagctcccatgtccaatcgatggtttgggctacctcatcctccagggcagataaggccgctctatggcctaactcactccggtatttgccttatcgatcatggttttagtaaatcgaagatttaatgttatattttaatttgacataatttgatcccttatctttataatattattaagtctaaaatgataataaagtttgtttattttccaaaaaaa

SEQ ID NO: 22601 - DNA, 753 bp, Gossypium hirsutum
  Clone ID: GOSHI-09MAY01-C92419_1
cggccgcgtggggcaactactagcaaaaaaatcactaaaagctggaagaagagtgggtatgccattgtcccctgttgcttctcagtcattgaaagcatccaatgggttttctgatagcaagattgatgaagctcctaaagaagttctttaagagggttaggaaaaccggaagtttctgctacacaaaaggtttctcatacggttgttacaagcactgtcaagaagccttttggtgcaaagaagactgggaaaactggggggcttggtgcccggaagcttacttcaaagccaagtgaaatcctctatgaccagaagcccgaagaaccagttgcccctgttacttcctcaactaaaaacactgtgcccgttgcctcatcttttccatcgcgttttgagtatgtagaaaatggtcaatcttctgaatttaattctggtggcccacaagtggttagccacattgctcctccaaaatcatcaagcttctttgctgattttggaatggacagggggtttcagaagaattcaatctcaaattccccaaaagtgcaagttcaggaaacagatgaagctagaagaaagttcttgaatgcgaaatctatttcatcaggccaattttttggtgatcagacaagagcagcagacaatgacgctcaagtcactttgcagaaattctcaggatcaacagccatctccagtgctgatctatttggtaaagacgcagatcatgacctcaccgctagtgacctcatcaac

SEQ ID NO: 22602 - DNA, 312 bp, Gossypium hirsutum
  Clone ID: GOSHI-09MAY01-C92159_1
ggtgtgtcgagcgatactcaagggcgaataggatgaatgggtggaaacaaaattaaaattgcactgcatcatgaacataatttgtacatgcattgatttactgaatgttctttacattatgcttaaattttgctatgatgctataaattgaatgttttactatttgaacaattatatatataatgttttaaaaattaaattcacactgagttgtcatatgctcactccccctttttttaactctcaagtaatatagaaaactaggactcggaatggcatcgaaggaacctcagactagcaactcttttttcc

SEQ ID NO: 22603 - DNA, 1142 bp, Gossypium hirsutum
  Clone ID: GOSHI-09MAY01-C92109_1
tttttgttttgtctctttaataaagattggcacgactcgccatttcgttcattgctattttcgtcttattcaccgtctctcacgctcgcttaattgtaccggaccaggccgtcacctctgaagaaatcgttgccgaattacccgaatccgactctacaacgacaaacgttatccttctccctaacgagaaacccaactctgaacccgccaaaacagttgattctaagcacgacgttgatgatgcctccgaagccgaccccgacttggtttccgttccgttgacgataatcagtttccgtcctgtaaaaggtcacttccccaggcatccgttggttccgttccgtaatggacatgactgccgttaccatagaaggttcaggcctttgaactcgcggttccagcgcaagcgctatgtttctcacggtaacggtatggcactgtcggacgagagatctcgttccgacccggagtcaatcagacttggtcaccagatccgggggagatggaccaggtttcccaataatggcgccgagtcgaaggagcacgtagactttaggaaggttcgtccttataaccacgagcatgaacaagatcatgacaacaacgatcaccactcgcaccaccgctaccaacatcaacgtcgccatcatcgccgaggagaggaagatgaaaggcgcgagagtgaggagaaggatggggggttcattaagaggtttcgcaagtttttgattaatttttgaaggtatcaatatcatgcacgttatttaatcaaagtgatgcatcaactctgtaattcccttgggtaatttccactttctggtttatttggcctggctgtctttacactacttgattattggctgtgaataatatggcatcctttggtgatgaacaatatggtatttccttttaaaacatactgcattataggactccatttatgataacataaaaaaaaaaaaaaaaaaaaaaaaaaaaaaaaaaaaaaaaaaaaaaaaaaaaaaaaaaaaaaaaaaaaaaaaaaaaaaaaaaaaaaaaaaaaaaaaaaaaaaaaaaaaaaaaaaggggcggccgttttaaaaaaacccaattttacttccccgggcttgcaagtttttaatttttttttggtgccccctaat

SEQ ID NO: 22604 - DNA, 706 bp, Gossypium hirsutum
  Clone ID: GOSHI-09MAY01-C92089_1
agagctaaaatatttcaattttttagaagtaatgcaagtgcttgagtttgaacttgacagtataattaaatttgagtacataaaccaacccttggctacacttacagtattttattgcctcacatatccgtcgtttaatttctatacgagcaaaattcatccgtgaaccatcaaaacatcattccgctcttccagcagtcttggatctatattcaaccctcatttgtttgaatacaattccgactcttcattttcttgaaattcatgtgtaccaaattcgtgtcagacacgtacttatatcccgatactcatgttcaacaaataaacaaatccaccttaaaaaggccgccttcatcgatggtgactacagcatttccagtgatggcggtaacgtcaaattggaggattttttttctttaatgaataaacaattatggaaatgcgaaaaaaatgaatacttgaacaagaacaaatgatcgaagaaacatgttaaatgatttagagccaagttggtaaattgagcaatgatttaaacgtcttatgctcatagcatagacagatttttctcggtatgtgaagagaatccgatattgtttctatcaatggacttagcagcaaaggctagcttcccacaattccggaaacgttaatctctaatgaaatcagggtggaacatactcggcggattttttgatattatttgtcc

SEQ ID NO: 22605 - DNA, 1109 bp, Gossypium hirsutum
  Clone ID: GOSHI-09MAY01-C92039_1
aatgtaaattgcgaggatgtattattcaagctaaaaatgacaaagaaaacaatcaccattggtgacagtacaacaacataattaaaaggcgtaaagaaaaaaaaaaggctcaaatgatccaatttcatcctcttcctcatcctcataatcactatcttgttatagttccatcaaaaatgtaattatctcatctatctatccaatcccaacctgtaagtttaactacccaaattgagtagtcctcaaataatgtaaattccactataagaaaaaaaaaccaatcgtaccaatcaagctacagattccttagctccttccagcccatcctcaatcatcttcttgttcttctcaattgcagcagcaacctcttgaggcatatacttctcatcatgcttagcaagaacttcagtcgccgaaaagtaacaatcaccgctccttgctttcgaagaaacgccccttgtcgaaacgtcccttttaatctcttccgtgaacggcttaacgaatccttcaaccacaacggaatgtccttctctaaacaaatcgggtagtgaaccttcgtacctaaccagaatatcagttatcaaatcggtaatgacgaactccatttctttagaagaactgggttgaaccacgcttccttcgagaaccagaccaccgagcctgaacttcgttttcgatgggtttttcgtgtatttctcgagggcgtcggttggggtaacgtaaaagactaattggtcttgaaaattgttgaggactaaaactacaaaacccgcgacgcaactgaaggttaatgcgtaggtccagaggcggcgggtctggagctggcgagctcgggccccgatgtcgacttttttgggtcgggtcgggatccgccgggtggaagtgtagaggaaacggagggttggagacatgatgtaatggtgagtagtagagatgggagggggcgcggggtgagagatcgacggaggagatctgagggtggagagagttgagcagttgcggaggagatgggatctgagacggagggcggcgagcctagtggccattggtactcccttttgcttttctgcgggaaaatgatgaaaattctgccgagaaatagtcccccc

SEQ ID NO: 22606 - DNA, 603 bp, Gossypium hirsutum
  Clone ID: AI731566.1
gtaaacaacaaaaggaatgtcatactgtaaacaaatggggtggtgagctttggtacgaaaccggaatatcggtatcgagatgggtgaggacgaactccatttgtttagaagaagtgggttgaaccacgtttccttggagaaccagaccacggagcgtgaagttggttttggatgggtttttgatgtatttgtggagggggtcggtgggggtgacgtaaaagaataattggtcttgaaaattggtgaggactaaaactacaagacccgagacgcaactgaaggttaatgcgtaggtccagaggcggcgggtatggagctggcgagctggggcaaaattgtaaaatgaagggagtggggtcgggatccgccgggtagaagtgtagaagaaacggagggttggagacatgatgtaatggtgagtagtagagatgggagggggcgcggggtgagagatcgacggaggagatctgagggtggagagagttgagcagttgcggaggagatgggatttgagacggagggcggcgagcctagtggccattggtactcccttttgcttttctcgggaaaatgatgaaaattctgccgagaaatagtcccccc

SEQ ID NO: 22607 - DNA, 2163 bp, Gossypium hirsutum
  Clone ID: GOSHI-09MAY01-C93959_1
gagaagattgctgaacttgttgagaataagactctagagggtatcaatgatattcgtgatgagagtgatcgctctggaatgcgtgtggtcattgagcttaaacggggagctgacccatctattgtgctgaataacctttaccgtctcactgctcttcagtctagttttaactgcaatatggtgggtattcttgatggacagccaaagcagatgggcctgaaagagttgcttcaggcatttttagaatttagatgctctgttgttgagagacgtgcaaggtacaagctttcacaagcacaagatagaaggcatattgtaaagggtattgtggtagggcttgataatttggatagagtaattgatataatcaaagaggctaagggcaatgcagctgcatcagctggcctgaaggaggaattcaatctttctgacaaacaagctgaggccgtattggatataaacttaagacgacttaaccttcttgagcggaaaaactttgttgatgaaagtgcatcattgatggaacaaatttcaaagctaacagaactgttgtcaagccgaaaaaatatattgcagctaatagaacaagaagcacttgagctaaagaacaagttttcgagtccaagacgttcaatactggatgattcagatggtggccaacttgaagacatagatgtggggccggaggaggggatgctgctggctttcaccgaaaaagtgatgttaaacggatgaagccgagcacttttaatcttcaaaatcgtggaacaattggtaaatctgttggaaaacttcgtgtaaatgatgcaatgtctgacttcatagtttgccgttcacatgaccatgtgctgtatttcagtgataggggaatagtgtactcagcttatgcatataaaattccagaaagtagccgaactgctgctgggacgcccctgatccagatcatatctttatctgaaggcgagagaataacgtcgattgttcctgtcactgagtttgcggaagaccagtttctagtgatgcttacagtgaatgcccacgccttcgccctcgccctcgattacttctcagctattcggtccactggaatcatagccattcaattggttcctggtgatgagttaaagtgggttcgttgttgcacaaatgatgaccttgtggccatggcttcacaaaatggaatggtcattctaagttcctgtgacattatccgagcactaagcagaaacaccagaggagctattgccatgagactgaaagaaggagataagatggcaagcatggacatcataccagctccaaggcatacagatttggataaggcagcagaagattccattagctatgataagggtggcagtggtccgtggctcctgtttgtctctgagaatggctatggaaagcgagttccgttgagtagcttcaaacagtcgcctttgaacagggttggtttaataggatacaagttctcttcagaggatcgcttggcagctgtctttgtcgttggcttttcattgacagaagatggtgaaagtgacgagcaagtggtgcttgtcagccaaagtggtactgttaatagaattaaagttcgggatatctcaatacagtctcgttatgcaaggggggttattctaatgagactagagcatgccggaaagattcaatcagcatcactaatctcagcctcagcagaagaagcagcagagttgctacccggtatgcagtcagaagaagcaacaactaatgcaggaacagctgagggcatatctatgtcatcataaagaccacagtttggccgattgctcaaaattgtctcgtgtaagtgtaaccatgttcaaattctatgtagtatagaagggctctttcagttagcagaaacaagaagcattaagaaaattagtatagagaaatctgatgaaagctttatctgttgtatttaaatgaaaaatatttttgaagaggggttgtatcccctttttcctaagaatgtcggttttggtggcaattggggtttggtttactgctgttctgatttagtgaaacgtatttattcagattaagctttagaagcagttccgagtattaagagtatactatctatgttcgcaagtaacattgaaaaaacatttagagaaaaaaagacttgactcgggaattgagttc

SEQ ID NO: 22608 - DNA, 1168 bp, Gossypium hirsutum
  Clone ID: GOSHI-09MAY01-C93869_1
caaagagaactgagcatactcaaagagccattgaaaagcatgctgatgatgaagaggcagctgacctgtcaaaatccactgctgctcttaagaatcataagatgaactcagatcaatcgcgaggagaggacactgaaatgggggatgagaacctaacagatagggaagaatctgataaagaagtgggttcagtttcccaggagaggtgttcagaggatacaaagggaagcccaaaccatagtgaggaggcacatgaagtaaaatctgatgctgatagctatctttctgaagaggcagatagcatttcgaaaaatgctgaaaaggaggatgaagaagagaaagcagctaatgaattagcaagtgaagtctcaagagaaagagatcctactgctagtaaagcaactgaacgtgaagtcaaagagactgaagaaagtgaccaaattgagaccaaatctcgagtttcaaagaaatcctcgaaaggattgatgtcatcttcagtagatgtggattccgggatttctgatgatgagcccctttgtaagtggaagcttaaagttgggaaatcaggttctaagaagccagtgcagtaggcaaatgcaaagtgcagagaagaaaggtaacagtgggcatctatctgactctatgtaaacaaacacatatatatggaaataaatgtatgactaactctagagtctagactagagaatgttactgtattatttaatgacagtgttagggagaagtgaaatgaaatgaaatgttagtggttggcacttggcacacacacacagagttgggataaagattttggatggatgggatggtgtaggagactcgggctggggatctgagagatcttcaaatgaaatctagccttagacatatatggatagataataggtttcattatgtgtacagctacttatattttggggatagctttattttgtttatttcatacaacacctaaacaaaacaatccatatcgcattcatcatcgtcgtcatcatcaccatcatcatcatcattattattattattattattattattattaattccatttgtagataaacatgttaatttgttagcattagaaattattattctcactattttaatgtaggaattttgtccttgtaatttatgaaaaccgagaagttagatc

SEQ ID NO: 22609 - DNA, 556 bp, Gossypium hirsutum
  Clone ID: GOSHI-09MAY01-C93839_1
ctgtttcagggtcgggttattgatggagttaatgcccatttgaaacatgaacctgcatcaatattttccaaggcgtaagaagttccgtgcaatggagtgagagaaatgtcgccaacctggagcatttgattggtaacagatgcggtatgcttgagaaacgtcaagaaccgaaccagttaaagctccggttggtggaataggccaaaggaaatgtttctttgattcagccggcttttttcccgagccaaagcgaaccgtttccatctacggtgagattgagaaacggcttatgcttagaggaatcgattagccggcgaaagatctcgagactcttaagatgttccttgaagcttcgcaactcaaagggcctgttacacagctaaaaacctccaaaccaaacgaataagagaaactttgtttatgaacatgaacgttctccgcttcccattatcaaaccgggggagatcaccagcttcccctgctcagaaggatttggaaccgattcgccctccttcaagtaattaagctcaaggactctgggtcctcatcaggaact

SEQ ID NO: 22610 - DNA, 996 bp, Gossypium hirsutum
  Clone ID: GOSHI-09MAY01-C93589_1
gcaacgagtacaaggtttccgatggattgaacgataatttatgagttttgcctaactaacaagctgaacaaaaaggagataaagtgctatttgaaggaaacattacaactacgcaaaacattaacaagaacattgttacatggatggcctagtcgactatgccacactgtaagtgaaaacacattttaagctatgtataacgacacactaggctgaaaagatgcaccactactgttggagaccaatcgagaagtatcaaacttgtagaaaccattatgcatgcggcccactaggagagttttcttggttagaatatcacacagtgggaacatggagcacattctgtaggcgtaacaacctaaaaccagcctgtataaggagaaactgttaaaagattggccacgtcaggggtgatgtgattagttgccccagaatctagataccatgattgatcatgagcaggagacgaatactggcgatgaccagattgagaggagacgatagcctggtttgaggaactacaatgagacatataagaacaaggattaaaagtaaaggaacttccctaatcttggatttgatgataattaaccataattgactgactgggactaacacccgaaaatgtctcatcaaaacgatgatagcacatttaaaccaagtggtcgatttttccacataactgagattacggtctaaatcgtgaccaattacgaccgctatcacgagccttgccacgagaccaacctcggccttgtcccctttggccatatttgcactcttggtgacaacagttaggagcattagtgtgtttagaactcacgttactctcctccttttgatgagctgccaaattagcttgcaaaggtaactcagtcagagaagccaactgtcgcgcttcacaatcaagaaacatctctgttaacaattcaagagacattgttgtggcagaggcaatcacacggacagattcatatccagtgaaagaccagccag

SEQ ID NO: 22611 - DNA, 879 bp, Gossypium hirsutum
  Clone ID: GOSHI-09MAY01-C93519_1
cggccgcgtgggcggacgcgtgggtggcaaattgccattcctctgagtcataaaccgaagacccaattattagggtttcggcgcaacagactttgaggcttttccctccccttttgacccttcaattgccaccattccaccattgaaatcgatggatgatagctcgcaatgaaatcattccatatccctattttaaacctcgcctcagaaggtcagattttttagcctcgaaaacctatctcaagcttcgatttcaacgaagaagatatggcctccgatggctcgtttgaagatatgctttccttcttttaattccttatacagaaaaccacatgcaaactctaaaaaaaggcaaaaatagattcaaaaggaaaagaaacagaaaaaaaaactcgagatcaccttttggaaaaattgctttcgaattttctatttaatctgcgtattagtgtgtgtaaaaaaaattacattaatcactacatggcttttatagccgaaacaaaaaaatgaaaagaaaaatacactttcctttttttgtttttccctctttgttgtgctgtggcttttgtatttgcttgcaggtacggggtgtgcgtggcgcatgtacgggggctgtgcattggcgtacagaggcgtgggcgtggctgtggtgccaggaggccgtacggcgctgtgggctggaacctggctgcggcgctagaggtagaaaccctagggtttctgtttctaaagtattttgggctatttgggccgatgtaattttgggctgtaattggtattaatgtaatgggttttaaatttgggtttgggtttaggtttgtaatgtcttgtaatttggactttgatgatggactatttaaaaattggactttatatttt

SEQ ID NO: 22612 - DNA, 951 bp, Gossypium hirsutum
  Clone ID: GOSHI-09MAY01-C93509_1
attaaatgtttcaacactattacttgatgatgagaaaccaaaaatgtgaaggtgcagcaaacgacaggaattcttgagagtatacttgatttaagacagagaattacaaatatcaggcagatgaaggttgagataagtggaggcttcattgttttttggtcaggttcctactaccaggtaagggcattgtttgagctgaaactatttggatttgttaagcaaaaagcctacattgcaagttagcatgtatgtatgtgctgtatgatagttattgctgactgcaaaagaagctattgagtttataaccttgtctgggtaagttatggtatcctcaaaacttacacttttccttccatctttttggtgttctttgacaaagatgatgaaattttacgtgtttgatagggaatgggaaacagcaaagctaggagttccttggcagttactagagaaaaacagaggcctatcagcatgaagtttgcttaaaactgcaacacattgagagaaattgtcactggctactcttcattatatggattaccagtattatcatgacaaaataaaaattgggaaaagtagaaaaaaccgtcgtacagggataattttcctccttgacagttgcaactcctccaataccttctgtagccaaataagctcacaaacaccttcagccatagccctatattttgcctcggctatgctttgcttattcttgtggttctgcttttgcactgtatgaagagattcgtaaccaagcaaatctccatacgaaaatcaaatcaagaaatggttactggctttttttcctttagaatatagaagcatcattgtcagtcactatcaaagagattaccaactgtaattttgcatcaagttgtttgttgattacatgatgtctttcacttcttgagcttgtaaattacaaaattaggtttactatagccattgcgg

SEQ ID NO: 22613 - DNA, 630 bp, Gossypium hirsutum
  Clone ID: LIB3825-010-Q1-K6-A10
ccgtccggcaaaaagcctacattgcaagttagcatgcatgtatgtgctgtatgatagttattgccgactgcaaaagaagctattgagtttataaccttgtctaggtgagttatggtatcctcaaaactttcacttttccttccatctttttggtgttctttgacaaagataatgaaattttacgtatttgatagggaataggaaacagcaaagctaggagttcctttttaggtaacaatcatatgcttttttccccaaaaatcagtaacaaatgattttgaccttttaagagtgactaagttgttcaattgaattccatgcaaactttgaagtaactaactaattatttcttgattgaatatatggaaaaccatttcatgataagtttagtaactaaaacattttcatggcaaatcaggtattaaaattaaaagacaaaggatataaattgtaaatataacattattctgtttgctactcagaaaccatcttaaaatttcaaaatttccttgcaaaacataatgggaacacaattgcatctgaacataaagaaaagaaatgagtatagtaccagtgagaaaccgaggctgactaatttcttaaacaagaaataagctttgtggagctccg

SEQ ID NO: 22614 - DNA, 587 bp, Gossypium hirsutum
  Clone ID: GOSHI-09MAY01-C93799_1
cttatcttcacttttttttttttcatagtgaaattgttcttggcttaactaaattgttttgattgaaactgcattattgaatgttgttatgtatcagaggcaggaaaggtggctatggggacaggcccagggataattacaggggtggtggatctgggccagatagacatccctatggtgggccccgttctcgcccattctgagggatattcagcttcaactattttttgtactaaggattagggtctgagggatgtagttgtgttccattcactgggttattcttgatcaggaggccgagaggtaggttgttcccttatttgggcaattcccttttgtccttcctcctttatcttctattagcttgggggggggggtatgctaagcgttggattgattagatatgtgaatcttttttttcacgcaagtggttcaacttccgagtgcttgctacctaggttggttgataatttcaggtgggtgctgctctttcaaatcccccacttaggctcttttatttgggaacaaccccttggcgggggacttaattttgttgctcatcgtttaatgtggtggaacgatcatgt

SEQ ID NO: 22615 - DNA, 579 bp, Gossypium hirsutum
  Clone ID: GOSHI-09MAY01-C93649_1
cacagctaaaattttgattgtgggatcaatacattgaaacttattagatattcttaattatgatttcattaagggactcatccattaatccctctcaatcatggcacttcgattttttcacaaacttcacgaaaacgtaaaacaaaacaaagtatcacaaaattaattgtgcttgctagaactgtcctcatgacctccaccacttccgccaacaacagggcggctctcgttcagcgcttcggtgaaggcccctgtaccttcgtctatcatgaccatggttgcctgttcaatgttgaaatcattatcaattactgctttaatgaccaggttcaccaagtcttcaaccagttttgcctttgcttttaaatcccaaatcattctcttcagctcttcgagtgaactctccacagatagtagcctcacctcgatgcctatttcctctcttgcaatgtccctagaactgccctgatgccttccgtcatttctggcagcagtgcggcggctcccgcgagattgagcctcgttcggtacttcagtgaacgcctttgtagcttcgtccatcaaggccatggttggctg

SEQ ID NO: 22616 - DNA, 600 bp, Gossypium hirsutum
  Clone ID: LIB3825-012-Q1-N6-D3
gtgctctcctttaataaccagagtatcgtcctctaccgaaaccttcacatcctctttcgtcagtcctggcatgtcgaatcgcattttgatctcttgttcatcgtctttgatatcccacggtgcacgcacctgtcctcctgttcggctcctgctgcccggcaatatcatggcatcctcgaatatccggtccattgtgtccagcatttgacgcattgatctcaaaggagacaaggggtccaacaaacctgtcatcaatgaatcacgttaagatagtgtgaaaatggatgatgaatggtacgtacccaaaatgcaaatactttccaaaaggagagacatcgacagccaaccctctaggcctcttctcaacagctgtgccttggttgtctttgttgacatgcacgtccactgacgtatctttgttattatccccagcagcctgtgcccttacaagagagagtcggctgatgcagggattcttggatggaaaagatcagagaatggcgttacagctttaatggaacaagaaggcttagctctgtctgataccaatggagaagatgagcaacacaaagttgaagccgccatttttatattaaacgc

SEQ ID NO: 22617 - DNA, 506 bp, Gossypium hirsutum
  Clone ID: uC-gsronu33B172b07b1
ccctcgctgtccgcacaaagctctcagttcttaacgtcttctgcgtttaatataaaaatggcggcttcaactttgtgttgctcatcttctccattggtatcagacagagctaagccttcttgttccattaaagctgtaacgccattctctgtatcttttccatccaagaatccctgcatcagccgactctctcttgtaagggcacaggctgctggggataataacaaagatacgtcagtggacgtgcatgtcaacaaagacaaccaaggcacagctgttgagaagaggcctagagggctggctgtcgatgtctctccttttggtttgctggaccccttgtctcctttgagatcaatgcgtcaaatgctggacacaatggaccggatattcgaggatgccatgatattgccgggcagcaagagccgaacaggaggacaggtgctgcaccgtgggatatcaaagaccatgaacaagagatcaaaatgcgattcgacatgccaggactg

SEQ ID NO: 22618 - DNA, 498 bp, Gossypium hirsutum
  Clone ID: GOSHI-09MAY01-C93019_1
cccacgcgtccgatctctttcaaaaaatttgcgaaaaacgaattctgatgggccgcctgacatccaccgtcgaaattccggaacggagacgccaatctgatcgagaaagcggccggtacgcatctgaatccgatggttcccccgattaccgccgccgtcgccgtagccctagctacgaagcctatgaacgcgaccaccagagccgcaaagattaccaacagcgtaacccttctggttcatctgaatacaggaaccctagaagacgaagccctgtcgaaagtcctgaaagaagacggcgttttgaccgcgaaaatggtcgctacgcatccgaatcggatgactctgttgattaccgccgtcgtcgccgcagtcccagttacgacgtctacgaccgcgaccaacctcgaaaccgccaccgttcggagtcgcctggagacgaaaatcctagaaggcggaaccctgcacatgacggaaccctaaactgtctggccaagaaat

SEQ ID NO: 22619 - DNA, 767 bp, Gossypium hirsutum
  Clone ID: GOSHI-09MAY01-C88559_1
gttgaggcgccagttatttgggaggtcaaaaggaggcgaagtcatagccgaagcaaaagccctaaccggcgtcgtagtagccatgatgagcgccctcatggttcacgtgaccatggtagacggtacaatgatagggataattatcacgaaagccggagcagaagacacagaagcacaagtcctggtcatcggagtggtcggagcagaagccctgggggaaagaggaatcatagcccaatccgtgaaggcagtgaggagagacgtgctaaaattgagcaatggaaccgtgaaagggagcaacaggaaaatgcaaataattttgagaaagatgctgccaataataacaagaagaatggtagaaatgaatatttgcggaatgatgataagaactatcagcaacaggagtaggcttcacttccagaagttcattaatcctgattatatcaccctgcctggtagtccattgggtgccaaataaactggtggtttaaagtatcttttgggtttaacttaaagaagaaaacaagaagcacctgcaaccactactctctcaactctgttgcattgggtcctaaccacaagcaaggagtaatagtggtattagcaaaggctctacttaatttgctagacgttgttatttgttatatttagttgttaacctgacaggtttggtgtttgttggacccccagaaccatgttttgtgctaagacattgaaggacctgtttgttttttgattgaagaaacatttggtcattggtagttatt

SEQ ID NO: 22620 - DNA, 746 bp, Gossypium hirsutum
  Clone ID: GOSHI-09MAY01-C88569_1
gaaaattcctaaaatttcctaatagcagcactaattataaacgaggcttgatcaattcctatctttgaagatcgttaatgttgttcttgaatcttcgatagctggtgaagtaagaagtaaatatcatagagggaaaaaagaaaaaaacagagaaaaaaaattgaacaaatgcattactgggttcgagcttttgcttctgatttctctggaactcctccccagcctcgaagtggtcacaccgctgttccaatcggaaaatccaagatcgttgtgtttggtggtcttctcgacaagaaattccttagtgacatcactgtttatgacatcgaaaacaaactatggtttcagccagaatgtactggaaatgggtcagatggacaagttggtcccagcccacgagcatttcatgttgctgttgcaattgattgtcatatgtttatctttggtggtcgttctggtaacagaaggttaggcgacttttgggtcctagacactgatatatggcaatggtcagagttaacaagtttcggtgaccttccttcatcacgggatttctctgctgcttcagctattggaaatcaaaaaattgttatgtatggtggttgggatggtaaaaagtggttgtcagatgtatatatcttggacacaatatcgctcgaatggatggagctatcagttactggatcactaccaccacctagatgcggccacacagctactatggttgagaaaaggttgcttgtctt

SEQ ID NO: 22621 - DNA, 647 bp, Gossypium hirsutum
  Clone ID: GOSHI-09MAY01-C88709_2
aaaaacttgatgtcttggatccaaacgcctgtcctaagagatctgatgatggactacctagaagacaaattgctctctgcatgtttcaatcagctgtacaagtatggatcctgattttgccaccacgtggtgcaattttcttaagcgtgttccaaatagggctctttggctgcttcgattcccagctgctggtgaaacgagacttcgtgcatatgcaactcaacaggccgtgcagccagatcagattatttttacagatgttgccatgaaatgggaacatataagacgcagtgccttggcagatctcttccttgatacaccattgtgcaatgcacacacaacaggcaccgatgttctatgggctggtcttccaatggtgacccttccacttgaaaagatggctactagagttgctggttctttgtgcctggctactggtgttggggaggagatgatcgtcagtagtttgaaagaatatgaagagaaagcagtgtcacttgctctaaatcgtccaaagcttcaagagctttccgataaattaaaagcagccagaatgacttgccctctttttgacacggcacgctgggttaggaaccttgaacgggcctactgtaagatgtggagtgtgtatcggtcaggtcagcaac

SEQ ID NO: 22622 - DNA, 637 bp, Gossypium hirsutum
  Clone ID: GOSHI-09MAY01-C88709_1
gaattttttttttttttttttaaattaaataataataataataataataataataataaaacacgagagttaatgaaacttacagaattgaaggtgttgacataggttatcttaatcattgaaaagtgagtatccacaacaaatcacactcaggagtcctcaacaacctttctaccttacaaaataaatttaccccgatgccctcggcggtatctacaatgcacccccacctctaagcaaattcttcatcattctctgtcactctaatgtgtcggggttgctgacctgaccgatacacactccacatcttacagtaggcccgttcaaggttcctaacccagcgtgccgtgtcaaaaagagggcaagtcattctggctgcttttaatttatcggaaagctcttgaagctttggacgatttagagcaagtgacactgctttctcttcatattctttcaaactactgacgatcatctcctccccaacaccagtagccaggcacaaagaaccagcaactctagtagccatcttttcaagtggaagggtcaccattggaagaccagcccatacaacatcggtgcctgttgtgtgtgcattgcataatggtgtatcaaggaagagatctgccaaggcactgcg

SEQ ID NO: 22623 - DNA, 500 bp, Gossypium hirsutum
  unsure (1)..(500): unsure at all n locations
  Clone ID: LIB3825-002-Q1-K6-B4
ttttcgcgtgggcgagacttcgtgcatatgcaactcaacagggcgtgcagccagatcagattatttttacagatgttgccatgaaaagtgaacatataagacgcagtgccttggcagatctcttccttgatacaccattatgcaatgcacacacaacaggcaccgatgttctatgggctggtcttccaatgttgacctttcttttgaaaagatggctactagagttgctggttctttgtgctgctccccccctggggaggagatgatcgtnagtagtttgaaagaatatgaagagaaagcagtgaaactagctctaaatnacactcaggagtcctcaacaacctttctaccttacaaaataaatttaccccgatgccctcggcggtatctacaatgcacccccacctttaagcaaattcttcatgattctctggcactctaatgtgtngggggtgctgacctgaccgatacacactggccatnttacaggaaggcccgtt

SEQ ID NO: 22624 - DNA, 694 bp, Gossypium hirsutum
  Clone ID: GOSHI-09MAY01-C88649_1
gacattgttaacctattaagggacatcttattattaagccaataaaaatgaaagataagcaatactccatatttccatttgacacagtcaaagagactattataaaaaggatcgaacagcgaatcattttttttggttaacaccaaatttggatattatacggtatgctccaaaagaaagaacaacagcaaacagtagcagtaaaagaaagaaaaagaaaaccaagatttgagccaagggtagaggtgaggtgagaactagttttagataatgtagagttaccctcggcttgaggttttaacatagtcagccctaattgcccataactgttctcccacagatttcatctccggacggtcacttctaacaggtgctgcacattgaaatgccaatgcaaacatcttcgttagtatctctgcatctaccacttccatccttggatccaccaattccaccacatgtccttcattatacttgttgaaggcccatctaggtgtcacacgctcttcacccggcctccttagctccacgggacggcggccagtgagaatttcaataagtaaaatcccgaaagagtacacatcactcttggttgtgagttgataggttttcatgtactcaggatcaaggtaaccaactgttcctttcactctggtctcaaatatgtgttcggttgagtcattgggccgaacgc

SEQ ID NO: 22625 - DNA, 549 bp, Gossypium hirsutum
  unsure (1)..(549): unsure at all n locations
  Clone ID: LIB3825-020-Q1-N6-C5
actcacaccttcaaaacaaaaaggctatngagaatcttattttagtaaacacaagggcgaaaagcctgttaacttgggatttagttcatatggtcaacctcaagtggtgacatccaataggtgcaggattagcctgactctactttaggtctacttctttttcaataagatatgagagttgtaattaaagtaaagtatttgaccaagaaaaaagattgataaattagatattggttgcccatgccgaagtaatgattatagcaatggagtcaagcttaacaagataaggaagaacaagcttacccatctaggtgtcacacgctcttcaaccggcctccttagctccacgggacggcggccagtgagaatttcaataagtaaaatcccgaaagagtacacatcactcttggttgtgagttgataggttttcatgtactcaggatcaaggtaaccaactgttcctttcactttggttgaaatatgtgttcggtctgagtccattgggccaactcttgcaaatccgaaatcagccactttagctctcatgct

SEQ ID NO: 22626 - DNA, 740 bp, Gossypium hirsutum
  Clone ID: GOSHI-09MAY01-C88609_1
aaaaaacagaagagaccccccattttcctctgctagggttttgaaacccatttcgcagatcgccgaaagctccgccaatatctggcctcacagctttagcccgagcttcgattgcgacgaagcgagcaaggtttcaatcggcgctccgctaaggtgaatcatttccctttttctctctatttacaaaaatcaatagtaataaccatgcatcgatggaacagagaagaaaaaagcagaaaaaaaccttcaaagaaacttttgatcttttgtattgatttcgtgtctgtgtgcgtaaccttacaagaatgaagcaatcggccctttatattgccgaatattacaaaaatggttttttcctcttttttttctattatttcttcccttttttatatctgctggcctattgttgttgttgttttgctgtgttgttttcgtcttctttgcaggtacggtggccagctggtgtatggagccgtacggtgacgtggcgcggaggctcgatgcatgctgaaggtaggagcggtggctgagtttagggttttggtctctagggtttgctggtaattttctctggtttgggctgcgagtttttgggcttggttttgggtttaggttagttgggtttgggttaaagctatttaggctaatcgggcttaggactaattttgggtagtggatttgggctattgagcccgttgcttgtaaatggacattaaaaattggactatatttttattatt

SEQ ID NO: 22627 - DNA, 533 bp, Gossypium hirsutum
  Clone ID: uC-gsronu33B038f10b1
tttttatcgcgagcggcccggacgcgtgggccgacattacgttgacccttccaaaaaaaaaaagaaagtaaagaaaagaaagtgagagagaaaatgcgagaaagcgaggaaactgagaaagtgaagaagatgaagaaacgagaaaaaatgaagcacatttttaagaagctgcacataggaagcagaaaaaaaccttcaagaaacttttgatcttttgtattgatttcgtgtctgtgtgcgtaaccttacaagaatgaagcaatcggccctttatattgccgaatattacaaaaatggttttttcctcttttttttctattatttcttcccttttttatatctgctggcctattgttgttgttgttttgctgtgttgttttcgtcttctttgcaggtacggtggccagctggtgtatggagccgtacggtgacgtggcgcggaggctcgatgcatgctgaaggtaggagcggtggctgagtttagggttttggtctttagggtttgctgttaatttctctgttttggctgcgag

SEQ ID NO: 22628 - DNA, 835 bp, Gossypium hirsutum
  Clone ID: GOSHI-09MAY01-C88169_1
gcagatttaagaaaccgaagtaaagaagcattgcaatacatgcataccaagacgtgcttaccaattgaagaaaacgcaagaagtattcttacaccttatgcattcaatgcattacaacacgagattgtgcaatcgatgcagtatgcaacaacggaattggcaaacggatcatatcttgtgcgacactataagaaaatggaaggtgaatatcttgtgatttggatatcacaagatgagcagattcattgctcgtgtaaggagtttgaacattccgggatattgtgccggcattgtcttcgagtacttacagtgaaaaactattttgaaatcccggagaaatatattctgttccggtggagattggagagttcattggttgctctggaagatcaaaatggccaatgtaacagtgatgagtatgctcaagtctttcattctctagctgcaactcttttgactgaatcactttttacaaaggaacgattcaatcatgttcatcgggaacttacaagactcctcgagcatgtccggaacatgccagtatctaacgagtttgcttcgaatatggcagctaacaacatcagtgagtcataggtttggtggtacgaaatcacagctaatagattgacttggagtttgctggcttgttggaacatttcggagctatacacgtgatttataatacattcagccgtcaacgttggaattcaaaagatattggggtatgtggaggatgagatacacaagtggtgaattcttttgatagatactagacatcaaaacactgtgaaaacaacatagagatgggaatacactgactttttcattctctttt

SEQ ID NO: 22629 - DNA, 633 bp, Gossypium hirsutum
  Clone ID: GOSHI-09MAY01-C88009_1
tcaactcctctatgtgactggttaccaacaagatggatgctgggtttgcttatgaacgcatggtgtgccaatcggtcgccgggccccattccgatggttatatgaagttccatggggtatgtccaaagcagtaacatatgtaaaaaaacattatggaagccctaatataattctctctgaaaatggaatggatgatcctggcaatctcacatttcctgaatcgttatatgatattaatagagtaagcttttatagaagctacttgaaggaattgaaaagagctatggatgatggagctaatgtccctggctactttgcttggtcaattctagacaattttgaatggttattaggatatcccccaagatttggtctggtatatgttgatcccaatgatctcaagagatatcccaaactctcggcatattggttcaagcaaatgctcgaaagaaagaatttctaggattgattaaaaatactttttaggcccttaatgtcgttttagatttttttaatcgtgattttggttttaacttttctatttagaataatctctttctagatttatcatttaaagattttgtaataaattaatatataaaaagtattatgctcaattttgactttggtggc

SEQ ID NO: 22630 - DNA, 685 bp, Gossypium hirsutum
  unsure (1)..(685): unsure at all n locations
  Clone ID: LIB3831-002-Q1-K6-G2
ttagagtaaaagcttcagttccctccccattatatggatgggaggatatttcccgcaacagcattggtataattcatagtttagaagatgacggtgatattggtattgctttctgcttccgaagcaagcctttttgttgctctgtcactgatgtggagagagtgcctccttttgaagtgggacaagaggttcatgtcatgccatctgtcagtcagccacgacttggatggtcaaatgaaactccagcaaccgttggaaaaatttcgaaaattgacatggatggagctttgaatgtaagcatctcatttttttctttctaatctaggagcgagtggcctggtctaatgttactggtggagcactatatcttttattacgacattatcgcatcactgcatcagttaaagctatatgttgactatattattttgtgagttcatccattaaattactttaatggagaggttctgcttgagccatgcaggtgaaggttgacggcaggcatagtttgtggaaagtttctcctggagatgcagaaaggctttcgggatttgaagttggtgattgggtccgttcaaagccgagccttggcactagaccaagttatgactggaacactattgngaaagagagttagcggtagtgcatagtgttcaagatacccggtatttggaattggcttgct

SEQ ID NO: 22631 - DNA, 549 bp, Gossypium hirsutum
  Clone ID: LIB3543-059-Q6-K6-G11
ctgagatagagactgatgggcttcttatgattgaaataccaaacgaccatccctggcaggctgatccctctgacatggaaagagttgaggatttcaaggttggtgattgggttagagtaaaagcttcagttccctccccattatatggatgggaggatatttcccgcaacagcatgggtgtaattcatagtttagaagatgacggtgatattggtattgctttctgcttccgaagcaagcctttttgttgctctgtcactgatgtggagagagtgcctccttttgaagtgggacaagaggttcatgtcatgccatctgtcagtcagccacgacttggatggtcaaatgaaactccagcaaccgttggaaaaatttcgaaaattgacatggatggagctttgaatgtgaaggttgacggcaggcatagtttgtggaaagtttctcctggagatgcagaaaggcttctcggatttgaagttggtgattgggtccgttcaaagccgagccttggcactagacccaattatgactggaacactattgggaaag

SEQ ID NO: 22632 - DNA, 1201 bp, Gossypium hirsutum
  Clone ID: GOSHI-09MAY01-C88289_1
gaacgagtaaaggagaaaaatggctatagagagctacgtggtggttcacaatatagcaaagaggcacaacgtcggaaccctagctagaagcgccaccgcctttggagtcgccgaactaatcttagttggccgccgtgacttcaacgccttcggcagccacggctccacctcccatctccgtttccgccacttccattccctcaccgacgctcgcctcttccttaaagagaaagattgtgatatttgcggggttgagatcacagaggacgctgtttccataactgatcatcctttcaagaaaagcactgcttttcttcttggtaatgagggaacagggctttcagctaaggaatgtgagatatgtgatttctttgtttacattcctcaatatggaggtggcactgcctctttgaatgtcactgttgctgcttccattgttttgcatcattttggagtttgggcaggtttttcaaaaagaatccgcgatgggaacaagtttgttgtggctgagaaacctttaaaacaggtgagccgaaaatactgcacagaaacagatgatcgtatcattgaggagcgaaaatcaagaggggaaagtgcttccaatggattctttgaggacggaaaaaatggtgtatcttcttccaaccttttggattcattgttccctgatgagtgattgaaggatttaaatatagatttgatcctgcaaaccatacaacgttcaccactaaacattaaaggtaatttggttcaatggtccaacctattgaaaattgttgttaacatgtggcaaacagattctagctaaccatggaccaaagtgaagtttgattattgaaggaagttcctctgtgaatccatggaaaagtttgcaaagggaccccttttcagagtgacaataattgaattttgtgttacttaatttgcgttggttaaagcatcttctgtaattgtaatggtattttcacattattgttttgtactttacaataattgtttctttttttcttgggatatttttgtttacatacgaagtcaacaagatgtaatataaaagatgccttaggaccccaataccaaggattaaaaactcatggggtggttcattttcagtggacagctaacaacttaagaccagacatgactatgtgtaacacgtattttgtgccctaatttgaacgcgttttcatttgtgattggc

SEQ ID NO: 22633 - DNA, 646 bp, Gossypium hirsutum
  unsure (1)..(646): unsure at all n locations
  Clone ID: AI054498.1
agaaatggctatagagagctacgtggtggttcacaatatagcaaagaggcacaacgtcggaaccctagctagaagcgccaccgcctttggagtcaccgaactaatcttagttggccgccgtgacttcaacgccttcggcagccacggctccacttcccatctccgtttccgccacttccattccctcaccgacgctcgcctcttccttaaagagaaagattgtgatattgcggggttggagatcacagaggaacgctgtttccataactggatcatcctttcaagaaaagcactgcttttcttcttggtaatgagggaacagggctttcagctaagaatgtgagatatggtgatttctttgtttacattcctattggggaaggtggcactgcctctntgaatgtcactggtgctgcttcattgttttgcatcatttggaattgggcaggtttttagaaagaaccgcgagggaacagtttgtgtggctgagaaaccttaaacaggtgagccgaaatactgacagaacgatgatcgatcattgagagcgaaatcaagagggaagtgcttcaatgattctttgagatgaaaaatgtgatcttcttcaacttttgatcaatgtcctgatgatgatgaagattaaattaag

SEQ ID NO: 22634 - DNA, 617 bp, Gossypium hirsutum
  Clone ID: GOSHI-09MAY01-C88219_1
gtgaattatgaatttcaagcacacaacaccaaatttaatatcagacaaaattagattaatgggaagcaaagggcaaaaggaaaaaaaaatgaagcaaacccgtagattaacaaaacaaaagctgaaattgtatgtatgcttataatacatacaatatgcatatcagtttgttttgactcacactgaatatgcactgctccgtccactaccatgacccaaccccacagtcccactctcggtttccaacttactataggtgcactgggaagagtgaagatgcccttgatgtgtattggttttgctagaattcacatttatagcaatatggccgtttttgttcccaagactaccattttccctagtcatttggaccatcccaataccttcagaatgtgctgcatcttcaataacctgaatgtcttcgttgtagcctttgatcaggaaatctgagcagttcttccagcatccatgatcatatggatttctaaatcgaccaccaggacccttgaggtagctatagcgcatgacatttgccatttcatttgttgttatattgcgagatatctgagaagcctgtataacggtcaaggctgccacaccaaagaagaggaaaaaat

SEQ ID NO: 22635 - DNA, 475 bp, Gossypium hirsutum
  Clone ID: GOSHI-09MAY01-C89959_1
cccagcgtccgggctcactggggcgggggggggggacctcaagtggagtatatggttttgtccagacacgacaacccggtgccctctttttcagcacactggttggttgccttttacttgtgatgggagtactctttgtcactcaacacttaaattcaatgaagggtaaacctcgggctgcatctggtccacggtagaaaaagcaggttcgttttatagtcttgactaccaaagatcacccgacagttgagtgaaagatggctgtaatagaagttacaacactctggaattccaagagatcgaagatttttaggctcatagttctcgactttgtatgatttatgttatgcagatttggattgagaatggaggtggatcatgtaacttgttttgaagttcaagaaagttttaccataaattttgtgaagtctcgatttttttttcaatttcaatcatcataattgattgtggtggt

SEQ ID NO: 22636 - DNA, 1015 bp, Gossypium hirsutum
  Clone ID: GOSHI-09MAY01-C89969_1
taaccattgaaggcgcttgcaaacgccgttcttagtttggttccccccccctttcttgctgttttcaatttttctctttcgcttccccatcaaaactctttgtcatttgctttcaatttcacatcaagccaataaaagggtatttttcttttttgttttatttggaaggaaagaaaatggtgttcgagaaaacaccgatcttttttatggtggttttggttttggtgagtttggatctgtgtttcgggagtgagctcggtatgtcgccggcgcatggtgaccatgggcatcatcatcattgtgatcatggacatgggcatgaccatcatcatcaccaccgccatgtggaggcgcccgcgtgggcggtcgcgtgggtgccggaggagttggctgaggaggaagatatgaaattgtacggatttgggccctatctagacgatcacgatcgcgatcgcgatcatcatcatcaagacctctccagtttaggcctttggttacgcgcactgggctgttcgctcttagtaagcttggcttctcttgtttgcctggttattttacccgtgatatttatacaaggaaaaccttccaaggcagttgttgattcattggctttatttggggcaggagctatgttgggagatgcttttctgcaccagttgccgcattcttttggcggtgcacactcccactcacatgatgaccacggggatcatgcacatcatactcatactgggcatgataatacgcatgcacactctttaagggatctttctgtgggcttgtctgttcttgcggggatagtactatttcttattgtcgaaaagttggtcagatatgttgaagaaaactctggaggggctagtggatggagccatggtcatcaccaccatcatcacaaaagcaataaaaatttgaagaaaaaggatgaagatgctgctcacagaaacagttcgcaaccggtaggtgacacaccagacaactctttgaatgcagataatgcaactcagcctgaaat

SEQ ID NO: 22637 - DNA, 630 bp, Gossypium hirsutum
  Clone ID: GOSHI-09MAY01-C89849_1
cccagcgtccgcgcctgctttgttggccgtgtaatactccgcaatgattgtatcttgggagaaatcgcagagcccataacaacaaaatgaagaacaacaatcgcttgtgcgaagatttggatgccggaaatcaacgttccgacgcatttccgatgtcctatttctcttgatttgatgaaagatcccgtcacgttatgcactgggatcacttatgatcgggagaacatcgagagatggattgaagccggcaatgaaacttgcccattcaccaaacaggtcttggaaacttttgatttgatcccgaatcacatactgcgaaggatgatccaagactggtgcgttcagaaccgttctctcggcgtcgaacggatccctaccccacgaatccctgtgtcccaatgtgaagtctcggcggtcgggtcgaggatcgtcggtgctactcgacgtggagatggaaaaaatgtggggagttggttaggaagatcaagaattggggcaaagaaagcgaacgtaacaagctttgcattatggagaacggaacaggttgtattttatcagcttctttcgagtctttcgcccgtgattcattcgagaaacaataaatttgttggtggaaattctattggtact

SEQ ID NO: 22638 - DNA, 742 bp, Gossypium hirsutum
  Clone ID: GOSHI-09MAY01-C89139_1
tcaattctcccctatcgttgaaggaattaaggatgctggttatgagaagatgaccgttgtacaggaggcaactcttccagtaatactcaaaggcaaggatgtactagccaaggccaaaacaggcactggaaagacggtagcattcttgcttccatcaattgaaattgtttcaaaactgcctcctgttgatcgtgatgttaagcggccaccaattcatgtacttgtaatatgcccaactcgagagcttgcgattcaagctgcttcagaagctaagaagttgctgaagtatcacccatctatcggtgttcaggttgtgattggaggtacaagacttgctctagagcaaaaaaacctgcaagcaaacccttgccagattcttgttgctacacctggaaggctcagagaccatcttgagaatactgctgggtttgcaacaaagctgatgggtgtgaaggtccttgtacttgatgaagcagaccgtttactagccatgggttttcgtaaagacatagaaaggataattgctgctgttccaaaacaaagacagacacttctattttctgcaacagttcctgaggaggtccatcaaatctgccacattgcacttagaagagatcatgaattcatcaatacggttcaagaaggcactgaggatacacatccactggtccgacaggtgcacatggttgctccactagatatgcagttttccctactgtatgtccttttgaaagaacatatt

SEQ ID NO: 22639 - DNA, 1308 bp, Gossypium hirsutum
  Clone ID: GOSHI-09MAY01-C89049_1
aaagctgaaacttgtttgatggagggttagatgaagttgtgctggtatcaagtgcgcaccagttcaaaaccttaagtggttatgaagcagctgatgagcgcaacagttgggattccttcaagtatttagttgctgatgaagaatcgcgatataatgcctcgataaacatgccaattgctggtgaaacttctcagaatgtcactttgatggtatctgtggaagatacaggtattgggatccctttaattgcccaggatagggttttcatgccatttatgcaggcagatagttcgacttcgagaaattacggtgggacaggtataggcttgagcattaccaagtgtttggttgagctaatgggtggtcacataagctttgttagccggccacaagttggaagcacattctcatttactgcagccttcgggagatgtaaaaaagcttcatttagtgataccaaaaaaatccaataccgaagatcttccttccagtttccgaggattgaaagcaatagtagttgacgggaaaccagttagagctgctgtaacccgataccacttgaagaggctcggtatgctggttgaagttggaagtagtgtaaagatggcagcttctgcaggtgggaaaaacggctcttcatgcggaactaaaaaccagccggatataattcttgttgagaaggattcatggctttctggcgaggatggcggtttgagtttagggatgttggatcggaagcagaatggacatgtgtttaagttgcctaagatgattcttcttgcgacgaatattacgaatgctgagcttgagaaagcaaaggcggctggtttttcagatactacaattatgaaaccagtgagggcaagtatggtggctgcatgtcttcaacaggtgcttgggatagggaagaagaggcaggcaggaaaagatatgttgaatgggtccttggtccttcggagtctactttacaggaagaaaatattagtagtcgatgacaatatggtaaatcggagagttgctgctggtgcattgaagaagtttggagctgctgtagaatgtgccgacagtggaaaagctgcactaaaactgcttcagattccacactattttgatgcttgcttcatggacattcagatgccggaaatggacgggtttgaggcaactcgtcggatacgaaagatggagagccaagcaaatgaacagatcaacggtggcagcatagatgaagagtctgcccgaaagggaagtggcatgtcccgatattagccatgacagccgatgtaatacatgccaccctatgatgagtgc

SEQ ID NO: 22640 - DNA, 558 bp, Gossypium hirsutum
  Clone ID: GOSHI-09MAY01-C89039_1
ggaagagaaattgagtttggccaagtcacatcctgctgtcaatgatgtgcctgaattagaggaagaactagagtttgaatccgatcccgagcttgaatccgagtcaatctatcaagaatctgacatgttggatgagttgtcagaggatgaatcttctgatgttgatgaggaggacagagaacagcatattgagcatgaggatttgagtgctttgaaactaccagaactcagagcgcttgcaaaatctcgcgggttaaagggattttccaaaatgaaaaagagtgatttggtggcaatacttagtagctcgagctagttagtaatgaagccgaaaaactaaagatcacttgcattttgatggttgtgatatgtgagattctcattttgttttttcgatggtacttattttgtgtttattattaaatgtataactaacctgccgaaaaatccttccaagaggcgggaagctatggatgtttcgatatggttttgtcaggttaccctttttacagtttcccgcaaatctttgaggaatcaatattattttattctgtactt

SEQ ID NO: 22641 - DNA, 621 bp, Gossypium hirsutum
  Clone ID: GOSHI-09MAY01-C89029_1
gcctagttctagcggacgcgtggggcgaaatcatggttccaaagcttctgttttccactttcactatcctaattacatgtttattcagttttggaatcgcccaaccttgcccccgtcctcgaccatgcccttcaatctcgcccccaccacgccctactagaaccgtctcttatgttcgaccccgtccgccactctacgatccttcccttcgtctcttacctcgccagccaaacaacaatcccggtcccttagccaatagagccaggattctcgccattacccaagaactcaaacgaaacattacctttgaccctcaaaactacacccctacttgggttggcaacaactactgcctcttcaaaggcttcatttgcgacactgtaccagacctcaacattactggacttgcaggcattgattttaacggcgcaaggtttggtggtaacttgaatttttatcgtttcattcaaaacttgcctgatattgctatcttccatgccaattcaaacaacttcagtggtgtcatcaaccaaggtcttagtggcttgcgttactcttatgaaattgatttgagtaacaacaagttcatcggagggttcccctccaacgttcttagtgcta

SEQ ID NO: 22642 - DNA, 647 bp, Gossypium hirsutum
  Clone ID: GOSHI-09MAY01-C89339_1
aaaagtcaaaaggttattcaagcctgagtggcaataattcagtgagggaatttgaaatgcaagagagtaggaagaaaaaatggatgaagaagaatgcggagagaatggcaggtcatctgaaacttttgggaatgaaattgaagagggggaagctcacgagggaggagctgtttgggacgttttccggaggcaagatgttccaaagctgcaagattaccttaaaaagcactttagggagtttagatatgttcattgttgcccagtatcacaggtttttcatcctctacatgatcagtccttttatctgaccatggatcataaggcaaagcttaagctggaatatggaattgaaccttggacttttgttcagaaacttggggaagctgttttaatacctgctggttgtcctcatcaagtccggaacattaagtcatgcataaaggttgctctcgattttgtttcgcctgaaaatgtcggtgagtgcgttcgcttgactgaggaatttcgtctgcttccccgtgatcatagggaaaaagaggataaactagaggtgaagaaaatgactgtacatgcagtccagcaagctgtgaaatacttggatccaaatgcagaggttgaacttgcttataaagttaattgagttgcat

SEQ ID NO: 22643 - DNA, 877 bp, Gossypium hirsutum
  Clone ID: GOSHI-09MAY01-C89299_1
tttcttctttgagacgacttttagttacattgtgaattcataagcagcatgcttctccttgtaataatagcttatggcgaaagcagtgagattatggttccaaaggttttcagcaagtgatatggttttgggcctggttttaactaatgttgcagtttttttattatggcggattgcagatagacgatttatgatggataactttatggtttcattggacaattttaaaagtggacgcttgcatacactgatcacttcagctttcagtcatattgatattgagcacattgtgtctaacatgattggactttatttctttggatataatataggaagaatctttggacctgaatatttgctgaggttgtatctagctggggcaatgggtggttcagtgttttacttggtgcaccatgcatttttggctaagggacaagcaacacggatgatggacccttcaaggactccaggattgggggcaagtggagctgttaatgctataatgctgcttgatatatttctgaacccaaaagctactctttattttgatttcatcataccagtgcctgccatgttactgggcatatttctaattgggaaagatatattgaggataatagagggaaatagtcatatatcaggatcagctcacttgggaggtgctgcagttgcggcaatagcatgggctcgacttagaaggggacgcttctgaattaaataatagacctgctagctaacatttacttgctcttgtatgttgctttgccacatgtttcattctagttgctttctttgttaattttaattaaggtttgttaattttataatttattagatttttataatacttataagtttttataatttttttaagttt

SEQ ID NO: 22644 - DNA, 738 bp, Gossypium hirsutum
  Clone ID: GOSHI-09MAY01-C84999_1
ctcaaaccgcgtttgcccaggtctggccgtttccttcatatatcactttcactctccctggggtccctctctaaccctaaaaccaaatacccggtagtcgctgcttcttcttcttttggtgggttctaaggcagtagaagctgagtttgagataagaagagaatcaagcgatagttctattgtacttgctgttttttttagctatggccgagaacggtgaagagaagctgcttgcggtggccaggcatatagccaagacgctgggtcaaaacgacaccatggccgacgatattttgcagatcttttccaacttcgacgggaggttttctcgcgagaagttgtccgagaaaatggttgacgacaacaaccctcgtggctgtgccgccctcgagcgagccgttaattccttggaccgccagatctcccagtacgtggcgcttgatcatcccatctgggctcacaccgctgattcttctgctttccttgacgctattgacgacttgattcgtaccatgagggattgggaacccatggccgccgagaaatccgtcagcgcttgtcttgtgcgcgctgatgacctgatgcaccaggccatgttccgagtcggggatgagttcaggtctcttatggaccgaggtgctgagtcctttgaactgaatcgaagcaaccacgagtcaaccgggaacttatcgtttgattctgacgatgacaatgaagaaaacgaagatggacttcttc

SEQ ID NO: 22645 - DNA, 631 bp, Gossypium hirsutum
  Clone ID: GOSHI-09MAY01-C84449_1
attgtttgtaaggagaaggaagaaatgaggtagaggatgaattctataacaaagggccgttatgtgcttctcaagatgctctgcttcgagttcacactgtggttgcaaatgccattgctgccatgggggattctgaaaagaaacgggcagataaatacagggaggaatgccaaattcttgtcccatctagccaatcttctaacatcattgggaaggcgggttcaactattaagaaactgaggggcaagactcgggccagcattaaagttactgctaaggatgctggtgatccaagtcattcttgtgccatggattttgacaacttcgttcagataactggtgaaccggaggctgttaagaaagcactttttgctgtttctgcaatcatgtacaagttcagtcccagggaagaaatccctcttgagacaacagtggcagaagctcctccagctcaaagtatcattatcccatcagatgttcctatttatcctccaggtggcttatatccgaatccagatcctattcttccttctagatcagttccacctatattgggtgctgcacatgtgtcagatcttcaaggatatggtgatacagggagtacctggcccgtgtactcatctgctcttcc

SEQ ID NO: 22646 - DNA, 649 bp, Gossypium hirsutum
  Clone ID: GOSHI-09MAY01-C84769_1
ttcacgcgtccgaaagaaattcaagtttagaaattcaaaggattaaattaaaaataaaaagtcaaatgatactttgactttaaaaaaattatattctactttagcaggatttttatccgtctaacagggcaattaggagacgcagctttagggcattggataatgatatagaaatttctcaatttggggcaacagcaagcaaaaaaatccactcaattgaagaacaccagatcatataattgctaatcgatctctcagtactgattcagatttcctgaatcgaaagcaagtaattttcaaaggagcttgtgcaacacaggatatgctattgcatttgagctgagttatctactacggaatcagctttagaataaagtttcacttgccctggttgttgttggcatggaatccgagttagtactgcacaatggcggttgccactgtaagaaagtaagatggaaagtccaagcacctattagtgttattgcttggaaatgcaactgttctgactgctccatgagagggaacgttcactttgttgtcccgcgtcaaaggttcgagcttttgagtgattcgaaccagttcattactacgtacacttttggatctcacaccgccaaacatacattctgtaaggtttgtggaatat

SEQ ID NO: 22647 - DNA, 595 bp, Gossypium hirsutum
  unsure (1)..(595): unsure at all n locations
  Clone ID: LIB3582-029-P1-K1-C6
ctttggcagccgtctaacagggcaattaggagacgcaactttagggcattggataatgatatagaaatttcacaatttggggcaaaattttcagcaagcaaaaaaatccactcaattgaaaaacaccagatcatagaattgctaatcgatctctcagtactgattcagatttcctgaaccgaaagcaagtaattttcaaaggagcttgtgcaacacagcatggaatccgagttagtactgcacaatggtggttgccactgtaagaaagtaagatggcatgtccaagcacctactagtgttgttgcttggaaatgcaactgttccaactgctccatgagaggaaccattcacttcgttgtcccacgtcaaaggttcgagcttttgggtgattcggaggagttcattactacctacactttcggaactcacactgcaaagcatacgttttgtaaggtttgtgcaataacttcattctatacccaacggtcgaaccccgatggcattgctgtgacacttgcatgnttagaccctggaacgctttcccatgttgagattcggaatttcgatggcaagaattgggaatgatcagagtggc

SEQ ID NO: 22648 - DNA, 624 bp, Gossypium hirsutum
  Clone ID: GOSHI-09MAY01-C84659_1
gcaaaatccaattcctttgttgggacgcacgagtacttggctcctgagatcattaaaggagagggtcatggagctgctgttgattggtggaccttcggtatcttcctttacgagcttctctgtggtaggacaccttttaaaggtgcaggtaatgaagaaacgttaactaatgttgtgctagagagccttaagttcccagacagccctcttgtgagtttccaggcaagggatctcatcagagggctgctggtgaaggagccagagaatcggctgggaacagaaaaaggggctgcggaaatcaagcaacatcctttctttgaaggcttgaattgggctttgatacgatgtgctgttccaccggaactgccagagttgtatgaatttgggattctgagcatgatgtccccggaagcagagagcaattatttggaatgtaaaggtacaggagaccaccttgaatttgagctgttttgatgtaaacatgtactttaggagatggatttccataggatacccttctccatggctggccatgagccatgcttcccttgttgtaattaataatgtaccccatgatgtatatttaattgagaatacttggtaaagctgtcgccagattttgtc

SEQ ID NO: 22649 - DNA, 667 bp, Gossypium hirsutum
  Clone ID: GOSHI-09MAY01-C84069_1
atttttcgtgaggggtgcatctggcagcaagttcctcaactacataaacaagcacattatacctgtttttgataagcttccagagagcgaaaactagatttgctcaaaggtttggcggaaatttctccttacacaacgccacaggattcacgccagattcttccttctgttgttcagcttttaaagaagtacatgcctcgaaggaagactggtgaagaaacaaactttacctatgttgaatgcttgttgttttcattccaccatttagctcacaaggctcccaatgccacaaatagtctatgtggttacaagattgtgactggtcaaccatcagataggcttggggaggacttctcagagtattataaggagttcactgagagattgagtagtattgaagacctaactagggccacaatgaagaaattgactcagggaatggctgagcacaataaagcaatggcagctgctaaatctgatgaagcaaaggagagcattaaaactcaaaagcagaataccacaactggattgcgtacttgcaataacattttacctatgacaaagcccttgcattcaaaaacacctgcatttattggggataagagtgtcaacctttcttggaaagaaccggtgaaaccttctgtaccctacagtgcaactggaactg

SEQ ID NO: 22650 - DNA, 460 bp, Gossypium hirsutum
  Clone ID: GOSHI-09MAY01-C85419_1
ttttatcctgcaaaattaattatttttgcaagttgcctctgccattttgacatttggagttgaagctaagaaccgctcggtgccatccattaattggagcataattagagatgacaatgggacagatttggagcaaagtcattttggagtttttcgagtttggtgtgtgcgctaggatttggggccagcgcgggattttcttcgtaattttcaaacttttataaaagatgtaagcattctaacatgttcttgttagagttcaattgagctcaggtttaaatcactattttttttttatcaaatttcacttcatgggttgagacttgggatgtggccatggtcaataccaaaaacctaagtctgaactcaactcccgatgatttttttagttcatatattataaaatattatatttatttcaaaaaaaaaaaaaaaaaaaaaaaaaaaaaaaaaaagaaga

SEQ ID NO: 22651 - DNA, 559 bp, Gossypium hirsutum
  Clone ID: GOSHI-09MAY01-C86929_1
tttttttttttttttttttttttttttttttttttgtgtcgttctcacagctggggaagtttgcattttgatatcgactagaagagaaatacaaaatcagaccacttagctctcacagtttagcttatattaaactaaattttaaaagagtgaaatggctactcaaatccttaggaagttgaaacctcaaattctgaaaaagactcccaaagataaaccacagggaaactaaactgaggagtaatgctcataagaaaagagctacaattgtacatattgagacaacattttgtgacctctcaacagagatctttcccagtttgcctatcttccatagggatggtatcgaccacttcccgcaccactatacccccctcgacttccatagaaagaactccctcctgcagcaccaccaccgttgccgccaccaaggcctgcgtcgtagcttctaccatatccaccagcagcagctccagcaccgtatcccccataaaactcacctgggccttcgtagccactttccatgtcataccctctgttgaaattcctcctagcgacc

SEQ ID NO: 22652 - DNA, 1115 bp, Gossypium hirsutum
  Clone ID: GOSHI-09MAY01-C86859_1
ctccggtatccataccgggaccgcattacatttgcccgaagtccaggagtatcgattatttttattgacccaagatgagccagggacaacctaggaggcctcaacaaccagcaggtcaaggtgagaaccaagagcctatcaaatatggagatgttttcaacgtgagcggtgagttagccaacaagcctatcgcaccccaagatgcagccatgatgcaaacagctgagacccaagtgttgggtcagacccagaaaggtggaaccgctgccgtgatgcaatctgccgccacgaggaacgaacaagttggcgttgtgggtcataataatataactgacattgctggtgaacaaggcgttagcgtcgctgaaactgatgttgctggtcggcgtataatcactgaggcagtcgctggccaggttgtggggcaatatgttcaagcaacaccggttatgacaagccaagtgggcgctgtgcagcaaaacgcaataaccataggtgaagccctcgaagcaaccgctaaaacagcgggcgacaagcccgtcgatcaaagcgatgccgctgccgttcaagccgcggaagttcgagcgactggttcgaatgtcataatccccggcggactcgccgctactgctcaatccgccgcggctcataacgcgaccctggatcgcgatgaggaaaagatcaagctgaatcaagttttaacgggtgcaacggcgaagttaccggcggataaagcagtgacaaggcaagatgctgaaggagtggtgagtgcagagctgagaaacaatccaaatgtagccacacatccaggaggagtggcagcatctatggcggcagctgctaggcttaatgagaatgtcaacgcataataatatatacatagcttcatcatctatatgtagttttttaaagttatatataatgctggggaagtgaaatcttgtgtgtttaagatagtatgcattctgtagcagctatatataaaaatggtgtcctgttttgtaaaataagcaaaagatggggtttctgttttgttttaagtcaatggagtgtgtggctgccacctttgttgaatattccggctaagtattaattgaagaacatggattatattt

SEQ ID NO: 22653 - DNA, 689 bp, Gossypium hirsutum
  Clone ID: GOSHI-09MAY01-C87929_1
aaaaaggataaggttagaagaaggaaaatccgaagagaaaaaaaagaagaggaggagaaagaagaagaaggataaaggttcttcttcctcatcgtcgtcatcgtcatcttcttcttcctcgtcatcatcttcatcttcttcgtcgtcttctgattcggattcagataagaaaaagaaaagaaaagagaaaaagaagcaagagaaggaagacgataaagagccgaaagaagatgaacacaaagagaagaaagatgacgagacaaaagagaaaaagaagaaaaagaagagggataaagatcatgaagaaggtgagggaaaaggcaaagtcaaagatcttagcaagctaaatcgaatgctagagagaactaataagagattagaaatccttattgcaagaaaggcggacatcgaaatgcggattaaagaagccgaggagaaaaagtgcagtgaagctgctgctgctgctgctgctgcagctgcagccgcagccaaagctgcagtcgaggaacagatcaccgaagccacactctgagtaagtggctccgacaaacccccatgctatagacgtattcaatttcaaacaataacatacgtccattaatgtgaaaaaaagatagctacaaatttacagaaaactatttgtagcagtccaatattatttgaataagataataatgtgattttgagtt

SEQ ID NO: 22654 - DNA, 505 bp, Gossypium hirsutum
  Clone ID: GOSHI-09MAY01-C87859_1
gccaaatctaaaacccgttgtgttggtcgtgtgtcttcgagtgtcagtcaggtttttaatttcatttgttttaaccgttgtaaatatgggtgatgagagtgagaggggtaatacaagttcccagtcttgtaactctcttacttttttttttctctctctttactttataactattatactacttgaaatagtcacggttattaatgctccttttgcatgctttagacggtcaatttaagcatttttttcaaacatctacgactttgcaacctatcatggacatgctcggtgatgcgtaggtcgatgaagaaagagcgttgtaactaattagctggtcatagtgttggtggtgctagtaaaagtcctgcaatctattatccataaaatgaacgtcttgggttgtaatgtgcgttatgagtcgtaatgtgcgttatggttacggatcgtgtacagattgtgactttcttttccatatattctattgacgcacttgtagtttcgttgg

SEQ ID NO: 22655 - DNA, 739 bp, Gossypium hirsutum
  Clone ID: GOSHI-09MAY01-C87689_1
ccgggtcgaccatgcgtccggcttggttatctccctctagagttagctcagtatttatctcctctgattgaaaagtactgcttgagctttgagggatatgtgatatctgttcctaaacgttctcttgatgctgttccaattcagattgtgtgtcagaacagtatatttaatggtaaaaaaggatgtgatgaatttgaggctttacatttgtggcaaaaagctcttcaagtagttgaatttgcaaagaaccgcccacctaatacgacaaaatatcagcaaaatttttgtctgttactaaaggaggttctaactagtagccctcaccttttcacaaaagataaaaagaaattcatcgaatcattcacttcattatcagaggatagtcagaggctttttgttcgactttatacacggaaaggaccttggtttcgattgtctaccattatgtaccctgaaatatgtaatcctcaacaagctgtcaaggagctgtctgcaactggctatctgtatctctttgaagatacaactaaactacatgatgatgaaatgaaggaccttttgagtctgctcactgtttctgagcttcgtgacattttatgtacacttagaaaggtttggattttttatgtctacttcctattgttctttgtggcactatagcaattctgtactctgtaaaagcatttctttttatccttggtgtggtgttttaggattggaatgtaattattattatgct

SEQ ID NO: 22656 - DNA, 579 bp, Gossypium hirsutum
  Clone ID: GOSHI-09MAY01-C87679_1
cccacgcgtccgcagaactttgcgtgaattgaagcttctcaggcatcttagacatgggaatgtgattgctttgaaagatgtcatgatgccgactcataggagaagcttcaaggatgtttatctggtttacgaacttatggataccgatttgcatcaaatcattaagtcttctcaagtgcttaccaatgatcactgtcagtatttcctcttccagttgctccgaggcctgaaatatcttcactcggcaaatattcttcacagagatctgaagcctggaaaccttcttatcaatgcaaattgtgaccttaaaatttgtgactttggactggcacgcactagcaatgccaagggtcaattcatgacagtagtatgttgtcactcgctggtacagggcccctgagcttctcctctgctgtgacaactatggaacgtctattgatgtttggtctgttggatgcatctttgcggagcttcttggccggaaacccatcttccctggtacagaatgtctcaatcaactgaagctgatcatcaacatccttggcagcagaaggaggaggatctgaatttatagataac

SEQ ID NO: 22657 - DNA, 1045 bp, Gossypium hirsutum
  Clone ID: GOSHI-09MAY01-C87019_1
cggacgcgtgggcggacgcgtgggtttggtcggtactataaaacagctcataagcatgtatggttgtttcccatcgcttcgaaacctgtaagttgacaataacttcactcaaaccgttaccaccttcattaaatccaatgaatggataattgctgcgacttttgttcaaaacatttgcctgcagttacctaaataataactacttaactggaggatttccggcaaagatagcaggcttgaccaacttggaaatcttgtaagtatggtgctttttaacctttgggatatggtatggagttcgccttattatcggatacccttttagctatgttagaatactctggtctaactcggattttcgttattcaacatactggtcacaggtacctatcctacaacaaactttcaggagtaataccacatgaaatcattcatctcccccggttgacatccttgtaagttcattgttagacattgttgatacttctttagtcgcaatttacataaagtgtgtagctgaagtagggtttcattgtattaagccagaaagttgatttaatttgcttcttgaacataacttggcctttctttagagcttcgagtatctagacatcgctcgttgcctctttcacactgcattcgcagtttattccagctttctgagctaatttagcatcaatgcgttcatcaactcgtctccatacatgttcttttattggatcttattggaactgcaggcatttagatcacaaccaatttgcaggaagaattcctgaagcactctatagacatccctttgtgaaagaaatgcaagttttcttctactctcagttctggccaagttacaactcttataaggtctgttaattgacagttcatagaaattgttgacaggtacattgcaggaaattcattccagaaaggagcaaaatccatcggtgtccctaggatcctggaacttgctgactcagagttcctagtttagagtcaaaatagctatgtagtattctctattgttgatatcaattttggaaatttagattat

SEQ ID NO: 22658 - DNA, 558 bp, Gossypium hirsutum
  Clone ID: LIB3828-031-Q6-N6-B9
gattcaatgtaaatctgtttattttccattgctagagaactagatgaaccactgtcttggcaaatataatctaaatttccaaaattgatatcaacaatagagaatactacatagctattttgactctaaactaggaactctgagtcagcaagttccaggatcctagggacaccgatggattttgctcctttctggaatgaatttcctgcaatgtacatttctttcacaaagggatgtctatagagtgcttcaggaattcttcctgcaaattggttgtgatctaaatgcaaggatgtcaaccgggggagatgaatgatttcatgtggtattactcctgaaagtttgttgtaggataggtacaagatttccaagttggtcaagcctgctatctttgccggaaatcctccagttaagtagttattatttaggtaactgcaggcaaatgttttgaacaaaagtcgcagcaattatccattcattggatttaatgaaggtggtaacggtttgagtgaagttattgtcaacttacaggtttcgaagcgatgggaaacaaccata

SEQ ID NO: 22659 - DNA, 684 bp, Gossypium hirsutum
  Clone ID: GOSHI-09MAY01-C87309_1
cccagcgtccgatttatccttcggcccgtctgggaatgattctagtgcacaaaatgactggaaaggggcatggtggcacagtagcttcacagttcattcaggttttgtggaggatgacagccctttttccacgggaggtcagaagggaacgtattatttcgaattttctaggcctttaagaaccatggatcgtcttcaacaggatgttcagttcacaataggtggatcaagcaagatgtcggttgcactctggtatccggttgacgggaatccatggagtggatctggacactatactattaactgcgattgggtgtcgtttgatattgcttcaggtggttctaagctaaccaagtctgcgaaatcaagcagctcctgggatgctgcatctgccttttctcttttattctcagtagcagctctttgtgtggctatatttgtggcgtatcaggtttcaagaccaaagaatatcccattcacaccaatggaaaatctttagactacggatgttaaagtctgccattgtacaattaatcgagttcgagtttaagcttgagcttctcatacatgttagagattgtactattattgcttgtgtttgtactgccttagcttgagtttgtactttgaatgaattccttcccacttaattactattcttttaattaaaaaaatcttagtttt

SEQ ID NO: 22660 - DNA, 686 bp, Gossypium hirsutum
  Clone ID: GOSHI-09MAY01-C80789_1
gagttccttctattttagctttcggaaacttagctgaatctccatccgaatcagagcctttaagtttgaaaacgctgtgtttaagcaagatccagatttcagaatggaagaagagaaaggaaagctggtgcggagcttgaccgatgcggtgaaccagatagctccaatcggcgattacagatgcgccgtgaagaaggagttttgcaatctcgctaggagattgaagctgttgacgccaatgttcgaggagattagagaaagcaaagagcaaatccccgaagaaactgttaaagctttggtctcgctgaaagaagctttggtttcggctaaggagttgctcaggttcggcagtgaaggcagcaagatttacctggttctagagagggatcagattatgcataaatttcatgaagtgacagctcgggtggagcaagctttgagtggaatttcgtatgagaatcttgacatatcagatgaagttaaggaacaggtggagcttgttctagctcagttcaggagagctaaaggaagggttgatgttccgatgttgaactgtacgaggatctattatcactctacaataaaagcaacgatgctgcagcagatccagatgttctaaggagattagccgagaagttacaattggttgggatagctgaactacgcagaatcactagctctacatg

SEQ ID NO: 22661 - DNA, 614 bp, Gossypium hirsutum
  Clone ID: GOSHI-09MAY01-C80149_1
gaaaagaaaaaggtatggcccgaatgctaccgaaaaccctactcctctgccactccattttccaccgccactcctccttcctccgccgcttttcatcaaaagctgaactttacgaaatcgacctggactccgcttcttcatcggcatccgccgttaacaaaatggaggaaatcatccactccataattgtccaaaaatccacccctgattggctccctttcctcccgggctcctccttctgggtccctcttcctcgccaaggttccaagagagcatccgatttcatggatcaattgaccaatcagctcactcccgacgagtacctctctctcaccaccggacgcggctggccctgcgtcaacttttttgtctcagatggacactatacagatgttacaagcatggatgtggaattgaaatttccagagcaggaggagggggaagttaaggtggaaattttgattggttcaggcgacagaacttcttgacacgtggacggtgacgatgatcctactgaataatttccatctctctcaaacacgacatctcatctcaggctttgcgtacctttcacctatttcatcctgggagaggctgcttaatgaatgcaagag

SEQ ID NO: 22662 - DNA, 545 bp, Gossypium hirsutum
  unsure (1)..(545): unsure at all n locations
  Clone ID: AW187730.1
gggcagggtgcggtgtcctccaatcaaattcaaaggccaatggaggactcgtcttctcagcccttcgatcatgatcaaacggctcctggcgcttccaagttcctctctgaccttccctctcgtggccacctctcttccaccatcatctcctcaaatctgggggggatgcgagtttatatttgtgagcacaatacttctcctccagagatgcagcacataaagacagaccaacaaaacatactcattaggtcgctcatgcttaataacaataagggcggttccagttcaaaggatgtgaaagctgctgctgagggtcctanaaagagggctgctgaaaaagtcatggatagcagcgcttcaccaaagaaagccaatacaaaaaataattctcaatcggtgggatcaagcagtagttttactgtagagagacttcgcgctcttcttaaggaaagaggacattcacccaaaggaaagaaggcatgttcttgagaaacctttcttcgatgcttttaacttttaagcaccgtgattgattatagtggtcc

SEQ ID NO: 22663 - DNA, 533 bp, Gossypium hirsutum
  unsure (1)..(533): unsure at all n locations
  Clone ID: LIB3585-051-P1-K1-A11
atgatcaaacggctcctggcgcttccaagttcctctctgaccttccctctcgtgggcgccgctcttccaccatcatctcctcaaatctgggggggatgcgagtttatatttgtgagcacaatacttctcctccagagatgcagcacataaagacagaccaacaaaacatactcattaggtcgctcatgcttaataacaataagggcggttccagttcaaaggatgtgaaagctgctgctgagggtcctagaaagagggctgctgaaaaagtcatggatagcagcgcttcaccaaagaaagccaatacaaaaaataattctcaatcggtgggatcaagcagtagttttactgtagagagacttcgcgctcttcttaaggaaagaggacattcacccaaaggaaagaaggatgagctgatcgcacgcttgagatgtgtaaatgaatcagccgagtagttattacatgttgcataaaagcaaacatactctagctgnttgctcatttatcatgaaatatgatttgatttctttttc

SEQ ID NO: 22664 - DNA, 911 bp, Gossypium hirsutum
  Clone ID: GOSHI-09MAY01-C80299_1
gtgtaatatttttctctttatcttcaaagtggtaatatttttcttagattgaaagtgatgaagcaacaaactgtaaacagttaaaactacaatcatgaaccaatcaaacaaattccctaagctttgcctgtttcttcaaaaatgattaaaaagagcaccaaacccttagttttttttctttgttttatacagattgagtattgctttttagttgctaaaacatcaacgtttgaaccgcagcaattaggtgacactgcttgaaacaaaagcaaaagaacatttcttcttcttcactcaacatgattggttccataacaataaatcaatgtagcccacgtaaaagtgtttgattgtgaatttttctaaaaccccataattcccctggcaaggaaacgtgatagtatcgcctgtaaggtgctgggaaaaaaagaagaaaatgcctccacaagtctctcatggcggtgcctttcagattggcccttcggttctgttctgtaatggcggaggctcaggttcaagccccgaacatggcggaacagctagaaggatgaaattccatgggaaaaaactactgcctttgcttgttctcgtcctttcatgtctttcaattctcagacttcttaaaatagcaatgattgcttcacattcttcagctccggagtgttcattggaatgcagtaattttctatcaaatgcaactccagaggtggattccgagtccggtggccgacatgaacccacccctgctgccaccgctgccaatgcaacccttctcaccccaaaggaattcatggttctttcgaaacttgttacacgtaaagcgccttgtaatctccttgtttttggtcttcaatcacagtattacaatctttcatcaataaacgcaggaggaatcactgtttttctcgagg

SEQ ID NO: 22665 - DNA, 760 bp, Gossypium hirsutum
  Clone ID: GOSHI-09MAY01-C80229_1
cccacgcgtccgcccacgcgtccgcccacgcgtccgcccacgcgttcgaaaaaaaccatttttgtttcgtgtggtgtgtagctgctgtagcattgtcgtgttatggaatcgacacacccagaaagttgtctttggtctttctggattcatcccctataaattaaattaaattctcctctcgaatttaggaacttgaggcctttaacaatcgaaacagcaaattaaagctacgccaagcaaaaaataaaaggaaaaagaaaatggagaatcagtgccagaatggaaatgaaactcttctcaaagtgtcaactctcaattgcatcgatctttctaatcctgatattcatcaatctgtctctttactaaagcaggcttgtttagattgtgggtttttctatgtggtaaaccatgggataagccaggaattcatggatgaagtatttggtcaaagcaagagcttttttgaattgccattaaatgagaaaatgaaagttttgaggaatgaaaaacacagaggatacaccccagtgcttgatgagcttcttgaccctgataatcaagttcatgtaggagactacaaagaggggtattacataggtgtggaagtacccgaagatgatcctgaagcggagaagccgttttatggaccaaatgtttggcctgaagatggtcttttgcctggatggaggcaaactatggaaaaattccatcaccaggcattggaggtggcaaaagcagttgcaaggatcatacgcttgct

SEQ ID NO: 22666 - DNA, 491 bp, Gossypium hirsutum
  Clone ID: GOSHI-09MAY01-C81829_1
catacacttttaacgtcaaccatctcctgcctccttttactcaaagaaaaaaaaaaaaaagacatccccataatccatggcttaagtgcacgtgtagtatacaggcaatgaaccatgggtcttttccggcgactctttggagccaaaaagtccgacaaaacccgatccgattaagaacggaggcgttggagcttcgctagatcttccaatcccacgtcttcaacttcccatatagatcatgctcttactactgctccatgcggtgacaccttgggtgcccgcaagcacgcaatagcagtagcagccgccactgctgctgtagctgaggctgctctcgcagctgcgcatgcggctgctgaggttgttagactgacaagatggtggtggtggccccgctgggaacaaccgacgactcgtacaggaggtagcggctgttaggatacagaccgctttcgaggttatctggcacggagggcactgagagctttgaa

SEQ ID NO: 22667 - DNA, 748 bp, Gossypium hirsutum
  Clone ID: GOSHI-09MAY01-C81579_1
cttaaaaagaaaaaaaaaaaccctcaaagttagaaggagatacgcaaatattgttctcctcagcttttgatatattcttcttcttatctagatctacaatattgcttcaagaaagaaaattctttgttgttattactagtgattttaaaaggaaaaaaagtggttgattccttttcaagtaatacgattttatagcgcttgattcttgcccagaatcgaagcgtttcatcaccaaaagtgatagatattgacgaaaattttaagtttattgaagaaattgaaacaaacaaacaaacaaacaaaaaactgaatcgtaatatgtttgtttggtgatggggtcaggcaaaggcgcgacttcttctgcccaacaaatggaatcgtctgtccaagatcttcgtgagagatataggctagaattggaaaatttaacattgactacacagccagtcaaaacatcaaggtttttccttctggctatccttcaatatatcaagcgatcagcatcatatcttttggcaaagggtggttggcttatgctttcaagcactctaatacagttcttggaattttgcttgtgactattgagggccctcatgaaaagcatgttgaggaagtttctcagtatgttcgatttggattatggtggattgcacttggtgttgcatcttcaattggtcttggatctggtctgcacacttttgtcctttatttgggtcctcatattgccttgtttacaataaaagccatt

SEQ ID NO: 22668 - DNA, 673 bp, Gossypium hirsutum
  Clone ID: GOSHI-09MAY01-C81199_1
ggaaccgctgttctccgccgtggacgtcgtagtggtgggaatcggtctccttttaaccctgttattgtcttgcgcggtggaacggcgacgccttcgccttctgggggagattcgagtgttgaacagaacgggagggggtttgagctttattatgacgatggatccgggtcgggtctgaggccgttaccgccgactatgtcggagtttctgttgggttctgggtttgagcggttaattgatcagttatcgcagatggagattcagaacgcggggcggaacgagcaaccgccggcgtcgaaagcggcagtggaagcaatgccaacggtggaaataaacgaaacccatattgacgacgaactgtgttgcgccgtctgtaaggagcaattcgagttgggaaccaaagttcgtaacatgccttgcgatcatctctaccattcaaactgcatactcccctggcttcaattacggaactcctgccccgtctgccgccatgaattacctgcagccaccgtagacggcgatgaaggagcagaaaccgatcgtgtgtattcaaatttagatgagactccggtggggttgactgtttggagattacctggtggagggttcgccgtgggcaggtttcaaggaatcagaggtgatggggagaatagaggtctccaatggtttacac

SEQ ID NO: 22669 - DNA, 745 bp, Gossypium hirsutum
  Clone ID: GOSHI-09MAY01-C81109_1
aagaaaaatagtcattccctttctctttttttttttctcaaaaaattctcataaatttatgattttttttgaaagaaaaagccgagaaaaatcatatacccaaagctcccaattaaactatgagcagctcatctgcatcctctcgcaaggcgctgagtaaaattgcctgtaatcggctgcaaaaagagcttgtagaatggcagtccaaccctccttctggtttcaaacataaagtcacagataaccttcaaagatgggtaattgaagtgaatggagctccgggtactttatatgccaatgaaacttaccagcttcaagttgatttccctgaacattaccccatggaagcaccccaggttatttttcttcatccagcacctctccatccacatatttatagcaatggacatattcgtttagatatattgtatgattcatggtcacctgctatgactgttagttctatctgtatcagcattctctccatgctatcgagcgcgactgccaagcaatgtcccgaagacaacgacaggtacgtaaagaactgtcggaacggccgatctccgaagcagacacggtggtggttccatgatgataaagtttaattgaagggaagatcatgccctgcatcaaatttgtttttaatgacttttttcatgaaagtgatgcttgatgccatgtaagcacatgaatgagaaaactatatatctttatgacacttttttttttcttttttttggaacaa

SEQ ID NO: 22670 - DNA, 508 bp, Gossypium hirsutum
  Clone ID: GOSHI-09MAY01-C81399_1
gcagaacaaagcagatcgattctgagaatgttttatatgtctgttgatatggctcgaaagaagaagaacacgcggcttccagtgtctaagttttaaccttctctgaatggcttcttcacctttgtgtttaaagtttaattgataaataaatgaatagaataatggtgtcatctgaatacctttttcccgaaatgcaggaagtgctcaaatatttaactttatggtagtgtagtttatacataatttctgcttttaaggaacttagttgttgagtttatgtttgagaaattttggagttatgttattaactcagtgaatccattaccttgctgggttgctagtgcctagtagttaacctttagaaatgttggcaagtagtcttccttgaaatgttcaatggaaacccttgggaataagaggaagggctccgaaatgttgccatcatgtacgtaggtccttttctcctatagcggttgtttggcctcacttgtcactggaagattactcg

SEQ ID NO: 22671 - DNA, 504 bp, Gossypium hirsutum
  Clone ID: LIB3585-014-P1-K1-A10
attctcttcaaatgcccaatggttagcagtttcaagtgacaaaggcactgtccatgttttcagccttaaaattagtgccggatctcctggcactacccaatcacgaagtacatcggagcctgttgtatcttcccattcatctctttcttttatcaaaggtgtgttaccaaagtacttcagttcagaatggtcagtggctcagttccgcctggttgaaggttctcagtaccttgttgctttcggtcaccaaaagaatacagtggtaattcttggcattgatggaagcttctaccgatgccaatttgatccggtgaatggtggggaaatgactcagctggaatatcacaactttctgaagccagaggcagctttctgaagatttacatttatatttacatatttacaaatatatgtttctctattttattgggtcaaatatttggcatcttccacggtccacttcctcctttcccaatctgtaaatatatatttaagcatagtttt

SEQ ID NO: 22672 - DNA, 526 bp, Gossypium hirsutum
  unsure (1)..(526): unsure at all n locations
  Clone ID: LIB3825-002-Q1-N6-D12
aacagctgaaatttatttactttttcttaagaacagttgcgaactttacaaaactatgcttaaatatatatttacagattgggaaaggaggaagtggaccgtggaagatgccaaatatttgacccaataaaatagagaaacatatatttgtaaatatgtaaatataaatgtaaatcttcagaaagctgcctctggcttcagaaagttgtgatattccagctgagtcatttccccaccattcaccggatcaaaatngcatcggtagaagcgattattgatggtttgtttcaacccattcttttgataccattattggtcttttcttttttctttctacctttcatcatgccaagaattaccactgtattcttttggtgaccgaaagcaacaaggtactgagaaccttcaaccagcggaactgagccactgaccattctgaaactgagtactttggtaacacaccttttgataaagaagagatgaatgggaagatnnacacaggctcgatgtacttcgtgattgggta

SEQ ID NO: 22673 - DNA, 366 bp, Gossypium hirsutum
  Clone ID: LIB3272-057-P1-N1-G9
gaacaggtgtttatatgtaaaatatctcttgggtacaccgttacaaactatacaaatctatatatagttttgtatatttacaaattaagaatacattaggcaaattaggggaaaaggtggtagaaccttaaaatatacaatatatttatatgcccgataaatagaaaattattttaaataaatgcagcacattagaaagctgcctcaggcttcagaaagttgtgatattccagctgggtcatttccccaccattcaccgggtcaaattggcatcggtagaagcttccatcaatgccaagaattaccactgtattcttttgatgaccaaaagcaacaatgtactgagaaccttcaaccaggcggaat

SEQ ID NO: 22674 - DNA, 473 bp, Gossypium hirsutum
  Clone ID: GOSHI-09MAY01-C83599_1
cggacgcgtgggttcacgcgcatgccacgcgctcctgtttaatcttccttacactacgcgccgtctcggaaacctcgctcccaatctaatagtaaaagtctcagctcctcggaagagtcgccgctgcctcaaccctttcgtttcgactgctagtctcatgggttcagtttctgcgttgaaagagcctttagagcatccaattcctcgcacagacgactctctcgtccccgtcctccatggcgttaagattgctgacccttatcgatggcttgaagatcccgatgctgaggaagtaaaggattttgttcagaaacaggtaaaattaaccgaatcggtgcttcagcagtgcgaagcaaaagataagcttcgcgagaaaatcaccaagctttttgatcacccacgttatgaggtcccattcaagcgaggcagtaagtatttctatttccataacactggacttcaagcacaaaatg

SEQ ID NO: 22675 - DNA, 602 bp, Gossypium hirsutum
  Clone ID: GOSHI-09MAY01-C83579_1
cccacgcgtccgcccacgcgtccgcccacgcgtccgcggacgcgtgggtgagaagattgctgatgggtatggcggactcgttctcgcaactcataatcttgagtcagggaaattggcagcatcgaaagcacgaaatttaggaattgagaaggggaatcaaaagcttgaatttgcacagttatatggaatgtcggaagcgctgtcgattggattgagaaacgcagggtttcaagttagcaaatacttaccctatggaccagttgatatggtaatgccatacctgtgaaggagagccgaagaaaatagaggactcttatcaacttcaagccttgatagaactctcatggggaaggaggtgaagagatgatttaagtgcctgcattttgcgaagccagagatggcagcttcagcagcaggtagcatgaagatagaaataggaacgccataaatgaggttttgactcatagatggtttgggatgggcaatttttcccaacaatgtagaattatgaaaaaaaaataacaatcattgtaacgtttgggcatttgtcccatgtcaattattatttgcattagaaattgatttttttctttattttgacc

SEQ ID NO: 22676 - DNA, 690 bp, Gossypium hirsutum
  Clone ID: GOSHI-09MAY01-C83779_1
ctttatcaactttcattttcttttaaccgtgctttctctttaacctggaaccgtttgatgcagttcattttctgatccgggttttaatctagttttcattctttttctttttcgcatcaattaaagtgcacccaaagttcttgtctttccagaaaggaataatacccatcggaaaataaccggtccattttgataaagtttttttttttggatctccttttgtatggaatttgatagcattgattgtatgacatcttcagatgtgattgatgatgatgatgagatccatcatcctaatcagttgtcttcattgttgaagtcccatagcaacaatgggagcagcaacagtattgtgtcacctgcggttcactcaagcaccaccagtgtccatgaacttctggaatgtcctgtttgtaccaattctatgtaccctcccatccatcagtgtcacaatgggcatactctctgttcgacctgtaaaacaagggtacacaatcggtgccccacttgtagacaggagcttggtgatattacgtgtctaccactacagaaggtagctgaatcacttgaactgccttgcaaatatacatcacttggatgcccggagatctttccttactacagtaaactcaaacatgaggccctatgcaacttcaggccatacaattgcccatatgctggatcagaatg

SEQ ID NO: 22677 - DNA, 213 bp, Gossypium hirsutum
  unsure (1)..(213): unsure at all n locations
  Clone ID: LIB3493-036-P1-M1-D6
gttggatccgaactgatgtttcagtctctgggtcgggtgatttgggtgtcgtggtgcttantctncattgttnaantcccatancaacaatgtgagcagcaacagtattgtgtcacctgcgggtcagtgaagcaccaccagtgtacatgaacctttggaatgtcctgtttgtaccaattctatgtaccctcccatccattagtgtgacaatgg

SEQ ID NO: 22678 - DNA, 1035 bp, Gossypium hirsutum
  Clone ID: GOSHI-09MAY01-C83399_1
atcctctaaatagccagttttgatcaggagctccgggctgtagtgcaggagagcatggagcaacgcaagttggagctacggggccgacctacattaaacatgatgataccaatgaatgtatttgagggttctatcaaagatcatcatggaagggtagtgggaggggaaagtggtgatgaagcattggatgaagaggctggaggaagccgggaagtgcaggtgaaagttctcgtgaagcgggggaacaaacaacagacgaaacaaatgtatattccccgtgattgtacgctagtccaaagcacgaaacagaaagaagccgcggagtttgaagagaaacaagacattaagaggctggtcttggagtataatgacagggtagaggaagagaataatggactcggaacacagacattgaattggccaagtggaaatagcagagcttatggccgtggaaactcatgggaaggatccagcggcaggggtggaggatcacgtcatcgccatcatagtcattcaggaagtggatcttattatggcagaaaaaagtgagattcatggtagaataatggaaaattctgaagactgggcatcatattgagcctccatttccacacattagacaaagtttgagaaaaacattggcttgggctctcagagcaccgccagatgattgaatgatctctttctggtctgatttgaaacggaaatttgatgttacattgccctgtaactgcaaatccgcaatcacgccttcctgcagtatggctactgttgcatcgattttctcatataggcaaggtacgtaatacatctaacctgctgcttttactagatgttagtctttaattaggagtacctacaatggattccgatgtgtgacgaggacctgaaaataagctttacagagtccggaaatgattggcattcccatctttactgtcgtattatctggtaaaagggaagaagtggatttgattaaaacatggttctgttaccctaactgaacgtttcctaagtaaattctgtttgatatag

SEQ ID NO: 22679 - DNA, 430 bp, Gossypium hirsutum
  Clone ID: GOSHI-09MAY01-C58818_1
gacccacgcgtgcgcgggtgttttatcctcccttatattatccgtgtcgatctctaccaacacccagctcgacatggtcagttggaactttcacttttacagttacaggtactttagtattgttattggtgttgaaaagtgttttctagaaatgaaaatctattatattttactgttattttttttattctgttttcgttcttattgtaccataaaagttcgtaacaagattaatatactattggttatctgaggtttttaaaatataatattgaattttaatttaatggttacgtttatataatcaatatatttttaaatttattatattttttattaatttttatttaatttttttatattatattaatttattttttttattttttttatatttttttgtatttatttttatatttattttatttta

SEQ ID NO: 22680 - DNA, 422 bp, Gossypium hirsutum
  Clone ID: GOSHI-09MAY01-C58558_2
aggagactattggttacattttctcatttggtgcagttggtgcactcttgggggcaatactctaccaaaatatattgaaggatcatccttttccagacttgctttcctggattcagttattctatggtttggcagggatgttagatctgatattggtgctgcgaataaacttgaagtttggaataccggattctgtctttgttgtgatcggcgaagctgtaactcaaatgattggacgactcaaatggatgccccttcttgtactgagtgcaaagctttgtccttcaggtattgaaggcacattctttgccttgctcatgtcgattgataactttggacttctatcatcctcatggggaggaggcttgctgcttcacacgttgaatgttactcgaaccaaattcggaaatctttggctggcg

SEQ ID NO: 22681 - DNA, 410 bp, Gossypium hirsutum
  Clone ID: GOSHI-09MAY01-C58558_1
gccacgcgtccggttcgaccgcgaaccggtgacttttaacggtatgaccacattggttgggtcccaaaacatatggagatacgcgggtcaaacatctcgcatataatcttagaaaaacaaagatgaaaaaaacaaaaaatgaagctgcaaaaaaaaaaagaagattggaatacccagattctgactttgttgtgatcggcgaagctgtaaactcaaatgattggacgactcaaatggatgccccttcttgtactgagtgcaaagctttgtccttcaggtattgaaggcgcatgctttgccttgctcatgtcgattgataactttggacttccatcatcctcatggggaggaggcttgctgcttcacacgttggacggtactcgaaccaaattcggaaatctttggctggc

SEQ ID NO: 22682 - DNA, 796 bp, Gossypium hirsutum
  Clone ID: GOSHI-09MAY01-C58478_1
cggccgcgtgggttaaagttgactggaaactcccagaccccaaaggaattgtatctcggattttgttgactattttgtctttcttcatgatgatttacactatcctccacacggcagcacgccgtataactaaaaagcttcctgacacagtttctgatcattgtcaaaatgttactaaacttacctctgatgcgactcaacaagctgagtctcgtccaccgtctccgatccctccttttacccaggctgatcttttatcctctgttctcaaaagattgggtgaacttgaggagaaagttaatatactacaagcaaagccatctgagatgccttacgagaaagaggaattgttgaatgctgccgtatgtcgtgttgatgccctagaagcagagctgattgctaccaagcaggcactttacaatgctttgatgagacatgaagaattgcttgctgaaattgaccgtcaagagaaagccaattttctgaaactgcagaaaaagaagttttgctggtgatgcttttgctgctgatggagagcttacaaaaaccactaatctatcgtcaatctgtttccacttcactggttaacatacaactccctatatcgatcttgtggaggttataagtctttaaccaacgtatttgccattccgagtacaaatcattctgcacagaaatgcacaaaaactgtaatcgaactctgttaacttatttaaattcccttcttctttttcagtgtaatgtttgatttgctgcacttcttaaatattaagggtgtttcatatgatgccttggg

SEQ ID NO: 22683 - DNA, 746 bp, Gossypium hirsutum
  Clone ID: GOSHI-09MAY01-C58418_1
ttaagcactcgtgcaagtttggttgagacgggtgcaggtgctgttgacgcaacagcaggatggggttcaacctgttgtaaaccgtgctttactctgccttccacgccataagcacgttaagtttatttcacaggcggctatacttgagttcaaatctggggttcctgatagagggagatctatgtttgagggagttttacgggagtacccaaagagaacggatttgtggagcatttatcttgatcaagaaattcgacttggagatgaagatgtgattcgtgctctgtttgagagggcaattagtttgagcttaccacccaaaaagatgaagtttttattcaaaaagtatctcgattatgaaaagtcccgtggtgatgaggaaagaattgaatctgtcaaacggaaggcaatggattacgtagaaagtactctaacttgaagttattgagatttgagacacatatctgatcagttgatctggaatatgcgagtacattggcgtagtcgtcaagataacattatttttgcattaaaatagccctcgtatagaggaagaaattagatccatagtttcttctaattttttatttgaatagtctcttttaaaaccctaaatagtaaattatgagctgatagatgggggaaatgcccttctgtatttagtatcttgactgtggcatcgccaccaacattgtttttgatgtaaaatgctaccgattgagggacaataacttttttttggactg

SEQ ID NO: 22684 - DNA, 598 bp, Gossypium hirsutum
  Clone ID: GOSHI-09MAY01-C58778_1
tgtggttttgcaggccgtggctatgtacaaatcaaaggaccccaagacatcagatgaagaggaaatgctagagaatttgtttgattgcttgtgttgtttattgatgccattggagaacaaggagaggttcgttaaggccgaaggagtggagttgatgatcattattatgaagcagaagaaatctgcctatgcctctgccatcagggcacttgatttttccatgaccaagtatccccctgcttgcgagcgatttgtggatgttctgggattgaagaccgccttcgctgctttcatgggtaagattcctataagtaagaagaacaagaaggaaaggtaccaagaggagttggaagagcgcctggtatcactaattgcatcattgtttggtggaattttgagaggttccagaagggaaaggttgttaagtaaatttgttgagaatgaatgtgagaagatagaccgccttatggaactatatataagatattccgacagagttacagcagagacacaacgactggagcaactggaacttgatgatttggagatggatgaagaggaaaagtacaataggaaacttgaatctggacttacactc

SEQ ID NO: 22685 - DNA, 355 bp, Gossypium hirsutum
  Clone ID: LIB3149-042-Q1-K1-F1
cacaatgtaagaatcttgctaaaaggttgttggcggatttcgttttttttttttttttatgcgggaaagtgtaaaccttacaatttatcttgttttgattttgcataagatgcaatggagactattaagaatctcagatcatcagtcatgaatgatataagcaagtaacaaaatgtgaggtacttctctattacctgctcatactgcctttattgcagaggagtcagaaaccgacagtgaagaatcagacgttagtggttccgaaggagatgacacgtcttggatttcatggttttgcggtttgcgaggcaatgagttcttttgtgaagttgatgatgaatacatccaagatgac

SEQ ID NO: 22686 - DNA, 369 bp, Gossypium hirsutum
  unsure (1)..(369): unsure at all n locations
  Clone ID: LIB3149-042-Q1-K1-F2
gaaannnnggaaggacccacgcgtcccacaattaagaatttgtaaaagttttttctttttaattttttttttttatataggcggcgtagagttaaccttacaatttatctagcctaaattttgcataagatgcaccggaaactattaagaatcttagatcatcagtcatgaatgatataagcaagtaacaaaatgtgaggtacttctttattacctgctcatactgcctttattgcaaaggagtcagaaaccgacagcgaacaatcaaacattaatcgtttttatttatatgacacgtctcggatttcaatggcccgccagctgcaatgcaaaaaattcttttgtgaatttcattcattaatacatcca

SEQ ID NO: 22687 - DNA, 311 bp, Gossypium hirsutum
  unsure (1)..(311): unsure at all n locations
  Clone ID: LIB3149-042-Q1-K1-G1
caatgtaagaatcttgctaaaaggatgtttgcgtttttcgattttaattttttaatagggggtggagggttaacattacaatttatcttgtttagattttgcataagatgcaatggaaactattaagattttttttttttttctttttaatgatanaagcaagttacaaaacgggatgcacccctatatcacctgctcatactgcctttattgcagaggagtcagaaaccgacagtgaagaatcagacattagtggtttcgagggagatgacacaaattggatttcatggttttgcggattgcgaagcaat

SEQ ID NO: 22688 - DNA, 507 bp, Gossypium hirsutum
  Clone ID: GOSHI-09MAY01-C58318_1
tcgttcagtagggttgaaacaatggctttcctaagtaaaattgggaatatgcttaggcagacctcgacaacacagatcaatgctcagttgtctgcatcaagtccaagcctctttcatgtgttccggtgcatgtcgaacatgccgagctcaaaactattggggggaggtatttcataccaaacagatgaccaaggtctgagagaagctttcagcaaatatggtgaagttgttgaagcaagaataatcgtggatcgagagacgggtaggtctagaggatttggctttgtcacctacacaagttctgaggatgcttcaagtgcacttcaggccttggatggacagactctccatggccgtcaagtaagagtaaactatgcaactgagagagctcctcgtaactttggaggtggcggctacggtggtggtggctacggtggtggtggctacagtggtggtggctacggcggtggaggctatggaagtggtggcggtggatatggaggcggt

SEQ ID NO: 22689 - DNA, 577 bp, Gossypium hirsutum
  Clone ID: GOSHI-09MAY01-C59978_1
atcaaaaaagggccagaatggataggaaaggactcccaaaatctgagcataccagccgcttaaggagaaatgttgctagacaaccatagttgaggttagaaagaggaaagaaggaagagttagtgggctagagaggggaaggatgtgatttgagcagatagttctcattctcctctgtccagagtacctgaactatgaggatgggaaattctctaagagccggggtgtgggagtgtttggggacatggcccaggacacggggatccctgccgacatctggcgcttctatctgctgtacattcggcctgagggccaggacagtgctttctcctggacggacctgctgctgaagaataattctgagctgcttaacaacctgggcaacttcatcaacaggtgggaattggtaaggggtcagagttagcagtgagctggggtggggctcattttccctcaggagatgggaatgtggagagaactagaaaatgggcaggaggctgtgaggacagtgtggaaagttgatttctattaattgggatctgttcctagcacatatgaggctatgtatgcttgatgg

SEQ ID NO: 22690 - DNA, 374 bp, Gossypium hirsutum
  Clone ID: GOSHI-09MAY01-C59898_1
gataccttgtaatgtgtcaataaaccattccacagaggttgtttgctaagaactttggggtttccaagaattacaataccatatcgagcacgtgttaaggcaacattaagcctgcggggatcatctagaaatccaataccctaaaaagtttatagaacagtttaaaaagtagcatgttagtttggtccataattaaagcatatagagagagagaggacagagagggttaaaatattagtattagacttggaatgaacaccataactagaggttaatccaccaaacaaatgaaaaatatcacaaagaaaaactttcaacaaacttatgaatagtgcagaaattgaatattagtttgacataagactgagattcaa

SEQ ID NO: 22691 - DNA, 382 bp, Gossypium hirsutum
  Clone ID: GOSHI-09MAY01-C59848_1
atcgagaaagtcgagtggccaacgagccggcagagacccaccgagcgtcggcggagggagcagcgccggggcgcacgcggccaccatgacccagacgcccgccttcgacaagcccaaagtggaactgcacgtccacctagacggagccatcaagcctgaaaccatcttatactatggcaggaggagagggatcgccctcccagctaacacagcagaggggctgctgaacgtcattggcatggacaagccgctcaccctgccggaattcctggccaagtttgactactacatgcctgctattgcgggctgccgggaggctatcaaaaggatcgcctacgagtttatagagatgaaggccaaagagggcgtggtgtatgtggag

SEQ ID NO: 22692 - DNA, 402 bp, Gossypium hirsutum
  Clone ID: GOSHI-09MAY01-C59828_1
aatgctcccccctccccccgagcgccgctccggctgcaccgcgctcgctccgagtttcgggctcctgctaagctagcgccgccgtcgtctcccttcagtcgccgtcatgattatctaccgggacctcatcagccacgatgagatgttctccgacatctacaagatccgggagatcgcggacgggctgtgcctggaggtggaggggaagatggtcagtaggacagaaggtaacattgatgactcgctcattggtggaaatgcctccgctgaaggcccagagggcgaaggtaccgaaagcacagtaatcactggtgtcgatattgtcatgaaccatcacctgcaggaaacaagtttcacgaaagaagcctacaagaagtacatcaagattacatgaaatcaatc

SEQ ID NO: 22693 - DNA, 581 bp, Gossypium hirsutum
  Clone ID: GOSHI-09MAY01-C59518_1
cccacgcgtccgcccacgcgtccgcccacgcgtccggccgttttatggggaaagaaggaaagatgggtagggttttcgcatctcttgtgcttgttttggtggttgtgcaagctagccatgcacgtaatgtgcctagccatgtcggcctcgataaccgacaaacaacgatgccaggtgcctcaacggaggagcaaacgttgcaagccgatgcaccgaaggcggattcaccgaagggtacgagtggcattgatgacaagaagaattttatttacggtggagttggtggctttgctgggatgggtggctatggtggaattgctggtggaatcccttttcttggcggccttggtgggattgggaaatttggtggaatcggtggtgccgccggaatagccggttatacgggtatcggtggcctgggcggtttaggcggtgttggaggacttggtggtggtattggcggtggcggcagcctcagaggtggcagtggcattttcccatccccttgatgtttcgtgatttggtgatgtctagattttaggtgttgtatgttagatgttagatgttcatgtcttaagtgg

SEQ ID NO: 22694 - DNA, 465 bp, Gossypium hirsutum
  Clone ID: GOSHI-09MAY01-C59498_1
cagaaaagccgaatcacgaaaagaaaagcgcctcctgcaggcttccctttcccttttaacgccgctctctctttcggccgttaagccgcccgtggtctgtttctaagttccctcctctctattttcttctcatatcaatcctcttttatatttcaaatttcgcaaatatctaatgccgcaaattaaccctgcctctaaaccctagagtcccccccccctttcacttctcggctttactttatactttaattattattattatttctttgattttgcgacgtggaatggatggagtgagtagcagtagcaacaaccaaaccgatgcatcgacgagcggcggaggaacccaaacagcaacacaacctcagccaatgccccagccggtggcagggcatagtgcaaacgggccaccgcctttccttagcaagacttacgatatggtagatgatcctgccaccgatgcca

SEQ ID NO: 22695 - DNA, 440 bp, Gossypium hirsutum
  Clone ID: GOSHI-09MAY01-C59408_1
atctcagatctccagctgtctctgtgctaatgaagctaaaacctatcactggaacatcacagctgtcaaattgggtcacattaactttactattagtacaaagattctggacagcaatgaaccatgtgggggccagaaggggtttgttccccaaaagggccggagtgacacgctcatcaagccagttctcgtcaaacctgaaggagtccttgtggagaagacacacagctcattgctgtgcccaaaaggaaaggtggcatctgaatctgtctccctggacctcccagtggatgttgttcctgactcgaccaaggcttatgttacagttctgggagacatcatgggcacagccctgcagaaccgagatggtctggtgcagatgcccagtggctgtggcgagcagaacatggtgttgtgtgctcctatcatctatgtgttgc

SEQ ID NO: 22696 - DNA, 384 bp, Gossypium hirsutum
  unsure (1)..(384): unsure at all n locations
  Clone ID: LIB3196-048-P1-M1-G1
atcatggctgtaggtgccactgagtgtatcagccccaaggactctaccaaacccaataatggagtgcttgcaaaaattaccagccaccatggtggggaccacttttgaggtattgggcgtcttgaaaccatgattgatgctctggcatcctggcatatgaactaatggaccagcgtggtagtaggaggctcttcaataagcaagaatgctaactacgaaccggatgtgcttcttcactggacgcacgtggaagggatgtgtcttttgaggtttgaaaagcagagatgatgtcccaaaactagtgactgagttcctggcaaagaaatttgacctggaccagntgataactcatgttttaccatttaaaaaaatcaatgaaggatt

SEQ ID NO: 22697 - DNA, 361 bp, Gossypium hirsutum
  Clone ID: LIB3196-006-P1-M1-D3
atgggttttccactggatatggggctgctgttaaaactggcaaggtcaaacctggttccacttgcgtcgtctttggcctgggaggagttggcctgtcagtcatcatgggctgtaagtcagctggtgcatctaggatcattgggattgacctcaacaaagacaaatttgagaaggccatggctgtaggtgccactgagtgtatcagccccaaggactctaccaaacccatcagtgaagtgctgtcagaaatgacaggcaacaatgtggggtacacctttgaagttattgggcgtcttgaaaccatgattgatgctctggcatcctgccatatgaactatgggaccagcgtggtagtaggagc

SEQ ID NO: 22698 - DNA, 380 bp, Gossypium hirsutum
  Clone ID: GOSHI-09MAY01-C59708_1
cccacgcgtccgctcaggccgaaagctttctcaatctcagcagcgggcatccaccttttggcttagcttagtcagttccctgccctatggttgttgaataagaagagcttataaaaggagttggtcaacaagaccgacgaattagaactagtatccactcattacacagaagaaagagtaacgcttgaagttcaatctccccacattctatctccatctgggctattgacggctaccaacccccgctctatctcttctgagtcatcaggggtgacccgaacttcggtgtcagaggatccatctcttcgacgggtataaaggctggttgcagtgctccaaaccttatccatgttggtagtcgcttgtcttatgagtgaatc

SEQ ID NO: 22699 - DNA, 571 bp, Gossypium hirsutum
  Clone ID: GOSHI-09MAY01-C59648_1
gttcatttgggtggttcgtccaccggtagagaatgattcagcagcgacagtttttaagtcaaacggcgtctacaatgacttcctggactactttcccgaagggttcttgaatcggacctgcaaaaacgggttggtggttccaaagtgggcacctcaaactgaaatcttgagccatccatccataggtggatttttgtctcattgcgggtggaattcaagtctggagagtatcgtcaacggtgttccgatgatcgtgtggccattatacgccgaacaaaagatgaatgctacggtactagctgagcacattggggtggcaaccagatcgaagttgttagcgccacagggtgtggttgggagaggtgcgatagcggcaatgatccgaaagttcatggtcgataaagaaggtgaagcaattagagccaaagtgaaaatgctaaaatcatgcgctgtaaaggctcttagcaatggcggctcctcttataatgctctggctacagtcgccgaagagtgcaagattggaatgcaacgccggaatgcaaaaacaggctgatcttcatctctagtttga

SEQ ID NO: 22700 - DNA, 519 bp, Gossypium hirsutum
  Clone ID: GOSHI-09MAY01-C59678_1
atgctggcttggcaggcagtacagcatccaggggagtcaagggcatggggcgagaccagactaggcgaggcgggcggggcggagtgaatgagagctctcaggagggaggctggcgcaggcaggggtgaggagcacagcaggcggcgagcgggaggcactggcctccagagcccgtggccaaggcgggcctcacgggcgacgacggagccgggatcggtgcctcagcgttcgggctggagacgaggccaggtctccagtcggggtggacgtgcccaccagctgccgaaggccgggacgccaggtccggcggacttgccgagcgggacatgacatggtccggtgtgacggcgaggacagaaggggcgcgtccggccttcctgaacaccctaggctggtggggctgcggcaagaagcgggtctgtttctttacttctcccacggagtcggcacactacagctgccctctgggctcccagaacccacaacatgaaagaatggggctacccagctcaagcctgg

SEQ ID NO: 22701 - DNA, 296 bp, Gossypium hirsutum
  Clone ID: LIB3196-005-P1-M1-D8
atgctctcaggagggaggctgccccagccagggggggggggcccagaagccgttaagcggaagcacttgccttcaaaagccgtggccaaagggggcctcacgggcgacgacggagccgggatccgtgcctcagcgttcgggctggagacgaggccaggtctacagtcggggtggacgtgcccaccagctgacgaaggccgggacgccaggttcggcggacttgccgagcgggacatgacatggttcggtgtgactgcgaggacagaatgggcgcgtacggccttactgaacaccct

SEQ ID NO: 22702 - DNA, 547 bp, Gossypium hirsutum
  Clone ID: GOSHI-09MAY01-C59088_1
cttgttaatgttttgaagtctctttccaaggggaaggtctggatactttccctcaaggtgtggttttcgttactgctgcttagcttcattccagccttaccatttcaggctatttttttcataggacttccacttgcctttatagctttctatgtatatgacaaaaaagagcacgaaattgatgctttcattctagaaactttctcaatgggatgcaaattgaaatctggtattgccaggaaattggtggcctccaagaagaatgattgatagtatactagaattggactttggagccccaattttccttaagaaaaaggggggggggagctcttttcgaggattttaagcatttggaccattgttacttgtattgtaggcatttcactttgagaccccttcatatcacttgtatgtattccataggaatgtttgatacgttttcctctttggattgtatactgaagtttggtttgggttagtgtactctgtgtgtgttggtttgatgaataaaaaggcaactagactttgattatctccgtctttt

SEQ ID NO: 22703 - DNA, 679 bp, Gossypium hirsutum
  Clone ID: GOSHI-09MAY01-C59348_1
cggcgcgtgggttggaaagactttgatgagcaaggtgttgatatggatgactttgattatgcattgaagaaaagtcgatacacccaagctacttctaattacaagtttggtggtcgatttcaagaaccggcaagaatgccttctagaattaggccctctacaagcccagagtccttatgattcaagggggatgggatggatgagtgtttgtatctactaatgtatcacgtaaaattactgcagaagaaacaagtgcaaaattgatccaagggagattgttatttatggtccggaaaagggaatgttcaagattagctagctgatctctcatccaaaacctggagcggagtgcagagcaaagaatgttggatatatgaagtttttgaaggtattgtcagcttcttgtttattcagagtattactatgattgtaaaaattcaatcaacggatagcttagatttctttcttttgtcgctttgaaattgttctttcttatacgagctccttactacccgatgaaatgtcttttttgcggccccctattgggtgtgagaagctgctaaatgtaatacttatttgttaggtttggcccaaattaaaatgatgtttacaatttaaaagggggaatgatgtatgctgatctactgctaccccctggtttaataacaatcatttcatc

SEQ ID NO: 22704 - DNA, 575 bp, Gossypium hirsutum
  unsure (1)..(575): unsure at all n locations
  Clone ID: LIB3583-004-P1-K1-F9
agaagagagnaaannctanannncnacactgctcttcatagtttcgacgccatctcttctttgcggggtaaaagctaacgaccaaatcctccatctccaaggattttaatctaaatctaaatcacccaacttttgaaacctaagattctaatttcaaaccctaattttcaaattcccctaatttccccaaatacccgcttcaatttatcaaccgtcaaccaaaaaaaaaaaaaagataaatgaacatgaaatgatatgaggaagaattattgaacatgaacaatgggtgtttggagaatagaaaaaaagaacatgacaattcacaaaaacggccaaagtcttacaaattcggtagcaaaagtgacgattttgccctagcaatcgcgaaggttgcagtggcgcaactatgtgaaagcgtagggtttcagggttttcatctctctgctttagaaacattatctgatattagtgttaggtatatttacagcatagggaaaactgcgaatcttaatgctaatttagccgggagagtggaagggaatgtgtttgacattattcatgggttaagaagattt

SEQ ID NO: 22705 - DNA, 383 bp, Gossypium hirsutum
  Clone ID: LIB3165-033-P1-K1-F7
ataaaaactaacgcccaaatccttcatctccaagggttttaatctaaatctagggctaaatcccccaacttttgaaacctaagattctaatttcaaaccctactttccccaaatacccgcttcagtttatcaaccgtcaaaaaaaaaaaaagataaatgaacatgaaatgatacgaggaagaattattgaacatgaacaatgggtgtttggagaatagaaaaaaagaacatgacaattcacaaaaacggccaaagtcttacaaattcggtagcaaaagtgacgattttgccctagcaatcgcgaaggttgcagtggcgcaactatgtgaaagcgtagggtttcagggttttcatctctctgctttagaaaccttgtctgatat

SEQ ID NO: 22706 - DNA, 527 bp, Gossypium hirsutum
  Clone ID: GOSHI-09MAY01-C54088_1
cccacgcgtccgcccacgcgtccgaaaatttccccccaaaattctcccaatctttcttattttcttggcaataattctcagccccagtgatgaaaacaggatttcacatcaactgtaactaaggaattcgattttagtttcagccatgtgttatagcaaagccccaaaaatgaacaacaatgatgtaatgagtgatattttactgaggctaccattgaaggatttggtgggatgcaaatgtgtctgcaaatggtggaatactctcatctcggaccccattttcaagttgaattattcgctgcgaaaccctcagtacaatatctcagggttcttcctacagaaattcttgtaccttgagctgcattcgaaattgttgttctttccttgtgaaggacgagtagatgctgctcctaaaccatctctctctttcatagaagatgataaaggtgtttgtatacaacattcttgcaacgggcttctcatatgcagcagtttccgatgtggagaagaagatcgcaaatactaca

SEQ ID NO: 22707 - DNA, 454 bp, Gossypium hirsutum
  Clone ID: GOSHI-09MAY01-C54238_1
cccacgcgtccgatggcacccatttcattacccaacaagccccatgcagtatgcatcccctacccagcacaaggtcacgtaaatccgatgctcaaagtggccaaactcctccatttcaaaggcttccacatcacttttgtcaacaccgagtacaaccacaaacgcttgctcaaatccaggggcccccacgccctcaatggcttgcctgacttccggttcgggacaatccccgacggccttcctccgccggacatcgacgccacgcaagacatccccgcgctttgtgactccactagcaagcattgtttggctccctttcgccgactccttgttgagctaaaagctacttccggtgtcccgccggtcacttgtatcgtcgccgatgggtgcatgtcgttcactctcgaggcggctaaagagttagggattcccagtgtgttgttttggacaccca

SEQ ID NO: 22708 - DNA, 422 bp, Gossypium hirsutum
  Clone ID: GOSHI-09MAY01-C55998_1
cccacgcgtccgaaatccaactagtttcactaacatgggtatggtttttggtaggatcacagtggaaacaccaaagtatgaagtgggtcagtcctcggctgactatgaaatccgaaaatacccacctgcagttgcagctgaagtcacatacgatccatctcagttcaaggggaataaagatggtggcttttcgttgttggcaaattacatcggtgctttaggcaatacccaaaatgcaaaacctgaaaagattgcaatgacagctccagtgataactaaatcacctggaaatgaaagtgaaaagattcccatgactgctcctgtggtgacaaagggtgacaacaataacatggttaccatgcaattcctattgccggcgacgtataagacagcggaggaagcaccgaagccgttggatgaga

SEQ ID NO: 22709 - DNA, 896 bp, Gossypium hirsutum
  Clone ID: GOSHI-09MAY01-C55888_1
gttaaaaaataaaaggccatggttcctttacaattatttacaaaccccattcttaagccatcaatcaaacattccctctctctttgatctttaagaatcaagatcctttctttttctttcactaaatcgacgttaacccaatcttcccaacacaatcaggccatcgaattctctggtgtttgaattgaatatctcatatatggcttacatccctccacacaagcgacattcgaaggatgcggagagtccaacgccaacgccaacaccaactccagagtcctttattcccaaatttaaaagaaatgtacagttaagagcttcaaacaccaaagctgataggagtggaagaatcgtatattcaaactatgccatctctagatggtttgctgttggtttggatgatggaaatggggacacatcttccgttcatcttaagccagtttcagttgaatctattgagaggaaaacaggtgagaaacctgcaatcttggtgaaaagtaatttaaataaagagaataacgaagcaaaagggagcccgtggtcttctattgcagaaaatattctgccagacctattatcctcctttgagaaagtgagggctgaaacttgagtgcaaagatttgaaagatgtaaagccaggattggtgcgctccgtttggcaaaatactttttcaagggagcccttccatgaacctgggaagtgttagtaatggttgcgttacagagacattattgagtaaattgaaaagaaccttttacacgagtcttcctgcttcatacacgggaaacattatggctgaagttgtctcaaagattggagttgatttcgcagaggtgaaagatgtttccctgaggatattttccataactctcttttgatatgatctcactgtgga

SEQ ID NO: 22710 - DNA, 837 bp, Gossypium hirsutum
  Clone ID: GOSHI-09MAY01-C55858_1
cgccctccgggagggggagagagggagcctttcaatcaccgtgcatggcggcggcggctcatatagatatagagccagcaatacccgaggaagaaacgacgtcgaattcccttatacgaaacactcgttgctgcttctgtttcccttgcttcagctcccgtcgtacgcctgccgttggcgtagccttttggcagcggataggttcgtcccacgtccagtccgatactggcttctggtcctcaagtgttagagccttcaagaaggttcgagagtggtccgagatcgtcgccggcccccgctggaagacttttatcaggagattcaaccgtagcaaaagtgggggcggaatcgtctccggcggtaggcatggacaattccattatgatcctttgagttacgctttgaatttcgacgaaggcccgggacagaatggtaatttggaagacgataatgatttcggtgcctttcgggctttctcaacccgttacgcttctgttcccggttcggagaaaacaccattggcgtagatgacgccgagtggatcatgtacagtgaaccggtgacgtcactacggcgtggcttcttcgtttacttttatatgataagatggcacattgtagggttatttttgcctaatggataggtgggtgggttggggtgatagtgaaaggtgaggatgaagcgtatgggattaagattagattttgtatgtattcatttttgggctttttctgattttggagcttttaagttattttgcgtttaattttcctaattatgtaaatataaagtaggtttatatctcaaaaattccttcccaaaaaaaaaaaaaaaaaa

SEQ ID NO: 22711 - DNA, 834 bp, Gossypium hirsutum
  Clone ID: GOSHI-09MAY01-C55408_1
gcaggtgttaataggaaaatatcagccgcttccgcaagagctcacactagaagagccaagcaaaacgcttctttcaagcttccttcagggatttgcacaaagatactattggtcttgtttgctgggatattggcatgggcttatcaggctattcagccgccaatacctaagacatgtggctctcctgatggtccaccggtcacggcatcgagaataaagctcaaggatggaaggtatttggcctacaaagagcatggtgttccccgagatgcagcaaagtataaaattgtctatgtccatggctttgattcttgtagacatgatgcggttgttgccaataccttgtcaccggaaattgttgaagctctcggggtctatatcgtgtcttttgacagaccaggttatggagagagtgaccctaatccaaaacgaacggttcagagcttgcctttggatatagaagagcttgctgatcaattgggattaggatccaagttttatgtaattggattttctatggggggacaggttatttggagctgcctcaagtacatcccacacaggttagctggggcagcattgttagctccagttgttaactactggtggcctggttttcctacaaacttagttacggaagcatatcagcaacagttacccaagaacagtgggccgttcgtgtgagtcactatgctcccctggcttactactggtggaacactcaaaaatggttccctagttctagtgttgttgctcacagtaccgatattcttaatagtgaggacaaaaaactcttgcccgagatagtctctactagaactacacggcagtatc

SEQ ID NO: 22712 - DNA, 464 bp, Gossypium hirsutum
  Clone ID: GOSHI-09MAY01-C55668_1
cccacgcgtccggatttctcaatctccacgttttaatttcttgaaatctttttggatttgttttcgatggaatcgattagatcgccctattggtgctacagatgtaatcgattcatccggatccgggttcgatctccccatgattcgctcaactgccccgactgtggcggaggattcatcgaagaaattgaaacaccctcgcgatctcccatccaccaccgtttccctgtcgctgccatgtattccgacacgccaagccctgcgctcagcccaagccccaccgccactcctcattttcgccgaactcgtcggaacgctggcgatcgctcccctttcaatcccggtgtggtcctccgtggacccacctccgaatccgacggcatagttaccgaaagagggaacagaaatttccagctttattacgatgatggctctggctcgggtcttcgtcccttacctgctag

SEQ ID NO: 22713 - DNA, 497 bp, Gossypium hirsutum
  Clone ID: GOSHI-09MAY01-C55118_1
cccacgcgtccggattttcttgtttaaggttttttttaagacgcgcaatttgcggagtctactttaacggcttttcttccacgtttacaccttccctttctttcttgtccccaagtatgattcaattattacaatgctgcttaaaaactgggattcaattttgaatattcctatccaattcctgattcagggttttgagggtctcactgttaattaactcataaaagtttccatcttgagaaatgcagaaacgattatgaaggcttcgaagatgaggaattaagagaaagtctgattcatcccctgcgcgatttcactgaaactagagttaaacaaaagagtgtgtgggcccgccttaaaaattcaaaagcctgcattatggcacctggtggtggtatctgcaaggatttgatccaagcttggattacaattgcaaaatatgacaaggccacttcaagggccgaggtaaaaaggttccctttaagaaaagcaacaac

SEQ ID NO: 22714 - DNA, 734 bp, Gossypium hirsutum
  Clone ID: GOSHI-09MAY01-C55288_1
cagaaaagccagagattccccgacaactccggcgataactgtaccccataccctatctctgcccttctcgactaccgcaccctcgttcctaagccctttctttgatctgagtaagaaatggcgatgtatatcgtatctcggcgactctccgctggatccaccacctcccagctggtcacctctctccgttatgccacctgctggagatccttctccacgtcttttagggaggaacgagacactttcggccccattaacgttccctccgataaattgtggggagcgcagactcagagatcgttacagaattttgaaattgggggagagcgtgaacggatgcctgaacctattattcgggcctttggtgttctcaagaaatgtgctgccaaggttaacatggaatatggtcttgatccaaccattgggaaagccataatgcaagcagccccagaagttgccgtaggaatactcaacgatcactttccgcttgtcgtttggccaactggtagtgggcacccacagtaacatgaatgcccatgaggtaattgcttatagagcagctgagatccttggaacatcagcgtggtgaaaagttggtgcaccccaatgatcctgtggacaggtctcaatcttctaacgacacattccccactgtaatgcacattgcagctgctatggaaataaactcaagattaataccaaaattgaaaattttgcattctactttacattca

SEQ ID NO: 22715 - DNA, 608 bp, Gossypium hirsutum
  Clone ID: GOSHI-09MAY01-C56548_1
ctttagtggggcagacacttacggaaatttgtcaacgtgcatgcaaatatgctataagagaaaacattgaaaaggatatcgagagagaaaggaggaggagtgagaatcctgaagccatggaagaagatgttgaagatgaagttgcagaaatcaagcctgcacattttgaagaatccatgaagtttgctcgtaggagtgtgagtgatgcggatatccgcaagtaccaggcatttgcacaaacattgcagcaatcaaggggatttggaagtgaatttaggtttgctgaaactggttcaaggactgcagcatctgatccttttgcagcttctgctggtggagctgatgaagatgacctttacagttaaattacctttcatctgtgtttgcttatgggtctttcatatgatatttacatataaacgtagtgttaattgaactgtatgatattaagaacacattggcacagatcttgagcctgtgggtgctcaatggagtttagaaaacaggttttgttattttgggattccaagtttttattttctactagagttaaattcaaattttacccttttcatcatataaatagaatttacaatatttagtgttcg

SEQ ID NO: 22716 - DNA, 533 bp, Gossypium hirsutum
  Clone ID: GOSHI-09MAY01-C56488_1
gtgacactctcccagcatttatacagtcccaaaatcattctaatttagcccatcgagtctctcatcctcatttctgctttctcttcaatcttgatggctctctttctctcacttcttctcattcttttgactccttcaaccaatgcggactggccaccttctcctggttactggccaagctctaaatttaggcctatgagctttcacaaaggctttaaaaatctctggggtccttcccatcaaagtgttcaccacaatgcattaaccatctggcttgacaaaacttcaggaagtggattcaagtcagttcgtccatttcgatccggttacttcagtgcctcgattaaggtccaacccggttacactgcaggggttataacagcattctatctatcaaacaacgaagctcatccggggttccatgatgaagtggacatagagttccttggaacaacatttgggaagccttatactttacaaaccaatgtttatgtcagagggagtggggatgggaaaatcattggagggaaatg

SEQ ID NO: 22717 - DNA, 584 bp, Gossypium hirsutum
  Clone ID: GOSHI-09MAY01-C56438_1
tcggttttgatgatggttgttatgaagattggagtcgtgaccttcttgtggcacggaagatattgggaaatgagaggcttcctagaattcctcatacgatgattcttgaaggtggaagtatacatgtagatggagaaggaacttgcctcactaccgaggagtgccttttgaacaaaaacaggaacccaaatatgactaaagaagaaatagaaaatgaacttaaggcatatcttggtgttgagaaggttatctggctgcctcgtggattatatggtgatgatgatacgaatggtcatattgataatttgtgttgctttgcaaagcctggtgttgttgtgttgtcttggattgatgatgaaaaggaccctcaatatgaacgttccatggaagcattcactgttctctcgaatgaaaaagatgcccgtggtcggaaattagaaatagtcaaactccatgtccctggcccgctttatatgacagatgaagaagctgatggacttgttcaagatggtgaccctaaagcgagacttcctggtacacgacttgctgcttcttatgtaaacttctatattgccaatggagcg

SEQ ID NO: 22718 - DNA, 592 bp, Gossypium hirsutum
  Clone ID: GOSHI-09MAY01-C56338_1
tgcttagccttttgtctgcaaaatcaatcctgaggatggcattgatgcaatcgctaaaccacacaagaacaattcctatttgaaatccatatggattctcgagattcttctccaagtccagcccttttattgtgaaagttggaattccagaatttctgaatggtgtagggcatggggttgaaactcacgtagcaaagctggaatctgagatcggcgactttcagaaactgctcgtcacccgcactctcaagctcaagaagattggaattccctgcaaacataggaagctgatactgaaatatgcccacaaatataggctgggtctgcggaggccgagagctgagcccgtgaagagtgggattaactagtcctatcctttgggagctatgctaagatggtgatgttattgtaccaaagaatggctttagggctctatttgcaatcattggtcaccttactccttgtttcaatggacatgaatttagtggtttaggttcaaaaaaggggggaaagctctatttgcaatcattggtcaccttactccttggttcaatggacatgaatttagtggtttaggttcaaaaaagggggg

SEQ ID NO: 22719 - DNA, 654 bp, Gossypium hirsutum
  Clone ID: GOSHI-09MAY01-C57868_1
ctaaatcaaacgccactcctacctttgttttttcaatctcccttttccaatggccgatcttaccgattccgttatgccgtcagctgtaatcacccctctttcaaccacacctaacacccgtacgttacctgtacgtgaggattgttggtctgaggaagctacgtctacccttgttgatgcttggggtcgtcgttatgttgagcttaatcgtgggaatctccgtcagaaggattggcaagatgtggctgatgctgttaatgctcttcatggtcatactaagaaaacccatcgtaccgatgtgcagtgtaagaaccggattgataccattaagaaaaagtataagatcgagaaaactagggtgagttcttctaatggaaccctaacatcgtcttggcctttctttgaacggttggatgctcttattggatctaattttgctgctaagaagctttcgacgtcgcctaagatatcaccgaagccgtcgccgaggttgtcacccaggatcccgggatctcctcctgtggctcttccgcttttgcttccgtacaggaggactcctccggcgcccactgctattgttgctcttccccaaaaaaagccactgtggacaatgggtatttcaaaaagaaatattctgctgttgctgctgctgct

SEQ ID NO: 22720 - DNA, 664 bp, Gossypium hirsutum
  Clone ID: GOSHI-09MAY01-C57598_1
cacaaacgcaccccaaaaaagttttgacccattccatggcagccatggcaacaaccctctcttcactgtcttccacccccaaaccatccttcttagaccacaagtcatccttccatggcacccctttagcttctcgctttactcccattaaatcctcctcccaaaccgccaccatttccatgtccttaacccctccttacgacctgcagtcctttaaattccaacccatccaagaatcctatgtcgctcgtgaaatgacacgccgttacatgatggacatgattacctatgctgacaccgatgttatcatcgtcggcgccggctctgcaggtctctcctgtgcttacgagattagcaaaaaccccaacatccgtgtcgccataattgaacagtctgttagccccggtggaggcgcatggctcggtggccaactcttttcagccatggttgtgcggaaaccggctcacagattccttgacgagctcggcatccagtacgatgaacaagaagactacgtagtgatcaagcacgcagctctgttcacctcaacaatcatgagcaagctcttggcaaggcctaacgtgaagctattcaatgctgtggctgctgaggatttgatcgtgaaggaaaacagagtcgccggtgtggttacaaactgggcttt

SEQ ID NO: 22721 - DNA, 472 bp, Gossypium hirsutum
  Clone ID: uC-gsflmaxxa011b05b1
atttttcaactctctccattttagaaaaaagcttaaatacccaaagtttggattcatcactctcaactagatccctttcatctaccacacaaacttagctgaaagatcaatggcagccatggcaacagctctcacctcactgtcttcaagccccaaaccatctttcctagaccacaacaagtcatccttcagcggcactccaattccttctcgcttcactcccatcaagtcctcctcacacaactcaaacatttccatgtccttaacccctccttatgacttacaatcctttgaattccaacccatcaaagaatcctatgtttctcgtgaaatgacacgccgttacatgatggacatgattacctatgctgacactgatgttatcatcgtcggcgccggttccgctggcctctcttgtgcttacgagattagcaaaaaccccaacatccgtgttgccataatcgaacaatct

SEQ ID NO: 22722 - DNA, 545 bp, Gossypium hirsutum
  Clone ID: GOSHI-09MAY01-C57518_1
cgccttcttttcgctccctacttagctctctgtattgggtttttgaatttgaacttttttgcactctcagattcaggaaaaatgaagaaaccttttaactcaattgcaacttcgagccaaacccacttcgaggaaagtgaagaagaagaagagatcgaatcttcatccgaagaagagaaatccgatgacaccattgattctgatgaagaggaagagatagagcgtgaattagcagaagttacattcggagagctacaaaaagcacgagccgatggtactgattcaatctctcgcaaaccccaaacagagaccaagcgtcgtcgcgctaacaagaataggccaatggagcttagtagcaagaagccagtgaggtcatttagacaggttattcaagctcctaaaaaggtggtacgagacccccgttttgaatctttatgtggtaatctcgacgtcgagggattcagaaaaagatataattttctgtttgagaacaacctaccagctgaaagagaggaggtgcagaaacaacttaaaaagccagagac

SEQ ID NO: 22723 - DNA, 513 bp, Gossypium hirsutum
  Clone ID: GOSHI-09MAY01-C57798_1
ctctatttatgatgttgtagtcagacgctttgcatgctgatgagctagacaaaagcctagatgttctggaccagatgatgaagttttccatcggtgttactcctgcattgcaggagttcgtgcgtggagcttttgggaaagttgggaggactgaagaacttgatagagttttaaatgaaaataggtggagattccctgggcgtcaacctcgaccttttggacagtcaccacggtcaccctccggacatgctgagatgggtggagcgcagtcctcaggttccccacaaatggcaggtgccacagcaatttctcagccccttctcaaatgccagggccgcagtcattgtcatgccccccccccccgatattatgcagggtgaagggtttctctcagtttgtccccctggaactgatctgttttgcgcctctgtttttgtgatggtttagctattcttgtatccgaggagatctcctcaaatatatttgaaagtttgatacaaaaacccccccccc

SEQ ID NO: 22724 - DNA, 753 bp, Gossypium hirsutum
  Clone ID: GOSHI-09MAY01-C57778_1
cagtagtttacctagcagtagcaatgacggttgagatagactaaagggctttgacaaattccgtcacgagacatctcaaagtcaaactgcaatatcagacttggaaaaatatttagatgagcccgtctttcctcgtaactgcaatttcaatatattgaattggtggagagttcacactccaaggtatccaatcttgtcaatgatggcacgagatgttctcggaactcctatgtcaaccgtctcacaagagtcagcattccacgctggaggtagggtgctcgatagttgtagatgtccactgactcccgagactcgacaggctttgatatgcacacaagattggttacggatgcaatcagatgaccccggtccatcttcaagtcattatgctctacccctttatgtcgaaacaaattgatttgttctcggccttggtctcaaataaggtattcatctccatggagtgccaattgctttaaggtatttcgatgtggcattgcgattatagtccttcatcatgaagcttttgaatgaaaaatgtacattttagattaaaaacttaatgcttaaagcaatggctttaattcaaagcatttagctctttgattattgatagttatttgagtaaaaagtagaagcttgtttaaagcgatgttgaattgccaataacatgagcaatgggggcatagtttgcttctattgtagtatttatgtaattataacaagtttttaaagaaaatttttggttttctt

SEQ ID NO: 22725 - DNA, 574 bp, Gossypium hirsutum
  Clone ID: GOSHI-09MAY01-C57648_1
gttgtggggatcgaaagtggatgcccaagttgaagagacaagcttgaagctgatgagagatgctttggaatggccgctttctgtgtcactttacagtgacttaaacgacaatgaaggtgaagaagaggtagatggtgaagaggaaactgggcatagtcgtagatccttgttttggacgagaatgaggtattacatttcgtactcggcgctttctgctaatagaatcccatgtcccccaagatcaggaaggtcttattataccaacaactgtttcaaggcacatggatcagtccacccttactctagaggatgctccaggattacccgctgcaggagatgaagttttccttttttcttttcctttttaggggatgcttggggtttgtaatattttaatgggttttttgtgagaactatggaggaattgagtgttgaggtttcgggttttgccatttttgtgagtttttgtttcttggtttaatgtgtggattagcaatgtaattatgaacctatgatgtgtgatttggttaagatacttttaaggttatggttatggtaaaaaaaaacaaacttt

SEQ ID NO: 22726 - DNA, 437 bp, Gossypium hirsutum
  Clone ID: GOSHI-09MAY01-C57308_1
tagtagtggctctagcttcaatgcctcgattcctgatttccttcaagacagacgttttaatactcctcctacttcttcttcagcttcgttaccaagagaccatggactccttcaggatattgttccaacacagatgaggaaagaggcaaaggaacagtaagacagtacgggttctttttttatatgtaattatatggttgctggtatgttgtttcctaatcctttactaactgataaagaacccaattcactatatctttttttattcaatctattatcatctgtataaaatcacctgtctctttatagtgtttttgcaggagaacaagtggtcttgtacttggcttttcttgcggctattattcctttgcatttaagggagaattcatttatggaaatattgggggttttttattattaatttcttccaattgtgc

SEQ ID NO: 22727 - DNA, 517 bp, Gossypium hirsutum
  Clone ID: GOSHI-09MAY01-C50998_1
gggatgaacaacatgggcatgaatttaggcatggggatggatatgggaatgggagaaagaccccaaatgcaaggaatgcccggcggttataaccctatgacgggttctggcagctattctcaacagccatatggtggtggttatcgatgagaatgggttcctatcccggagaagaggagtaaggaaattacatacaagcttgtgatatgagagagtaaaaaagagatgggaaaatagctaaaacattagacgttgggaatggaatcccaaagtagaagcagtagagtcgcacatttgtgttggcagatgagaacccatgttttttattcatattattgtcattcttggttaagctattgccagtgtttgggccataatcactccttccattgattactggtttgagctgttgtgaaattgtgtggatgaaatggtatgatgaagcttcataaattctgtaataagctccaatatcttatttttaatttttttaaataaattctgcaataaaaattta

SEQ ID NO: 22728 - DNA, 636 bp, Gossypium hirsutum
  Clone ID: GOSHI-09MAY01-C50978_1
aactagcctccatttcctctcattcagccaaatctaaaccccagtccctttgtttctccctcaaccgttcccaaaattccttcattcaaactccaatcaacctccatgaacagcgatcggttcattcaagccttgaagggtgttttttagcctcaagatccccttaaacttcgacttcgacgaagcaagagtgcaccgatggccaaatcacaaggtatcgtcccctttctccttctttccaccttggccgactaattcccttttgcctaaactccaatcggctaccacagtagcatattcaagccttgatggttgttttttagccttgagatcccctcttagcttcgattttaacaaagcaaaagggaactcatggcattctcgtaaggtgtgcatggcgtggagaggaggctacgcacgcatggaagcttcagcgcgtgggaatggtggctgggggctctgcagaagctgctggtgtatgttgcagcactaggcagtaggctagaatttgttgttttaggccatgtattttgttgggtctattatttttggttgttgggctatggacattggactttattattttggttttgttatttttttattttgttattttttgttttattttggtgtaat

SEQ ID NO: 22729 - DNA, 424 bp, Gossypium hirsutum
  Clone ID: LIB3493-028-P1-M1-D6
gtccctttgtttctccctcaaccgttcgcaaagtgccttcattcaaactccaatcaacctccatgaacatcgatcggttcattcaagccttgaagggtgttttttagcctcaagatccccttaaacttcaatttcaacgaagcaagagtgaaccgatggccaaatcacaagtctttgaagaaccatttcagcattgatcttccttcaacttcaattccaacgaagcaaagagaagatccttggcgtactcgcacgcttctatgggagcacgggactactgtacgatggagaaggccatgcaggtctggcatgttccagaaactcctagtgctgctgggaattttgggtgtattgggcctcgagttttatggcttatgggtattggatctcaatgtttaataaaggggcattggatttatttttg

SEQ ID NO: 22730 - DNA, 383 bp, Gossypium hirsutum
  Clone ID: uC-gsflmaxxa040d11b1
tcgttcttttctcctactttccaccttggccgactaattcccttttgcctaaacatcaatcggctaccacagtagcatattcaagcctcgatgattgttttttagccttgaggtcccctcttagcttcgatttcaacgaagcaaaaggaaactcatggcatcctcgtaagtctgctgcaggaggagctagctggagaagtcgttcatgggagtgtacgaaggcacagaggaacacgtgcgatgtggcgaggctgctcgtgagggctgcggcgcaagaggaaaagaaaccctaaagtttctgttcctgcaagactttgggttattgggcttattactgggccactacaatttgagttaatgggtcctgaaatttgggctgtttt

SEQ ID NO: 22731 - DNA, 587 bp, Gossypium hirsutum
  Clone ID: GOSHI-09MAY01-C50878_1
acaagtgcgtattatagaggtgccttgggggcaatgctagtgtacgacatcaccaagcggcagagcttcgatcacgtggccagatgggtggaagaactacgtgcccacgccgacaattccatcgtcatcatgctcattgggaacaaagctgatctagtggacctcagagccgttccaactgaagacgctgttgagttcgcagaggatcagggcctattcttcgccgagacgtccgctcttagcggtgacaatgtggataaagcttttttcaagctgctgggtgagatttacggtgtgctttgtaaaaaatccttggaatgtgggaatggaaaactcaacggtgctgatcacgccaccgcgttgaaaggatctaagattgaggtcatcgctggtcctgatttagaaatgagtgagatgaaaaaattatctacctgctcttgctgatcttcttttcatttaagggaatggttgctttattaaccttattttattcgatatttgcttttgtgctcttgggttggttgtacatttcaatcatatcgcatattatatgtatgaatataaatatagggaaatagttatggttt

SEQ ID NO: 22732 - DNA, 602 bp, Gossypium hirsutum
  Clone ID: LIB3825-032-Q6-K6-H11
atcctcaatttcctcaatgtacgggcagtctcagcccatgaacatccctgcctcgatcgccgacaacgatgtttctgcctcagcaccggccgatagcgttagttacgatgctcatcctcttgacgacggcgtcggagtcgatgacgtctccgccgatcccctctatgtcacttccaccccctctgacttagccatcgttcaacgtgtcgacggtgccagccaactcactctttcctttcgtggccaggtctatgttttcgatgctattactcccgagaagttccatgcggtgttattacttttgggtggaagtgaactgacttcaggtccccatggtgttgaaatgtcagctcagaaccaaagggttgttttggactttccgagaggatctaaccaaccgcatagagcagcctctttagatagatttcgtcagaagagaaaagagcgatgctttgataagaaagtccggtatagtgttcgtcaagaagttgctcttaggatgcagcgtaataagggtcaatttacatctgccaagaagtccgaaggagctcacagctggggttcttcccaggaggatgataacctagctgatggcatatgta

SEQ ID NO: 22733 - DNA, 305 bp, Gossypium hirsutum
  Clone ID: LIB3146-021-Q1-K1-F8
cccacgcgtccgtttcgatgctattacttctgagaagttccatgcggtgttattacttttgggtggaagtgaactgacttcacgtccctatggtgttgaaatgtcagctcagaaccaatgggttgttttggactttacgagaggatttaactaatcgtatagagcagtctttttagatatatttctttagaagagataagagcgatgcttttattataaagtcttgtttttggtttgtttagaaatttgtttttatttagcagttgtatttagtggtctattttaattttttaatattaattttt

SEQ ID NO: 22734 - DNA, 211 bp, Gossypium hirsutum
  Clone ID: LIB3146-021-Q1-K1-G8
cccacgcgtccgtttcgatgctattacttttgagaagttccatgcggggttattacttgggggtgtaagtgaactgacttcatgtccccatggtgttgaaatgtcagctcagaaccaaagggttgttttggactttttttgtggttttaatcaactaaataaagcaagctctttagattgatttctgttgtatagataagagctatgcttt

SEQ ID NO: 22735 - DNA, 687 bp, Gossypium hirsutum
  Clone ID: GOSHI-09MAY01-C50588_1
acggcagaggtccataacctctccgagaggagacgcagggatcgtataaatgaaaagatgagggctttgcaagaacttatacctcgttgcaacaagtcagataaagcttcaatgctggatgatgcaattgcttacttgaaatcacttcagatgcaaattcagatgatgtctatgggttgtggcatggtcccaatgtttccaggtgttcagcagtatatatccccaatgggaattgggatgagtatgggcatggatatgggaataattcggccaatgatgtcatttcccaacgttgtggctggttcagcgttaccaacatcggcagctgcagctcatttgggtccaaggattcctatgccagcctttcatatgccaccatcagttccagctcctgacccatcaagattccaaccaaagcaatcaatctgaccccatcccaaacccgcttgtcatgcaaaacctaaaccaggcccagcagtatattggtcttcaccaaactatgcaaataccccatccacagggtcaagcaatggcccagccaagtagcagaaggggagctgagaaagttgagaatcacccaacaggtaggtccattagtttctagttccatatcatcacaagttgttgatatgcatatgcgaaatgataagacagagcacatgccgtacccattctaatcatatctat

SEQ ID NO: 22736 - DNA, 679 bp, Gossypium hirsutum
  Clone ID: GOSHI-09MAY01-C50548_1
tatccgcagatgtaattgtagcatttgccttcttgctaacaaaataaatacaacttagcagctgctgttattgtggtaaaaagagagacctggcgtcgaagagaactttggaaccgagtagaggatttccgtgctttgactggaattgccatttccagtccaataatatctcttattgtaggaagtgaaaagaaagccttgaaagctagcagaaattcatatgttggcaatctttctcttttctgtgaaatagagtagaagcttaagcagatactcctgcatcaaaaactctttctaggcacttatcctcagaaaccaagtctactttgaaagtcactactcccccgcggccgcttgcatgaaagacctgttgaagaggagagaccaccttcagtggcagtgagtgaattaaatcaattaagtcactactcagaagtaaaatatccattagcctgttactttatcagaatgtgttatatttcctcaacaatgtctaatttgagtttatagaagcaataaactcatgtagtaaacagtggatgtagtaaacccatttcagtctattttctttcgggttttgtgtgtccaatttagtctataaattttcaagtttattactgtacatattgaacttgtgcatttttttttgcaatcaattagttgcactatttgaacttgt

SEQ ID NO: 22737 - DNA, 477 bp, Gossypium hirsutum
  Clone ID: LIB3582-014-P1-K1-B3
tagagctccggcggaagcataatctgttgttagtcatcgatgacgcacatggaacgtttgtttgtggtaagagtggtggaggagtggctgaggaatttgagtgtgaaagagatgttgatatatgcattggaactttgagcaaggcagcaggttgtcatggtggatttatagcctgcagcaaaaggtggaaacagcttatccaatcaaggggccgttctttcatattttctactgccacaccagttcctatagctgctgctgggcatgctgctgttattgtggcaaaaagagagacctggcgtcgaagagaactttggaaccgagtggaggatttccgtgctttgactggaattgccatttccagtccgataatatctcttattgtaggaagtgaagagaaagccctgaaagctagcaggaaattgttaaaatctggtttccatgtcactgcaatgagaccaccaacagtgcccccca

SEQ ID NO: 22738 - DNA, 602 bp, Gossypium hirsutum
  Clone ID: LIB3828-022-Q1-N6-G2
ggaaattcaaaaaccttttgaaattagactgaaatgggtttactacatccactgtttactacatgagtttattgcttctataaactcaaattagacattgttgaggaaatataacacattctgataaagtaacaggctaatggatattttacttctgagtagtgacttaattgatttaattcactaactgccattgaaggtggtctctcctcttcaacaggtctttcatgcaagaacctacctatgaatagtgacatcgttgaatcaactttagtttcagtgcattgatagctacaactgctttctccagctccagccttggcatatttttcagtcattgatcgtgcagaacctatgactaacttcatgctgtgcagtgtttacctcaaatcataaattacaatgcctgccttcatagaagaactcgaacgttaaaacccacgtgccaaaaccaacctggaaaaatgaattttcattgttataaatatttgaactttgattgtcaacttttttttccaatatttctttttttctcttcgctcttttcttgttgcaaataaatacaggcagagcaagaaaaaaaactgtgaaaaaagtaaaat

SEQ ID NO: 22739 - DNA, 392 bp, Gossypium hirsutum
  Clone ID: LIB3146-018-Q1-K1-B2
cattcatggatcagcacgaacaagattaattgatattcatcatgctatatttttcttatttcatggtgaaggcaggctttgtaatttatgatttgagatgaacagtgcccagcatgaagttagtcataggtactgcacgatcaatgaatgaaaaatatgccaaggctggagctggagaaagcagttgtagctatcaatggtattatcagaatgtgttatatttcctcaacaatgtctaatttgagtttatagaagcaataaactcatgtagtaaacagtggatgtagtaaacccatttcagtctaatttcagagggtttttgaatttcaaaaaataaaaaaaatatggcggggggcggttgattttaaaaataaaaaaaaaaaccccgcttt

SEQ ID NO: 22740 - DNA, 428 bp, Gossypium hirsutum
  Clone ID: GOSHI-09MAY01-C50578_1
cggacgcgtgggcggacgcgtgggcggacgcgtgggtttcaaaaaatggctctcctccaaatgcacacacttcctcaccaaattccttcactttcacccattgttttttcatcaaaaacccattccaaaaactcactcttcttctctacaacaaaggttagacctttctcactttcaacacaacccagaaagctgctttgcaaacccccacttggcaaatatgtcagggaagattatcttgtgaaaaagatgtcatctcaagaaattgaggagctagtaagaggggagagaagagtacccataattattgatttctatgcaacatggtgtgggccttgtattttgatggctcaagaacttgaaatgctagcagtgggagctgagaaaaatgcaattattgccaaagttgaatccgatgacgagtatca

SEQ ID NO: 22741 - DNA, 610 bp, Gossypium hirsutum
  Clone ID: GOSHI-09MAY01-C50528_1
gagaaaccaccagggattggcagcagcaataattaaactttgggagaaaagcctcgttgcaaagattgctgtaaaacgaggtattcagaatacaaataacaagcttatggctgaggagctaaagaacttaactggaggtgtcttgctgcttagaaacaagtgggtggttgtcatataccgcggaaaagatttccttccaacaaatgttgcagctgctctggcagaaagacaagatttgacaaaacagatacaagatgctgaagagaaactccggatcaaagcagttgagccagctctctcaggtgaagacaaaggacaggcaccagctggtactttggctgagttttatgaggctcaagcccgctggggaagagatatatctgctgaagaacgggaaaagatgattgaagaagcttccaaagctaagcacgctaaactcgttaaacgcgtggaacataagttagctattgcccaagccaaaaagcttagagcagagagactactagctaaaatagaagcctccatgatccctgctgctcctgattatgaccaagaaacaatcactgatgaggaacgggttatgtttcgcaaagttggtttaagaatgaac

SEQ ID NO: 22742 - DNA, 552 bp, Gossypium hirsutum
  Clone ID: GOSHI-09MAY01-C50458_1
cactgtatgttttacaatggtttcaagtcttccctccacagctttgggcagtcgcatatttcgaaggagtgcgatatggccacttcacactaggtgtgaccgagttgttgtataattgggccctcgaatgtcatgagctccctgttgtgcaaatgatggaacatattcgccttcaactaacctcttggtttaacaatcgtcgtgaaacaggaataagatggacctcaattcttgttccctccgccgagaagcggatttcagaggcaattgcagatgctcattgctaccaagtacttagagcaaatgaagttgagtttgagatcgtctcaactgagcggacaaacatagttgatattaggagtcgtgtgtgttcctgtcgccgttggcagttatacggtttaccgtgcgcgcacgctgcagctgcacttatttcttctgggcagaatgctcatctgtttgccgaaccttgtttcacagtggcaagccaccgtgagacctattcgcagatgatacatcctatcccggataagagcgtttggaaggagctgggtg

SEQ ID NO: 22743 - DNA, 727 bp, Gossypium hirsutum
  Clone ID: GOSHI-09MAY01-C50748_1
gatgaactcaaatctgaaattcttgcagattgggagtgacctctaaatgtcgtaatataagcccctatctgtgaattatctatactatccaacttgcacttctttattattgctgaatcaccctcaatgataactgatgtctattgcatgttaataccgagtcgaactgctgtgcgacatgtgagagcctcagcagcaaaagccgatgcaactcactcgtgatctccgagcacgaaaccagaaccctgcccttactgttcctggctactaatccccttgacaattgccgagatctttcatcaaaagctgcatcgaagttgatcttcacgacctttacagttttgtgggtcttcttgtgaatcctgttatttctgtcaccccaaattgcccataattacacagcagaccaccttactctgagatggagaactctgcaaaaacacccaaatgagccactgtgcgaactccagatcagattagacttctcactcggcaccaccatcgatcctttgactgagagttgaaggagttcttcagctaaaagcccgatctcatctctccctaccccaacgtcaccaccactttcctttatcctaagctgcaactactgccttctccaggacactataggaagcactcttggttgctagggtttcacaacttattgacatttgatattgtatttctaggctaaagataaatttaccattatatttaaatttatttt

SEQ ID NO: 22744 - DNA, 435 bp, Gossypium hirsutum
  Clone ID: LIB3165-052-Q1-K1-B11
cccacgcgtccgtgttaataccgagtcgaactgctgtgcgacatgtgagagcctcagcagcaaaagccgatgcaactcactcgtgatctccgagcacgaaaccagaaccctgcccttactgttcctggctactaatccccttgacaattgccgagatctttcatcaaaagctgcatcgaagttgatcttcacgacctttacagttttgttggtcttcttgtgaatcctgttatttctgtcaccccaaattgcccataatacacagcagacaaccttactctgagatggagaactctgcaaaaacacccaaatgagccactgtgcgaactccaggtggtccatactttctgatcctctatcatatgctttgctcatatcaagtttaaccgccatgtatcccttcagtcttgttcgcttttgccgaaaagatgtaat

SEQ ID NO: 22745 - DNA, 386 bp, Gossypium hirsutum
  Clone ID: LIB3146-020-Q1-K1-F12
tcgttcgctttcatcaaaagctgttttgaaattgatatttactacctttgcaggattgttggtcttcttgtagaatcctgttatttctgtcaccccaaatttcccataatgcacagcagacaaccttactctgagatggagaactctgcaaaaacacccagatgagccactgcgtgaactccaggttcggttcttgtagcacatactaatatgatagttctttccatactggtactgaaattaaacattctctgaataggtgttccatatttttttatcctcgtccacatcgagggtattctgtagtatttgaaactctctgtttatacatattagcccttgtagctaaaaaattttttgaaatcttccagaatgtattttttatc

SEQ ID NO: 22746 - DNA, 737 bp, Gossypium hirsutum
  Clone ID: GOSHI-09MAY01-C50718_1
cggacgcgtgggctttcacggaaattgaggaagcaactctcaactttgatccctctctgaagattggagaagggggatatgggagtatttataaaggtaatctgcgtcataccactgtggctataaagatgttgcattctaatagcttgcaaggtccatcggaatttcaacaagaggttgatgttttgagtaagatgaggcatccaaatctggtaactctgattggtgcatgtcctgatgcttggactcttatttatgaatatcttcccaatggaagtcttgaagaccgacttagctgcagaggcaattccccccctttatcatggcaaactcgtatccgtcttgctactgagttatgttctgttctcatcttccttcattcaagtaagcctcatggcatagtgcacggtgatttgaagcctgcaaacattcttcttgatgctaattttgtcactaaactgagtgactttggaatctgtcgtctgctaagcgacaatacaaccatctgctgtagaactgaccccaaaggaactttcgcatacatggatccagagttcctttcaactggagaacttactcaaaaggctgatgtttactcttttggagtcattttgttacggttgttgacaggaagacaagccttgggtataataaaggaagtgcaatatgcattagatatggaagtttgaaaaatctcttggatcctttggctggagattggccttttgtgcaagctg

SEQ ID NO: 22747 - DNA, 564 bp, Gossypium hirsutum
  unsure (1)..(564): unsure at all n locations
  Clone ID: AI728511.1
cctcgtgccggcacgaggagcatattttcagggaagatgtgtatttatcgagactacctgtttctgtcatcctctcttggtaccaacgacaaggttatatttgttccatggctgacttgattaaagaagagctggagagatttgcaaagcctgaagaggtcatgatattctttagtgcccatggggtgcctgatagttatgttgaggatgctggagatccatacaaagatcaaatggaggagtgcgtctacttaattatgcaagagctgaaatctagaggaattggaaatgatcatacccttgcttaccagattcgagttgggcctgtgcactggttaaagccctacataaacgaagtgcttgttgagcttggacagaaaggtgtgaagagtcttctagctgttccgataagctttgtgagtgaacacatagaaaccctggaagagattgacatggaatataagcacttagctcttgaatccggaatcgagaattggggtcgtgttcctgccctaggttgcacctcttccttcatcacggatctanctgatgcagtagttgaac

SEQ ID NO: 22748 - DNA, 257 bp, Gossypium hirsutum
  unsure (1)..(257): unsure at all n locations
  Clone ID: LIB3146-018-Q1-K1-H3
ccacgcgtncgatataaattcaattcgggttatatactgattaccgataagcatttattatgtgcaacacagattaagctagacaggataaaaaagcttgttgcgttgccattatatcctcagttctccatttccacaactggaagagattgacatggaatataagcacttagctcttgaatccggaatcgagaattggggtcgtgttcctgccctccgcatgttgatacattggtggacggtatcaaatgggatga

SEQ ID NO: 22749 - DNA, 748 bp, Gossypium hirsutum
  Clone ID: GOSHI-09MAY01-C50388_1
gagattcattcatcaatggctttgattcatacactgtctcccaaaagaacgaactttgtggtgtttcctctgttcttgatgatgatgtcttctcccagatccaacaacaacaacaagaaatcgagcgtttcattgctggaacacacagggaaagtgaggtttgaacttgaagaaagaagaaaaaggcaatcgacaatgttgattactgcaatccaagaaggggcaatgaagaaacctgatggaaaaagaagaagagatgcagagaatggggaaactgaactggattcttcaagaaagggttaaaagcctgtacgtagagaaccaactgtggagagacctggcacaaacaaacgaagccactgccaagtccctgcgtaccaatttagagcaagtcctggcgcacgtcagcgacgaacgccacttgagcggcggaggcgcagccgcgctggccgatgatgcggagtctagctgcggaagcagcgatgaagggtggcgcacggtggtgccaccgcagccacaagggagcggtggatgtgcgccggataaggcggtggtggttgggaatcataatattaggaagtgtaggaagtgcggggaaagggagtcaagtgtgctgttgctgccatgcaggcatctttgtctctgtacagtttgtgggtccactctggtaggcacttgccctgtttgtgattctattaccaatgccagtgttcatgttaacatgtcatgaaacaattctttttttctt

SEQ ID NO: 22750 - DNA, 277 bp, Gossypium hirsutum
  Clone ID: LIB3543-060-Q6-K6-E12
cccagcgtccgccccgcgtgcgggcggcgtgcgcccacgcgtccgggcatctttgtctctgtacagtttgtgggtccactctggtaggcacttgccctgtttgtgattctattaccaatgccagtgttcatgttaacatgtcatgaaacaattctttttttctttcccccttctttggtaagattcctttacttagtcaaaactcccccaggaaaacagaaaaaaaaatgcaaatatctttttagaaatggatcatagaaaaaagaaattcagtatt

SEQ ID NO: 22751 - DNA, 700 bp, Gossypium hirsutum
  Clone ID: GOSHI-09MAY01-C50248_1
cgaaataagaagttcatgatggaatcattggtgaaaggtccttcaatcacaaatccgtgtaccttgccacctccttatgacactcgagctcttgcagtatttctcagaagaaaaaataactcaatattgcaagtgaagaaatgggagaaaggttattgggaaagtctcaacaagcagtagttgatgcctggttttttctcgttttctttttgtcatgatgaatctagacaactatacttttggtttatgtccaaattttaagaaatacatggctgaaccctttacagcaacatggaagaatacccccgatcaatcaaataaacttggatcgagtgaatttgtcgagtcaactatggttcgattgaaaccaagattaagaccaagatccatcaatttataaaggggactatagataaataaagtggtgatttcagacaggtctggcttccattgaatcggccggatcattcagacagattaaggtggatcagttgtagaatccttaaataatggtaccttcagctaggccatcaaatgggaatggagaagtaaaaaaaacagaaataggcctaaaatagatgtaaaaagcttgcacggttgcaccattgggttcttgcagcctgtaggggtattattgggtatttgtaactatgttgattactacctcccaagaaatggcctgtttctggtgttttggatc

SEQ ID NO: 22752 - DNA, 1336 bp, Gossypium hirsutum
  Clone ID: GOSHI-09MAY01-C51868_1
ctttctatggatgatggaaagtgtttgctttgaaacgattgtgaagttgaatgaaggatttgatcgattttttgaaagagagcttgaaattcttggaagcataaaacatcgataccttgtgaacttgcgaggatattgtaattcacctgcatcaaagctgttaatctatgatttcctggctggtggtagccttgatgaagctcttcatgaacgatctgagcagttagactgggaagcacgtttgaacattatcatgggagcagcaaaagggctggcttatctacaccacgattgttctcctaggatcatacaccgtgacataaagtccagcaacattttacttgatagcaacttggaggctcgagtatcggactttggacttgccaaactgttagaggatgaagaatctcatattacaaccattgtcgcaggaacttttggttatttggctccagagtacatggcaagcgggagagcaactgacaagacggatgtctatagttttggggtcttggtgcttgaagtcttaagtggaaagagacctactgatgcatcattcatcgaaaagggcctcaacatcgttggctggttaaatttcttgattacggagaataggcagcgagagattgtagatccgaattgtgtggggatgcaggcagaaagcctggatgccttgctctcagttgccatccagtgtgtgtgttcgaacccagaagatagacccagcatgcacagggtggggcagtgcttgaatccgggttatgaccccatacccgagtgatttttatgattccaactccgattgagtagtccaagctgaaaacagagacacgtttggtttgccttcatgtttctcacaactcaaaagtagtgcaagcaaaaaaaaaacaagccctaaatgagggggctcgaaatcagcagctgcagctttcacttgttcatttcattaaattctgtatgcggatcgaagttggaaggtccatttgacctgttcaatggaagtagagtttaggtgcatatttgtccttcatttggcatgggtgaacctcctttttctcttttaattttaggctttttttttcgttcgagctttgcctttatgaaatcaatacgccctcttctttatccagtccttaagtacaaattgagaatatttgggcttttggcagatccttgttgtttataccatttttgtaagataaagcttcattattacagtaataatttgatggatgaaagttacttttattttcgcaaaataaaaaaaataaaaataataaatatttatatctttgggcgggcgtttttgaggattccaacttacttacgcccgcct

SEQ ID NO: 22753 - DNA, 459 bp, Gossypium hirsutum
  Clone ID: LIB3146-035-P1-K1-C6
gaagaatctcatattacaaccattgttgcaggaacttttggttatttggctccagagtatatggcaagtgggagagcaactgagaagactgatgtctatagttttggggttttggctcctgctttcttccttcttctccttcccttcttttcccttttttcttcttcctttcttctcatctttatttcttcttttcttctccctcttctttttctttatcttctttctttctttttccctctttttcttctttcttttctcctcttcctcccttcccttcttcctcctcccctctctttccctccttctctccctccttttcccttcttccccttctttcaactactttactctcttcttctattcatcctccttcttttcctctttttctcctccccctcttacttttctttctatctcttcatctttcctcattttctcttctcttccttttttatt

SEQ ID NO: 22754 - DNA, 426 bp, Gossypium hirsutum
  Clone ID: uC-gsflmaxxa014c08b1
attttacaccacatacattgctatgactgtgtctttacataaatgcggggattgaatctacagggactggtcacatgaggagtgcggtggaacattatcatgggatcaacaaaagggctggctcatctacaccacgattggtctgcaaggatcatacaccgtgacataaagtccagcaatattttacttgatagcaacttggaagctcgagtatcggactttggacttgcaaaactgttagaggatgaagaatctcatattacaaccattgtcgcaggaacttttggttatttggctccagagtatatggcaagtgggagagcaactgagaagactgatgtctatagttttggggttttggtgcttgaagtcataagtggcaagagacctactgatgcatctttcattgaaaagggcctcaacatc

SEQ ID NO: 22755 - DNA, 466 bp, Gossypium hirsutum
  Clone ID: uC-gsflmaxxa014c09b1
gcgatattttctggctggaggtagccttgatgaagctcttcatgaacgatctgaggagcagaacccataggcactgtcaaggataataaccaggacaaggaggggattgagtcatacacaccacggttgatctccaaggatcatacaccgtgacataaagtccagcaatattttacttgatagcaacttggaagctcgagtattggactttggacttgcaaaactgttagaggatgaagaatctcatattacaaccattgtcacaggaacttttgagtatatggctccagagtatatgggaagtgggagagcaactgagaagactgatgtctatagttttggggttttggtgcttgaagtcataagtggcaagagacctactgatgcatcttttattgaaaagggcctcaacatcgttggctcggtaaatttcttattaccgagaatagaaagcgagagattttag

SEQ ID NO: 22756 - DNA, 396 bp, Gossypium hirsutum
  Clone ID: LIB3149-046-Q1-K1-E6
gaaacgaattgtgaagttgaatgaaggatttgatctattttttgaaagagagcttgaaattgttggaagcataaaacatcgatgccttgtaaacttgcgaggatattgtaattcacctgcatcaaagctgttaatctatgattatctagcaggtggtagccttgatgaagctcttcatggtgaggctccttaaaactatttttattcaaaagcagttctcatttcctggtttgcctccatgtttctcacaactcaaaagtagtgcaagcaaaaaaaacaagcactaaatgagggggctcgaaatcagcagctgcagctttcacttgttcatttcattaaattctttatgcggatcgaagttggaaggtccatctgaactgttcaatggaagtagat

SEQ ID NO: 22757 - DNA, 342 bp, Gossypium hirsutum
  Clone ID: uC-gsronu33B051g11b1
cttataattttgtccttaagtacaaattgagaatatttgggcttttgtcagatccttgttgtttataccatttttgtaagataaagcttcattattacagtaataatttgatggatgaaagttacttttaaaaaaaaaaaacaaaatacaaacaataactataaatagaacaatatgggcgtacattataaattgatcaagcttaatttctcactttatagcattttctagctccttttttagggaacctaaactgcattccgtgggccctagtttaaaacattgattctgggataacccgtggttttacccatcttatattctctttcatacattcccctt

SEQ ID NO: 22758 - DNA, 655 bp, Gossypium hirsutum
  Clone ID: GOSHI-09MAY01-C51808_1
gcgaaaagtaaaaacactggaccaaggaaatttccaggctctgccaagtctgccttgcgggtaaacgtgaaataagaggaattttgatcagttcgcagaggaagagcttgaagatggacgaagatcacagtaatagcggctttttggagactggaaaagctgatagatcggtttggttaatgaagtgtccggtcgttgtggccaaaccatggaagagtcagaccgcttcttcttccgattcacagcctgtcgccaaggttgtcctctctctcgaccctcgcaaacccgatgacccttcttctatgcagtttactatggagatggctggatctgagattggaaatataccaaagagttacgccttgaatatgtttaaagactttgttcctatgtctgttttctctgaaacaactcagggtagggttgcaatggaaggaaaagttgagcataaatttggcatgtaaccccttgagcaaaaccttgaggagtatgggtggctctgtcgtgaaagggccaataagtccatgataaagaacagacaaatacaggttattgataatgaccgtggagtgcacatgaggccgatgcctggaatggttggtctgatttcatccaacacactagaaaagaagaaaacaacgcctgttaaacaacc

SEQ ID NO: 22759 - DNA, 501 bp, Gossypium hirsutum
  Clone ID: GOSHI-09MAY01-C51508_1
atcatcattagggaaggtagaaccaggtgaacctgaggaagaagaaggagaagagcttctgctcaacaaaagcttagatctttcaacactgagagggttccagaaagcgaacggggagattagtggcttcggtttccgagtttcaagtgaagcgataaaatttggagaagaaaaagttatcgctggtcggcgtcggtgagttggaaggaggggacccaccgccaccaaacaaatgccggagcgagttgccggcggtaccaataacgtttgcatgatgaccggatgatgtgcaggggccgcttgcgcaccgggcccggtggtgaagtggcagcagttccggtttgcccaatggatttggaatttcatttggtttataccaagttcatggagaaatcgaatcattcttctgaatttttttttttgccatttaaaggtttaccatcataaatattggaccatgtattaatttaatttttattaatatatttgtgatagtattgg

SEQ ID NO: 22760 - DNA, 394 bp, Gossypium hirsutum
  Clone ID: GOSHI-09MAY01-C51528_1
cccacgcgtccgagtttttcaaccgggtttgaatgaaaagttggatcgaacttctccgcattgggatgacatcccagagatcgtgctggctgatgagccttacgtcggtcacgagtttgaatctgaggcatctgcacatgctttttataatgcatatgccacgagggtaggattcatcatgcgtgtgagcaaactttcccgttcgaggcgtgacggatctgctatcggtagggctcttgtttgtaacaaagaaggttttagaatgcctgacaaacgagaaaaaattatgaggcacagggcagagacgacggtcggatgcagggcaatgattttggtgaggaaagtaagttctggtaaatgggttgtcacaaaattcgtgaaggaacacacacat

SEQ ID NO: 22761 - DNA, 655 bp, Gossypium hirsutum
  Clone ID: GOSHI-09MAY01-C51408_1
caaagacagcttgctattgcggaaaatgaacaacatagattgtggaggcaggcaagaatgaagactgatatacatctccttataactaaagtgcccgaattggaaattgttgactgctttgacgctattgagaggcatcttctcggggaaatgcagctgcagcaatctggaagggcgatatcggactctgcagcaatgtgtcagaaattgaagggtgatctacaggcagtgttcaacgtacttccaaacgacatgcagcagcttttgcttttaaacccccaaagagcagctcttttacagggaagttcaagtccagaactaacgatacttcctggccgtccttcgattcaagtcggggttgtatcctccaattccccaagataacctaaaagggaaaagaaaaggtatctctaggaatcaggtcggctttggtatatttgagggttgtcttcatattgaaaacggcgatctgtgattgtttttttttcggaacggagaatcccccccgacttttggggtaatttgttcaaataggtgagactaaaaatacactctgcaactcagttttttttgtacaatcatgtgtcatgcaatttcttagaatttttatattttattttgacttttgccttgtctttgaatcaaccttgccttg

SEQ ID NO: 22762 - DNA, 881 bp, Gossypium hirsutum
  Clone ID: GOSHI-09MAY01-C51778_1
atttgcattgatgtttattagaatggtaccaattgttgtgcttattctgtcactggtttcttatagtgggctcttgttaatatttgcagtcatgcatgatttgcgtctgatacatacggacttgaaaccagaaaatattcttcttgtctctccagagtgtgtcaaagttcctgattacaagggtacatcaagatttcctaaaggtagttcttactttaaaaggttgccaaaatcaagtgccattaaggtaatagattttggtagcactacttatgagcgtcaagatcagtcttacattgtgtcaacacgacattatcgtgctccagaggttattcttggactgggatggagttacccttgtgacatatggagtgttggctgcatcttagttgaattatgcacgggtgaggcattgtttcaaacacatgagaatctggagcaccttgccatgatggagcgggtgttgggcccactacatcagcacatgttgaagagagtagatcgacgtgcggagaagtatgttagaaggggtagactggattggccagatggtgctgcatcaagggagagtatgagagctgttcttaagctacctcgtcttcagaacttgataatgcagcatgtggaccattcggctggggatctaatccatctattgcaggggttgcttaggtatgaccctattgataggctcactgctcgtgaagctctaaggcatccgttttttagcggggacaagtttaggcgatgagcgtgcgatatgcttcactttgtaaattgtatcaaacattcagttacatgaaaaattgtatcattagttggattgaatatacctttttataaattatactgcccatgtcgtttttccaaattttatatta

SEQ ID NO: 22763 - DNA, 604 bp, Gossypium hirsutum
  Clone ID: LIB3825-034-Q6-K6-A12
aggtcacagaaaagagctccaggtgttataaagagttcgggatatcaatgtggctgtcagacatgcaatttttctaaggtgatcaatgcatatgaatttgagcgacatgctggttgcaaaacaaagcatccaaataatcacatatactttgagaatgggaagaccatttatgggattgtccaagagcttagaagcacacctcagaatatgttgttcgatgttattcagacaataactggctcgcctattaaccagaagtgcttccggatttggaaagagtcgtttttagctgccactcttgaacttcagcgtatatatgggaaggatgaaatgaaacaattgtcataaaacaaccattttcatttgcaaggtagggttaatctctgttttgtgaatatgaaggaagtgactttttacgagactttatgcttgttaatggtgacagcttgttaatggtgacagcgccgggcgtgggtttttttttttttttaatttacgggagtagggactatgttaaaaagtagggagttaatgcctgaaagaagatacttgttatttgtgtatttgcttgtatctctgcaaacatgtagtcggatattaattc

SEQ ID NO: 22764 - DNA, 404 bp, Gossypium hirsutum
  unsure (1)..(404): unsure at all n locations
  Clone ID: LIB3146-033-Q1-K1-C3
agcgacatgctggttgcaaaacaaagcatccaaataatcacatatactttgagaatgggaagaccatttatgggattgtccaagagcttanaagcacacctcagaatatgttgttcgatgttattcagacaataactggctcgcctattaaccagaagtgcttccggatttggaaagagtcgtttttagctgccactcttgaacttcagcgtatatatgggaaggatgaaatgaaacaattgtcataaaacaaccattttcatttgcaagcttgttaatggtgacagcgccgggcgtgggtttttttttttttaatttacgggagtagggactatgttaaaaagtagggagttaatgcctgaaagagagatacttgttatttgtgtatttgcttgtatctctgc

SEQ ID NO: 22765 - DNA, 717 bp, Gossypium hirsutum
  Clone ID: GOSHI-09MAY01-C51708_2
cccacgcgtccgcccacgcgtccgcccacgcgtccgcccacgcgtccgcccacgcgtgcgcccacgcgtccggttagcagtggtggattctccagtctgcttgtctttctggcggagggcgtgctggtaaaacttttgggtgcttgggttgtccggaacctgtgtgcacctgtggggcaggtcgcattggaccaaatcttaggcggaagtgtcttgtgtagcagttaaaagtgccacggggctctcagctgcaaggatggccaagcagttagcagttgattcgagttgggtatcaaccaccgaaagcttaatgttcattctcaatctggaagatgtgattcctgtacgaacctgaactcctttgatttggacacagggagtggagcttggatatgacttgatagagctttgtattttcctggtggagaatgggtgagattgggtgggttctcattctgattgattattaactaactgtacatttgtaggtatttgtgagtgggtgagagaagagtataggtccattcttgtaaataaatgaagttgaaaagaatagaaaaaaataattaccaagtaattagggaaagtagaaaagcatagcagctgtaaagaggttccagtttcagctgcagtttgaagtcgtctcttatttatatataatattactttcatgtgccatccttcctttgattctaatctaattatttgttggctttt

SEQ ID NO: 22766 - DNA, 839 bp, Gossypium hirsutum
  Clone ID: GOSHI-09MAY01-C51708_1
cggacgcgtgggcggacgcgtgggcggacgcgtgggcggacgcgtggttcaaaatgcacagataggaggaggtacaacctgaagcatgttcctaagtcaaaagacggtatattctggatgtcatggcaagattttcaaattcacttcagatcgatttatgtatgtcgggtctaccctcctgagatgcgatattctgttcatggacaatggcgtggttacagtgctggtggttgtcaagattataattcatggcatcaaaatccccaattcagattgagggcaagtggtccagatgcttcatatccaattcatgtattcatcaccttaactcagggtgttagcttctcaagaacggcagctggttttagaaattatcaatctagtcatgattcacagatgttctacattggaatgaggatcctcaaaacccgtggtcgtcgtgctgcttacaacatttacctacatgaatcagttggtggtacagattatgttaattctcgagaaatatcttgtgaaatggttttagagcctgaaccaaagggttacacaatagtgcctacaaccatacatcccggggaagaagcaccatttgtcctttctgtattcacaaaagcatctgtagtcttggaacctttgtagtttgcagtggtggattctccagtctgcttgtctttctggcggagggcgtgctggtaaaacttttgggtgcttgggttgtccggaacctgtgtgcacctgtggggcaggtctcattggaccaaatcaggcggaagatagtagtaattcaacacttgtttttggatttttggggaacagtgcttttttgtgtgtgtggatgg

SEQ ID NO: 22767 - DNA, 540 bp, Gossypium hirsutum
  Clone ID: GOSHI-09MAY01-C51738_1
gggttttagcccctctctccgtcgaccaagactccaatctacagtacgctacacacagaatcaaatagaagcaacgatgttcccaggcatgtttatgcgcaagccagacaaggcggcggccttgaagcagttgaaggcccacgtagccatgtttggggtgtgggtagctgtggttcgtgtcactccttacattctgcattacctctctgatgaaaaagaagagctcaagattgagttctagaggccacctctcattctttttcagtggatcgacacggagagaacgggagaatgaaaagaatttgcaagttccaggttcctttttcgctttagtatgaagctgatgtgtaatcacattaggttgtttatgtacttgctttggtcatgcttgttagtcttttcattgaaatgaaactagtcatatctagttaaatatgcattttactggttctgttggtatttggattttgagagtgatagcactggatattgcagtgatgtccagattttcacatgctgaggtctaacagcctaagatcc

SEQ ID NO: 22768 - DNA, 663 bp, Gossypium hirsutum
  Clone ID: GOSHI-09MAY01-C51688_1
gaatttttttttttttttttttgtctttttgctcttgttttttctgctacttggcctctgttgttgctgatgtttcttgttgtttgtgtttgcagggtatacccggtgttggtggtggaagtgtcaaacggtatgggcgtcgtgggggcgagggcgcgcatgcaatgctggggggcagacgaaactgagcggcgcacatgggcatagggctgctagggtttctgtcattttttgatttgggctagggtttatttttgttggcccgttgggtttgtttattagggtaggttacttgggttttgggggtgggccaaaattggccttgtaaataacatacttgataatgcgttctattaatttccgaatttctgaagagtataactgaccaaagaatacagtctttagagtaaggatgactagaataaatacattgagcacaaaatttgccaccagagccatgatggagtaagaacccaaaagaagctcaggtacatggttgacattttccgtatgaataaaattctcagtaattaacccatcagtttgaagtagtgaaaattctgtccgaagttgaagagctataaagcttagagctgtggagaacaccgagatcacccagtatttcacacccattggtgacaaacacaacttttccaccaaaat

SEQ ID NO: 22769 - DNA, 699 bp, Gossypium hirsutum
  unsure (1)..(699): unsure at all n locations
  Clone ID: AI725894.1
gaatttttttttttttttttttgtctttttgctcttgttttttctgctacttggcctctgttgttgctgatgtttcttgttgtttgtgtttgcagggtatanccggtgttggtggtggaagtgtcaaacggtatgggcgtcgtgggggcgagggcgcgcatgcaatgctggggggcagacgaaactgagcggcgcacatgggcatagggctgctagggtttctgtcattttttgatttgggctagggtttatttttgttggcccgttgggtttgtttanttagggtaggttanttgggttttgggggtgggccccaatnggccttgtacataacatacttgataatgcgttctattaatttccgaatttctgaagagtataactgaccagagaatacagtctttagagtacggatgactacaataaatacgtggagcactaaatttgccaccagagccttcatcgagtagcatcccctcagaaactcgtgctcctggtgcacatcttccctattaacaacatcctccctaattccgcccgcccgtcgagcttatgtaacattctcttccgacgtcaaggacgcaccgtgccgtcggctgtcgacaccccgcactatccccgctcttttccccccccttggctgaccagcgtcacctctgtccccgtcggtacaacctgtgctgattctcccttgaaacc

SEQ ID NO: 22770 - DNA, 372 bp, Gossypium hirsutum
  unsure (1)..(372): unsure at all n locations
  Clone ID: LIB3146-032-Q1-K1-H12
atcgacttcagcgacggagaggagaatttcgatggccgaccacggggcgttcggggtatagccggtgttggtggtggaagtgtcagacggtatgggcgtcgtgggggcgagggcgcgcatgcaatgctggggggcagacgagactgagcggcgcacatgggcatagggctgctagggtttctgtcattttttgatttgggctagggtttatttttgttggcccgttgggtttgtttagttagggtaggttagttgggttttgggggtgggccaaaaatggcctgtacacagactaaacatatcaaaaatccaggaaaccatccattacaagttaatattggttaaatcaattaaaacatttaccttgttnna

SEQ ID NO: 22771 - DNA, 400 bp, Gossypium hirsutum
  Clone ID: GOSHI-09MAY01-C51628_1
tagccaacaagtgccttggatccgatttcgacacaaaacatagaggatgtgatagtgaagcttaagaagaaaaggagaatgacagttgtaatggtttcccacagcatcaagcaaatccaaagggttgcagatgttgtttgccttcttgtgaatggtgaaattgttgagattttgaagcctaatgaactctctgaagccaagcatcccatggcacaaaggtttcttcagctaagttcgtaatttacttttctataatagttgttatatttcccttttctttgtgcttaggatttgatgttaatttggtttaaacaatgttcagcattgcaagtttatttgttgtaaaaaaacaaaactaaaaataaaaatatttaattttttttttatattaaataattaa

SEQ ID NO: 22772 - DNA, 628 bp, Gossypium hirsutum
  Clone ID: GOSHI-09MAY01-C51148_1
gaacaataggtgcctttttcttgccatcgtttgctaggaatattttctcatcaatgagcagggtgcaacctaatttttatccattatcaaggcatttccaacacttacccttggaaaaattaaccagcttttctgctcattttcccagagaaaacatgctgatgagcattctttaaaactcagaaccttgcactgtctttgcccgatgatttgagattcaagatccaaatcttataatggtgtactttgtgaccgcagattgatgtgctaagaaacagaatatgcatatcctacttgtcttcaatacaagaaccaataccatggttgtcagcttatgggttttaactttgaatgtcctcatttttcttctctttcttttgcaagtcccgtttctctcacattcgatctatatgataaaggagtatgagtggggtgacacatttgatccaccacaaaaggggggggtgtgagaagaaaatgtgtaaaatttcagccctcgctccaatttctttaaactgtgaattggagagacaccgggaaagggaaatggattttttatttttatttttatttatttaaccatgggaaagtaactggaattcaaacgtattttgggaaatataaggaa

SEQ ID NO: 22773 - DNA, 449 bp, Gossypium hirsutum
  Clone ID: GOSHI-09MAY01-C51178_1
tttttatgaacctccacaattctatcagagatgaccggtatcttataggtcgtcgacttcataactttggggaaaactcagaagagaagcaaaatgaggcagggtcttcctcagaaacacagatttctgatctgcgggacactggaataatccagcatgaccgagaggttgatgtggggctgagactaaggcgcgctgctaattaaaaacgatgctgatgctcgaaatgcttgtatgaatctacgttccatttatgacaagctggtatacttgttaggtagtgtttgaaattggccaatacaatatttggcttacgcttactttttgtgcacagaatacacgttaactttgcaattagggtttgtcttaaaatttcagcaagttagataaataatgaattactattttatttttcctacataagatgcgggcaacaaatcttacatatt

SEQ ID NO: 22774 - DNA, 1507 bp, Gossypium hirsutum
  Clone ID: GOSHI-09MAY01-C51168_1
tgagaacaaagctcaggccttccaaagaagcgggaggtttgttcctagtaaaaagattcaggaattgacaaacaaattgattcagttcatggaagttcacatttatcccttggaaaatgaattcaacaaacttgcaaggtctgatttacgttggacagtgcatccagaggaggagaggttaaaagagcttgcaaagaaagaaggattgtggaacttatggattccttttgatagtgctgctagggcaaaagaacttatttttaatgggagtgaacgtgctcactgcacgcatgatcgtttacttggtgcgggcctctcaaaccttgaatatggatacctttgtgagattatgggtcgctccctttgggctccgcagatctttaattgtggtgcaccagacactgggaatatggaggtattgttgcgatatgggactaaagaacagctaaacgaatggcttgttccactgcttgaggggaaaatacgctctgcatttgcaatgacagaaccacaagttgcttcctcagatgcaaccaatatcgagtgttctatcaaaagacaaggagactcgtatatcatcaatgggaccaagtggtggacgagtggagctatggatccaagatgcagaattcttatactcatgggaaaaactgacttcactgctcccaagcacaagcagcaatccatgatcttagtggacattaagactccagggatatgcgtaaagagaccactaacagtatttggctttgatgatgctcctcatgggcacgctgaagtttcttttgagaatgttcgtgtgccagcaaagaatattctattgggagaaggacgcggctttgagattgcccagggaagacttggccccggaagactgcaccactgcatgagactgattggcactgctgagcgtggcatgcagataatggctgaaagggctcttaatcggaaaacatttggaaaatatattgcccaacccgcgcctccgccctcgcgtccggcaaagtgtcgaatagaactagagcagactaggttattggttcttgaagcagctgaccagcttgatcgacttggaaacaagaaagcccgtggaaccattgcaatggcgaaggtagcagctccgaacatggccctgaaggtactggacagggcaatacaagtacatggtggagccggggtatcatccgacactgttttggcacacctttgggcatcagcaagaacattgagaatcgctgatggacctgatgaagtgcacttgggtaccattgctcagttagaactacgaagagcaaagctttgaaggatcttgaaactatgatcatcacacaacagtactttttattttttcttcttgcagtctcgaagataaaaataaggaaaaggaatccaaaaaattgggcattttcttagtaatattatggaattattatgaaagataataataataatgataatttatgtagttatttgttaatgtcttttctgagttgtgctctatttttct

SEQ ID NO: 22775 - DNA, 550 bp, Gossypium hirsutum
  Clone ID: LIB3825-015-Q1-N6-G5
aaacacaaatgttaattatttttataattgaatttaattttatttatgccagccagattgtaatggaatgttgtgatatttacaaataaataaagctatgatggtctatagaaaaatagagcagaattcagaaaagacataaacaaataactacataaatgattattattatctttcataataattccataatattactaagaaaatgcccaattttttggattccttttccttattttttatcttcgagactgcaagaagaaaaaaaaagtatttttgagtgatgatcatagtttcaagatccttcaaagctttgctcttcgtagttctaactgagcaatggtacccaagtgcacttcatcaggtccatcagcgattctcaatgttcttgctgatgcccacaggtgtgccaaaacagtgtcggatgataccccggctccaccatgtacttgtattgccctgtccagtaccttcagggccatgttcggagctgctaactgctccatccaacattcaaaagtttctactataacaaagttcattttgaacc

SEQ ID NO: 22776 - DNA, 500 bp, Gossypium hirsutum
  Clone ID: GOSHI-09MAY01-C51388_2
gtattattcctcctcaactttgctcccattaaaccacagccacaaccagctcaaaaaccccatcttttttcctccattaaagcttaaagcttgagttttttggcctgttccgccatgggcggaacctcattttcaaagcttctacttgcattttgcttagctttgctctatttgagtcctcagcttggtcaaaccagggttccttatgataagaaagctattggtatcaatggtcaaagaagaatcctggtctctggttctattcattatcccagaagcacacctgatatgtgggaagatctgtttcagaaagctaaagatggcggacttgatgtgattgagacttatgtttttcggaatgtccatgaaccatctctctggaaattataagcttgaaggaggatatgaccttgggagattcataaaaacagtacgaaaggccaggtctctatgctcagcttcgtattggaccttatgtttgtgcttgatggaacctttga

SEQ ID NO: 22777 - DNA, 946 bp, Gossypium hirsutum
  Clone ID: GOSHI-09MAY01-C51388_1
cttccttctccatttcactctcattaaaccatagctccaaggccagccagctcaaaccaacttttttttttcatttctcatgctcgccattttctagttgcaagctttgggtttttcttcttctgagttttgaagttgaaaaaggcagaatcttgtgctgttaaaacatggaaagaagctcatgttcaaggcttttaattgtattctgctgtgctctgtgtttggagtgtcaattggttcagtgcagtgttacctatgataggaaagccattgtgattaatggtcagaggaggatcctcttctctggttctattcattatcccagaagcactcctgagatgtgggaagatctgattcagaaggctaaagatggtggacttgatgtgattgagacttatgttttttggaacgttcatgagccatctcctggaaattataattttgaaggaagatatgaccttgtgagattcgtaaaaacaatacacagagcaggtctctatgctcatcttcgcattgggccttatgtttgtgcagagtggaattttggagggtttcctgtatggttaaaatatgtgcgaggcatcagcttcagaacagacaatgaacctttcaagagagctatgcaagggttcactgagaagattgtgggactgatgaagagccataacctgtatcagtcccaaggtggtcccattattctctctcagattgagaatgagtaccgcgcacagagtaaattactaggggctgtcggctacaattacttttcttgggctgcaaaaatggcgatagagacggaaactggggtgccctgtgtgatgtgcaaggaacaagatgccccagacccggtgataaatacatgcaatggtttctactgtgattcattccaacccaacaaaccctacaaaccaacaatgttgactgaagcttggagtggatggttctc

SEQ ID NO: 22778 - DNA, 629 bp, Gossypium hirsutum
  Clone ID: GOSHI-09MAY01-C51378_1
aaaccctcaacccctctccctttatcagttactttcttccagctccatcaaaagataacaatggcgggtagattaggcagacgagttgtccacttcgccaaccttccaatcaagctactaatgcccaacaccttcaccaacatcacagaaatagccctcaaaaccatcccatccgcatccaagattgagatcaaacgcgtcctggaatccctctacggtttcgacgtcgacaaagtccgtaccctcaacatggacggaaagaagaagaagcgcggcggtttcttaatcgcccggcccgattacaagaaagcttacgtcaccctgagaacccctctttccatatccgagaacctcttccctatccaggtgattaaagaggaaaaagacagtattaataagaccagtaagagtaagagcattgtggaagaaggggaaaagaagaagcattggcttgacggcaaggtgaaggatgatggatcacacagggggaaagggaaagggaaaggctcttatgcctcacccgtggcggtgaccgccgcggtggaggagaggccaagttccttggagcagcatgaggaaagctattaggtaggtaggtttgtggctttttgagttttcctttcccctcc

SEQ ID NO: 22779 - DNA, 922 bp, Gossypium hirsutum
  Clone ID: GOSHI-09MAY01-C52908_1
gaaaaacaagatactgagtgctgactattgaaattggtagtcgctgcagatatggcagagggggagaacaaactcaagctctattcttactggaggagctcctgctccttccgtatcagaattgcccttaacctcaaaggtctggaataccagtacatacccgtgaacttgcttaagggggagcaattcagtcctgaattccaaaagctgaaccctattgggtatgtaccggtgctggtggacggtgacatgatcatttcagactcttttgcgattttcatgtatctggaggagaaataccctcaacaccctttattgccatctgatcttgcaaagaaggcactcaatttccaggctgcaaatattgtttcctctagcattcagcctcttcagaatctagctgtactgaagtacattgaggagaaagtaagtccagatgagaaaattccttggacaaaatttcatattgagaaaggctttgaagcgcttgagaagctgttcaaagatcatgctggaaaatatgctactggagatgaagtttccatggcagatctgtttctagcaccacagattctggctgggattgaacgattcaatgttgacatggctaaattcccactgttatctaggttaaatgaggcatatagtgagctaccagaattccaaaatgccaagccagagaatcagccggatgctccttcagcatagggcactcgttaagatggtggatggatgaggtacatatctactgctgaactgtccatctgtttggtggctggtaatcttcaacaagggcttttggttcctcccgggtatgatcaatgataataaggattatgtagtccagaaccagaagttaatggaagacatatgatatatatatatagatatatatgccatgtttatccgactttggtggttt

SEQ ID NO: 22780 - DNA, 422 bp, Gossypium hirsutum
  Clone ID: LIB3146-046-Q1-K1-D8
ctaagcttaaatggaaccgaggatattcaaataagcgtggataaattttacggtgatccacgacccgagcataagttgatcaacacaggcttctaccatattagatcaaataataggaccatctctttgttcgaaaaatggtattcactcaacaattctacgtggaaaaaagagcaagatgtgttgatagacctacttcgacaagggatcgtcacccagttgcatctccgagtaaggttcctagagacgaggcatttcagtggcttttgtgaagacagtcgagacgtcagctacgtaaccacggtccatgcgaattgttgccgccacataaatgcaaaggttagggatctaacagccgtcctccgcgattggaagaggttcaaggcggctgtgaccaagtatcccaatgctgctggtaatat

SEQ ID NO: 22781 - DNA, 410 bp, Gossypium hirsutum
  Clone ID: LIB3146-046-Q1-K1-D4
acccacgcgtcctcttactcttagcccgtttcttttttacggacatgcacgtcccgtgcggaagtttatcaacacaagcttctcccatattagagcaaataatacgaccatctctttagtcgaaaaatgatatccactcaacaattctacgtagaaaaaagagcaagatgtgttgatagacctacttcgacatgggatcatcacccaattagcatctacaagtaaggttcctagagactaggcatttcagtgacttttgtgaagacagtcgagacgtcagctacgtaaccacggtccatacgaattgttgccgccacataaatgcaaaggttaaggatctaacatccgtcctccgcgattggaataagttcaaggcggcttgaaccatatatcccaatactgctggtaat

SEQ ID NO: 22782 - DNA, 407 bp, Gossypium hirsutum
  Clone ID: LIB3146-044-Q1-K1-H10
cggacgcgtgggtaatcggctcgtgttaaaaacgggacgtccttctaaaaaacaaaaaaaaacttgcaacttctcatttctttcaatcggatcacacttaaatgtcaaattgaattcgtatttttgaaaatcaagacaacatgtgtttaataagataccaattttgggcgtcgcgagggtgctaataccttcctcgcgcgtaaccgactcccgaaccctaaattttctctggattttaacgtagacctaaactcaaccttttatttgttttaataagagatctaataggtgtccgatcacacctaggaaaaaggatcggtggcgactccctgtttatttcaaaaatcaaacgtcaaatttcaaactttttttcaataaatcgccacaattagcgaccaagctaagct

SEQ ID NO: 22783 - DNA, 396 bp, Gossypium hirsutum
  Clone ID: LIB3196-053-P1-M1-F2
ttcaaaacaagaaattctcgtgtttcaatcggatcacgattaaatattaaattgaactcgtatttttaaaaattaagataacacgtgtttaacaagataccaattttgggcgtcgcgagggtgctaataccttcctcgcgcgtaaccgactcccgaactcgaattttctctggattcttacgtagacctaaaattacctcttttttagaaaatttaaaaataaaattttcttctaaaaagagaatttattaggtgtccgatcacacctagaaaaaaaaaagatcggtgacgactcctttttcaaataaaatcgagattcagttttcaaattttcaatacttacttcgactagcgcccgtgcccaatttttaggtcgctacagctggcgactccact

SEQ ID NO: 22784 - DNA, 523 bp, Gossypium hirsutum
  Clone ID: LIB3583-035-P1-K1-D8
gagagcctgaatttagtccaatcttgtttcgaacttctccatctgacttgcagtttcaacaagtatttttgaaggacaccgatgaaagggcttgtgcatatatcgcaggccctgcacctaatcgttggggttttacaattgatgggaaagacctattggagtcagttgctgatattccaattactgatgaagcacaactccattccgaggagggaaacaatgatcagaaggatctgcgaagaaagcttcgtgagcatccacttttctttggcataacaatggggctgctagctgaggttataaattctaggctttttacaaccgtccgggactcccttgggttaacatatgatgtatcatttgagttgaacttgtttgatcgacttaagcttggatggtatgtcatatctgtaacatcaactccaagcaaggtatataaatctgttgatgcttgcaagaatgttcttagaggtttgcactccaacaaggttgctccacgggaactggagagggcaaagaggac

SEQ ID NO: 22785 - DNA, 271 bp, Gossypium hirsutum
  Clone ID: LIB3146-039-Q1-K1-G8
cccacgcgtccgcccacgcgtccggacccacgcgtccgcccacgcgtccgctgcgaagaaagcttcgtgagcatccacttttctttggcataacaatggggctgctagctgaggttataaattctaggctttttacaaccgtccgggactcccttgggttaacatatgatgtatcatttgagttgaacttgtttgatcgacttaagcttggatggtatgtcatatctgtaacatcaactccaagcaaggtatataaatctgttgatgcttg

SEQ ID NO: 22786 - DNA, 689 bp, Gossypium hirsutum
  Clone ID: GOSHI-09MAY01-C52168_1
gaagccatggcctcttcacacggtaagttttccttcttttatttctttctttcggtttttgaatggtgaaaaataaactaaaaaaaataaatcgaaaagaaaatcaagaatctcaagaactttcaatcactttttaatttcagtaactttttttattttggtatgcatgtgtatttctgaaaaaaagaagaagatcccccatttacatcgtttacattcggttttatagccaaaaaatgagtaaataaaaatacaaaaaatccttgctgtaatctgttattgtttgctgtcattttctgttgtggttttcgtttgttgcaggtgtgcatggcgtggaggagttatttgcggaacatggcacgagtggaagaatcaactaaaggctgcggtggctgaagcttctaaggtttctgctgaaaattcccttggggtatttattttgggttatttaggctagttggattaagtttaataatttgaacccattattttggttgctggactatgtaagaaatggacattggactattatttatatattttttagttttatttttttgttttggttttggtgtaagcccgggcacaaattgggtcttagggtcttacagtaataattaaatattaatatgtttttatatttaaattgtatatttgtaatttcttatctttaaatattcggattatag

SEQ ID NO: 22787 - DNA, 299 bp, Gossypium hirsutum
  Clone ID: LIB3146-040-Q1-K1-A9
gtttgttgcaggtgtgcatggcgtggaggagttatttgctgagcatggcacgagtggaagaatcggctaaaggctgtggtggcttgagtttctagggtttcttcccaaaattccctaagtattttgggcttggggtattttggggtatttagggctttttgggttaagtttaataatttgagcctgttaattttggttgctgggctatgtaagaaatggacattggattattattggtggtttattttatttttggttttagttttggtgtaagcccgggcacaaattgggtcttacac

SEQ ID NO: 22788 - DNA, 420 bp, Gossypium hirsutum
  Clone ID: GOSHI-09MAY01-C52058_1
gaaacaactccatctggaatgtgggctagaggatcttattcagctagaagtaagtttgtggacgatgacaacaagtgctacttggagatcaactacaccttcgatatccgtaaagaatggcaatcgtagactacatacgaaggaatcattgtcagcgaattggtttgctttgtgtccattgtttgtcaagtctcctttaggtgtgaccatagttcattcatttactttgttcttattttgccacccatatcctgtgtgagagtgagactaagaatggtctacacaatgaagagagtttagtcgaatagctttctggtttgctccgagtccgagttgcagttagacattcatttctttaggaatggattaattaaaaaaagttaaagcttttgctttttaaccttccttcacgggaaccac

SEQ ID NO: 22789 - DNA, 719 bp, Gossypium hirsutum
  Clone ID: GOSHI-09MAY01-C52338_1
tcgtccacgcgtccgctttcagaaacacagtttcaaacctgaaatttccatttgtcgattccaagctctcatcaatgggtctctcagttgagaattcggtaacacaatctcatacccgaacccacaaaaccttcctcatcaccaactacatcctcttgggagctgcttccgcctgtatcttcctcatcctctccctacgcttgttcccgtccttgtgtggattcttccttatcctcctccacgtcgtcaccatagccgccgccgtctcgggttgctccgtcgccacttccgggtccaacaagttctacgcagctcacatggtagtgatggtgttgacatcgatattccagggctcggtttcggtgcttatattgacccgaacttctgacttcttggggtacttgaagtcctacgtgagggaagatgatggggcggtgatattgaagttggctggtgggctatgtgtggctgttttctgcttggaatggatggtgttggggcttgcttttgtgttgagatactatgcctttgtggaaggtcatggggttggcaatggcagccaagcagcatatcagagaaatgagaaggttcaagatgaagatttgaagaagtggccatggccaatccaagtttaaaaatgataatattcatatatgcttgtcagattggttattcgttgatttgtttgtaatgtttggtcgattgaaattttattttcg

SEQ ID NO: 22790 - DNA, 616 bp, Gossypium hirsutum
  Clone ID: GOSHI-09MAY01-C52258_1
cccggttctataccgaccggatcaaccagttggtttacggttcatgactttaaacccgggaacagttccccgaatgtaccattcaaccgccaacttgttacccgatgggcgggttttaattgcaggtagtaacccacattatttttacaaattcggtgctgaatttccgacggaattaaggctggaaacattttcacctgagtatttatccccggatcgagccaatgttcgaccggtaatcgagggaattcccgagacggtacgttatggcgaggcgttcgatgtatttgtgtcggtttcactaccggtcgtgggaatcatcgaggtcaatttcgggaacgcaccttttgctacacattcgttttcacaaggtcagagattagttaaaattaacgttacgccgtcagttccagatagtggcaggtacaggattaaatgtacagcaccaccaaatggagcggttgctccgctaggttattatatggtttttgctgttaaccaaggggttccaagtgtcgctcgttgggttcatttagttgcttaaattgtttagtcgtattgcaaagatttgcaattgtattaacttttccaagtcttaaaattctcaactgtttat

SEQ ID NO: 22791 - DNA, 561 bp, Gossypium hirsutum
  Clone ID: GOSHI-09MAY01-C52268_1
ctattacttctcagttctgattttatttttcaatttttgccctcagcttcatcttctgcttctgtaactttctttccaaccatctctacgtttccctttttttccattgattgcagaggagacctagatatttaagatctttatgcagtgcacaaatcaccggcgaagtactttttggatgaaatgtatagtggaaattcattgcggaggaccacaacacttggtagtgagaaagaacgagagcgagtgtatgatactatcttccgcttgccatggagatgtgaagtgcttatagatgttggattctttgtctgctttgatgcgtttctgtccttgttaactatcatgccaacaaggattctgattaagctttggaggttcctgactgcaaggcagttcaagaggctttctgcagcagagctgtgtgattttgtgctgctttcttgttctagcatgtggagtcattctcctgggccaaacatgtatggcatgacatatcactgcctgtatgtttgtaataaacgatcattataaatatccatatcattggtgcttgttaat

SEQ ID NO: 22792 - DNA, 538 bp, Gossypium hirsutum
  Clone ID: LIB3829-025-Q6-N6-A3
cggctaacggaggacttgctacatctcataaatttgatttaaagcagttggtcgatacaaagagttagcatcaagtacagtgattccctaacaagaatgtcaaagtcattctggtacacatcgtcaactgccgcatgaaaagtccttgaaaatttagtgtaatcacttgctgcatatcatcaatcttgaaggatttttacgctgaagctcatccatcagcagatgcgcaaccgatttgtatcccaactcccgagctctgtagattgctattcctgttggagtcatctttcgattcttcagacacaatgaactattacatatccaataaggattgatccctttttcttctatgcagtgtgggcacatccattccttattttctcgtacctcttccagttcttcaccatacctaatcttgagacaagcccgacacagaacaccattgctagagtgacaaactgaacaatccgtctttcctatgcacggctgattaacatcgagattaccacatcgcttgcagtcgttctcagcacataat

SEQ ID NO: 22793 - DNA, 414 bp, Gossypium hirsutum
  unsure (1)..(414): unsure at all n locations
  Clone ID: LIB3146-061-Q1-K1-H1
accctccggtgtgttctcaaaccggggaggggcccgcgaaaattaaggtttggttgcgccccccctgcttagaggaaaaagggaccaatccttatgggatatgtaatagtccatggggttggaagaatcgaaggatgcctccaccgggattagcattctacaaaggttttgccttgaactgattcctgtctttcccaactggctaaccttgaaaaatactgactattaactgttatttgttttcgtgatcgaattcaaagcacgggagttgggatacaaatcggntgcgcatctgctgatggatgagcttcagcgtanaaatccttcaagattgatgatatgctgcaagtgattacactcaattttcaaggttctttccatgcggcagttgacgatgtgtaccataatgacttt

SEQ ID NO: 22794 - DNA, 981 bp, Gossypium hirsutum
  Clone ID: GOSHI-09MAY01-C53598_1
gaaattcctctctttcaacttcgtctcctgacctcccctagtctggctcgcttaccccaccataccttgtttgatcttcagcgtacttaagaactcccatttccagcaggctatggcttcagcagcaaaagcagacgatacgtcattgtgaatttctaaacaggataagagaactttgccttccgaatctctggccacaatacctgaagctgaccggttctggctctccttatattcaccgttaaagttaatcttgatgacctcctactgtggatggcccagagtgcacaacagaaaagccgaccttgacaagcgttgagctgctctatcacccagggcattctcggaatagatgattcatagtttcaacattgtctccacatcgaggacagcttgtacttactgctagcttcatgtgttgcatatttacttttgtaggcagatagttccatgacagcctccatattgtaatctttacttttgttggtagattcaggctccagagttgtttacagaatttcctgtagatggtatgtaaagcataagctctaggattaccattcgatctctgtaatagtttataagcactgcggactctgaattcgctcgacgtctcacctccccaaataagaaaatcttcatgcggtgttagtgccagagggattcggaggatccttgcaacgtcttttcttgtgaagaacagatcagagaaggtttaccatttgcctccaccatcaaactcttgacagatagttgaatgagttcctctagggagatctcgtctcccccaaacccatcgttgtcaccactctccgtcatcccaagctgcagcagctactgtttttgctaggacaccagggatagcactcttggcttctagggttttttctttttaaataaaattaatttaatataaaagaaaagatgtagtttttaatttaaagtttaattgatgtgagataagatgattgttaccctgtc

SEQ ID NO: 22795 - DNA, 413 bp, Gossypium hirsutum
  Clone ID: LIB3146-058-Q1-K1-G3
gcaggctatggcttcagcagcaaaagcagacgatacgtcattgtgaatttctgaacaggatgagagaacttttccttccgaatctctggccacaatacctgaagctgaccggccctatctctccttatatgcaccgccaaagttaatcttgatgacctcccactgtggaaaagtcgaccttgacaagtgttgagctgctctatcacccagggcattcccagaataaatgattcatagtttcagcactgtttccacatcgaggacaacttgtacttattgctagcttcctgtgttgcatattacttttgtaggcagatagttctatgacaacctccatattgtaatctttacttttgctggtagattcaggctccagagttgtttatagaatttcctgaggatggtatgtaaag

SEQ ID NO: 22796 - DNA, 702 bp, Gossypium hirsutum
  Clone ID: GOSHI-09MAY01-C53588_1
cggacgcgtgggcggacgcgtgggtcaaaacccagattttagattggcctaattcatcaaaagatgtaatgtagaatagtttcaaaaattgattttttttttgttgatgtttgaaataatgaagccaagtaaaaggcttccaatgaaggtttggttaactgctcaaagatcaatgggtctccccgtgggtggaaatcacacttcctccaggttttgtactcgttaatcttgtttcctggtttagttttggggcacatttccttttcaattttctcattttatatcaaaagattggatctttgttacaagaacatggattttaagaccttgaaattgatgatctttcatggttctttagcaagacgtgtacttttacgtgctctaatggtgattactgctttgtcaattgttcctctactgcaaatcatatctggggttgaccttgaatctggttattcaagttcatttatattcccaggcacttttgccttctctaaagcttggggttcatttaaaatggttcaatatggaggaaatgggaacttgacaaccagtgtggttaaagagctaatgggaaagaacattttgaattacattgcataagctctatgtgttgtggaaggttcaatgtcaactgtcattggattgaaagacttgggattctttgatgttcattgggtttataagcaccccctttttctt

SEQ ID NO: 22797 - DNA, 346 bp, Gossypium hirsutum
  Clone ID: GOSHI-09MAY01-C53748_1
ctgagactagaaaaatggggatttaaatcccttgaaattctgcaaatactaagggtgatttttgtgggtagctgtaaattccaaagcttcctgcaaaggtttttaatttcagcatgtactaaataattcctaggatccgcagtagctccttgcaatagtttataggcactacgtactgagcattttccctattgttcccctttccacacctgaaaatcttcacgatcggtctctgtaagcggaatctgtaggattttttgagcatcacctaattgaaaggtattcatgttcaaaatgcatcatttgtcggttttgcaacagccaatataaggtcgatcactctaaa

SEQ ID NO: 22798 - DNA, 906 bp, Gossypium hirsutum
  Clone ID: GOSHI-09MAY01-C53728_1
cccacgcgtccgcccacgcgttcgcccacgcgtccgggaaggtggagatccaatcagtttgggctctgccaagagaaaccaggaagatttaagtggtcactacaatgaaacgggtttgagaagtgttgagaagaacgagaatccagttcattataactcttccaaaaacattgagacgatccttcttcagatgatgagcagcaagagtcaaaacgggggcgctccaaattggaacgttggacaagccataaggaaagggattacagtatcaatagcaagtcatctgcttcctcaaagttcaaggagattgagaagattgataatgtggatgccgcagaatcaaacaaaactctagatgaacctggtaagttggtcgagcctgctgagaaccatcaccctttgtctgacaataaaactgctggtgcgccagagaccaaggagaccgatacatggccattggacgaccggcatcttgacactgtcgagaagctgaagaagcgaagtgagagattcaaacttccaatgcccaaggaaaaagatgccatggcaataaagaaaatggagagcgaggcattgccttcagccaagaatgaaactcctgcggattccgaagttaagccagagagaccagcccgaaaacgaaggtggatcagcaagtaatagtggaacaagtaagcccacattgttgctgtgctgcaaggtctttaattattggaccccaaaggtcctgccataagggtttctgaaatgttcatgtactattaataccttcatatcacgtatgagattgtaacagtgctgccgccatgtacttttttctctcaatactacgtgtatatactagagaatgtaacattgaattagtcataagtggtgcacatattccatttactgttaatttgggat

SEQ ID NO: 22799 - DNA, 408 bp, Gossypium hirsutum
  Clone ID: GOSHI-09MAY01-C53668_1
tggttgaagataatgatgactttatcgcatcagaatcagatagacaaatgcttcttataaagcagcaggatgaggagttggatgaacttagtgcaagtgttgagagaattggaggtgttggccttacaatacatgaagaacttcttgcacaggagaaaataatagatgacttgggttctgaaatggacagtacaacaaaccgactggattttgttcagaaaaaagtggctatggttatgaagaaggcaagtgctaagggccagattatgatgatattatttttgctaggtttgttcattattctattcattctgggctttctcacttagtcttctgattgtttacccaagtttgattttggattaaccatgggaggctgggaacataaaggagttggttggtgtgatg

SEQ ID NO: 22800 - DNA, 265 bp, Gossypium hirsutum
  Clone ID: uC-gsflnu33B098b04b1
actacgcgtccgagtttgtgggagcaaaagagaggagatttataaaaaaatactccgcaataccccacaaggatgagggaacggaaacaacttagtgcaagtgttgagagaattggaagtgatggacttacaatacatgaagaacttatcgtacagtataaaataatagatgacttgggctcaaataaaataatctcaacaaactcgactggacttaatacccaaaacagtggctacggcactcaataaataaacttataagggc

SEQ ID NO: 22801 - DNA, 887 bp, Gossypium hirsutum
  Clone ID: GOSHI-09MAY01-C53128_2
ccctttgcttcttgcagcttaatgtctctataggctattagtctattagtctattacccctctctactccacctacttggttgctataaatagaagcttatcatcttcttgcttccgccaccttcattcatgttccctccctctgctttctaataatacataatctatagctaaaggaaaaactaaagttggaaaaagaaaatggacaagtcccatattttgtctataagtgttgctgttgtgggagcggtttgttttttggttcatcatctgcttaatagcatgtggttcaggtcggaaaggctgaggaggaagctgtggatgcagggtatcaaaggtccatcaccttcactcatatacggcaacctccctgagatgcaaaagatccaattgaatgctctcacctccactcctaataatgccgatattgttgcccacgactatacttcctctctcttcccatatttcgtgcagtggagaaaggaatacggtccaatatatacgtattcaacagggacaaggcagcacttgtatgtgaaccaggcagagcttgtgaaagaaatgaaccaatgcattagcttggatttaggtaagccctcttacataacaaagagactggcacctatgctcggcaatggcattttgagatccaatggccccctatgggcacagcagaggaaaataattgcccccgagttcttcatggacaaggtcaaggtaatggtggagctaatggtggagtccatgccacctcttgtaagaaagtgggaggacagcattgaggcccaaagtggtgtgatggcagacattagagtggatgaggatttgaggggcttcacagcagatgtcatcgctagaacttgttttgggagctcttattctaaagc

SEQ ID NO: 22802 - DNA, 768 bp, Gossypium hirsutum
  Clone ID: GOSHI-09MAY01-C53128_1
aggattacatgaacatcgatcgtctagcaatcatttgggtaaaaagcaggtccaatatatacgtattcaacagggacaaggcagcacttgtatgtgaaccaggcagagcttgtgaaagaaatgaaccaatgcattagcttggatttaggtaagccctcatacataacaaagagactggcacctatgctcggcaatggcggtcgcggggccaatggccccctatgggcacagcagaggaaaataattgcccccgagttcttcatggacaaggtcaaggtaatggtggagctaatggtggagtccatgcaacctcttgtaagaaagtgggaggacagcattgaggcccaaagtggtgtgatggcagacattagagtggatgaggatttgaggggcttcacagcagatgtcatcgctagagcttgttttgggagctcttattctaaaggcagagagattttttccaagcttaggaaacttcaaacagctatttccaagcaaagctttcttttcggagttccaggctatggacttctgccaatgaagaagcaaaatgagatcttgagtttggagagagagatagagtccctaatctgggaaacagtgaaagagcgggaaagcaaatgcaaagaggcatgttcatcagagaaggatctattgcacttgatactggaaggggcattgaatgaccaaagtcttggtgaggattcatccaagcgcttcatagttgataactgcaagaatatatattttgctggccacgagtctact

SEQ ID NO: 22803 - DNA, 591 bp, Gossypium hirsutum
  Clone ID: GOSHI-09MAY01-C53388_1
ccccttgtacgggattggaatttggagctgaggatctggaaggtcctattgtgtccggttcgagtcaaggaagtggtgagtactccgcccgagttggaatcgggaaaccaccgagtcaagtatacatggtactcgacacgggcagtgacgtcaactgggtacaatgcgcaccctgcgccgattgttaccaacaatccgacccaatcttcgagccatctttgtcgtcttcctactctccgctaaagtgcgacacccaacaatgcaagtaccttgacgattccgaatgtcgaaatgaccgtacatgcgtctacgaggtgtcctacggtgacgggtcttacactgtgggtgactttgtcaccgaaaccatcaccctcggctcggattctgtcaacaatgtagccattggttgtggccataataacgaagggttgtttgttggagcgggaggcttgcttggtctcggtggcggccagctctcctttacctcccagcttaatgcaagtagtttctcctattgtctcgtggatcgtgactctgactcagcatccactcttgaaattcgattcgtcttttcctcctaacaccattaca

SEQ ID NO: 22804 - DNA, 379 bp, Gossypium hirsutum
  Clone ID: GOSHI-09MAY01-C53368_1
aaaaaactcaagagggccttattctttttctctgctggggctcctgcgccgatcatgggtccggtcatcggactgacgtcatccgccgcgaggtcgctgtccagaaaatcgaaaaggcgcaagtggaggcactgactaggactgtggagtaggtggccgactggcatgggggatgggacagaggtcagaggcggcagcagctgatttagggtttttttgtttcacctttgattcgggctattagggttaatttgggcttggggtttaaatttagctgggtttagctatttgggtctgggtctgatttgggctttttgggttgcaattttagattgtaaaaaaaactgaacttttaatttatttttggtttttgtttatt

SEQ ID NO: 22805 - DNA, 427 bp, Gossypium hirsutum
  Clone ID: GOSHI-09MAY01-C48778_1
gttatggtttaatacccatgttagacttaactggttccatacctcaactattgtaaggcgctgttgaaaaatatgaatgctgtcttctcctctttggcgacatctagggaattgagcttccaccacaaccttcttgagccttatattgtcaagggacggaatgaaattccatgcaaatcaccataccgtaatccgcatttttgaggggatgtataatttccatagtttcctatgaaaggttttaatttcagcatgttaaggaaaattattaggatccaagctagtttcatgtgagagtttatagggactcgtaacggagaattcccctgtcaactcccctctccatacttgaaaatcctcgtgtgttgtctctgctagtgaaatctttaagatttttttttctatatccattcaaaaggtattcctt

SEQ ID NO: 22806 - DNA, 507 bp, Gossypium hirsutum
  Clone ID: GOSHI-09MAY01-C48648_1
cccacgcgtccgaaaagagaaagaaaaaagaaaaaaaaaaggttcagatttcttcgccggtaaaaaacccggaggcgtttctccggcgaggcgttagggtgtagcttccaagtagcatgaaaagtcatcgtcgtcatcgaaaagttgcgacggtgaagaatgattataagcaactagatcgatttgagtcaggtgaaggagataagatgaagaagcaaagatttaagaggaaattgttgaggtacgaagagttaccggattatttgaaagataacgagttcatcttgaattattaccgatgcgaatggccattgaaggacattttattaagcgttttctcattgcacaacgaaacgataaatatctggacgcatttggcagggcttttaatattcgttggattaacggtgttcagttccatggaggattttggagatggaagtttgatcaccagtttttccaaagctcaagtatcaagacccgtgatgatgatgatgaatgatgtaa

SEQ ID NO: 22807 - DNA, 565 bp, Gossypium hirsutum
  Clone ID: GOSHI-09MAY01-C48128_1
tccacgcgtccgctcattatgggggtttaaatgctgcattcctggaggaaaagaaatcagtgtgggtgatgaatgtggtgcctgttacggcacgcagtacgcttcctctcattcttgaccggggttttcccggtgctttgcacgactggtgtgaacccttcccaacatatcctcgaacgtatgatctgcttcatgcaaatgggctcctctcacatctcacttcagagaggtgtggcttgatggagttatttatagagatggatcgaattcttcgtccggagggctgggttgtgctctctgataaattaggagttatagagttggcacgtgcacatgctacacaaatacgatgggatgcaagggtgatcgaccttcacaatggtagtgaccagcgcctacttgtttgtcagaaaccttttgtgacgaaatgattgctttagcgccaaaaggtctcaagaccacagatctgtaaacttttcttgatctgaggatgaactatcggtggcatcacaatgttagatatgctccagagtttcgacaggttcgatattaatgacttgagaag

SEQ ID NO: 22808 - DNA, 714 bp, Gossypium hirsutum
  Clone ID: GOSHI-09MAY01-C48098_1
ggaaaagatttccggttttattttgattttgagcatcttaaggaggtagcatctgttgtggaggagagtgagttcttgagaggttggaagaaatggaataggggccgtaaaagaaaagtgccagtcaagaaggttacaacctataaagtcacacctatgcaacttaagaaggataagagcacgataatttggaggcagtttgatgcaccagagccggaaaactattggtacagggtatgtgaggggcaagcagctaagtacattcagaggccatggcatgctttatggaaatcaaagagattgatgaatatagtgactgagatcagtggacaaatggactgggattttgatgctgttcatgtggttcgaggggaaaaggcacaaaatatagaactctggccgcgcttggatgccgatacctctcctgatgctcttctcacaaagctcaaagaaatgattcagccttggaggaatctttacatagcaacaaacgagccattctataattactttgataaattgaggtctcaatataaggtccatctgcttgatgactacatggaattatggagtaacaagagcgagtggtacaatgagacaacattgctgaatgatgggaaaccacccgagtccgatggctacatgagaggtgctgtggacaccgatgtactttactcggcgaagacgcgtgtttaaaccttttacaatttaact

SEQ ID NO: 22809 - DNA, 387 bp, Gossypium hirsutum
  Clone ID: LIB3493-030-P1-M1-F11
aaaagatttccggttttattttgatttggagcatcttaaggaggtagcatctgctgtggaggagagtgagttcttgcgagtgaggaacaaatggaataagcgccttgaaagaaaagggccactcaagaccgacacctcctatgaagatacacctatgcaactcaccatggatcagagcacgatcagtacaacagcatgctgatgcaccatatccaggaaactgatcttacagggtatgtgaagagcaggcagctaattacattcataggccatggcatgctttatggaaatcaaagagattgatgaatatagtgactgagatcagtggacaaatggactgggattttgatgctgctcatgtggttcgaggggaaaaggcaccaaata

SEQ ID NO: 22810 - DNA, 960 bp, Gossypium hirsutum
  Clone ID: GOSHI-09MAY01-C48008_1
cccacgcgtccgctacccgcagagatccaaagaggaagctccgattgctgtaaaacaatggcggattaccatttcgtttacaaagacgtcgaaggagcttccactcaatgggatgatattcaaagaaagcttgggaatttacccccaaagccaccagctttcaagcctgacccttttgaacccgcacctgacccggattccgtccctaaggacaagtcttggatcgatgaaaagactgaagaagagcttgaagaaatcgaagatgatgtcgatgatgatagattccttgaagaatacagaaagaagaggctggctgagatgaggaaagctgttaagatttcaaagtatggatcggttatgccaatttccggatccgattttgtacgggaggtttcgcaagctcctcaggatgtctgggttgttgtcattctctacaaagaaggatttccagagtgtgggctgctcttgcagtgtttggaagaattggcagttaaataccctgcaacaaagtttgtcaagataatatctacagattgcattcctaactacccagatcgtaatcttcccacactcttggtgtataacaacggagcggtgaaagcaaattatgtaggcttgcatagttttggccgcagatgcacgcctgaaggtgtggccttagttctttgtcaatcagatcctgtactgaatgatggtcaaagtgggagcaatgcatctgttctcgaaggagttcgaaagaggttcatagagaaagttgttacggagcatgaagatcatgatgatgacgggtcttcaagtgattgaatgtttggtcagttgattttatttcttttgattggtaaaagaatgattaccattgacagagagtggcttctttgctgcttcaggaacaaatggtattgtatttgttataacatctttatcatgtttccaacaaattgggatgcaattcttagctcc

SEQ ID NO: 22811 - DNA, 365 bp, Gossypium hirsutum
  Clone ID: GOSHI-09MAY01-C48288_1
gagatggtgtctaagcttacaagtgagtgctgggacaagcgtatcacaagtagtccttggaataaattcagctcgagtgaatctgcttgtctttctaattgtgctcaacgatacatggacttgacactcatcattatgaaacgcgttcagtcaatgcagtaacctggaggagactatgcctgcagtcgtggttacaagttgtgagcttttcttgcaaaatctgctgtattttttaaaccaatactcgtattctgttaaaattcctacagaaggacatcctttgcaatgggttacaaattaattatctcaagattctatgcgggctttaaagagtttgctttggcatcaaaaaataaaaaattatt

SEQ ID NO: 22812 - DNA, 529 bp, Gossypium hirsutum
  Clone ID: GOSHI-09MAY01-C49898_1
ctctttcattcgtttacttttgttggaaaatatgagctgaaaacactgaactgaagaaaaatgggttcggtggcaaagaagggattgcagaaatacttgttacagcttcaacatcaccctttgagaaccaaggcaattacggctgcggttttgtcagggattagtgacactgtttctcagaagctttctggaatacccaaacttcagctgagacggattcttctcaaaatgctctttggatttgcttatcttgggccatttggtcattacatgtatatgctactggataaaatcttcaaggggaagagagactccaaaactgttgccaagaaggtggtgctggaacagttgacaacttctccttgcaacaacttgcttttcatgatttactatggggtggctgttgagggaagaccctggatgcatgtgaaaactaggatcaagcaggagtatccgaaagtacagatgactgcatggacgttctggcctgttgtgggatggataaatcaccagtacatgccgttgcagt

SEQ ID NO: 22813 - DNA, 596 bp, Gossypium hirsutum
  Clone ID: GOSHI-09MAY01-C49888_1
cgtaaagcaacatctgaagatgcccctgctcctgcagaggataagaaacttgctacttggggaactgaggttcctgaggacctggttcttgatgaaaaacttcttactgaggcacttaagaaagaggatgagaggagaagagaggagaaagatgaaagaaaacgcaagtataacgtcagatggaatgatgaggttactgctgaggaaatggaggcatataggatgaaaaaggtacaccacgatgaccccatgaaggatttcttgaattgaaaaggtaaatgtaagagcaaagaaaatggataatgccaatcagctttgtggttgtcattgagttgatgaaaatcatgtcgttgttttgtttgtataatacactaaaagtattaaattaggttccagtgacagatggtcttggcttcttgtaaattatgacccaacctgcgtccttctgcaatacgatcatttaaaatttctctaacatgtaggagcttgaaaggtttacttgtattttattttttggtaatcaagactccaaagtgacttggtacttagtgatgttaatgagtgggtcagattgaaataaattaagtttgttgaat

SEQ ID NO: 22814 - DNA, 573 bp, Gossypium hirsutum
  Clone ID: GOSHI-09MAY01-C49798_1
gttgtattttctatctcatccaaacatcgtccgatactacggaagtgaactgggtgaagaaacactctctgtttacttggaatatgtctctggtggttcaatccacaaattgcttcaagaatatggtgccttcaaggaacctgttatccaaaactatacaagacaaattctttctgggcttgcttacttacatggaagaaatacggtgcatagagacataaaaggggcaaacatactagtggatcctactggtgaaatcaagttggcagactttggcatggcaaaacatatatcagcttgtggtaaaatgctttcgttcaagggaagtccttattggatggcaccagagggtggtatgaatacaaatggctacaaccttgcagtggacatctggagcttgggctgtactatacttgaaatggcaacatcaaaaccaccatggagtcagtatgaaggggtggctgcaatatttaagattggaaacagcaaagatgttccggagattcctgatcgcctttctaatgaagcaaaaagtttcattaggctttgcttgcaacgagacccatcagcacg

SEQ ID NO: 22815 - DNA, 585 bp, Gossypium hirsutum
  Clone ID: GOSHI-09MAY01-C49688_1
gcaaaatcctctcaaagaatgatgaacaccaccaaaagcaccttcagcttggctagtcttatgatggcagcagcttcagtatgcgcagccaccgggcctgattttttcgatcccttttcatcatcgtccgatcaaaagctcaagacccaccagaaccaagttggtggggatgatgggttctacggaccagacgattttgatattccagggtttgaaaaagggtggggaaacgggatcatgggtggtggttacggtggtgggttcgggggtccgagtggaagtttctccaaaggtggcatcgttaggcctagtgttgtttgtaaagaaaagggtccttgttacaacaagaagctgacctgccctgctaagtgcttcacctcatttagcccttcagggaaagggtatggcgtgggtggcggtggtggtgggtgcagcatggattgtaaggaaaaatgtattgcttattgttaagagggtgatataaacatattaaaaatgagtagccctagttgttaaaccatgtatgattttatatgatcagatgcatggagtttataattaaaaatcataatatttatgtggttg

SEQ ID NO: 22816 - DNA, 786 bp, Gossypium hirsutum
  Clone ID: GOSHI-09MAY01-C49178_1
atcaacagaccactccaaccccctaattcccccttgaatacttcatctttcattgaatgcattccagtagacagatttcaaaaatagtttccagcttcatctccaaccttctaggctctcaactctcctctgctctccgtccacctccaatcttcagccaacgcatccatcacgccagaaggaacccgtttctccagataagtcgtcttcctctttattaatccttcagatgcaatgacatgtgcgactttattcgattctctgtatgtaaaaaggaagacacatacctgaaaacctaaacttagccttttttagtctttaataaacgcaacaatctctgatttatccttttgcttcttttgtagtttacgaatcaccgaccgagaatcgccctccatttccacttccttcaacccaaggtgaagtccgagttatagtgcttggagaccctccaccgcttctgctgcaaaggcagatgcggcgtcaaagtttattttgagcctcgttccctctggagcaacacatcttacagaatagatccgtttttcagtagggcactctcggaacaagtgttccctcgtttccgcctcatgttggcaccagtgacaagtagcagaaccaattaatcttctgtagttaagattactgaaagtacgcaaaaatttttgccaaaagcgtcatattgtaatcttacttttagagggaagatctagattccacatctttttggaaaattgtttataattctcctgcacatgaatctggtcatcatgtacaagaagttta

SEQ ID NO: 22817 - DNA, 830 bp, Gossypium hirsutum
  Clone ID: GOSHI-09MAY01-C49378_1
ctcttatcaaaaaagaacacagtaatggctatttctttgaaatctacagcagcgggattggtccagttaaagaaccacaatacccattctccgtctcgctttccttcattcaaacccttagtttcaactaagagattcactccaatggctgctcttgctacttctcaaactcttggcatttctgaaaccttctctaaactgaaaaatcaaggcaaagttgcattcatcccctacatcacagctggtgatcccgacctttcaacaacagcagaggctcttaaggtgcttgattcatgtggctcggacataattgaactcggtgtaccatattctgatcctctggctgacggtcccgtaatccaggctgcggctacgcgttctttggcaagaggaaccaacttgaatgcaattctttcgatgttgaaggaggtggctccacagttatcttgcccgattgctttatttgcatattacaacccaattctaaagcgtggggttgagaaatttatgtccgctataagggacgtaggcatacaaggactggtggttccagatgtccctctagaagagacccgacttttgagaagagaagctctcaaaaataagattgaactgggtatgcttacaacaccaactacgccgacagaccgaatgaaagcgattgtggaagcagcggaaggatttgtgtacctcgtgagctcagtcggagttaccggtgcccgtgcatctgttagcgatcgggttcagactcttttaactgaaattaaagaggtaacaaccaagcctattgtggttggctttggcatatcgaaacccgagcatgtggagca

SEQ ID NO: 22818 - DNA, 407 bp, Gossypium hirsutum
  Clone ID: uC-gsronu33B007c03b1
gatgggtatctatacttctatgatgggggatggtgggggggtcgattcatgtggctcgggcataattgaactcggcgtaccatattctgatcctctggctgacgggcccgtaatccaggctgcggctacgcgttctttggcaagaggaaccaacttgaatgcaattcttttccatgttgaaggaggtggctccacagttatcttgcccgattgctttatttgcatattacaacccaattctaaagcgtggggttgagaaacttatgtccgctataagggacttaggcattctatgtctggtggatcccagatgtccctctagaagagaccgaacttttgataagagaagcttttctaaatttattaatcgttctttaattgttacaacaccaactacgcctacagac

SEQ ID NO: 22819 - DNA, 397 bp, Gossypium hirsutum
  Clone ID: GOSHI-09MAY01-C49248_1
aaagaaagaaaactaaattctcttagagctctggcctgtggccgtcctagctcatcccagagcacgcaccgccttcggccccacatgcctcacgcgccaccgtctgggtcttgaaacccggcggttagggctttcaaaaccctatcctcttcgcgatgaatcgaagggtatcccgacgatctcggcgttaacggaggtatgaggcctgagattacggtgcaccgacagtggagactctcggagtaccccgacgtttctggacaactcattgattaaggccagctgatgtgacgtgggggacaggggcattgatggctcttgctttacgagttggaacgggcctgcatagcttacggcgctaaaagatgcagaaaccctaaggtttctgacctggggt

SEQ ID NO: 22820 - DNA, 1720 bp, Gossypium hirsutum
  Clone ID: GOSHI-09MAY01-C44958_1
gctgacttgtttaataattttgtccgaaaatattgcccatctcgtctggctccgtctccgatcaggttgaaggtgattatgtttactggatatatcttggagaggggctgtgatcttttcaggtgttctggtagcagtagcctttctgaaagattccatttcaattatccccttggttggtaacaactatgctaccgactggggcaaaagatactcatctccgtgatagcagcaatcaaaaagtccaccctcaacccatggaagagagcatgaaccagaacccagaagctgtggaagctctaatatccaaattatttacgaacatctcctccctgaagtcagcttatattcagctacaaactgctcatactccctatgaccctgaaaaaattcaagctgctgataaacttgtaatatctgagctgaagaatatatctgaactgaagaacttctatagagaaaagaaccccaagccagtgtgcgtttctcctcaagattctcgtttagctgctgagatccaagaacaacagaccctgttgaaaacctatgaggtcatggttaagaaatttcagtctgaaattcagaacaaggattctgagattcgacagttgcaggagaaaattgaagatgcaaaccagaagagagtgaaactggaaaagaatataaagcttaggggcttgtctatgaaggaatctgaaggctcaggagaagaaaatggattctttcctgcggatttgacccctgagctcttcacatcagctgttgaatctgcttacaaagctattcatgatttttctaaaccattaatcaacatgatgaaagctgctggttgggaccttgatgctgccgctgactcaattgagcccaatgtggtttatgcgaagagagctcacaagaaatatgcatttgagtcccacatttaccagaggatgttcagtgggtttcaacaggagaacttctccattaaattggataatgttacagtcaataaagagagcttcttccagcaatatctggctctgagggagatggatccattggacatgttgggccagaatcctgattccttattcgggaaattttcccagagcaagtacctgatggttgttcatccaaagatggaagcttcattctttggaaatttagaccagcgtaattatgtaacaggaggtgggcatcctaggactccattttaccaagcctttctaaaattggctaaatctatttggcttttgcatcggctggcttactcattcaaccctaacgtgaaagtctttcaagttaaaaggggaagtgaatactcagaggtttatatggaaagtgtagtgaagaatttgataatggatgaaaccaatgagaagcctaaggttgcgctaatggtcatgcctggcttttggattggtggcaccgtcatccagagccgagtttatcttttccggtatgaaggttaacgagtaaattaccaccactatgcaaatctaagagtttgatgagtaatacacgtatggactaatatagtgtgctgtttgtctttgtgatttgttgttattgctgtagtcatgcaactgtagtaattgtattacgacataggagctcactgtttgttgacaaagttcctttgtctttgtgtgcttcaactgttcttctgggtttgattgcctgcaagaatgcagcagacagtccatgatttgagcatcatctgtctctacgctgcattggg

SEQ ID NO: 22821 - DNA, 779 bp, Gossypium hirsutum
  Clone ID: GOSHI-09MAY01-C44908_1
cccacgcgtccgcaatttgggcacaatctatgtggattgtggtaaactggatcaagctgcaacctgctatatgaatgcccttgaaatcaagcacacgagagctcaccaagggttagcacgcgtatactttttaagaaatcagcggaaagctgcatacgacgagatgtccaaactaatagagaaggcacataataatgcctcagcatatgaaaagcgatctgaatattgcgatcgtgagacagcaaagaatgatctcaacatggcaacgaaactggatccacttagaacttatccatacagatacagggctgctgtgttaatggatgaccaaaaggaaaccgaagcagttgaagagctttcaaaagccatagctttcaagcctgacttgcaaatgctgcatcttcgagcggcattttacgagtcgatgggtgatatgaagtcagctctctgtgattgtgaagcagcactctgcttggaaccgaaccatatggacacgcttgatctgtataatagagcacgagacagagccatcagtccacaagaaatgtgagaggcatcatcgtcattacatttctgataaacttgccggatgtagcagtcagttacaaggaaaaagaatcatggagtcttttcacatcgagctgctgaatgaccctcactgtggaaaggaaaggaccccgagagagttgcttgcaaatgcgaacgggccttatggaatcaggtgtaccttgccacgtaagaaaagatttagccttgtaggttaaaaggggtcacactgt

SEQ ID NO: 22822 - DNA, 582 bp, Gossypium hirsutum
  Clone ID: GOSHI-09MAY01-C44578_1
gctatttaaagcccactaccaagagccgaattccccccccccccactagctttcgagacacccccattggatatcacataaaaatcccaacctctcagtttcttggaactgatggggtatatggtattattttggcaaatggggtcttcataaaagcacactggggaggggggaatttgggtgggattcctccattctcaccctcagcccacaattaaaactgtttggcagtgcttattacccaataagctttgcatggaagaggatccatcctacagagcacctacctatctgcggaggcttttttggctaatgcactggcaaatcggcaagtcacgaaaagggcaatcaactcatagtaattagtatgagtctgttatctggctatacatacatatatatatgtatatatcatgttttcttgtatggtattaattgtttttgaattatggttgttggaatgtaatggaaaggcgtgtgtttagagcagaacctcacccttagatgtgtgagtttgcttgtttccaaatttgcagtcagttgctgcaatatgaatcgaataaaaagttcttttccctccta

SEQ ID NO: 22823 - DNA, 441 bp, Gossypium hirsutum
  Clone ID: GOSHI-09MAY01-C44788_1
caacagcttattcagagatatgatcctgatccagcagcggaggctgctgctgcaactgtcctggcatctaagttgggagcagattcaggtttgaaggtctatgttggagatgaatctgagtataatgtgccaggggggaagagccatgatgttgaggtagtgccatcaagtggaattcggaaacgaaagcaactacacactagatccagtagtgcaggaagcactccattgcttcattctgatgaagaaatacctcattctgcagggatggagggtcctcgagcttctgagcatggtcaactggttgtagttgatcatcactgtccacagggaccagcctcacatgatgggggatggcttgctcgaatcgctgccttgcttgtgggtgaagatccaacacaatcttatgctctcatatgtggcaactgccatatgcacaat

SEQ ID NO: 22824 - DNA, 913 bp, Gossypium hirsutum
  Clone ID: GOSHI-09MAY01-C44668_1
gcaaggtgggaatctgcagattgtgaatcagacgatccattttgatgacagtgtttatgcaaagtcaccagcttctaatgtcgaatcaaagaaatcactcaagaggtttcatttatacttatacagtgatgatgttgatcaaggaaatggaactctatcgatggtagctaatgtcacattaggattcaatgagaagaagtttaaagatgccgatgccaggtcgcctagcagttcactcagaaatttgcagaaaggaaagggtgtaataattataaaagacaacctggttgtgagtggagtcggaagtacccaacaatcatataattacgatagtagtaaattttgctactctagaaacataagcagctcaaactacaccattcttcacgatgaagtgcaaaacacatgtaataaaagagcaaaatctcattttggatacggtcttagcagaaggtggtcatttccagctagaagagcttttctaacgtctcatgtagttgatccgaatggaaactagtattttgactcctttgattcttgacttgctttatttggagttctcgaattagataatcaagtttcgtgcatatggatactccaaataaatgctagcgttcatggtttccgtttatgtgaaaaggtttctgggggacgtaccttcgggtgacaaaacttgaagatgatatttaattgttggtgtgggagtactggattgttacaaatatctcacattttttgtgtttgatgaacattaatggggaagagcaaataagccaattccattctcttctcacaagtcgtcggtgatattatgcttctaataatttcctctcatttgttgagaaacttattgtgtgaaatttgttaaaccgtaattggaaattatataaattagatttctgatttttaattc

SEQ ID NO: 22825 - DNA, 562 bp, Gossypium hirsutum
  Clone ID: GOSHI-09MAY01-C44608_1
gacgcggattactatgccacccaattccaaataaccggcatccccggtgccctcaattattaccgcaactttgatcgaaactgggaactatctgcaccatggtggaaaagccagatcaaggtacctgtaaagtttgcaatgggggaccttgatcttgtgtatacaatgcctggtatgaaggattatattcacaacggtgggttcaacagggatgtgccctttcttgaagaagctcttgtcatcaatggagtttctcattggatccaccaagaaatacctgatcaaatcaatcaattattgttcgacttcttctccaagttccattaaatttaaataataataatatcaaatttagtaaaaataggaaaaaaaaaacccatgttgtacctttgttgtttttattttttaagtccaaatgttagatataaaaaacagttttgggtaaaaatattaattttgtttaaaatataaatcaggtttaggctttctttcgaggtttgaattctttattaaggttgtaatatattgttgcttctatataagatataatatggttatttat

SEQ ID NO: 22826 - DNA, 474 bp, Gossypium hirsutum
  unsure (1)..(474): unsure at all n locations
  Clone ID: uC-gsronu33B111a03b1
ccttcgcttccgatcccggaactttgtggtcacgggaagggccaacacaagtggcgaggggtgcgcaaaagtatttcattcggttgaactccatgaacaaagataggaggcgatctagcatccacgatatcaccagcgttggcaatgcagatatttcagcacctcaagggccaatcactggtcaaacaaatggtgctgctgctggaggttcatccggaaaatcagccaaacagccccctcaacatcctgctgcactggctggtgtaggtgtgtatggtgctccaactatggggcagccgataggaggcggccccctcgtctcagcagttggcacaccagttaatcttcctgcccaggcacatatggcttatggagtgagagcttctgtaccaggagcggtagttcatggtgcaccgatgaacatgggtcctgcgacatacccaattncgcatacatctgctcataggtaacatg

SEQ ID NO: 22827 - DNA, 393 bp, Gossypium hirsutum
  Clone ID: LIB3148-022-Q1-K1-C3
cccacgcgtccgcccacgcgtccgcccacgcgtccgcggacgcgtgggtcagcacctcaagggccaatcactggtcaaacaaatggtgctgctgctggaggtcatccggaaaatcagccaaacagccccctcaacatcctgctgcactggctggtgtaggtgtgtatggtgctccaactatggggcagccgataggaggcggccccctcgtctcagcagttggcacaccagtgaatcttcctgcccaggcacatatggcttatggagtgagagcttctgtaccaggagcggtagttcatggtgcaccgatgaacatgggtcctgcgacatacccaattccgcatacatctgctcataggtaacatgctgtttagctgccaaatgtacaaaaga

SEQ ID NO: 22828 - DNA, 378 bp, Gossypium hirsutum
  Clone ID: GOSHI-09MAY01-C44078_1
gaaaggcatgggaggttcttgatcatattatggctaaatatatatgccaaaaaaggaaagatttgaaccaagggatgatggcacaaactgtggatggtggtgtggatatcttaacatcatacattcttgaagagaagtcatgtgatgataaattcttgagagataccattttgaatatgacgcttgcagggagggacaccaccagctctgctcttacttggttcatttggcttgtttcgaggcatccgatagtggaaaacaagatcattgaagagctccaatcgataatacctgcagaggaaaccaaaaagaggcgactgctcaatgctaaggaggtaaagaatctggtttatctacaaggagcattatgtgaggctt

SEQ ID NO: 22829 - DNA, 790 bp, Gossypium hirsutum
  Clone ID: GOSHI-09MAY01-C44368_1
agagcaaccaacattacaacaacgttaatagagagatagagagagagagagagcatatcaatcaaattcatcaaatctttcattcttatattctctttctttcttggtttcatgttttcagggcctttgtgttgaatctaatccaatctctgctatctttctcagccatctctccacaagcaataagaagaagattccatcccaatcttttcttaaagactacccatatcttcttcttcttttttgtcagaagaaaaaaatatatctgaatcccatattttgctgaagaagagattccaattctgctggtttttacccctcgacatgtcttgttgtttcaaggattgattgaagtgagaagcaactgttggaatggaaggtgatatatgttcgggttttggtaatggaggtcaagtggatggcaaggttttgcaaacatttcaaaagagttttgttcaagttcaagacatcctagaccaaaacaggctgctaatcaacgagattaaccaaaaccatgaatcaaagattcctgataacttgagccggaatgtggggttaattaaagagttgaataacaatattagaagagtagctgatctctatgctgacctctccagctctttcaccaggtcgatggaagcttcgtccgaaggtgattcggccgggatgtacgaacctgatggaaaagctagtcagaagagaattagatctgggtaaaaatttgatcaaactgaaacttttggcataaagtatgttccctttcgctgtggaataaagggagggggtgttt

SEQ ID NO: 22830 - DNA, 336 bp, Gossypium hirsutum
  Clone ID: GOSHI-09MAY01-C44298_1
aagggattgaaaccagtgtgtgtgaattatttggtgaatggagttggtgaagaaggaacagtggtggttcttcctaggaatgaaaaagacggtgggaataatgggaagatggtcaccatcaccttgcctcaacatctattgctaaagcttaacaatggacttcaaattgattggaatattgttatttaatttaaatatttttctcatttcatttcttgtaatgcatgcgtgggtgagttatcgtgtctgtaagagaataatgaatgtatggtggctctgttgttatatatgaataacattctcattatcatatgtaaagcctaaacaataaacttc

SEQ ID NO: 22831 - DNA, 672 bp, Gossypium hirsutum
  Clone ID: GOSHI-09MAY01-C44248_1
tacaaacagtccttttattatctcccagttgttagggtttgtttctttgtctccctcttctctctctcgatgcctgcatttccatcccccaagtctcccttttctttttcaccatttaaaacatcaacgaaaatctcagtcttcctcacattttcattcacaaaccaaccctttcatggccaagaccaaacctggcaagaaggaccttgattcctacgctatcaaaggcaccaacaaagttgttcgtcctggtgattgcgtgctgatgagaccgtcggactccgataagccaccgtacgtggctcgtgtagagaagatcgaggccgaccatcggaacaatgtgaaggttcgagttcgatggtactatcggccggaggagtctattggggggagaagacagttccatggagccaaggagctctttttatcagaccattatgatgtgcaaagtgcccacaccattgaaggaaagtgtatcgtccacactttcaaaaactacactaagcttgaaaatgttggtgctgaagaattattttgtaggttcgaatataaggccgccaccggtggtttcactccggaccgggtggcagtgtattgcaaatgtgaaatgccatataacccggatgaccttatggtgcaatgcgaaggatgcaaggattggtttcatccatg

SEQ ID NO: 22832 - DNA, 625 bp, Gossypium hirsutum
  Clone ID: GOSHI-09MAY01-C44278_1
actttcgaatgaagatgcatggacattgttctcggacaaggttggtcaaaacctaatgagttctatagatttacaaccgattgcaaaatctatcgttgagcgttgtgccggtttaccgttggtgatagttatagttgccagtagcatgagaagtgaagatagttttccaatatggaggaatgcgcttgcagaattgaaccgaaacatatcgagtatcatcgaaattaaagacaaggtgtatcaacaactgtgattcagctacgatcgattgaaagatcaaagaatccaaaattgtttccttacttgtgcatcgtatcgtgaagactcgggaattctaaaggaacaattgataagggattgggttggaaagggattaatagaggaaatgggtagcttggaagcaaacatggacaagggacaagcaatactaagaacattagtagagaattgctagttagaaaatgtaggaaatgaaagagtaagaatgcatgatcttgtaatagatatggttaaacttatcactcgagatttgtatgaatcataaattaacattgcacatgtatggttgggtctcttacactttttattttagatgaattaaaatgatacactaaattcactattc

SEQ ID NO: 22833 - DNA, 546 bp, Gossypium hirsutum
  Clone ID: GOSHI-09MAY01-C44268_1
ccacccgtccgcgaaaagaaaaaaaaaagtaactggggtgagggtttttgtaaaggccaatggagggctcctcttctcagctatttgatgatgatcaaaagtcttccggcgcttccaagttcctcttcaaccttccgtctcgcggccacctctcctccaccgtcatctcctccaatctgggggggatgcgagtgtatgtttgcgagcacaacacttctccaccagagagccagcacataaagacaaaccaacagaacatacttattagatcgctcatgcttaatgacaagaatggtgattccagttcaaaggatgtgaaagctgcagctgagggtcctagaaagagggctgctgaaagagtcatggatagtagggcttcagcaaagaaagccaatacacaagagggatcaagcagtcgtgctgagaaggactaccatagtttaaccgtagagaggcttcgtgcccttcttaaggaaagaggactttctcccaagggaaagaaggatgaactgattgctcgcttgaaatgtgtaaatggttcatcac

SEQ ID NO: 22834 - DNA, 839 bp, Gossypium hirsutum
  Clone ID: GOSHI-09MAY01-C45918_1
gcattttcactcttgattccctgcaactatgtgttcttcatcatggaaaaccatggcggtcgctttgttattgatagagctgtggtttaccattgaatcttctgtagctcaccctgataaaattgttaagcttccagggcaaccccctcgcttgagctttcaacagttttcagggtacgttacggtggattacaagaagcataaagccctgttttactactttgttgaagctgaaactgatcctgcatctaagcctttagtcctttggttaaatggagggcctggctgttcttcacttggagttggggcattctctgaaaatggaccattcagaccaaatggagagtttctagttaaaaatgattacagctggaacagagaagccaatatgttatatttagagacaccaattggagtagggttttcttattccacaaacacctcttcttatgaagcagtggatgatgagatcactgccagggacaatcttgtgttcttgcaaaactggtataataaatttccaaattacaggcacagggatttgtatattacaggagaaagctatgcaggccattatattcctcaacttgcaaaacttatggttgaattcaacaagaagcaaaatctgttcaatttaaaaggaattgctcttggtaatccagttctggaatttgcaactgatttcaattcaagggcagaatatttctggtcccatggattgatatcggactcgacctacaatatgttcacttccgtctgcaactattctcgatatgtcagcgagtactatagagactcggtttcaccgtcttgttcgaaagtgatgagtcaagtaagca

SEQ ID NO: 22835 - DNA, 871 bp, Gossypium hirsutum
  Clone ID: GOSHI-09MAY01-C45928_1
gcaaattaccaaacaggagtccctttcgatttcaacctcttttaactgtagaaataaaccgagatggattgtttggaaacccgccaacgcttctgcagcaaaaatagaagcaatgtcaaaattgatttttaccctcgacccagtcggagcaacctattttccagtaagaatctacctcgctggacactatctgaacaggtgctcccgtgtttcccctccatattgacgtcttctacaagtggctgatcccatcaagcgtctataataaaggttaccaaaagtaggcaaataattactagcaatcctccagtttgtaattttaatctttggaggaagatcaagggtccacaatctcttgtaaaaatttttgtattctggttgtattagagtctgtccattatgtaaaaggcatttatgtccactccggacagtatattctccagtcggctcgccagtccatactaagagatcatcatgcggatgcatagacagtgggacatatagaatcctttccacatccatttcctcaaaggtacccacgggtctccccagatagagacactcttcccgtccccaattctccagccctagcccttttgaagaagtcctttagcagcccaaatgctctgccagggaagagaaggtaaatttcctaacctggaattcaggaaatctgaatctttaaaatatttagctttcaatgtacgcgctagtaaagagttaggattacataataatcgccaaccctgtttggcaagtaaagcaatattaaaaagattcaaattacgaaatcccattccatctcttctttaagcaaaaaaaaaaaaataaaaaaaaaaaaaaaaaaaaaaaaaaaataaaataataaaaa

SEQ ID NO: 22836 - DNA, 444 bp, Gossypium hirsutum
  Clone ID: GOSHI-09MAY01-C45448_1
cccacgcgtccgtgtatgtgaaaaaattggctgtttttatagggtacccttttagctttgaagaagaacaaggtggggtagtgaagaaactaatagatttatgcagttttgagaacttgagtaatttagacgtgaacaagacgggaaaacgacatgaagacgacgatgaggcaacgaacaagacgttcttcagaaaaggctaggttggggattggcaaaaccatcttacacccgagatggctaatcggctcgacaatatagtggagcaaaaactgagtggaaccggtttgagtttcgaactcaacaatggatcatcttgatggactaaaatcatttgtctttcgggtaataattgtgtgttcatttgcaactgtgtttggttgggatgctttgaatttcttgttcaaagatccaaacatgttattgaaacctatttctctcaaa

SEQ ID NO: 22837 - DNA, 453 bp, Gossypium hirsutum
  Clone ID: LIB3148-039-Q1-K1-G2
atctgtttcttcccacatcggtggatccaaagattttaaatttttaaaaaaaaaaaaaaaaaaaaaaagagaaaggtatttttgaaaggggggaaaggaaaattctaaaaaaatactaaacaaaatgctttctataaacatatacaaatcatgctttctttctttttctatcccgtttatttggtaacctttttgaccttcttcataaaaggcaatgttggggattggcaaaaccattttatactattcatgtctaatgttctaaatatattttttccatatactaaatttatctggtttgagtcttcaacttaacaatggatcatctttattgactaaaatcatttgtctttcttgtaataattgagtgttcatttgcaactgtgtttggttgcgatgctttgaatttcttgttcaaagatccaaacttgttttctttaaggtttttttttt

SEQ ID NO: 22838 - DNA, 806 bp, Gossypium hirsutum
  Clone ID: GOSHI-09MAY01-C45478_1
cccacgcgtccgctttgattcccattttatgccgagcacttgaacatgttgcagagttctgaaggcgtaatttcaatcgttctaccttgtacaggaagtatttggaagatccttgtttgtgggtagaatcgaacaccactactcttagcatactctcttcacatgctgagatcggagttggcttccttctaatcatttctttgttctcgtggcaacgcaatatcatacaaactttcatgtactggcagctattaaagcttatgtaccgtgctccggttacaactggttaccaccaaagtgtttgggcaaagatcgggaggacggttaatcctcttgtccagcagtatgctccgtttttgaacggtccggtttctgcaatacagcgatggtggctcagataggaagtcaaaaatggccgatttgtagatgaagatgcggatgaaatgttctacacaaggtttagtttgcatctctctttttaaattaaaaactgatttgggataaatgatgatatagccattttgactggagaagatggggtttaacatttattcagctaattacagccttctcttgctcttaaccttattagactcttttgtgtcaatcattaaaattgtgtttttttttgcccgtttttatttcatggccttaaatttaataaaggcaaaagcactcaagtagtatacaatgaaattatttgcctcaagtagtatacaatgaaattatttttttttcttttctattgaatattatttaatttgcttttttcaaaaaaaaagaattctgcggccgcgaattcttcc

SEQ ID NO: 22839 - DNA, 621 bp, Gossypium hirsutum
  Clone ID: GOSHI-09MAY01-C45438_1
cccactcgtccgaaattttccattcatataaccaacccttagagaacaacatcaccccatttctttttaattactgcttcttgttctcttccttctcacgtaccccaccaatatcaataatggcacgccaaagctttgttcttgctttggtctttatagctcttgtcgggttggtttccgccgccaatacagcttctaaagcaccatctgcagtcccagtacccgatgatgataccatcggcaacactgatgatggagcaggtgcatcctcccccggtgcttctaatgacgctgttgctgcccctcttggcagtgagcaggaagctaaaagcatggctcctgctccttctagtgatgcaaccaccacaggtgtctctgccgttggggcggctgctctcactggggcagctgccattgctacctacttcgtcttctaaattagcttcgtctcaatccaagtagtaaacctcgaaaaagggtcttattatccataatttgtacgtctactttaatttcttagtctggtaaaattgaggtctgcaaaggcagctgcttgtatttgtttatgaataaaaactaatgaatatatttacctaaataggaaacaaaaaaaaaaaaaaa

SEQ ID NO: 22840 - DNA, 526 bp, Gossypium hirsutum
  Clone ID: GOSHI-09MAY01-C45788_1
gctagtcagtgctgcaactatggaggaatgtccaaccactgggaccatggtgggtcattgggttcgaaagtttactttcttatgcactgatagagaatccatgttcggtcgtatgatttggtagtccgggcgtgcatattattgtgtatactaagggagtacacatatgcttctgtgccgacgaaaaacaaacccaggcgtgtcgatttatactattccagttggttaatccgtgcagttgaatcaaggagaggagacggtcagctaactgcatgcgaggtgttacttttccatcacgaagatatgggtataccatggaaaattgcaaaggttggcgtccggcaaggcatgtggggaaccgtcaagaagatcgaccccggcctacgtgcatatcaaaaggaaaggacatccgggaatacgctatcccattgcgctttcatggctcagatataacagtaaatatgagtgcagactatctgagatcctttgaaagcaaaagtaatgattcaatagagctcgaaacaca

SEQ ID NO: 22841 - DNA, 660 bp, Gossypium hirsutum
  Clone ID: GOSHI-09MAY01-C45768_1
cgttagaattgggacctgaatgggttcgcaacaagtcaaagatctcgtgaagaatcgagaaatagttatagaagcactgtcaccattgggtgaaggtgctgtgctgggtggaaaaggtgcaatttacttatgggcgacgctaccagagaaatgcatggatgatgtgaaggtggttcactggcttgctcacaggcatggggtggttgcgatcccagggagtgcatgtgggtccccggggcatttgaggatttcctttggtgggctcatggaaaatgactgtagagcagctgcacagaggctgaagacaggattagaagaattggtaaaacatggattggtgcagtaaaagctctaattttacattgatttgaatatacagaatttgtgcccccggcttcctttgaataattgaacattttaagttgctcagaattggagctgcggtttctgctctgtatattggaaaaagcacttgcatagatgcatgtataaatttcccgtacattgatatttaatacatgcaattactttttaacctaaaaaaaaaaaaaaaaaaaaaaaaaaaaaaaaaaaaaaaaaaaaaaaaaaaaaaaaaaaaaaggaaaaaaaaaaaaaaaaaaaaaaaaaaaaaaaaaaaaaaaaaaaaagggggggggtatt

SEQ ID NO: 22842 - DNA, 667 bp, Gossypium hirsutum
  Clone ID: GOSHI-09MAY01-C45118_1
ctcttctaaagcacgtcttcatcagctctctgatgctgataagatagttgttgcatttccagatgatggagcttggaaacgatttcacaagttgttggaccattttccaacggttatctgcacaaaggttcgtgagggtgacaagaggatagttcgactcaaggagggaaatcccaccggttgtcatgtggttatagttgatgacttagtgcaatctggaggcactctcattgaatgccagaaagttctgtttgctcatggtgcggcaaaggtgagcgcatatgtcactcatggtgttttcccgaagcgttcctgggagcggtttactcagaagaacaacaggtcggagaagggatttgcctacttttggatcacagattcatgcccccagactgtgaaagccattgaaaacacagctccttttgaagttctgagtcttgcaggatcaattgctgatgctctccaaatttaagtccaatctccaagaggcttcatatgaactctttttaagccgaaagtttagaaagtatgtgccaatttcatcttagtatgaaatgacgaaataaatgtattatgttttgaggataaaagtatcatttagtatgaaaagttgcatactaatttatataatttatttttatgaataaaatctaatattcatattagt

SEQ ID NO: 22843 - DNA, 418 bp, Gossypium hirsutum
  unsure (1)..(418): unsure at all n locations
  Clone ID: LIB3148-035-Q1-K1-D1
cccacgcgtccgcccacgcgtccgcccacgcgtccgcccacgcgtccgggcaaaggtgagcgcatatgtcactcatggtgttttcccgaagcgttcctgggagcggtttactcagaagaacaacaggtcggagaagggatttgcctacttttggatcacagattcatccncccagactgtgaaagccattgaaaacacagctccttttgaaagtcttagtcttggaggatcaattgctgatgctcttcaaatttaaattcaatctccaaaaagcttcatatgaactttttttaaaccgaaagtttaaaaagtatgtgccaatttcatcttaatatgaaatgacgaaataaatgtattatgttttgaggataaaagtattatttagtatgaaaaggtgcatactaatttatataattta

SEQ ID NO: 22844 - DNA, 465 bp, Gossypium hirsutum
  Clone ID: GOSHI-09MAY01-C45138_1
ccccaagagccatcgccagcctaccagactctaccaagggtagccccatcaaggtcccataccttaaccagccatggaaaaggatattgtccccgttggaatccaggcggatgcaggtgagagctgcacctgatcgcttatcggagaaggtggagcagagcatcaaggaagcacaagaggcgtgctcggatgacccggccagcggagagtgcgtggctgcttgggacgaggtggaagaactgagtgcagcagccagccacgccagggataggctgaaagataacgatcctctcgagaattactgccaagacaaccccgagacagatgaatgcaaaacttatgataattgaaactatgggttttttcttttaagtttatgaagatccttctgttttagatgatgaatatgggtgtaagactactcttatgtgaaactgaatgtattctttttatggattgcatgac

SEQ ID NO: 22845 - DNA, 611 bp, Gossypium hirsutum
  Clone ID: GOSHI-09MAY01-C45068_1
tttggttttcgtttcgttgaaagcttcgttcgtgttcggttcgggtgttactcaaaaaggacatgttattacatccgtggaaactgccctttttgtttgttcaatggtgatgggggttgctcatataattgtggcatatagaacaagttgtagagaaagaaggaaactattggtttacaagattgacattgaagctatttcagcttgtaagagtgggttttcaagatacgagaagattctacaagacgaaagagtgaagcttcatttgaatttacgatgatattaacttcaacaggcttaaaaataacaataaaattaaatcaatggtgaaacatgccgcctagatacaaaagtgagatttatccaaaacaagtaccagctggaaatcatgagtagtatagaagtttaaaacccatatatacaaatacaccaaaattggtgtgtatatatatagatatattgaggcattctttcataattttgagtgtacaagttttataatgaaattaatgctcaaaatagaaacggccaaaagcccttctacgaccctttttattgggtgagaatatatattcaatatttggaatttcaatgacatttcatattggtgg

SEQ ID NO: 22846 - DNA, 338 bp, Gossypium hirsutum
  Clone ID: uC-gsronu33B012d11b1
tttggttttcgtttcgttgaaagcttcgttcgtgttcggttcggctgttactcaaaaaggacatgttattacatccgtggaaactgtcctttttgtttgttcaatggtgatgggggttgctcatataattgcaacatatagaacaagttgttgagaaagaaggatactattggatgacaagattgatgatgaatgtatcaaatttcatgtgagtgggttttcaagatacgagaagagtctacaggacgaaagagtgaagcttcatttgaatttacgatgatatgaacttgaacaggcttaaaaataacaataaaattaaatcaatggtgaaacatgcc

SEQ ID NO: 22847 - DNA, 580 bp, Gossypium hirsutum
  Clone ID: GOSHI-09MAY01-C45318_1
attgccagtgggtcagcaaaacagctaatcaagtcttcagtctggaaggcgagcaactaggcgtcattcggtaccaacataccttcatggcccagaagattggttctgtgagctgccttaccttccatccctaccaagtattgcttgctgctggtgctgcagatgcgtgtgtttctatctacgctgatgacaattctcagacaagatgaatataaattctttcccaatttcatgaattcgggaggtattgcacggtagaactggcatcggcacaaattgcacggagtcaggatcgaagataacctgtaaatgttgcctgccacatttaccatttcattgtgggtattcctggaaattggggggggggggggggatctgctgattgtaatgctatatatatagtgggatatatattcattagcctccggtgtagatggtcttacacatgttcggaaaaaggaatcctatcctgcagatatttcatggatgggggggctttggcaaataatttgttcttataggtgcatgtaaatagttttcccattattatttcacccttttcagtgtgttcattgttcat

SEQ ID NO: 22848 - DNA, 795 bp, Gossypium hirsutum
  Clone ID: GOSHI-09MAY01-C46858_1
ctccattcgtccgaccacgcgccgagagtggggaggtgtttaccttaaaaaccctttccaacccctagagaatgcttgcgaggaattgagaaccagtaggatgtttttgaagcttctagaggctgtgctcaagactgggaaccgcatgaatatcgggacaaaccgtggtgatgcccatgccttcaaacttgatacacttcttaagcttgctgatgtgaagggtgcggatgggaagaccacactcctgctttgggtggtccaagaaatcataggaactgagggtgctcgtctgtccgatgctgaccaaactcaaagctccactgtaaacgaagatgctcggggtaggaagcttcggtttacaagctgtttctagtctcagttcagagctcaccaatgtgaagaaagctgcagcaatggattccgaggtacttaacagcgatgtcttgaagctttctagaggcattgaaaacatcagcgacgttctaagattaaatgaaaaaatggcattggatgagagcctggagaagttttccgaatcaatgaacaagttcatgaaaatggccgaggaagagattataaggattcaagcccatgaaagtgtggccttatctctggtaaaggagattactgaatacttccatgggaactcaacaaaagaagaggcccacccatttagaatctttatggtggtgagggatttccttacggttctcgaacgggtctgcaaggaagttgggatgataaatgaacgaactgttgttagttctgcccataaattcccagtcccagtgaatc

SEQ ID NO: 22849 - DNA, 384 bp, Gossypium hirsutum
  Clone ID: GOSHI-09MAY01-C46878_1
gccacgcgtacttcaaatggatgcagctgttgtcataaagaccttttctcatgaagacgaattacttatccgtgtccatcgtggttgtatataacactctaccagatgagcgccttctcttacaatctgtaatcagcttattgttcgcttgccgcggcctatttttggaatataaatgcttttttacaaaaggcaataacaaatcgtcatggcaataaaacccaaattcttaatttaattaatttaactatcatcccccttaaaaaaaaaaaaaaaatttttttattaaatacctacctatttaccatttttgggggggccctttttagaggtccaaattttattccccggtgtttggaagtaataattttttttttggggccc

SEQ ID NO: 22850 - DNA, 649 bp, Gossypium hirsutum
  Clone ID: GOSHI-09MAY01-C46828_1
tcaggcatggaatcaagatcattcacccaccaagaagacactgcatgagcattggtgacgacgaaacatacattcgggaccccaagacggaaagctaacaaaagagtccaagaacaaagcaacatgtcggaaacaatggcggtaggaggcaaaacatgattttcaaaccagttaactaaaggatcttggagcttactcaaggcagcagcaaaatctgggacaaaagatatgtcaacgtcttgcatgttttcgacaccatgagggattgaagagtgggaagggaaaggaaggaccaaggtttgaagattggaagaagaatgtaaagagaggagcgagttgagataatgaaggtttttgggtgtgaccatgatcgtcactgttaagccacgaaggaggatttggtgggctaaatccatgaggggaaaaatatgtcccgatgctgggaatgggatcattagaacgtggactccattgctgaagtttgtcattgcttcttttctttttctttcacttcctttcttgcttttcttgctctcgtagtcgtagtctgatttgtgccataatttatatgcaaacttttctttttattaatatataataggtttgtatttgatataaaagttatacatactgatttaaatttgttttt

SEQ ID NO: 22851 - DNA, 601 bp, Gossypium hirsutum
  Clone ID: GOSHI-09MAY01-C46448_1
gcgttgaatgcatggcaacctccgacaatgtcgtccgagctggtctcactcccaagcatcgtgatatccaaaccctctgttctatgctcacctataaccagggttaccctgaaatcctttcgggacttgcattgagtccttacataacaaggtacctcccaccgtttgatgagttcgaggttgatcgttgcattcttccgaaagggtcgtcggtggttttctcggccatcccgggtccttcaatcttcctcgcatttgttggggaaggaaaaatgaaaactggatgttggaaaggcattgttaccgaaggagatgtggtgttcgaaccagccaacacagagctcgtcattactgcgactacatctgagctgcaactttatagggcagggatcaacagcaggttctttcatggtcaatgaatttatgaacactgccggcgtctactgccattatcattcagcagccttagtgagtaaaataaattatttaatttcatttaattatgctttcttttgccgccattttatggttataatgtaattttaggacctgcatatatattctgtgaatatataaataaataactgaaatcactcccaat

SEQ ID NO: 22852 - DNA, 642 bp, Gossypium hirsutum
  Clone ID: GOSHI-09MAY01-C46408_1
tcggatcatcaatggctgaatccttgggtccacgattgtatagctgctctaattgtctaaatcgcgtttctctccacgatgatataatttccacgtgttttcagggaagaaatggccgtgcatttttgttctcccacgcaatgaacattacattaggaccaaaagaagacaggcatctcttatccggtctccataccgtggctgatatttactgtgctgactgccaccaggttttaggctggaaatacgagcgagcttacgaggtgtcacagaagtacaaggaagggaaatttatactcgagaaggcgaagattgttaaggaggattggtaacaagcaagcctcatcgtttttttaaggttttcttattccatttattccccgtgtttgatgtaattgttatcggtgcccgatgttcgtcttgttcagaaaaagacgtcgccctcatttcggaaaaaaattgtcattgtttcgaaccttgcattcttaacgatgatgcgcgacggtttggcaattctctgtgttaataaattatggtattcttaaccatcgttcatgagaaaaaaaaaaatatatatataaatggtggtccttttttaaatataaatataaattaattttaaatattaaattatatattttg

SEQ ID NO: 22853 - DNA, 1063 bp, Gossypium hirsutum
  Clone ID: GOSHI-09MAY01-C46718_1
ggttatatatgtagaagcttgtgagagtggcagtatctttgaaggcataatgccagaagatctcaacatttatgtaacaacagcgtcaaatgcgcaagagagtagttggggtacgtattgtcctgggatggaaccttctccacctccggagttcatcacttgtttaggagatttgtatagtgtggcctggatggaggacagtgaaactcacaatctgaagagagaaaccatagagcaacagtataaaacagtaagggaacgaacttccaatttcaactcatacacatccggtggatcgcatgtgatgcgacgcgcgagcacaagcattaaagctgaaaagatttatttgtatcaaggttttgatcctgcttccgtaaactttggctccaaatgaattaagccatgacacgcaaatggaagctattaaccaaagagatgcagatattctctttttatggcatatgtacaaaaattcggaagatggatcgaagaagaaagaaatactgaaacagatttctgagactatgaggcatagaatccacttggatggcagcattgacttgattggaacagtgttgtatggaccagcaaaaggctctgtcatcctcaataccatcagggaacctggtttgccccttgttgatgactggcagtgcttgaaatccatggttcgcttgttcgaaacacactgcgggtcactaactcattacggaatgaaacacatgcgtgcatttgcaaacatttgcaacagtgatgtttcccaatccgcaatggaggaagcttgtgttgcagcatgcagcatgcagcagcagccatgatccaacacaatggcatccttcaaatcatgggtatagcgcttgattgaggaatccatgtgcccaaggccattcactaccattaaatctgaatcgttttcaaagttagtttagtatgttaggtttttctgctagatgcacttttatcccacatatacatacaaggttgtagccacctagcagatgggttgtagatgttgcggaagcgacgataatattaataacaatattatcagaaatatttagat

SEQ ID NO: 22854 - DNA, 548 bp, Gossypium hirsutum
  Clone ID: GOSHI-09MAY01-C46678_1
ggaagatgaagagtgatgatggacagttggtggtgctgagtaatgatgttactctaaagatcaaaggccatggcagagggtttgatgtgtgagacagtgcaagaattccgggagagtgtggtgaaccccttctcagagcggttcatgtgggcagacagctctcctagaggacacacctggtcagtgatggatgatgtagttttgaggggcaaatacaaccgttgtcccctaaagaagccatccaagggaggagatatcaagggtttgaaactcattctgcttcataattcccactatgcccacctcaattcagtccgctaaaacatctgagatatgttccagcagttatgttttgaaatctcaagtaattgcttacatatattgcaatagcatataccattgatgggatcaatactgtttcctccgaagacaagctttgccatgagtgcaattctttttttccaatcaagcatagtgtgaatcaaatttccaaattaatgatattcagaatattcgcaagatctaatggtcttgtataaattattgtt

SEQ ID NO: 22855 - DNA, 415 bp, Gossypium hirsutum
  Clone ID: GOSHI-09MAY01-C46638_1
taccaacccatttgccggaactggaaaaaacaatggggctttcacccttcttccctctgctaggaccagtgaacgcgcccatcatcgccggaccaccaccagatctagtggccgacatcgcgcaataggggtttcaaccccgttttaaaacacgcgtgccaagcggagatcgtggggaggtggtgtggcgcacgactcggagttgcgcgacgtgcggagcccggcttgcggcgctggcttccctgatgctgggtttctcatttccttttttgttttattggtatttgggcttgtgttttgctttgtatatcgggctgagagatgtgggctaagctttgggtaatctgttgggctttgggtttggtttaaatttggtcctacaactatattcattaaaatcacatgactatcacat

SEQ ID NO: 22856 - DNA, 564 bp, Gossypium hirsutum
  Clone ID: LIB3582-028-P1-K1-D4
cccacgcgtccgcccacgcgtccgtgtaaatctccaatatgaatgatatgttattgtgacgttatacagcatctaagccgcgtttacaaatcaaaataccgaactgcaagatacgaaaatctcatcaaaaggggaaaccaaaatgcaacaactgcttttgggctgaaacaatatgtaatatattaaagaatgaattcaattttgatgctctacttacagtcggagacttgttctaatctatacagtgtgatccgacaagtctactaacttttcgtcctcgttcgggatgtcggtcatgggaagttgaatgctggacttggaaattttattccactcgttttcaactcgaaagaatatccattggaaccttctgagcatctctagggcggtaatggtgaacacggttaagtagttgtggcggagatgagcggatagtttgtacgtccacgtacatcgtaaaatcaagttgcttccgataacccaataataaacccaattttgcccgtataacagatcggaccaccaagttggcttgttgaacttgaaaatcctagtgaagacact

SEQ ID NO: 22857 - DNA, 188 bp, Gossypium hirsutum
  Clone ID: LIB3148-048-Q1-K1-G11
cccacgcgtccgtccacgcgtccgtccactcgtccgcccacgcgtccgcccacgcgtccggcagttgttgcatgttggtttccccttttgatgagattttcgtatcttgcagttcggtattttgatttgtaaacgcggcttagatgttgtataacgtcacaataacatatcattcatattggagattt

SEQ ID NO: 22858 - DNA, 391 bp, Gossypium hirsutum
  Clone ID: GOSHI-09MAY01-C46318_1
gcaggcagtaaccaaggaacttacgaacttaagccagagtataaaaaatctgtggacgacacagcagctgaatacctgtaatttacatttcttttgtttctaattatttttctcaattaaagggatagtctaaaggaacccctcaggaagaggatagagagtaatatttagcttaagaaccagtgatttaaggggataataggcaatttgtttggggaaaggataacttggctgcaggacctctgaagtccaatggtgcaattcaaacattcttcaatgatctcaaagttggggactaggggggcaagtatatccagaacaaaaatcctgatcaataaaaaggaatcatattctattcgtggaaaaaaaagaaaaaccaaaacaaacaacc

SEQ ID NO: 22859 - DNA, 655 bp, Gossypium hirsutum
  Clone ID: GOSHI-09MAY01-C46298_1
cccacgcccgtccgggcccctacaactttaaattctttctttaacaaaaaactaggcatctatctatctgtcatggaagggatatcgacattgagaatgatgctcattataataacccgcttacttcttgttccgtcatctctaccactaccaccgtggccacctccatctcattctccgtttcgggtcctaaacaaaacaagaaaacttcaaaaaacagtgtagctattaaaggttcaaagaaagctgtaggagacttggaaaggaagcaaccggtataccgtggtgtacgaatgcggagttggggcaaatgggtgtccgaagtccgacaaccaaaaaagaaatcgagaatatggctcgggacttaccccaccgcagaaatggcagctcgagcccacgatgtagccgcactagccatcaaaggctgctcggctcaccttaacttccccgaacttgcaaaaacacttccacgccccgctagtacatctcctaaggaaatccaagccgctgcttcccaagctgctgcttcaacatatctcgacacatcgcggtggagcaacaacattgaacccgaagacaaagtcagtcgtcgaccgaggcaagaacaagttccggtttcacgttcggacaatatgtgtagtacttcaccctttga

SEQ ID NO: 22860 - DNA, 657 bp, Gossypium hirsutum
  Clone ID: GOSHI-09MAY01-C47818_1
cccggtcgacccagcgtccggttaaggatccactgttgcttattaaagagaagtttcgctctcttgttgccattcctaggttcccaaaaaggggtagttcaaagaaagatgcagataataatgaagaaagcaacatgcaagaggaggcaagtgatgaggaagaagaaggatattctgatatggatagttatctgagtgatggtgggtttggtgatgatgagggtggcgaagatgatgactatgcggatgattggagcgatgatgatgatggtgatgcaccaccagattttgatgacgacgatgagcttgttaatgttgggtcgagcaaaccaactacacaagcagctttctcagccaagaaagaagaagaaaggcgtgttcctgtatttcctgatggtcggccaagagagcgttggtaaaaagataccaaatttgctatagaatgaagaccccactccttttgacacctaaatagttgcttatcgttgcttggcttcaaaaggttaggtttttttctggagaaagaatccagtttagtatttggtgagatgccaaatcttatttcttaaaagcttggagcagttcatcactttgttaatacatctgagacatcaccattgatctaaatagaaatgttctagtgatttgttcttgttt

SEQ ID NO: 22861 - DNA, 429 bp, Gossypium hirsutum
  Clone ID: LIB3135-037-Q1-K1-C2
gagcgttggttaaaagattccaaacatgatattaaatttacaccccactccttttgactcctaaatagatgcttatcgtggcttggcttgaaaaggttagtgatttttctggggaaagaatccagtttagtatttgatgagatgccaaatcttatttcttgaaagcttctttgttaatatatctgagacatcaccattgatctaaatagagatgttttaacgattggatcttgtttatcttcgtctcatactacattgcattaataacagtgatatggaaagccggagctcttggataatttaatcatatctgcaaactgttctaatatgtgtaactagttcatatatgcattgatttatgcactgctttagtcgacaacttaataaaacacatggctcttaacttatatctctgcgttataaatttgg

SEQ ID NO: 22862 - DNA, 441 bp, Gossypium hirsutum
  Clone ID: GOSHI-09MAY01-C47448_2
aagagagtgagaaaggttttattcctttgcctgattagagacatggagaagtggagttttatgctagttattgcattagttgttgttcacgctagtgcaagaaatgtgcccacaactacaactgtgcccactagcactactcgcagtagtgtaccaagtggtgctactggtgttggcgaccaaaagaacttcctcacttacggtggcgttgggggctactctggaattggctctaatggcttgccatttggtggagtggggggtctgggtgggattactcccctcggtggtgcacgtggacttggaggtggagtcgggggcattggtggagtacgtggacttggaggaagtaatggactcggtgggctcgggggatttggtggctttggtggcgagcggggtgcttgttgtggatttggaggtggagtcagaggtgctgtt

SEQ ID NO: 22863 - DNA, 389 bp, Gossypium hirsutum
  unsure (1)..(389): unsure at all n locations
  Clone ID: LIB3149-049-Q1-K1-E12
ggatcatttatattctccattatgacctgattgaaagttcatgatggagaatataaaaagagagtgagaaaggttttattcctttgcctgattagagacatggagaagtggagttttatgctagttattgcattagttgttgttcacgctagtgcaagaaatgtgcccacaactacaactgtgcccactagcactactcgcagtagtgtaccaagtggtgctactggtgttggcgaccaaaagaacttcctctaatggcttgccatttggtgggagtgggggtctgggtgggattactcccctcggtggtgcaagtggacttggaggtggagtcnggggccattggtggagtaggtggacttggaggangtaatgggactcgtgggctc

SEQ ID NO: 22864 - DNA, 747 bp, Gossypium hirsutum
  Clone ID: GOSHI-09MAY01-C47798_1
agccctaatcttctcatcgcttcttcctccacaaaaccctaataaaggtcgtagaaaagaacatgggtcgccgcaaaagcaccaacacaactcaaacctcgaccaactcttcgaacaaattcgaaggagctaacattcgcttccaagacgccgacgacaaggaaatcgccagcaacagctccaatctcgatgattcaatcgtcgccgttgataaagctagtgaagatatttccatgggagagcccgacgtctcctttgtcggttgcgacgccggtgatgataaaaccagtgctgattattacttcgattcttactctcacttccgtattcacgaagaaatgctcaaggatgtagtgcgaaccaagacatatcaaaacgttatttatcggaataagtttctattccagaacaaagtagttcttgatgtgggagctggaactggaatcttgtccttgttttgtgcgaaggcaggggctgcacatgtttatgcagtcgagtgctctcacatggctgatatggctaaacaaattgttgaaacaaatggattgtctgatgtgattacagttttgaagggaaaaattgaagaaattgagcttcctgttgccaaagtagacatcattatatcagagtggatgggttactttttgttgcttgagaatatgttgaatacagtgttatatgcgcgtgataaatggctggtcaatgatggtgttgtgctaccagataaggcttctctttacttgacag

SEQ ID NO: 22865 - DNA, 415 bp, Gossypium hirsutum
  Clone ID: GOSHI-09MAY01-C47718_1
cttgttgatactataagtgcagtagcgtaagaggatgtcctgctagaaaacatgtggaaagagctttagatgatgcttcaatgctaatagttacatatgaaggtgatcataaccattctctatctgttgcagaaaccaccatacttgaatcttcatagatgaacaatattttttcctgttattaatgttagtaagttttactgttcatgttcgggattggaggatattatctaatctgctcgtttatttccttgtaaattatatgctttgtgctttctttaattgaaagaccatttgagatcaaaagggaagaaaaaagatgttagatttggtattacagttgcccattattgagggattgaaaattcaattccaaattaaagtttccaatgccaccttttgttgttgttttttt

SEQ ID NO: 22866 - DNA, 172 bp, Gossypium hirsutum
  unsure (1)..(172): unsure at all n locations
  Clone ID: LIB3135-036-Q1-K1-A8
cccacgcgtncgggtgatcataaccattctctatctgttgcacaaaccaccatacttgtatcttcatagatgaacaacctattttcctgttattaatgctcgctagccaaactgtactttgttgggatgggagggttttatcccctctgcaagaagctcttcttttgcttta

SEQ ID NO: 22867 - DNA, 598 bp, Gossypium hirsutum
  Clone ID: GOSHI-09MAY01-C47728_1
cacatgcttccagttctgttcatgttatggctggcatgataagaataacagacacaactcttctggcaaccggttggactggtcatatggcaaaaatgggaatctcaacattgttctttcttttagcttgccacaaggtgatataaactcttccagttttctgccgatggctagcctactaaccggcaagacggggcctgttttggcaagagggtggttcttcttgatgttattttcggtcctaattatttctgcgagtgtaaagattgggacctgcttttgcacaaggtatgggctatgattcactccacacatgaactgattacaaatgttgggtaatatattagttaccactataggttgactaggatggtagaccaggcaatgtttcatcatttattttgttccttcttctttcttttctttttttatgatgattgccgaaacagaaatcataagctatatagatttatcttctcattacagtccttcaagaatggttcaccctataaagttgcaaggtacatcataatgcacaataaaatcctgggtttgtaagctattattccacaaaaaaaaaaaacccttatatctttat

SEQ ID NO: 22868 - DNA, 690 bp, Gossypium hirsutum
  Clone ID: GOSHI-09MAY01-C47148_1
cacgcggcgcaaaccgtagctaggcctaggcagcttcctcaatctgatcccaccattcattcaaaacaccaaaagtcttactatcaaagtaatcaattttctttttctagttgatccagatcccagtcaaaactctcacgaagaagaaacatgagtggtgacgagaaaaacccggctgtagttgtagatcaccagcatcatcaatatgggactttccaaggagtatccaactaccctcctccacctcctcctcagcaccatggcccggctattgggtttcctcagcctgttccgccgcctggcctccatgagccctctgctcctcctcctcagtattacccccaaggttatcaaaccgttccaggttatgctgttgctgaaggaagacctgtaagagagcgtcgtctaccatgctgtggcattggttttggatggttcttgtttatcattggtttcttccttggggccatcccctggtacattggattgtttgttctactttgtgcgaggatagactaccgagagaagccgggatatattgcttgcacaattgctgctgttcttgctacaattgctattatccttggtgtaacgaagggaatcgatgattgacaagctcttccgagtggtatatacgtgggaaaataatgtatatttccttgtaagctatctttatgtcgaattggttta

SEQ ID NO: 22869 - DNA, 378 bp, Gossypium hirsutum
  Clone ID: GOSHI-09MAY01-C47018_2
cccctggatttttctatgcaggtaaccccaaagggggattatcggtgggcaaatcgattggttctggttgcaaaacaacggataatggaattacaaatttggaatcttcacatgacaagctgcttaaatgatggatttccatcgaatccagttatcggcgcggagaaagcgaagggttaaccattccaccactcggtgcccttgggaatcgaccaacatcagatgtattgagctgcaggggtactgattgttaaggagagctgtgaatgttagaggtgtattttgattttgttgagatgttttgccatgttattgtgtgtttgcaaaatctgaagaatgctgttttgatataaaatccatgcttcctttcggcccccc

SEQ ID NO: 22870 - DNA, 714 bp, Gossypium hirsutum
  Clone ID: GOSHI-09MAY01-C47018_1
cccacgcgtccccaagaaacccctagaaggatttggagttcttataccttcaaaggagcagcgaaggggtttaaaaactctcggccctcctttctcatctgtgatgtttcctgatcgtgcacctaataatttgtatctctttacaacctttgttggaggaaaccgaaataaggagctggcaaaagtctcaacagatgaattgaagcatattgttacttccgaccttcagcagttgttgggagtggagggagaaccaacattcttcaatcatttctattggagcaaggcatttcccttatatggccgtaactatgcttcggtcttgggagccattgaaaagatggagagagatctccctggattcttctatgcaggtaaccacaaagggggattatcggtgggcaaatcgattgcttctggttgcaaagcagcagataatgtaattacatatttggaatcttcacatgacaagctgctgaaatgacggattaccatcgaagtaagaatttccctcttttggttaatctatgatgttaatcctcttgtattactactgccttatactggatatatatatatatatttatatgatgtaaaagcgatcatcttttcctggactgcactatttgtttttgttctttgatatgcaaccaacttttttttattttattttgacacagttttgatatgatatgcaagttttgacacagtttt

SEQ ID NO: 22871 - DNA, 322 bp, Gossypium hirsutum
  Clone ID: LIB3135-025-Q1-K1-D5
aaggcccgagccagaccgacgcgtccgcccacgcgtacagacaactacacagcctattccctctcatgccttatcaggacccgggtagggtgataaaaactctgggggcactcttttcatctcagatactgactgatcatacacctaataatttgtatctctatacaacctttgttggaggaaaccgaaataaggagctggcaaaagtctcaacagatgaattgaagcatattgttacttccgaccttcaacacttgttgggagtggagggagaaccaacattcttcaatcatttctataggagcaaggcattttccttata

SEQ ID NO: 22872 - DNA, 949 bp, Gossypium hirsutum
  Clone ID: GOSHI-09MAY01-C47338_1
tactgaatcaaaatagcatcacccataacagcacccaagaagtggaaccaaagccaacgcctcaaaaagttgaaacagtctcgacgattcaaacataccttctgctctctcaatctttctcgacaagtaagcttcgttaatattctgtttgaaactccgcagtttctccgtaagaggggaaaattagacaacatgtctaagatgaggtacgatcgtaagcctccgcttgctaaatcgcctatccgcgtacgaccccgtcgagtcctccgttccaactcaacctccctgcaaaccccgccaggttctttgacgaaatcccaaaagccggttcgtgcttggacaggcgaagaatcagtgattcgacccgaatatcggtccatttcttgcgagttacaggctttggctacgatggttaaacgtgaagttgggaatggggaaaaggaaaacgctggttttggtgagaccagtgtgggcgccaagtcgactagtctgtttgagagaggcaggttctacgaggagtactcggcgaggagaaacgagaggcttaagagaaggaaaggcgaaaccgggacggagtcaaagagtgggcaccatcatggacttggtgtaaacattgaatcctcaaagaaaagagagtcgaagaagctggagagctttaggaaatcggtgtctgctgcttattccgtggagaggaatgagagtcagactcccaggtatctgctccgaagcatgagcaaggctaatgagaataagtttaagaagcctccccttgctgtcaataattacaactcgtctatgtctgtgacaggccctgcaagcaaaactacgcctagacgagttggtagaagggtctgaaaattgaaaactggatttctattaggattttgttttttttaaaaaaatttgggctccccttctttttaatggattatgattatgctttgggttt

SEQ ID NO: 22873 - DNA, 683 bp, Gossypium hirsutum
  Clone ID: GOSHI-09MAY01-C47258_1
cggacgcgtggggtctttatacaagctttcttcaatttcaacattcaagaatcaagattacagtatttgcaaggatgagttctactagcagagcatggattgttgcagctagtattggagctgtggaggctctgaaagaccaaggtatctgcagatggaactacacagtaaggtcagttgcgcagcatgccaagaaccatgtgaggtcagcttcacaggccaagaacctctcttctcaatcctcagctgcaatttcaaagggactgaacaagtctaaacaatcagaagagtctttgaggacagtcatgtacttgagttgttggggtcccaactgagccttaaatctgtcaaaatcgcttacaatttagaagaaacatcctttatttgggtgaatcattgactcgtgagtgcaagctttggtcattcagaagagggttgaacgacgactgagcaatcaaacacattgaggcttttgcaggcagaatcatgtaataaggtccaacatgtcaacaacaagctcagatcatattctcaggccaacatatttcctcctcctgcaattgttccaaacatacatgtatatgtataaagttgtagtatgttagatgacagtccttaagaatggcgagggaatataaaaattgtagatatatcatttggaatctatattgaatggctatgaa

SEQ ID NO: 22874 - DNA, 479 bp, Gossypium hirsutum
  Clone ID: LIB3582-010-P1-K1-C3
cagcatcacagtgtatctctctttacataaccttcttcaatttcaaccttcaagaatcacgattcaagtatttgcaaagatgagttcaactagcagagcgtggattgctgcagctagtattggagctgtggaggcactgaaagaccaaggtatctgcagatggaactacacagcaaggtcagttgtgcagcatgccaagaaccatgtgaggtcagcttcacaggtcaagaacctctcttctcaatcctcagctgcaatttctaagggactgttgcagtctaaacaatcagaagagtctttgaggactgtcatgtacttgagctgttggggtcccaactgagtcttaactcggtccaatagattacaagttagacgaaaccaacatcctttgggtgaatcaacgactcatcttgagtgcaagctttggccattcaaaacaaggttctgagcgaacaagatggaacatgcctgagctttcc

SEQ ID NO: 22875 - DNA, 425 bp, Gossypium hirsutum
  Clone ID: LIB3135-043-P1-K1-F2
ccacagtgtatctgtctttatacaagctttcttcaatttcaacattcaagaatcaagtgggtgcaaagatgagttctacaagcagagcatggcttgttgcagctagtattggagctgtggaggctctgaaagatcaaggtatttgcagatggaactacacagtaaggtcagttgtgcagcatgccaagaaccatgtgaggtcagcttcacaggccaagaacctctcctctcaatcctcagctgcaatttcaaagggactgaacacgtctaaacaatcagaagagtctttgaggatggtcgtacacttgccgactacaatatccagaaagaatcaacattgcatctggctctgaggcttcgtggtggcattatcgagccatctttgatggccatggctggaaatacaaccaggacaagatgatctg

SEQ ID NO: 22876 - DNA, 371 bp, Gossypium hirsutum
  Clone ID: GOSHI-09MAY01-C40988_1
acccacgcgtccgccaaacgggcgctcattttcagacagtgttttggtgccctgccccattgagggcgggcacgatgatctgtgcgcaaagcggagcattactgtttgcgcccgattcaagagggcgcgctgctgtatggggatacgctggaggtaacgtagccatcatataatacagtggctgtctgtattcgacgatcggtactagcaacagttgtggctcgggcaatggcttaccgacactaggcaaacattacagagaagctaatgttgtcgaagaggagcaatcagagaagtgcattctggtccccaaaacgctaagaattgacaatccaaatgaagcttcaaggagtcccatatgggctacatta

SEQ ID NO: 22877 - DNA, 452 bp, Gossypium hirsutum
  Clone ID: GOSHI-09MAY01-C40548_1
ccggtctatattaagcatcgacccacgcgtacgcccacacgtccgcccactcgtccgaaacatttatgagagaagaagggagaggaacacaggggagggagaggggaaggggttctcaacctgcgggccggtcaccggccgatcgtcggccactgtctgtcgccggcgccagccacagcgcacggtggccggagaaggtactggggcggtggagcagagagtgggtgaacggtgggtggctgaatgttagaggattcgccgtcacaagctaggattagggtttaggtattttttgtttctgattgggggtattgggcttagtgtttagttgggctaacggttttgtattgggtttgggtaatgggtaggtttagtgtgggttcaaaatcgctgagatttaatgtattgggctgagtaatttatggtggcccaaaattggcctttaacacatg

SEQ ID NO: 22878 - DNA, 417 bp, Gossypium hirsutum
  Clone ID: LIB3135-062-Q1-K1-A8
cccacgcgtccggttcttttttgcactatcttgcaaccaaaacatttgagactgtttatgggtgttatttgtttgatatgaacatgctatggattcaaaatgtgatatcggagtggttgatgtctacaaccccgaaattcaaagagtttccaaaagggttcagaattttgtgcatatgtttgagaaaaaaaaaaaaaaaaaaaaaaaaaaaaaaaaaaaaaaaaaaaaaaaaataaaaaaaaaaaaaaaaaaaaaataaaaaaaaaaatatcccctttcaaaatatttcatacaatttcttataattctttactatatcttattttcccacctcctttttcaaataccattttctttttttatcccccccttttttaaaaataaatttttttttctcccccttatttttattttttt

SEQ ID NO: 22879 - DNA, 348 bp, Gossypium hirsutum
  Clone ID: LIB3147-031-Q1-K1-F3
ggttattcaattacttaccgcaagtgtaatctatcgatatgcaattatgaatgtgttggaaatgttcttttttgcactatcttgcaaccaaaacatttgagactgtttatggttgttatttgtttgatatgaacatgctatggattcaaaatgtgatatcggagtggttgatgtctacaaccccgaaattcaaagagtttccaaaagggttcagaatttttgcatatgtttgagaaactttgaaggagttgagtacgatatctattttttgttctgcttaaaaaaaacacgattcaataagaggaataaaacccagctgtaattgtatataaacagaaatggaataaa

SEQ ID NO: 22880 - DNA, 683 bp, Gossypium hirsutum
  Clone ID: GOSHI-09MAY01-C40568_1
tgatattgctgaaactgtccttttgaacatattacgaggtgatattgctagactgagtagatgcacttcaattataactggggaagatggaccgattcccagatgcaaaccttttaaatatacctatgagaaggagatcgtgatgtatgcttatttcaagaagctggactacttctccaccgaatgcatttattctcctaatgcatatcgtgggtttgctcgtgaattgataaaagatttggagagaatcaggcccagggctatccttgacatcattaaatcaggtgaggattttcgaatttccactacaaccaaaatgcctgagcagggaacctgtgaacgatgtggttatatttctagccagaaatggtgcaaagcttgtgtcttgctggaggggctgaatcgaggtttaccaaagcttggcattggtcgtactcaaggcctaaacagtgatggtaagaaagatagaaaaagagatagcagaacgccaagtattgagagcaagcaatgtggaagtttggaattctgatccagagttttagattgcttatggaattatcaaattgttgtttgattggccacccaagctctcatatcttctctttttagagcttccaaatgaatagttaggcaaacaaaagcagttaatcgcactgtttgagctattagaactaatcatggaa

SEQ ID NO: 22881 - DNA, 329 bp, Gossypium hirsutum
  Clone ID: LIB3146-059-Q1-K1-C6
ctgtgaacgatgtggttatatttctagccagttgacatatgcttttaccttgcctgacacgttataattgtttaaactttagcatgcatttgatatgcctaatttatgataaagttctgccttgtactggagtggttaaagcactgatagctgtctgcagtatagttaaaactgatctgatcttatacatggtatacagaaatggtgcaaagcttgtgtcttgctggaggggctgaatcgaggtttaccaaagcttggcattggtcgtaatcaaggcctaaatagtgatggtaagaaagatagaaaaagagatagcagaacgccaagta

SEQ ID NO: 22882 - DNA, 634 bp, Gossypium hirsutum
  Clone ID: GOSHI-09MAY01-C40448_2
ctcggttttacttggttatctcatgtcccttggccttagccctttcaccattgttatttgcttcacccttgccaccttcattattctctctccttttgctttttattttgaaaggagcctatggcccaaccgtctaactctgaaattgataattcagcttgtttttatctcctttggaggggtgaccttgttccaattcctctacctcaaagggattaatctaacttcaccagcagtggcaacagccatgccaaaccttgctcctgggcttatctttataattgcatggattttcagggtagaaaaagttgttctaacttatctatacattaaaataaagattgtaggcacgttcgtgtgtgtcgcaggagccgttacaatgagtataatgcagagtactgactcgtcaggagatgcaatgatggatcacccggcagttgataacgatgggggcgacaaaaataagatcatcggttgcatgtacctcatggcagcagtcctagttctatcaagcagtggtgtattgcaggcggcaactttgggtgattttccggctccgatgtccttatgtgcaataacattcgttatgtggactgggtataacttcatatagtgcagttgctcaaaaatcatt

SEQ ID NO: 22883 - DNA, 635 bp, Gossypium hirsutum
  Clone ID: GOSHI-09MAY01-C40448_1
ctcttttccaatccctattcctcaaaggaataatctaacttcaccagcagtggcaacagccatgccaaatcttgctccagggcttatctttataattgcatgggcttgcaggtttcaatattttcaattcctttttcttctttcctcttaaaccagacttataatcaaattacagtgcgtgaaaatccaatggtgtattttgactgcaatgctgatgcaggttagaaaaagttgatttaagttgcctatgcagtaaagtaaagatcggtggtacattgttgtgtgtcttaggtgcccttacaatgagcctaatgcatagctctgtatcaccggaaagcgcaagaatgttcgctgccccgaccagtgatttcgttttcaataaagataagatcatcggttgcatgtacctcatggctgcggtcctagttttgtcgagcaatgtggtattgcaggcgacaactttgggcgactttcctgctccgatgtccttgtgcgcgataacatccttgatcggagtgattataacggcactggttcagttggtcgaaaatcatgttttccaatggagttggccccttggtgatgttagggagctacttggcttttctctgcttggaagtgctgtgggtggaaca

SEQ ID NO: 22884 - DNA, 649 bp, Gossypium hirsutum
  Clone ID: LIB3543-060-Q6-K6-C2
gtggggcattctgcaaccccattaccaacaacaccagtcaaggatccctcccatagagcaataggaggagactcagagcacacaactcttccggcttggaaaaatgaaacgagttttgatgacttagctatcaaaagcctcagaagccaagaacttgaacgccaagaagcagatgatgaaaatagcgaggtgggggactttgatcctgtcgatggtacaagccacaggagattgtcttggcctccgtcagttaaaaagaatggtctgtaacctctatcatgaatatacttggtgaatttagactggagaattcatactcatcagttagtttttgcggattcttgcttgaaagattcatagataaagattcatatatgttgtattcgtgcttggtgggctaggatgcaagaagtcattccatgcaaattcaatcgtatggattcgatgaacagatagtctcgtggatttttatatgaaagagtccaacgtatagccttaacatggaagcttaaagacacatccacatatcgtcgtatcttgaaacatgaggaaaattctagcggactatcataacttgaagcatgaggacaagtccagcggactgtcattgtaacaacccagtttagaccctagtcggaatagtagtttc

SEQ ID NO: 22885 - DNA, 320 bp, Gossypium hirsutum
  Clone ID: LIB3147-033-Q1-K1-C3
aagaacttgaacgccaagaagcagatgatgaaaatagcgaggtgggggactttgatcctgtcgatggtacaagccacaggagattgtcttggcctccatcagttaaaaagaatggtctgtaaatgtaagtatttgcttgctctggtttgtttcctctctagtaagtattgtctttaatccatagtagtattgtttgcctgaaaattgagcaataaataacagtgagtctgcatattatctttctttgttttcttctttccccaaacatattatttatccactcagtgttcttatttgaaatcaatgctatgtttgaagtc

SEQ ID NO: 22886 - DNA, 1539 bp, Gossypium hirsutum
  Clone ID: GOSHI-09MAY01-C40658_1
acgtccacgcgtccccccacgcgtccccccccccctccgctcgggtgcttcaaccaaatcgaagctagggttttgcagggagctttaaaacgacaatgacgaccgtcgttcccacctccgaagaagatcccgtcctccccgtcgtccgattcacggccgacctctcttgggctgatgccggtcctgaggttgcggaaccgctagtgacgaggctttgtatggaagcgcaagagtgtatggtgatgggaagatggttggatttggcttctttaatgcttacttctgctgagttggtctttcccaaggtctctgataaagatctcgagtgtatcttcactgttatctgcaatctagcctcaaagctcgaaaatccagatgatgaacttgagatggcaaagctcatatctacaaaaatcagtcaacaaccaaatgataagcctgcaatgcgtttaaagatcttgttcaatctctacaatttgttggaaggcccagatagccggttctttgtgtacatgcaagccttaaatttagcactgaatgggaaagttattgatcatattgtaccatctttcaagaagatagatagtttcttgaaggagtggaatattggggtcaaggatcaaaggaacctctttcttaccattgcaaatgtactgaaagaaaacaaaagctcgggaaaggattctttcaaattcttgaccaagtatttggcaactttctctggtgaggactcatatgtaattcgtgaagccaaggaggaagctgttcgtgctgtcatagaatttgtgaaggcacctgacacgtttcggtgtgatctattagatatgcctgctgtagggcaattggagaaggatgctaaatatgcactggtttatcagcttctgaagatctttttgactcagcgattagatgcctacctggaatttcaggctgcaaattctaccttaatgaaaagctatggtcttgttcacgaagattgtataacaaagatgaggttgatgtcattggttgatcttggctcttatgaatctggacaaattccatatgccctcatcaaggatactcttaggatcaacgatgatgaggtggaattgtggattgttaaggctataactgctaagttaatcgactgtaaaatggatcagatgaaccaggttgtgattgtaagccgctgtactgagcgcatttttggacagcatcagtggcattctcttcggttgaaactagcaacatggaggggtaatgttgctagcctcatcagcaccatccaagctaacaaggctgtggaagaaggctcacaagctatgcaagggatggcaattcggtagagctattatttataactatttatgtttggaaggcgttgtttatccaagaatatagatcaggtttaaatttctactgtttttagtgttcccgtggttttgaaatcctaatgaattggaaattttgacggtgcatttcttgattctatcttgttctcaagtctagctatgcaaaattttatctaaagatggatttctactaaaaaaaaaaaaa

SEQ ID NO: 22887 - DNA, 744 bp, Gossypium hirsutum
  Clone ID: GOSHI-09MAY01-C40648_1
cccacgcgtccggttgaatctgaacgaatcaaacttgtatatagctctagtttgggtcactataagtgtagttatcagtacaaccaaataattatgcccattgaatttcacctataatgaaacttgtatagcaattcatttcattagattgactgtgcccatgtatgataacaaaccttgcaaggggtgtccttctatatcggagttcatgaatttgagaatgtttttcttttgatttcccaatcatttttacaatttgggatttgttgtttagccatacctatagctcataattctgctggcccgaaaatggacattgttttagatgaagatggacaacaaacaggatttcttgctcaaaatgtagaagaatatgcagatgcagtcctgaaaattgcgaagatgcccgagtctgaaagactcaagatagctacagcagcaaggagaagagctaccagattttcggagcaaagattttacaatgatctcaaagccgcaatccgaccaattatatgcggttcttcctagttataggattgcattagaagatcacactgacatagaaaacaatagttatacttgttcttgtttattgggttcttcaccctttcgatccagtcattagaaaaagcttagtttagatttgtcaacaaaatagatatactcttaattttgatttgaaaacatactcttaattttgatttgaaaacatacttgaaggaattgaggatcatgtttggttca

SEQ ID NO: 22888 - DNA, 573 bp, Gossypium hirsutum
  Clone ID: GOSHI-09MAY01-C40108_1
cccatgctttcggttttttgagagctaaataaaatgagtcagaattcacccacatcgggctcaatatcaatccatcattcccaacaacaagcagcggcgttagctcctttaaaaaaagatagctcttcgtcttcttctgtagctggtttctttggtaaaaatgggtacaaattctgggttttgactgcaatcatcttacttgctttttggtccatgtttactggttctgtttctcttaaatggtcttcggggaatctcactagtttctcctacgactctgatttctccattcgtgaagatcttgatgttcttgaattggaggaaagagagaaggtagtgaggaagatgggggatgtctatacacatagcacaggcattcgtttgcctagattttggcttgatgcttttgaagctgcttatgagaatttatcaagtgatgttaatggagttcgcgataatgccatatctgaaattgctaaattatctatgcagtccctaaatcttgttcccccctcggttcaatcaaagattagcagcagtcaagggagaaaaaagactaataaagaagcttat

SEQ ID NO: 22889 - DNA, 458 bp, Gossypium hirsutum
  unsure (1)..(458): unsure at all n locations
  Clone ID: LIB3147-027-Q1-K1-D5
cccacgcgtccgcccacgcgtccgtctagctcctgttcgggcctacatatggaagaaacctgaggatttggtacttaattacagagtggttcaaggcaggtgattttatcaactgctgggagcaggtgagtgggttacctgtgttgcttttaactagggttgagaaaattttggtcagaactccttacccaatgtcccgaccaaaactgttgttagtatcagttttagtattaaaccgaccaacttgatcaaactattataaattattatatttatatattttaaaatatttcattatataataaatatttntaatatattaatattcttaccctgacccaattaaacccacccaatccattacccaataaactcgttaccaaatttccaaaatagctgagcgaactaagttgatctggttattgccggttatcaatataaagtttggttggtttcag

SEQ ID NO: 22890 - DNA, 462 bp, Gossypium hirsutum
  Clone ID: uC-gsronu33B116f07b1
tccacgcgttcgagtgcacctcgtatattgagaataaataaggttgttaattatgtcgtagaaaagatggtgcttgacaaaccaattgatactggaagtaccgatgggtcacttgctcctggacatggaggacaattgcagcattcagctgtcgctgatggttcttttaaatctggattgaagccttggccgaagcctaggccttctgttgagattttatgcaataatcaggtcttatctacagacatgagcttagccactgtgcgggcctacatatggaagaaacctgaggatttggtacttaattacagagtggttcaaggcaggtgattttatcaactgctgggagcaggctgcagtgtctgtttcgggaaatcgagatggaaatctcatactgttgtaaagtgttgggaaatgtatttgttcgtcagaggtttgcctatatcagaagcaaatgttgga

SEQ ID NO: 22891 - DNA, 848 bp, Gossypium hirsutum
  Clone ID: GOSHI-09MAY01-C41978_1
cggacgcgtgggctgcaataaagggtcacctatctttggcccccatagacatgaagcctcaaccaattattcttgcctatattgatctcaatcttgagactttggctgcggcaagaatgttgacatcaactggccctggtcaaactcattggggtgattctggagccaacaatccagcacctgccacaaattctgctgatgcccagctaaaacaagaactcgcagcaatatttaagaaaattggtgacaagcagacatgcacaattggtctctatgagctttatcgcatcactcagctataccctaaggttgatatatttgctcagctccaaaatgctagtgaggcatttcggacttatattagagacggcttagctcagatggagaagaatgctgcagcaggaaggactccttcaagtgtgccaatgtcaacccctccccctgcttctctttcttcttcgtcacctgaatttgggcctctgtcccctgttcagaccaactctttaaatgattctaaattatcaagtacaaaacctgaaccaacaagctttaatttgccaccatcatacactgaagactatcggggggctggtaatgctataaatacagcaagagttcgtgcccctgaaaatgcattggcagaccaaagaaatgagagattatcatgggttaccagtggacattggacgcatcagagaaggataaagttgcactacagctgcgtggaacatggtatatgaccccgcctgatgcgcatgacactaatctggctctaactaactcgcataatctatcgatgaaccgccaagaggctcctgataaagatgtgctcaccgttgaaacaaagc

SEQ ID NO: 22892 - DNA, 479 bp, Gossypium hirsutum
  Clone ID: GOSHI-09MAY01-C41838_1
gccagacgtccggttcctgttttgggcgtacttatcgacaggaaggtattcgagcctaagccgcatgctgctgaagtggacgctgtgttcgacgttccactggaaatgtgacattaaggatgaaaatcgaattgctcaagagagagaaatgctgggagaaaagtatcttcttcacttctttgactatgaaactgagaataagaagtatctaatttggggtttaactgctggcattttaatcagagctgcttcagtggtctaccagcgaccaccggccttcccggaacagagtcccaagtatgaatttcttagggatgtgggcaaaattaccgacgctcattgaatatagtctaggaattttaagcttgccttgtattgcaatggggcatcttcaaaagtaataatcttgcagaaaatctaaacagagattcattcaaagcaatctttcccttcgtttactcttctttaacaagattaga

SEQ ID NO: 22893 - DNA, 914 bp, Gossypium hirsutum
  Clone ID: GOSHI-09MAY01-C41588_1
gcgttcggggtgatctagtacgtgatggtggtgttgatttatgtggctaaacgaaacgcgttcacttgttgaattaaggtgtccccatcaccgcatcttcatttgcccttattcagacgccattgattcaaagcctaaagtcttgtgttttctcttttccaccttcacgttcttctagattctctcatttctctcccttctctactctattcaataccctctgttaaacatccccctccccccccctgtccttcctctttctctccttttatcttggcttttcatttttaacttaccaagtttttgcttttgtttttcttccagtgtttgattacttggaatctgataaaaaatggaatatgaagatcagatcaaccaggccatggaccccaaatacgaatgtcttttatttgatctagacgacactctttatcctctgacttctggtatatcaagtgaagttaccaagaacattcaagaatatatgattaagaagcttggaatcaaggacaatgttcctgaattatgtgtttcactgtataagcattatggcacaacaatggctggtttaaaggctattggttataactttgagtatgatgattttcatagtttcgttcatgggagactgccctatgcaatgctaaaacctgaccctgttttaaagaatctcttgcttagcataccaattcggaaaataattttcaccaatgcagtataagaaccatgctgccagggtgctcaacaggttgggattggaggactgcttcaaaggattatatggttcgagaactttaatccaataaacaaaaaaacccttcaacttgtgatgatatcaaaccagacactgccatttgtgacatcaatggatactgcagtgctgttcttgattctgagcttaagcttccaagtac

SEQ ID NO: 22894 - DNA, 417 bp, Gossypium hirsutum
  Clone ID: GOSHI-09MAY01-C41548_1
gaagaaaatgatgaactgcataaaaggatagaggtaaggaaaatgataccaaagcgaaatctggatgaaatggggtcctcgagtccggttaagagtcaagaaatgaaacgttcacggtttgccaccatagggtcacccttgcctaattcttctcatgtcaatgggttgcatgagcaacgtgctactagtctcactgaacgcatgaggttgtacgaaagtgctatttctggtcgtctcaccacttgttatcctgctgcctcagctgtaccacatggactaactgttggttctttgcctagaaatggagttgcccagatggtaggaataaatggtgttggaagcagcagtatgatgacgagcataggtgccatctcaagaagttcttattccagggctcatggggagattgaagtcaat

SEQ ID NO: 22895 - DNA, 398 bp, Gossypium hirsutum
  Clone ID: GOSHI-09MAY01-C41508_2
cttattttcttcctattttgtttccctgtggggtgtgttgattattcaactgggagtgctaaacagtacttgaatggaaaattttgaatcatggtaaaagattaataatttctgttgtgtggttaactatatgtagtagcttcatggatgacgatgcgttgaatatgcgtaattgggggggctacgaaccgtcgtttaaaggacatctcggtctgcagctaatgtcgagcatggttgaacgggatgcaaagtcttttattcccggccgtgatcccaatctcatgattactaccaataccacctttcaccagcgggaccccattgtttcccaggcacatatccccatgaattctcttagggatagttggattgctgacagagataagtttttcaacatg

SEQ ID NO: 22896 - DNA, 545 bp, Gossypium hirsutum
  Clone ID: GOSHI-09MAY01-C41508_1
tttctctttctttctatttagggatttttttctctgtggtttctctctcctctttctctctccagaaaaaaggaaaaaaaaaccctaaagagctattttacacccccaaacttcatggatgacgatgcgttgaatatgcgtaattggggttactacgaaccgtcgtttaaaggacatctcggtctgcagctaatgtcgagcatggttgaacgggatgcaaagtcttttattcccggccgtgatcccaatctcatgattactaccaataccacctttcaccagcgggaccccgttgtttccgaggcacatatccccatgaattatgttagggatagttggattgctgacagagagaagcttttcaacatgttcccggccaccactcctaattacgccgttctcccggaaacgtcggcagctcattcattgtcaattttgcagccaccacctgattcttcaacaagagatgagagggtggctagtagcgttgaagagctgccagctaataaggacagtgttgaaccgaagaaaaggcagggtggggc

SEQ ID NO: 22897 - DNA, 1017 bp, Gossypium hirsutum
  Clone ID: GOSHI-09MAY01-C41448_1
cgactggcacttttcttgtggtacaaaggaatacaaagttctcatggatcagtttcatcacgtgtctgctgcttttctggaactcgaaaaaggttatcaggaggcaattgaggacattacactaaaaatgggagcagggatggcaaaatatatttgcaaggaggtcgaaacagttgatgactatgatgaatattgtcactatgtagccggacttgttggattaggtttgtccaagctcttccatgcctatggatcagaatatttggctccggaatcgctctccaattcaatggggttgtttcttcagaaaacaaatattatccgagattatctagaggatatcaatgaaataccgaagtcacgcatgttttggccacgccagatttggagtaaatacgtcaagaaacttgaggacttgaaagacgaggaaaactcggtcaaggcggtgcagtgcttgaatgacatggtcactaacgctttactacatgttgatgattgcctgaaatacatgtccgctttacgtgaccctgcaattttccgattttgtgctatccctcagatcatggctatcggaacactagccttgtgctacaacaacatcaaagtcttccgaggtgttgtgaaaatgaggcgcggttttccggccgatgtccctttcatctcggcctcatttccaggtttaactgcgaaagtcattgatcgaacaaaatcaatgactgatgtctatggtgctttttatgatttttcttgcattttgaaagccaaggtcgacaaaaatgatcctaatgcacaaaaaaccgtgagccgactcgattcaatcctgaagacttgccgagactccggtgtgctaacaaaaggatatcatacataatcgagaatcatccaattacactccgtttgtggttgttttgcttttcaacatattcgccatctttttggttaaactgaacccaaactggcctaataactagtaagttcgatttctaaataatgatgccacagaattagggggctggg

SEQ ID NO: 22898 - DNA, 315 bp, Gossypium hirsutum
  unsure (1)..(315): unsure at all n locations
  Clone ID: LIB3493-019-P1-M1-H7
taagaggggatatcananntgaaatacnncgcanngtcacgccatggtnntctggcnncacgtcgcagatttaggtagctaaataccatcaacgnnaaacttggaggacgttgaaaagaacgaggaaaactcgtgtcaagggcagtnngcagtgcttgaacgacattggtcatctgaacgctttactacatgttcgatgattgcgctgaaatacatgtctcgctttacgtgaccctgcaattttccgattttgtgctatccctcagatcatggctatcggaacactagccttgtgctacaacaacatcaaagtct

SEQ ID NO: 22899 - DNA, 683 bp, Gossypium hirsutum
  Clone ID: GOSHI-09MAY01-C41468_1
cccacgcgtccgcccacgcgtccgacaatattctgcatccttgagaattaccagaaggaagagggtgttgaaataccagaagttttacggccattcataggtgggaagtccttccttcctttcaagaccaaaccaactgctgaaactaaagggaagaaatcaaaggcctagttatgtctcaccaaaccattggttaccattgaaggaacaagcgctcagattgcctgaaaactagttttgtttttcaaaaattgtggcctactgccatcacgacactgaatatataaattcaattgttttgtagtactttgcaaaaagaaggccccagccatgatactgtgacagacattatagacttggtgttttaagttattggatatcctttacaaaatttgtcatagaactgtaatcaaactaccataaatttgttttagttttctttctgaaaaaaaaaaaaaaaaaaaaaaaaaaaaaaaaaaaaaaaaaaaaaaaaaaaaaaaaaaaaaaaaaaaaaaaaaaaaaaaaaaaaaaaaaaaaaaaaaaaaaaaaaaaaaaaaaacggggggggccgttttaggggacccaagtttcctcccgggggcttgcaagttaaaattttttttttggggcccccaaaattaaattaccgggccgcggtttcaaaccgcgggaccgggaaaacc

SEQ ID NO: 22900 - DNA, 488 bp, Gossypium hirsutum
  Clone ID: GOSHI-09MAY01-C41798_1
cccacgcgtccgctcttctcttattctaatataatctctatctcttaagaaagtagaaaatggcgagcagcaggacttccacaccattactttcattacttctttgccttgtgctactgtgtgaggtgggaatgctgatggctcaactttctgcagcacaagccccaggcccccaggacgcatgccccaacaagtgtgcaaagcggtgcaacctttcatggaagccaaagatgtgcaataaaacatgcatagcctgctgccacaggtgtcccgatcactgtgtgcctgatgggcctagagcttgccgagattcctgcccttgctactcacagatcaagacccctaacaaggtcaaagtgcccttagattttacatgacaatcctcttctttttttctctcctgtgattttttccagagtgggagagtttggaaactaaaataaaaggaataataaaatgacgttactgtttctgtggtggtttcaatt

SEQ ID NO: 22901 - DNA, 666 bp, Gossypium hirsutum
  Clone ID: GOSHI-09MAY01-C41748_1
tttcttctctccctcaaactctgagaaacagaaaatcgtaatagaagatcatcgtaaataaagaaagcaagtaagcttccaacactcggcagcatttttgaattctgtaattggatgagggttacctacccggaataactcaaccaatctccatcgttggacgcacataagaaacgaaactagagccagggatccgaatttcaaacaccaagatctaaatgacggatccgaatctggatctgcaagaatcgggttgggaggaactcaggagagaggctcgaaagatcgagggtgatctcgatgtcaaactctcttcttatgctaagctcggtgctaggttcacccaaggagatactgggtcgccaaccgttgggtcaagtagatcatggaagtctatggaaatggaaattcagtcattgctcgagaaactgctggacataaatgatgccatgagcagatgtgctgcgtctgctgcttcaactacttcagtaacccaaaagcttgcaaggcatagagacatactacatgagtttactcaggagtttagaagaatcaaaggaaccataaattcaatgagggaacacgcggagcttctgagttctgtcagagatgatattaatgagtataaggcatctgggagtatgtcaccgagaatgcaattactca

SEQ ID NO: 22902 - DNA, 605 bp, Gossypium hirsutum
  unsure (1)..(605): unsure at all n locations
  Clone ID: LIB3828-009-Q1-K6-B10
ctcgatccagnaattgcatacagtcactacaatacgctctgcacgggtacccctacaacatcctctccctctctttctctatcaggctgaggctggagctgattgaatcagaactggacaacaaaattatagaaatccaagtcataaaagctaagcagcngaaaagaagaggaaagaaaagaacaacgcactcaacggcattttcatgtatccgattcaatggtcattatctgtaatctccatcactggacttacattacaactcagcgccagggcaattgaactaccgacatccaaatgacggatacgaatctggatctacaagaatcgggttgggaggaactgaggaaagaagctcgaaagatcgaaggcgatctcgatgttaaactctcttcatatgctaagctcggtgctaggttcacccaaggagatgctgggtcgccaacgcttgggtcgagtagatcatggaagtctatggtaattgaaattcaatcattgcttgagaagctgctagacataaatgatgctatgagtagatgtgctgcatctgctgcaccaactacttcggtaacccagaaacttgcgaggcatagagacatactaca

SEQ ID NO: 22903 - DNA, 424 bp, Gossypium hirsutum
  Clone ID: uC-gsflnu33B026g04b1
ttttacgcgtccgatcaaccaatctccatcggtggatccacataagaaactaaactagagccagggatgcgtattttatacaccaagatctagatgacggacccaaatctggatctggatgaatcgtttcggaaggaactcaggagagaggctcgaaagatcgagggcgatctggacttgaaagtatgtccttatgctaagctcggagctaggttcacccaaggagatactgggtcatcatccgttgcctaacgtagttgacgaaggtgtatggttatgggacttaaaccattgctcgagagactgcttgtcactgatcgatgccatgatgccgaggtgctgagtatgatgctcacatgacctgagtatacccacaatgtcgtaaggcttaaacgcatactacatgagcttactcatgcttatg

SEQ ID NO: 22904 - DNA, 1603 bp, Gossypium hirsutum
  Clone ID: GOSHI-09MAY01-C41778_1
tgtcttcgcatcatattcactcaggatttaaagatattattttgggagttctgcgcacgtagacatgaagaactttttccgcgtcgtttggttgcacctcaggtaaaccagttacttcaggtagcacagaaatgccagagcacaatatctgaaggtggatctgagggggtttctcagcaggacttgcaaacaaacagcaatatggtcctgacggctggacggcagcttgtgaagagtttggagtcacagtcattgaatgacttgggtttttcgaaaagatatgtcagatgtttgcagatcgctgaggttgtaagtagcatgaaagatctaatagatttttgtcgggaacacatggctggcgctcgtggtggcttgaaaaactatcctcgtcatgccagtgcagccaagctccaaatgcaaaaaatgcaggaaatggagcagttagcaaacgttcagggtctgccaaccgataggaatacgctgaataagcctatggcattacatccgggaataaacaacccgttaggcaacaaccatcacatgggcggtagaggaactttaagtggttcagcacaagctgctttggcacttactaactaccagaatctgcttagtaggcagaactctatgaattcaaaccctaactcgcttcatcaggaagcctcttccttcaatagttctaaccagagtccatcttcaaacttccaagggcctgctgccattttaccgggatccatgcagaggccgcccgcccgcgcctccgcgagtcccctgttaccaacaccacagcagcagcagcagcagcagcaacagcgacagcttagtggtaacttaatgcagaagaaccatccacagtctcctcagggtaaccaggttttacaacaacaaatgatgcaacagctgtaccatgatatgtctaataacaatactgcagttcaacagcaacagcagtccctgagtgggcagaatgggaatgctagtgtgggaagaaatggaatgggatacggtaacaacactgctgctccagctgtagctacctctaatgtacccggaagtgtagcagggcctgccccgagtcgaagcaacagttttaaaggtgcttcgaacagtgattcctcagcagcaggtggcaacactggattcaaccacagagcacctgatttgtctcagactcttcatttgcaggaccatatagtttcggatatagctcaagagttcctcgacaatggggtttttaacaacgaactcgatgataatattggttatggctggaaagcatgactaacgtaatatggccccaattaatggctcttctgtcgggtgagtaccgggcaaatcgatgtacagagcatttgaaacaacggcccttttcttccctattgctttttctttccctgcctcttcaatatggcgccgcccccccctcactttgtgctttaagtagggatttagtgatcattttctttcttttcccccctactttttcaaggttttccagttttcaagtcttgcaagtgtaatctattgaacgaacttgagaacagattctgtttcttattaatctgatgttttacatgtttcactgcccacattaaaaataatt

SEQ ID NO: 22905 - DNA, 501 bp, Gossypium hirsutum
  Clone ID: GOSHI-09MAY01-C41718_1
cggacgcgtgggcatttatgctcggaaaccgatggccttacagaaaaacaccatcactgctcaaaaccgaaaagacccgagtcaaaatacgggcatcgcgatccatgcatgtcggattctaccagcatcggatctcgtcgcatccaatggtagctttgagacgtacttgggccgtccgtggaaattgtactctagggttgtgttcatgttatcatacatgaataatcacgtacaccccaagggatggctcgagtggaacaccacattcgccctggatacactatattatggtgaatacatgaattacgggccaggagcggcgatcgggcaacgaatcaggtggccgggatatagggttattacttccgagattgaagcaagtaaatttacagtccaacaatttatctacggatcatcatggttaccatcaactggagttgctttcttggctggtttacaagtttaaagcttgaatgttgtatacattatgaattatttaat

SEQ ID NO: 22906 - DNA, 691 bp, Gossypium hirsutum
  Clone ID: GOSHI-09MAY01-C41698_1
ttcacgcgttcgaacacgcgtacaatgacaggcagtttgtgtgtccgtcgtgccgtctattatgaccctgagaccggaaaggaggatccgatcgaaaagtggggtttgtagcaattccctatgcaatagtaagcctgcagataaagttcagatcactggcccttctggcaagataatgcttttgcctgaagataacccaaatgccaaccacataatgatagccactggaactggtgtagctcccttcagaggctacctccgccgcatgttcatggaagatgttaactgtcaagttcaaaggcctcgcatggcttctcctcggggtggccaacaaggacaggctcctttatggtgatgagttttccaattacctcaaggactaccctgatcaattccggtacgacctagctcttagcagagagcaaaagaacaagagtggaggcaagatgtacgttcaggacaagattgaggaatacagtgacgaaatttccaagctcttggacgatggagcccatatatttttctgcgggctcaggggaatgatgcccgggacccaagaaacattgaagaggattaccaacggttgacggaggctcaaatggaggtcactggaagggcaagctttggtaggacatactgtactctgaagaacgttaacaaacattgtagcctggagtggaagatcaacaac

SEQ ID NO: 22907 - DNA, 507 bp, Gossypium hirsutum
  Clone ID: GOSHI-09MAY01-C41688_1
gaagacgagaacgacgtgcctgaacagctagaaccagatgtcataagtagtttaacttcactgattgatcatgacgaagaatgggatccaaacgactaactggatttatagacagtacgtttctatcggcatatatatcatcaacgggtgggaattcatttgctggagaactttcgacacggagagtagcaagtaaacatcattctttgatttccatagttacagtctctaatgtttttgaggtgaataaagtagtcaatttatttgtctttttcttttcttttattttatttttactagattcatagaaaccaaaagaattattccaatgtctttatacatcaaatagttgttctaacatgagaagggtgaaagattcaagtcatagattttgtcattggagaagcttaaagtcgttgctgtaatttttcttttagtatttctcactgtgcttcttcaactgggttcttttatcctatatttattggtattctttttggggtttaa

SEQ ID NO: 22908 - DNA, 603 bp, Gossypium hirsutum
  Clone ID: GOSHI-09MAY01-C41648_1
cactgaaggtgatgtagctgaagcattgagacttttcaaagtttccaccatggatgcagcacgttctggaataaaccaacatattaatatcactcctgatatggccaatgagattaagcaagcggagaaccagataaagagaagactgggaatcggaaatcgcatatcagaaagaaggctgattgatgatcttactagaatggggatgaatgagtcaatcgtaaggagagccattctaatcatgcaccagagaggtgaagttgaatatcaacgagaaaggcatattatcgttcgtaaagtataaatcttgcggttgtaatgtttggaaccgaaattatcagggcagcagttttattgcaagatgaagttccaaattccaattgtagtggtggtcttgatcaggaatgaccgggctaacaaaaagttgtgtaatgttatgttgtacgtctctgcaacttgttttgatcttacattttaatggattcagtggatggattgtctcgagactgaatttttttttttcaacaattaagaaaaaaaagtaattgagggcaaaaacctgaaaaggacaaaccaacctcaagatccaccaagggcggaaag

SEQ ID NO: 22909 - DNA, 353 bp, Gossypium hirsutum
  Clone ID: uC-gsronu33B048d05b1
atcgtaaggagagccattctaatcatgcaccagagaggtgaagttgaatatcaacgagaaaggcatattatcgttcgtaaagtataaatcttgcggttgtaatgtttggaaccgaaattatcagggcagcagttttattgcaagatgaagttccaaattccaattgtagtggtggtcttgatcaggaatgaccgggctaacaaaaagttgtgtaatgttatgttgtacgtctctgcaacttgttttgatcttacattttaatggattcagtggatggattgtctcgagactgaaaaaaaaaaaaataaaaaaaaaaaaataaaaataaaaaaaaaaaaaataatataataaaa

SEQ ID NO: 22910 - DNA, 990 bp, Gossypium hirsutum
  Clone ID: GOSHI-09MAY01-C41628_1
tttctttatttgactaatgatggtatttcagaagaagctgcacaagcagtttctgagctaattccttctaccgaaaagctgaaagttcttcagtttcacaataacatgacaggggatgaaggtgcaattgctatctctgatattgtgaaacgttctcatgcattggaggatttccggtgttcatctacaagagttggcacagatggtggtgtggctctagctgaagcactgaagacatgtacccgcttaaagaaacttgatctgcgtgacaacatgtttggcgtgggagctggagttgctttgagcaaagccctcgcgcccgcccccgcgcccgctgaggtttacctcagttacttgaacctagaggatgacggggcggaagcacttgccaatgctctgaaagagtctgcaccttcacttgaagttctggacatggctggaaatgacattacagccaaaggtgcagcttctttagcagcctgcattgcatcaaaacaattcctctcaaaattaaacttggctgagaatgaactcaaggatgaaggtgctattttgattggtaagtcattagggcccgcgcgtccgccctcgcgtccggttgatatgagcacaaatgctattaggagagctggggcaaggcttttggcccaggtggttgtgaaaatacctggatttaagttgctgaatatcaatggaaatttcatatctgatgaagggatagatgagattaaagaattgtttaaaagttcccctgacatgcttggttctttggaggacaatgatccagaaggagaagattatgaggatgaagacgaagatgaggagaatgcagaagaagggaatgaattggagtccaagcttaaggatctcaagatcgagcaaggagagtagtcatatgctatgcatcccagctgcttttgcggcatctgaaaagcctgtctattttctattttgatttattataaggtactatagctgtgcaacattagt

SEQ ID NO: 22911 - DNA, 695 bp, Gossypium hirsutum
  Clone ID: GOSHI-09MAY01-C41188_2
cacgaaaccttccttttttttctttcaacgctttcctttcccttcctttttcctttctttccttattctcatggctataaaacccatcatttctatcattagcaagaaaaaaaaaccagacccagtccctttttttattttttaaattttttcctgcttgaaattgctctctctgataaccccaaatcctcaagtgtcttgtagagagagagaaaaaacagaaacccaaaaacaaaaaagaaaggggaaaaaaattctaaattcagtatccattttaatcgacaatttaaaaggatgggtcaagcttttcgcaagctcttcgatacctttttcggtaactcagagatgagggttgtgatgcttggccttgatgcagctggaaaaacaactatattgtacaagttgcacattggagaagttttatcaactgtccccactattggattcaatgtggagaaagttcaatataagaatgtgatgtttacagtttgggatgttggtggacaagagaaactaaggccactctggaggcactactttaataacacagatggattggtgataattaccgctctctctctcctcttaaaaaaatggaatacattttcaccctccaattgttcttctgattgttttggtaatttgtcaaaactgaaagatttatttgtaaagtgatttactccgtcttcactact

SEQ ID NO: 22912 - DNA, 677 bp, Gossypium hirsutum
  unsure (1)..(677): unsure at all n locations
  Clone ID: AI729733.1
cgggaaaaaaaaaaaagacagcagccaaattttttttttccttctataaatttctctctttgatcaatctaaatttccaagttttctcatcacagagagaaacaaaaaatcaaaaacagaagtaaaagaaaaaaaaattgttttttgaaggtagaaaaaaaaaatcgaagcttaaaagaagcatgggtcaagcttttcgcaagctcttcgatacctttttcggtaacacacagatgagggttgtgatgctaggcctcgacgcagctggcaaaacaactatattatataagctacacattggagaagttttatcaactgttcccactatcggtttcaatgtcgagaaagttcaatataagaatgtgatgttcacggtttgggatgttggtggacaaaaaaaactaaggccactctggaggcactacttcaacaacacggatggactgatctacgttgttgattccttggaccgagagaggattcgccaagctaaacaggaatttcaggccataatcaatgatccatttatgagcaatgctatcatcttggtgttcgccaacaagcaggacttgaaaggtgccatgaccccaatggaggtatcggagggactaggtctattncaaatanagaatcggaaatggcacatacaaagtacttgcgcgcttcgaggagatggg

SEQ ID NO: 22913 - DNA, 1060 bp, Gossypium hirsutum
  Clone ID: GOSHI-09MAY01-C41168_1
gctagaaccaaaatgcaagaaagcagttcacagttgtctgccacttcatatcaaagcgtcccaactttccctcttcattcaaccaatgagaaagctattccccttctaggttccggcacagccgaataccctttcggtgcttccatcgataccatgaaacaaaccattctcgaagctatcgaagtagggtaccgtcactttcgataccgcttgctctttaccaaactgaacagcctttaggtgaagcaatatcagatgctcttcgtctagggttaatcaaatccagagacgaactctttatcacttccaagctctggtgtagcgatgcacaccatgattgtgttctcccagcactcaaaaaaaacactcaaaaatttgaagttggaatatcttgatctgtatctgattcactggccagtgagcgtgaagcctggggaatatgagttgcctgttaagaagaaggaccttgttcctattgatctaaaatctgtgtgggaagcaatggaggagtgtcaagctcttggcctaacaaaatctataggagtaagcaatttctcctgcaagaaactcgaaactatcctttccactgccaaaatcccacctgcagtgaaccaagtggagatgaacccaatgtggcagcaaaagaaactgaggaagttttgcgatgagaagggcatacttatcgagtcttactctcctttgggggcaaaaggaacgctgtggggaacaaatcgggtgatggaatgtgagctactcaaagaagattgcccatagccagagggaagagtgcgcttgcatcaggtttgtttgagaatgggcacacgaacaaggagtgttgtgcgcccttgtgaagagcttcaacaaggaaaggatgaaacaaaaccttgatattcttgattggaagctcactgctgatgagtcgcataaaataagccaactcccacagtgcaaagggtttccaggtgcggcatttttatcagatgacggcccttacaagtctgttgaagagctttgggatggagagatatgaatttcattatccactggatttattacaaat

SEQ ID NO: 22914 - DNA, 427 bp, Gossypium hirsutum
  Clone ID: GOSHI-09MAY01-C41018_1
cccacgcgtccgccggctttacaacaactaatgatccaacaacttctccaggagatgtctaataacaacacgggagttcaacagcagtccgtgaatgggcagaatgagaatggaagtgcggggagaaacacctctgctctggctacagctacctctaccgtgtctggaagtgttgcagggcctgcactgagtcaaagcaacagtttcaaagccacttcaaacgacaactctttagctgccggtggcgacaacagattcaaccgaggacaacctgatttgccccagaatctccattcacaggacgatacagttccggatatagcaaatgatttcatggataatgggttttttaacaatgaccttgactataatattggttatggctggaaggcatgactaacataattttgccccatatcattgactt

SEQ ID NO: 22915 - DNA, 524 bp, Gossypium hirsutum
  Clone ID: GOSHI-09MAY01-C41028_1
gttcttttcccccctcactttccagaacaaaatcatagaaactgaaagattgaatttttgttctctcgatcattcatatctttctttgcaaaaaagttactgattcatgtgctttgggatggaacaagaagtaggggaggccgtgattcagctggggaactcagatggttctaattctagcagctcagatcccgtaactcgtgtaaggaagctattgtttcgccggatgctggtggggatcaaagacggccggtttttcttgggcactttccactgccttgacaagcaagggaatatcattctccaagatacaatagagtatcgtagtacccgtcggtcttctccgtctcctatggagcaacgatgccttggtcttgttctcatcccttcctcttgtcagaactcctgtcatgtggattgctccgtcgaggaacagctgtcactgctgaaggtataagaaactagaatcttatgttcccataaaatctatgtttgaaagaaacaacagttttcatgcaagtatt

SEQ ID NO: 22916 - DNA, 491 bp, Gossypium hirsutum
  Clone ID: GOSHI-09MAY01-C41398_2
gaaaatatttgcaattagatttggctgtctattaaacgtctaacttttctcttcagtcttcacatggtgatcatcgccttggcgttggccttcaaccatgcaagctcttcaaccttctgcttctcttcgaccttcctctctaaaacctcttaaaaaccccaaacccaatccccattttcccaatgtatcaacactccctcccaggcctgccaagaaattctcttccattaccgcttcatcccccactgtttcagctcccaagcgcgagaaggaccccaagaaacgggtcgttattacgggaatggggttggtttccgtttttgggaacgatgtggatgcttactatgaaaagctgctggctggagagagcgggatcggaatcatcgaccgcttcgatgcttccaagtttcctactcggttcgccggtcagatccgggggttcacttcttgaaagttacattgatggaaagaacgataggaggcttgacgat

SEQ ID NO: 22917 - DNA, 1731 bp, Gossypium hirsutum
  Clone ID: GOSHI-09MAY01-C41398_1
ctttgttgttatcgccctaagcactttccccagttcccacgagtcatggaagctcttcaagcctcatctcttcgagcttcccctctaaaacctctccaaaaacccaagctcaatatccatttccccaatgcatcgagactcgttcccaggccaaccaagaaattctcttccatcaccgcttcatcccccaccgtatctgctcccaagcgcgagaaggaccccaaaaaacgggtcgttattacgggtatgggattggtttccgtttttgggaatgatgtcgatgcttattacgataagttgctggctggggaaagcgggatcggactcatcgaccggttcgatgcttccaagtttcctacccggttcgccggtcagatccggggtttctcttctcagggttacattgacggaaagaacgataggcgacttgacgattgcttgaggtactgcattgttgcaggaaagaaggctttggaagatgctgatctcgggggcgataagttatccaagatcgataaggagcgagctggagtgctagttggaactggtatggggtggcgcttaccggtggtttctctgatggcgttcaaaaattctgatagagaaaggctatagaaaaataacaccattcttcattccttattctataacaaacatgtcatctgccttgcttgcaattgaacttggttttatgggtcccaattattcaatttcaactgcttgtgctacctccaattatctgcttttatgctgctgctaatcacatccgtcgaggtgaggctgaattgatgattgctggtggaactgaggctgcaatcattcctattgggctgggagggtttgttgcctgtagggcattgtctcaaagaaatgatgatcctcgaactgcttcaagaccatgggacaaagatcgagatggctttgtaatgggtgaaggtgctggtgttttggtaatggaaagcttggaacatgcaatgaaaagaggtgcaccaattattgctgagtatttggggggggctcttgattggcttgctcatctcatgactgatccaagagctgatggttttggggtgtcttcatgcattgagagaagtcttgaagatgctggtgtgtcccctgaggaggttaactacatcaatgcacatgcaacttctactcttgctggtgacctagctgagatcaatgctattaaaaaggtattcaagaatacatcagacatcaaaatcaatgcaacaaagtccatgatagggcattgtctgggcgcatcgggtggtttagaagccattgccacagtgaaggccatcacaacaggatggctgcatccctccataaatcaatttaatccagagccttcagttgagtttgacactgtggccaaccagaagaaacagcacgaagttaatgttgcaatttcgaattcattcggatttggtggacacaactcagtggttgccttttcggccttcaagccttgaaagtctttggcatttagttttgcattggttagggaagatagagagagagataggcgttggcttgcatcaataattgagccaaaaatgtaacagttagtgttgtaataataagttttaagtcaaatggaagcgcttaggagtcatttcccccatccccctctttaaactactcttaatgttatgctctaaattctgtttagtgattgagaagactggactatttaaatcaaaatatcatatcaatgtcttcggttcg

SEQ ID NO: 22918 - DNA, 868 bp, Gossypium hirsutum
  Clone ID: GOSHI-09MAY01-C41378_1
tttagaataaaaaaactaaaccctatgaagagtcccgggggactgagataggggagtttacgctatctgatctggaatcttgtgaggtaagattaatcggctgctgcaatgcggtttttgtgaacagattgaagaactgcaaggtttatatggggcctgtaattgggtctattttgatagaggaagtggaaggctgtgttttcgtattggcgtcgcatcagataagaattcatttggcgaaaagttgtgacttttatttgagagtgaggagtaggccaataattgaggacagcaatgttgtgaggttcgctccgtactgtttggattatgaagggatcgagatggatttggagaaggcagggttgagtgaagagacggggaattgggggaatgttgatgattttaagtggttgcgagctgtgcagtcgccgaattggtgtgttttaccggagaatgagagggttgggaaggttcggactgaggatattgggagcaaaagcgaaggtagctaaagcttgtatttgtaattagagtcttcgaattatttgagttaatatggtcatgtttgaacttatgtttgttatctcagattttttttttcgaaatagaaggggaaatgaagtggcaagggagcactttttatatttcaaaaagtgctctagttacgtcattcttcttcttttaagtttttaattacaagcttctcaattattttgtcagactcatggcaaatgaaagctgatggcatcttttctgctttgtttagttgtgatttcatgtgtgcctgcagtccaggttatttacttcatatacattttgtagtcttttgaatcttttatagaacatattttgcattgaaccctgattt

SEQ ID NO: 22919 - DNA, 390 bp, Gossypium hirsutum
  unsure (1)..(390): unsure at all n locations
  Clone ID: LIB3147-040-Q1-K1-A1
accggctctgattcggtcgaccacgcgtcgcttttaagaaagttgaaatcttacactttcccccccccctgctcttcgccgaaaggcttatgcgcaggccttcaaccacccaaaagtcgccggcgaccggggaagtaaggccctctcgatggcgcaaacatgaggcgtggtaagtctcccttcttctttcctatttttaacttatattgtggatccgatttaaaaaaaaatgaagaaaaacaaaataaaatcacctttgaaactatttcttggtgggtttttttactgattcttgcgtgagatttgtatataaactttagtacctaagtcccgattctcgatttactctngaacttatatattctctggtatattcgaaaaagaaaactc

SEQ ID NO: 22920 - DNA, 336 bp, Gossypium hirsutum
  Clone ID: LIB3149-029-Q1-K1-B10
tttgaaatcttcacacttcccccctcccctgctcttcgccgaaaggcttatgcgcaggccttcaaccacccaaaagtcgccggcgaccggggaagtaaggccctctcgatggcgcaaacatgaggcgtggtgttgaagttgtggagaacgagaggcgtgaaacatatgcgaaaacatggagcgggacatatggggatggagtaagtggaggtatgggcaatggtacagggcaagtaggccgacagtcaagcatagggatgatggctaggcttttttattctagtcttctgcgtttttcttttgttcttaaatgctatggggtatgtgttaaaaggg

SEQ ID NO: 22921 - DNA, 667 bp, Gossypium hirsutum
  Clone ID: GOSHI-09MAY01-C41248_1
cccatgcgtcctttcattctctctgtgtccgattctctctccccaaactctcattctctcgctctctctctctctctctctttcttcacaagaaaagtttttctctcgtgaatccatgtcggaggaaaagggtcggccattgccaaaatttggtgaatgggatgtcaacgatcctgcatctgctgagggattcactgtgatctttaataaggcaagggacgagaagaaaacaggtggcaagcctgagtcaccggcaaagtctgattctaatgttaagcctggagctgatcctggcaaaacccaacctaaaaaatggttttgctgcgttcaagccccgcctgcggaatcttgacgacgccctactcgtataagacataagagcttccacaagtatatttgaagccccacccatatattcctaaacaagatagggcccgcaaggcttgtccagcccttctcgcttcctcccctgggcgcccaatcccttccccgtgttacgcagccgccctaccccccccctctttcttttcttttctcctccttttctcactccccctttacccctctttctactccccttccttttcctctatcttcctcttctttctttcccctctcctccttattcccccttctccacctcatctcatcaccccttcttcttctc

SEQ ID NO: 22922 - DNA, 1028 bp, Gossypium hirsutum
  Clone ID: GOSHI-09MAY01-C41268_1
caatattctacaactccttttgttgatgaaatgtatgatcgactgaaggagaccttaagcgattatgaagtcatcatctgccggtggcctgaatatatttttgtgctggaaaatgctatttcggatattgagaaagcaatagtggaagctctggataagcaatatgcagatgtggtaactcctttgaaggaaaacatggcaccaaagaaatttggcctcaagtacgtgcagaaacttgctaagcgatctgtatgcgcctacactgttcctgatgagctgggcatcctgttgaattctatgaagaggatgcttgatgtgctacgtccgaagatagagacacagttcaagtcttggggttcttgcatacctgatggtggaaacacagcccctggtgagcgtcttagtgaggttaccgtgatgttgagaaccaagttcagagggtacctgcaagctgctgttgaaaaacttgctgagaataccaaattacagaatgcgacaaagttgaaaaagattctccaagattctaaagaaacagtgggagaatctgatatacgatgtagaatggggccactgaaagaacaggtaacaagttcagcctatcaccttcatacagtttttgagactcacgttttcattgctatctgccgatggtactgggatcgaatgggacaggatgttctcagcttcctggaaaacaggagagagaatagatcatgggataaagggtccagaattgctggatctatcctggatgatacttttgcgtcacagatgcagcagctcgttggcaatgcactcccggaaaaagaccttgagccacctaggtcaataatggaggtgcggtcgatgctgtgtaaggatgcacataatagtaaggacaactcattcttttactaagcacacagtttttgggtagtgagagatgaatgagtttggtgattcacgcacattatacatggaaagccttgagatatagaaaaccaccccacaaaagcaaaacatggagatatacaagttgccacacagaa

SEQ ID NO: 22923 - DNA, 592 bp, Gossypium hirsutum
  Clone ID: LIB3829-019-Q6-K6-B5
atttccaagctttgcatctttcagtaatacctgattattttggttctttcattgatgcagttgtcattatgaagtttgcattgatgcactggttatgtcatttcttgatttctccattgaaatcctcaaaattttttcatgttcagtttttttgttttttgacattgtaccctgttgttgatacgcagatactggatgatacttttgcgtcacagatgcagcagctcgttggcaatgcactcccggaaaaagaccttgagccacctaggtcaataatggaggtgcggtcgatgctgtgtaaggatgcacataatagtaatgacaactcattcttttactaagcacagtttttgggtagagagagatgaatgagtttggtgatttacgcacgttatacatggaaagcctcgagatatagaaaaccacccaacaaaagcaaaaaacatggagatatagaagttgccacacagatgatctctgatctgaatagccttataaaagattagatgattgaatttggtcatcttgttatttgtatatgtaaaatatgatacaattttgtggctattaactagctcttcttcaagttttg

SEQ ID NO: 22924 - DNA, 412 bp, Gossypium hirsutum
  Clone ID: GOSHI-09MAY01-C41228_1
gaaaaccggctcgacccacgccgtccgcggacccttggccgtacccgtgggtataatttaatatatccctggatatacttaagaaggtgtctcccaagtagttgtgaatcaaggctaaagttcggttttatcatgtttagctggttcattggagaggctttttaaagggagatatcttgttcaaatggtggtgttggagaatatctaatttctttttgctcaggggaaggggttgttgaggttcaaaccctcgtcctggtgacaagctaagacgtgaaagcaatagaagtcttttgctattatactagtggtttggtttggagaatctctgattgatttcttcgtacattgcgtggattatttacaatagaagaagaagattacatgcttgattttcagcctgactgatttc

SEQ ID NO: 22925 - DNA, 382 bp, Gossypium hirsutum
  Clone ID: GOSHI-09MAY01-C42958_1
aaaggtttcatccggccacgatatttcttccaacgattgccgcatttccggttcatgataaacaccatttttactaattgatgaatgtaaatttatccttgactcaaaaaccagtagtggctgagatttcccttctttttgagcgccacggagagtgccaaagccgaaactagagcaagaagattagttttgtacgagagaagcgtgatgaaaaaccaaggcaccattcgagtctgtgactttgtcttcacggtttaccattgtagctgtgtgataaatcatggcaatgcatgttcagtttatagctttgttatactctttgctaaagtactctatatttgctaatcaatagataatcaaacattggtctttagctccaaaa

SEQ ID NO: 22926 - DNA, 584 bp, Gossypium hirsutum
  Clone ID: GOSHI-09MAY01-C42908_1
gaaagagaaggtatctctgtcggtattggtttcctcagtcacatacgaatattagatggtccacgacaacagcgaagggctttgaactttgaagatgctaccctatgcagacctacggaaagcgggcaacaagacaggaaaagtgggttcataagagttgaggttgttacagcttctcttagcttcctgacaaattttcaggatgtctacaagttgtgggcatttgtggcaaagttccttaacccttcattcatcagggagggtacacttccgaccgttgcggaggaagaatctgagacttaacgtctgcaattgagcaattcaaaatcatttgcaaaaataatcccagagtctgagtggaagctaaagaagaccctgagaggatttggtggtaccattatatgcatatggtgtgctcttccttaagacgtttggatgcaacagggtgaatttgttaattcatatttattgttgcttgaagttttctttctctcattttgggttcttgtagagttggttttagttttagaaatatatttgtactattttggatgttatcctgaccttaaaagcagaagtatatt

SEQ ID NO: 22927 - DNA, 456 bp, Gossypium hirsutum
  Clone ID: GOSHI-09MAY01-C42938_1
ttcggttgaaaaatattgggtctccaccagaatcagagcgtaaacgagctgaacttgatgcattagcccgacggttacaaggtattactaaatcagtgtcgaggtatccaactttcaggcgacactttgaggaatttgttaacaaactatccgaggatctctcaaaggacagtggcagcagcaacagcagcagatctagtaataggtctcatcaatcgaagaacaccgttctgcggttttttagcagcagatctttcaagcggagttcaagccaaaacatgtctgatcaagaatcacaatcagttcttgccagagatgcagaaatcgaatgatgtaggaataggatgtcgatcaagaatcacaatcagttcttgccagagatatagaaatcgaatggtgtaggactaggatgttgatatttgtccatagttgtcagattttggacataaatgcaac

SEQ ID NO: 22928 - DNA, 508 bp, Gossypium hirsutum
  Clone ID: GOSHI-09MAY01-C42928_1
ctaaaccctagacaaaaagaaaatcaaaatcagagaatttgaatccaagaaaaggaaaattggaggatcacgctgtcctcttggtcgaaattgcgtcgattttcttcgataaagagatccaagaaaatgtcgaataaaccgcgagagtcggttgtgatccgatccgtttggtcggaaaatttggattccgaattcgagataatcagatccataatcgacgttttcccgatcatttcaatggacacagagtttccaggagttgtcgtccgatcggagggcgccggcggcggccatcgctcccgtcgaattgacgccactgagaattaccaaagcctcaaagcgaatgttgacatactaaagcttatccaaatcggcctaacgttatcagacgctgacgggaatttaccaaatctcggcaccgagaaccggttcatttgggtgttcaatttcaaagatttcgatgtggggaatgatgtacatgccccctgtttccgttctgcttttttcg

SEQ ID NO: 22929 - DNA, 468 bp, Gossypium hirsutum
  Clone ID: GOSHI-09MAY01-C42508_1
cccacgcgtccgatccctttcaagttcctctcttttgtcatttcacatgccctatttttcatagtaccccttcaacaaccactctttcggtgaatattttcttcgattgctccttggtatttcattttttcgtgtccatgcctttcaggcctttcttctctttcaagcgttgccagtttcctcttatcttcctccagtgccagtagcgccttccttgataatcagttctctagatcagtgttccttagactctccattgttactcttgtaagttcatgtgcaactccgttaccagatctagagattttctgaaactgacactctttaaatcttctgcttagtatttgtatatcttgtatgtatgaacacaacactgactgatcctcttttgatgcctgaactcattgtacaatactgagtgcatctccttcgatgactacttgtcggagtcttagatctaatcccacc

SEQ ID NO: 22930 - DNA, 1406 bp, Gossypium hirsutum
  Clone ID: GOSHI-09MAY01-C42418_1
ctaaacccacagagtaaccacgcgtccggcaaaatgggtagcaaccaagccgcagtctctttcttgaccaacctcgcacgcgccgcttttggtctcggcgctggcgccactgtcctcaacgcttctatgtacacagtcgacggcggccaaagagcggtgatatttgaccgtctaaggggagtattggacaaaacggccgatgaaggaactcactttttgatcccatggctccagaaacctttcatctatgatatccgcatgaagccccataccttctcatctgtctctggaactaaggatctccaaatggttaatcttacccttcgagttctttctaaacctaaggtggagaaacttcctgaaatttatcaacaccttggtctagagtatgatgagaaagtgcttccctccattggcaatgaggtcttgaaagccgtggttgcacagttcaatgctgatcagcttctcaccgagcgtccccaagtgtcggccttggtccggaattcactgacacagcgtgcaagggacttcaacattgagctagccgatgttgcaatcacgcatttgtcatatggttctgagttctcaagggcagtggagcagaaacaggtggcacaacaggaggcggagaggtcgaagtatgttgtggcgaaagctgatcaggagaggagggctgctatcatccgtgcagaaggagaaagcgaggctgcaaagttgatttctgaagcaactgcaactgctggtatggggctgattgagctgaggaggatcgaagcatcgagggaaatcgctgcaactcttgcgaggtcaccgaatgtggcatacctgcctggtggtcagaacatgcttcttgctatgaacccatcgaggccttgacagctgcttgaatgatggtaattttcataccccataaatgttttaagtgtgtatttgctgacattgttgtcttcatgttggtggaaaccatcacttgaacttgctgaaaatgtcttgatgttaaaacaaggaggttacttactatttgtcttccaatttttgtcggaactgttgattagtttgtttgctatatgacacttttctgaattgtctcaaaaaaaaaaaaaaaaaaaaaaaaaaaaaaaaaaaaaaaaaaaaaaaaaaaaataataaaaaaaaaaaaaaaaaaaaaataaaaagaaaaaaaaaaaaaaaaataaaaaaaaaaaaaataaaaaaaaaaacaaaaaagggggggccctttttaagggacccaatttttcatcccgggtattgcaaaaaaattttttttttttgggggcccaaaaaataaaataacgggccgggttttataaccctgggggtggggaaaaccccggggacccccaaaattaagggttgtgaaaaaacccccctttttcactgggggg

SEQ ID NO: 22931 - DNA, 414 bp, Gossypium hirsutum
  Clone ID: GOSHI-09MAY01-C42748_1
aatcatagtgcttctattcagcacaatagcagtgatgacctcattggttgctttgtcgttctacggtgctagccaactcaagtttcattgggtggagcgatatgacaaagttcttgtaggttcggtgctatgcttagtagggatcttaactctaatttttcaccatcatgacggagatgaaggtttgcatggacaacatctgcgcaggaaagtcatcggtctttgaggactacacaacatcctgcaaatgtatgttttggcttgatgtgatcatccaatttaaacactataggtataaactgttcattgtgccataagcggattacaagatcgttttttcttcttagtctacggatgcacacatgttatggtcagtttgccatcattttcaatggtcaagcttgttttgctcgt

SEQ ID NO: 22932 - DNA, 448 bp, Gossypium hirsutum
  Clone ID: GOSHI-09MAY01-C42778_1
cccacgcgtccgagctgattggcttgttgagaagtgtactgaactgggagctagtagtgtaacgcccgtcctctctccccgttcttctaccatctctgacaatcgggtggagagattgcagcgcggcattttagcagcagctaaacaatgccaacggttgcatgaaatgaaactgaatcatcccatgaagattgataatcttatacctcttggtgccaagtcgaagcagtcttttatagccatagccgaagggactcccctaggtagtgcattgactgcaacaacaaaaggaacctagggggctgataatagtcggaccagaaggggacgttacagagaaagagggggacttgattacagaagcaggagctacagctgttggtcttggccctcatcgtttgcgtgttgaaactgcaactatagctattttggcaacccttactctatg

SEQ ID NO: 22933 - DNA, 1086 bp, Gossypium hirsutum
  Clone ID: GOSHI-09MAY01-C42738_1
accatttatgattgatttatatccttattatgcttatagagattctccgcaaaagtctctttggattatgcgatgttcgagtcatcctcggaagtcatagatccaaatactggtctactttacacgaacatgttcgatgctcagatagatgccctttattttgccttgatggctttaaatttcaaaacgattaaggttatggttaccgaaaccggctggccttccaaaggttcaccgaaagagaagggtgcaactccagacaatgctcaaacttacaacaccaatctaattcgacatgttttgaatgataccggcactcctgccaagcccggtgaagagctagatgtttatattttctcattgttcaatgagaataggaagcccggattggaatcagagagaaactggggccttttctatcccgataagacgagtatatataacttggacttcaccggaaaaggtgtccttgatatgactaatagtacggatggttccaaaaatggaacaacgtggtgcattgcttctagcaaggcttctgaagcggatttacagaatgctatagattgggcttgtggccccgggaatgtagattgctccgccattcagcctagccaaccgtgttttgaaccggataatctagcttctcatgcctcttttgcattcaacagttactaccaacaaaacgggccaagtgatgttgcatgcagcttcggaggaaaaggggtcaaagttgacaaggatcctagttatgataattgcatctacctgaccgccggagggatcaacaaaacagcatcaagtaacatgactgccactgcaaacacatcttcgtccgcacataccgacgtgtgctcgtggatttgcgttttccttttgacgactttgatcgctgttatcttgaacacgggcaatgtgttccatgtagcatgctgaaaataaagaacagttgagaatgtaagccatggatgttttttctatggttctcctttttgttttggtggtgatgatgaaatgctgtaaaaacgattatgtaaatgcgtttattgctactgatttgcattagaatgtagtgccattgcgaat

SEQ ID NO: 22934 - DNA, 552 bp, Gossypium hirsutum
  Clone ID: GOSHI-09MAY01-C42058_1
cccacgcgtccgaagtgttgaacaaaaaaaaaaaacgaaaaaaaggaagtaaaaaattgtaaccgaggtctgtaggcaatgtcgaggaggccagtgaatccctctagacgttacggcgatgccggcggcggagctgctctcttttcgctgtctaaatctcgttctccgcctttgctctccattgttctcattgtcctgggggcattgcttattgttgcgtatttccatagcggatcaggatctggaggcataaggagccttgtttccagagttgaaggtgacttttcctgcacatttgaggttctacgggcgcttcctattctgaagaaagcttatggtggtggcattcataaagttttgcatattggtcccgattcttgttcagtggtctcaaatttgttaaaagaagaagaaactgaagcttggggggtggaaccatacgacattgaggatgctgatgctaactgcaaaagactagtgcgtaatggcatcatgcgtgtggctgacatcaaatttcctcttccatacaggccaaagtcgttccctcttgtt

SEQ ID NO: 22935 - DNA, 1039 bp, Gossypium hirsutum
  Clone ID: GOSHI-09MAY01-C42348_1
agtatacagaagcaaagacatatgcatctaggaccattctgttcttgagaggggatggtacattgaagtctgtggccattgagttgagcttgccaaaaatggaagaagataaaataggatgtgttaacaaagtatacactccagctgaacatggagttgagggttggatttggatgcttgctaaagcttttgtaaatgtgaatgattctggtcaccatcagctagtgagccactggttgaacactcatgcagtgatagagcctttcgtaattgcaacaaacagacagctgagtgtggttcatccaatttataagcttctccatcctcacttccgtgacaccatgcctatcaatgcattggctagagagttgctcattaatgctaatggaattatagagaggacattttgccctggaaaatactctctagagatgtcctctgtgatttacaagagttggaatttcatggaccaggctcttcccaatgatctcaagaaaagagggatcgcagatggtgatataaaatctctggacgaccttgaccggttactgataaaagactacccatatgctgttgatgggttgaagatctggtttgctattgaaaattgggtcagagattactgctcattctactacaagaccgatgaaatggttcaacgggaccctgaacttcaagcctggtggaaggaactccgagaggtgggtcatggtgacaagaaagacgagccatggtggcctaaaatgcagaaccttgaagacctgatacaatcttgcaccattatcatatggatcgcttctgcactccatgcagctgtcaactacggacaatacgcttacggaggctacttccccaaccgcccaacactaagccgaaggttcatgcctgagaaaggcacccctgagtatgcagagcttgaaaagaaccctgagaaggtcttctttagaatcatgtcttcgcagctacagtccctgattgtcattacggtggtcgaaacgctgtcaaaccacgcatcggatgaggtgtatcttggacagcg

SEQ ID NO: 22936 - DNA, 507 bp, Gossypium hirsutum
  Clone ID: GOSHI-09MAY01-C42328_1
tcctcacgcgtccggattgacagttcaattatgaaacgggttaatgacatattacagcgggctaagttacctactgctcctcctgaaaccatgactgtggaaatgttcaaatctgtcatggcggttgataagaaggtggctgatgggctactaaggcttatccttctgaaaggtcctctgggaaattgtgttttcactggcgagtatgatagaaaggccctggatgatacactttctgcattttgcaagtcttaaatccagattttatttgttgatctgttttaagctttacttgcacaattgttcttccatatccttggatggtttatctcaatggtcatgctaatactttttggtgtactctttctctaggattctttcttttcttgaactccattgtcaaaaggctcgtaccaagttgtaatgccagtattaatgtagtcaataaaaactatatgtatggtaaagtatgtatttttattatttgcttacttcactgggttggcc

SEQ ID NO: 22937 - DNA, 467 bp, Gossypium hirsutum
  unsure (1)..(467): unsure at all n locations
  Clone ID: LIB3147-055-Q1-K1-G1
ttcccgggttcgacnccacgcccgtccgtcccactgccgtcnncggttcaaaaaatctgtcatggcgtgttggatatagaagggtggcnntgatgggctactagaggcgttanttccttctgaaagagtgcgctctggnngaaattgtgttttcacttgggcgagnntatgatagaaagggcgcctggatgaataccacttnntctgcattttgcaaagtcttaaatnccagattttantttgtgatcntgttttanagctttancttgcacaatnntgttcttccatatnccttggatggtttatctcaatggtcatgctaatactttttgttgtactctttctctaggattctttcttttcttgaactccattgtcaaaaggcttgtaccaagttgtaatgccagtattaatgtagtcaataaaaactatatgtatggtaaagtatgtatttttattatttgctt

SEQ ID NO: 22938 - DNA, 491 bp, Gossypium hirsutum
  Clone ID: GOSHI-09MAY01-C43988_1
atcaacttttagttcctcacttcaattctatcactcacctatgccattgttaatcttctttgggtgaaatagatgagaagattgaaaggaagccatttcttttgaggggaatgttgtctggctcgaggccatcaactagatctatggatttctttttcatatatcaaagtttgagagatgatgatgatttaatcattaatcataggttaatgacgtcggaccaggcttcattccccccaattatttgcttccaattttgattatgttctctcggtcttttgttggtaaaacaagaagtggtgggtggtggatgataaggatgctggagctgtgtaatctccgccatttatgttttgtttttatgcttgcttttatctctgcttaactttggtacttactattcctgtacatgctgttactggtttagatctgtagtatcctttgcaagtttcaaggttaaatacatggaattcactccctggattggaagt

SEQ ID NO: 22939 - DNA, 713 bp, Gossypium hirsutum
  Clone ID: GOSHI-09MAY01-C43958_1
cccacgcgtccgtaccgatcagatctacacttaactatttgagttggtcaagttgatgagagaatctatcgtgactatggacgatgaatacttgaacgcaatacaaggagaaaaagggtttaaaatcataggtgagtacattaatcagcttgaaaccatgttttccattgaaaagccagatgtcttttcctcaacaagttgggtcaacatcaagtattacgaactcgatttcggatggggcaacccgcaatgggttgctccgttcggggaagccgggtctgagttcaataacaatgtggttttcattgaaacaaagtgtggcaaaggcatcgaagcttggataacattggatgaaaagagggtgcgggtgttggaaaaagatgcagagttcctcaaatttgcaactccaaaccccgagatttcaagcctttgatgtgattgtgttcaatttctaatgcttatcaaatcttaaatctgtcgaaataaatggtttaattttaaatctaaatattttatgtttcgttgggagtttttttttaatcaatcattgttatgttccatggcgtggttcttatattacatttacgcttcactaaaaagtggactatttaatggttaaaatatactattagtccttacatttctatagaatttgagatttattcccatgtgctttaaaagttaaaatttcaatcatcctgcttttttatttt

SEQ ID NO: 22940 - DNA, 405 bp, Gossypium hirsutum
  Clone ID: GOSHI-09MAY01-C43968_1
cccacgcgtccggtactcccccatgcgccgttcgaagaaccagccgctcagagacctgccgacctctcgcccaactccgatggtagcggagtgaccgacagttcggcaatcaggtacctcatttccctctaatctcttattttttataaatatatatacttatatatgtattaataacaaaaacaaagaacaagaggaagaagaacgattggaaaaagaacagaatcacaaagagagaaaaaagaaaacctttgttgtattgcttttcttttttctttacaatctgtgtatgtgtttttgtattgaatcccccatttacagattctcgaaaatggctttatatagccaagataaaacaaacaaacattacaatgaaatatgtatttttatttgctgttggttttt

SEQ ID NO: 22941 - DNA, 593 bp, Gossypium hirsutum
  Clone ID: GOSHI-09MAY01-C43848_2
cgaaaaataccggaagaacgctggattcttctcatggcttatgttgagcgaggtgttgtgaaatcaaagcgatcaatatggcgactgaggaccatcatcgatttcttctgggcaatcatcaattttatcggagtgtttttttcgaccatgttctcgatggaaaagtcagatgcctatagaaaaagctctggttcaagcaagaaatggtatggtggtccaggaggaccaggaagtggaccgtatggtggtggtggcggcccacgtcgaccatcacgtggactagacaatgttcgaggaattgatcatagtaagtgctgtgccttattattattatgcctgggaacttccaattatcagtgtttttttatcaccaggccatgttccccttctcttttttccccttcaatttgtcaactaaaataatttgtcatttgccactgctatattttcaggttcccttcctgcttgcggctcttgctgtggtggctaattcccaaacattgttgtgtctaattcatttttattttgtgcaagaaatttataagatgttagtgtcaatagactgcctgtgaaataaaaaactttggaaactc

SEQ ID NO: 22942 - DNA, 676 bp, Gossypium hirsutum
  Clone ID: GOSHI-09MAY01-C43848_1
ttctctcgtccggaccctggagtttttctcatggcctacgtcgagggaggtgttttgaaatcaaagcgttcaatatggcgactgagaactatcactgattttttctgggcaattatcaatttcattggagtgttcttctcgaccatgttctcgatggaaaagtccgatgcctacagaaaaggctttggttcaagcaagaaatgggatggtggtccaggaggacctggaagtggaccatatggtggtggtggtggcccacgacgaccaccacggggaatggacaatgttcggggaattgaccatagttcccttcctgcctgtggctcctgctgcggtggctaattgctgcaagcatacatcttgtgcatgtacactgttatatagctaaagtcctcttattataagtaaggatgttccacatgtttttaatgccaatagattgcctgtgaaacaggcaactttgaacctctataaaaccagagatgcttttatgtactttcaaacttttgctaaatggtgggctgatactgctctgtttctacaacatgtcgatttgattcgagaaacatgttccattagtttcccctgtgtgtaaactctgttttgaagagattatttagggatgtcaagattgtctttcaggttacagttaggaacttatgcatgcccccaaaaa

SEQ ID NO: 22943 - DNA, 481 bp, Gossypium hirsutum
  unsure (1)..(481): unsure at all n locations
  Clone ID: uC-gsronu33B098c02b1
gttgttaaatcaaagcgatcaatatggcgactgagggcgatcattgatttcttctgggcaatcatcaattttatcggagtgtttttttcgaccatgttctcgatggaaaagtcagatgcctatagaaaaagctctggttcaagcaagaaatgggatggtggtccaggaggaccaggaagtggaccgtatggtggtggtggcagcccacgtcgaccatcacgtggactagacaatgttcgaggaattgatcatagttcccttcctgcttgcggctcttgctgtggtggctagttcccaaacattgttgtgtctaattcatttttattttgtgcaagaaatttataagatgttagtgtcaatagactgcctgtgaaataaaaaaaaactttagaaactctttaaacccttttatttttctctctctcgaattttgacattttttattgtcataaattaaaaattgttgattataaacnaaaaa

SEQ ID NO: 22944 - DNA, 279 bp, Gossypium hirsutum
  Clone ID: uC-gsflnu33B022d07b1
ccctggagtttttctcatggcctacgtcgagggaggtgttttgaaatcaaagcgttcaatatggcgactgagaactatcactgattttttctgggcaattatcaatttcattggagtgttcttctcgaccatgttctcgatggaaaagtccgatgcctacagaaaaggctttggttcaagcaagaaatgggatgatggtccaggaggacctggaagtggaccatatggtggaggtgcccttttcatatttattcatctcttttatatttatctcttttt

SEQ ID NO: 22945 - DNA, 575 bp, Gossypium hirsutum
  Clone ID: GOSHI-09MAY01-C43868_5
cggctgaacggccgtcatttgctaacatagtagaagcactaaagaagtttctcaagtcaccattgcagttggtggaaatgggaactcagtgcccgagtggcccttaaaggccattcctactgtgaaatagttcgaataaagccgattccaggggtctattttttacccttgcagcaaagcaactcttggacttggctgtataatgttattcccctaacagagctgcaactgtagatgcctatctttctaacccgtttggaaggcggttaaaatcccttcttaaaagccaaaaaccctataaataaaaatcccagccaactattccctgcctttgctgggctaaaactaaaaacaggttttgtttttgaaacccatgggggattgaatgctttcccccataaaagggctatattcaatgggtaaacccgaaggggtttaaaatttcggaaatttccctttgataatataataattttattttggattttccctttggaaacccctgggttgtatttgggctgtaaccagtcaaaagaacgaaatttgaagggatgatatatataggctttcccccc

SEQ ID NO: 22946 - DNA, 941 bp, Gossypium hirsutum
  Clone ID: GOSHI-09MAY01-C43868_4
ataagaactggacagtaaaggtgtgtgattttggactgtccagattcaaagcgggcacttttatatcatcaaaatctgttgccggaacacccgagtggatggctccggaattccttcgtggagagccttcaaatgaaaaatccgatgtttacagtttcggagtaatcttatgggagcttgtgaccatgcaacaaccttggagtggactcagtcctgctcaggtggttggtgctgttgctttccaaaacagaaggctggccgttcctccgaatacttctccaaagttggcttccctcatggaatcttgttgggccgacgatccggctgaacggccgtcatttgctaacatagtagaagcactaaagaagtttctcaagtcaccattgcagttggtgcaaatgggaactcagtgaccgagtggcccttaacggccattcctactgtgaaatagttcgaataaagccgattccagggatctattttttaaccttgcagccaagcaactcttggacttggctgtataatgttattccactaacagagccgcaactgtagatgcctatcttactaacccgtttggaaggcagttaaaatcccatcttaaaagacaaaaaacctataaataaaaatcacagcaaactattacctgactttgccgtgttaaaactaataacaggttttgtttttgaaaaccatgggggatagaatgtcttccaacataaaatggccccacgcccccgggggtttaaaatttcggaaatttacctttgatagtataataattttattttgtattttcctttgtaaaaccatgggttgtatttgggctgtaatcagtcaaaagaaccaaacttgaaggtatgatatatatatgctttctaccaaacaaaaaaaaaaaaagaataaacaaaaagcaaaaaaaaaagaaaaatataaaatac

SEQ ID NO: 22947 - DNA, 945 bp, Gossypium hirsutum
  Clone ID: GOSHI-09MAY01-C43868_3
ttgttggggagccaggaaatctccatggcccagattcatctatcaatggaggattcctttcttccatgccttcaccatttcaaatttctcatcttaaagaattccagcaaccttacatggataattcatcttactgtcagataatagactcaaagagttctagttctcattataggaatcctctacattctggtggcgttgagaaatctcaacagttgaaggacaatggtttgcttggaaaccaaaagccatcaatacatgcagcaactgaccgagattcttttggaaaggggatgcctttggaaacagcagctggatcaacaatgaattctagacattgcagagataaagtcgccaaagaacaaacacttaaaccgggtcgccctgcgtctgggagtccagtggtaaaaagtgaaaagcagttgaaagttaacttacctagtcagtcagatctagaggagataggggctgaacttgataatcaaggcaggttctccactgtttccatcccgagatatctacatcttgaaccttctcttgcaatggactggcttgagatatcatgggatgaattgcgtattaaggagcgtgttggtgctggctcatttggaacagttcatcgtgctgagtggcatggatcggatgttgctgtcaaagtcttgactgtccaagattttcatgatgatcagttgaaagagtttctgagagaggttgctataatgaaacgtgttcgacatccaaatgtggtcctttttatgggtgctgttacaaaaaggcctcatctgtcaattgtgacagagtatcttccgaggggtagtttataccgcctcattcataggcctagtgctggagaaacacttgatcagaggcggcgattgcgtatggcattggatgtggcccaagggatcaactatcttcattgccctaatcctcccatagttcact

SEQ ID NO: 22948 - DNA, 1177 bp, Gossypium hirsutum
  Clone ID: GOSHI-09MAY01-C43868_2
cccacgcgtccgcccacgcgtccgcccacgcccccgcgtccggtttctcagagaggttgctataatgaaacgtgttcgacatccaaatgtggtcctcttcatgggtgctgtcacaaagcgtcctcatctgtcaatagtgacagagtatctgccaaggggtagtttataccgcctcattcataggccaactgctggggaaacactggatcagaggcggcgattgcggatggcactggatgtggccaaggggatcaactatcttcattgccttcgtcctcccatagttcactgggacctcaagtcacccaacctgttggttgataagaactggacagttaaggtgtgtgattttggattgtctagattcaaagggggcacttttatatcatcaaaatctgtggcgggaacacctgagtggatggctccagaattccttcgtggagagccttcaaatgaaaaatctgatgtttacagtttcggagtaatcctatgggaacttattaccatgcaacaaccatggaatggactcagtcctgcccaggtggttggtgctgtagctttccagaataggaagcttgccattcctcctaacacctcccccaagttggtttccctcatggaatcttgttgggccgatgatcccgctcaacggccgtcttttggtaatatagtaataacactaaagaagttgctaaaatctccattgtagcgatgcggaaaggaaaacagtaacaatgggtgtcgttagaataacctgaaagcagctgattttggagattccactaacctttgtttttggttccaggcaactgtagatgttttatctaacccatttggaaggcagttcccattagaatttgaggcctataacgataattaataataaggggaaaaaatatagcaaagctgtaatgagttgctgtgttcattatatgtaggttttgcatggggggttgccttttcttacataaagcaatttgccagtgtatgtaaactccgaaatgtttatgaattcggattggttatgatatgttggtaattcccgtttttggtgttcttattcatgccaatgatggaacaaaaaacttgggagaggattaagcaagaaaaaaagtttgctttagcccctacttttgtattcattttgccgtgtttgtaatctactagaagttgaatt

SEQ ID NO: 22949 - DNA, 1067 bp, Gossypium hirsutum
  Clone ID: GOSHI-09MAY01-C43868_1
attatgggtcttttcttattgttaccaaaggcggtcataaatatcaacgtaattgaccaactgttgaagtatttcaatgctgtatttcataattccgtcaccccgtttcttgtggtgctgcaaattgtaggtggttggtgctgtagctttccagaataggaagcttgccatgggtgggagcaccttccccatttggtttccctcatggaatcttgttgggccgagtaagtatatactttctcctccatatattcactgcacttaattttatatgatgatgagttagctatagagacttccctattctatcttttctctgtatgcatcggtccgggtaggaccaagcagcagctttacggccaataaggagagagattagcagtagcttatactctctaagtaaaagagaaatgaaaaaaaagaaacccaagtttcactgaacatacttgaacttcacggtcacatctatcccgactaacatgggggccaagtatttcttggatttgctggagttatatttgagaatactaaaaattcctgatgatagttgctatatgtgcacttttgcagtgatcccgctcaacggccgtcttttggtaatatagtaataacactaaagaagttgctaaaatctccattgtagcgatgcggaaaggaaaacagtaacaatgggtgtcgttagaataacctgaaagcagctgattttggagattccactaacctttgtttttggttccaggcaactgtagatgttttatctaacccatttggaaggcagttcccattagaatttgaggcctataacgataattaataataaggggaaaaaatatagcaaagctgtaatgagttgctgtgttcattatatgtaggttttgcatggggggttgccttttcttacataaagcaatttgccagtgtatgtaaactccgaaatgtttatgaattcggattggttatgatatgttggtaattcccgttttgtgtttttggtgttcttaatcatgccaatgatggaacaaaaaacttgggagatgattcagcaagaaaaaaagtttgctttagcc

SEQ ID NO: 22950 - DNA, 560 bp, Gossypium hirsutum
  unsure (1)..(560): unsure at all n locations
  Clone ID: LIB3825-003-Q1-N6-H1
aattcaacttctagtagattacaaacacggcaaaatgaatacaaaagtaggggctaaagcaaactttttttcttgcttaatcctctcccaagttttttgttccatcattggcatgaataagaacaccaaaaacataccaacatatcataaccaatccgaattcataaacattcggattttacatacactggcaaattgctttatgtaagaaaaggcaaccccccatgcaaaacttctaatgggaactgccttccaaatgggttagataaaacatctacagttgcctggaaccaaaaacaaaagttagtggaatctccaaaatcagctgctttcaggttattcaaacgacacccattgttactgttttcctttctgcatcgctacaatggagatttcagcaacttctttagtgctattactatnttaccaaaagacggccgttgagcgggatcatcggcccaacaagattccatgagggaaaccaatttgggggaggtgttcggaggaatggcaagcttcctattctggaaagctacagaaccaaccacctgggcaggact

SEQ ID NO: 22951 - DNA, 669 bp, Gossypium hirsutum
  Clone ID: GOSHI-09MAY01-C43828_1
ggggccgaccgacgcgtccgaaaaggaaaaagaaaaaagaaaaatcaatagctggttcggacccccgaaaacccgatttcgaaaccctaatcggatctcccaaatagctccgtagcagaagaaagaagatgacgggagtaaccaatcaggaggaagacaagaaacccgctgatcaaacggctcacatcaatctcaaagtcaaaggccaggacgggaatgaagtgttctttaggattaaaagaagtactcaactaaagaaacttatgaatgcttattgtgatcggcaatcggtggagttcaactctattgccttccttttcgacggtcgccgtctgcggggcgagcagactccggatgagttggaaatggaggatggggatgagatcgatgcaatgctgcatcaaactggtggtaccatggcctaactagctagcttatttataggtttactacctagtaggattcaaatggtagtatttgtgagattaggacctatatgtattaaacctcttgaaaccgtgaggtccgctagtgcaatctccggtatgagtatttacgaactccgaggcctcaccactactcttcggtatgagtatttacgaactccgagttaagtagtcgtagttcatgtatttatctttataaaataatactcaagaggtttgagat

SEQ ID NO: 22952 - DNA, 713 bp, Gossypium hirsutum
  Clone ID: GOSHI-09MAY01-C43488_1
gcccgcccttgctcgtttgaaagcttatgagggcgttccttccccgtatgataaggttaaaaggatggtcatccctgatgctcttaaggtcttgaggcttctaaagggtcacaagtactgcctgttgggtcgcttgtcatccgaagttggatggaaccattacgataccataagggaacttgagaagaagaggaaggagagggctcaagttacatatgagaggaagaaggagctgaataagcttacggtgaaggctgagaaggcttctgaagcgaaacttggttctcaacttgacatccttgcgcctgttaagtactgaattttctagtgactagcttgtttttcttacaattttgttatttgaatggattagatttcattgttgtattctattcgaggtgttggcagttgcaacattgttggttaattgatacgttgctagaaaaccactgcattgactatcactttttggttgttgaatcccgggtctttaatttgatcaaatcccatcatttttatgtcaaaaaaaaaaaaaaaaaaaaaaaaaaaaaaaaaaaaaaaaaaaaaaaaaaaaaaaaaaaaaaaaaaaaaaaaccccaaaaaaaaaaaaaaaaaaaaaaaaaaaaaaaaaaaaaaaaaggggggccctttttaaagatccaagttttacttcccctgctttgcaaggtaaaattttttttttggggccccca

SEQ ID NO: 22953 - DNA, 947 bp, Gossypium hirsutum
  Clone ID: GOSHI-09MAY01-C43748_1
ttggaaatcttcccatattccgtgttttatatgttctttgagcaataccttgatatatggaagacagctctcatcaaccttgcaattgcgattggtgcggtatttattgtttgtttagttattacatgcagtttgtggacctcagcgatcattttgttggtgttggcaatgattctcgttggtgttgtgggtgtgatggcaattctcgggattcaactcaacgcggtctccgttgttaatcttgttatgtcagtgggcattgttgttgagttctgcgtgcatataacacatgcattttcagtaagcagcgggaatagaaatgaaagggtaaaggaggctctgggaacgatgggagcttctgtcttcagtggaatcactttgacaaagctagtaggggtgctggtactctgcttctcaaagacggaagtttttgtggtctattacttccagatgtacctagctttagtccttctaggtttcttacaccggcttgtatttttgccggtggtgttgagcatgggccgtccactgtcgagaggtatacaagttgagaagcaagaggagcgaccctcggtttcatctcagccataattgatgatctttcacacagttcataactccttttgtagagagttttaccatgtctgatatagaaactgcatgtacaaccagagcaaaggcttaaaaagggggggaaaagagaatagttgtccccatcccatcccaacatgtaaaggtttgtttagagaaggaaaagaagaagaaagtaatagaaaaatgatattgggtgctgtcgttgttgttgtcaatattataaggtagctgattcatctaatttaaaagttaatacttgggatagagttgttgtgagatttatatctctgttatttttcggacatgttcaccgtattcgtcctacgtaatctttatttgttttttttcttctt

SEQ ID NO: 22954 - DNA, 1013 bp, Gossypium hirsutum
  Clone ID: GOSHI-09MAY01-C43628_1
ccccgcgtccgcaacctgtgaggattctggtgaaacgtgatgagcttacccttgagggtatcaagcaattttatgtcaatgttgagaaggaggaatggaagcttgagacactttgtgatctctatgagaccttagcaatcacccaaagtgtcatttttgtgaacactaggcgtaaggttgattggcttacagataagatgcgtagccgtgaccatacagtgtctgctacccatggagatatggaccaaaatgcaagggacattatcatgcgggaattccgatctggatcctctcgcgtgcttatcaccactgatctcttagctcgtggtattgacgttcagcaagtctcacttgtgatcaattatgatctcccaacacaaccagagaactaccttcatcgaattggtcgtagtggaagatttgggagaaaaggtgttgccatcaactttgtaaccacagatgatgagaggatgctatatgacatccagaggttttataatgttgtaattgaggagctgccatcaaatgttgctgatctaatttgattctggttcaggctggctaggtaaatggctctctgggaatgacaaagcttaggaggtccagttacaactgggagggatttcgttcctgcacatttagttgagctcccattaccatataaaaaacccaatgttcaaattttgatttggtgtgtgtctaagcaagaaatatctgtagtattgttctagtttattctaaatcatgttgttttatctatgttcttatttctttccatctgtagtttctgtatgtgagacttgaggggagattatgtagaatggaaacgtgattattttagatcattggacttgcctctatggttaacaaagaggacttgacttgcaatggagggcagagttacaaaaaggcttatcttataattatagccaccacattgtttggattccttgtttctggtattttggtcattaggaccataagcttttacaaaagtgacatttacaagaaat

SEQ ID NO: 22955 - DNA, 545 bp, Gossypium hirsutum
  Clone ID: LIB3585-017-P1-K1-B6
cccacgcgtccgcccacgcgtccgcccacgcgtccgtccacgcgtccgggaggaatggaagcttgagacactgtgtgatctctatgagaccttagcaatcacccaaagtgtcatttttgttaacactaggcgtaaggttgattggcttacagataagatgcgtagccgtgaccatacagtgtctgctacccatggagatatggaccaaaatgcgagggacattatcatgcgggaattccgatctggatcctctcgcgtgcttatcaccactgatctcttagctcgtggtattgatgttcagcaagtctctcttgtgatcaattatgatctcccaacacaaccagagaactaccttcatcgaattggtcttagtggaagatttgggagaaaaggtgttgccatcaactttgtaaccacagatgatgagaggatgctatatgaacatccagaggtttaattaatgtgtaattgaagagctgccctcaaatgttgcttgatctgattagcttcttgttcgtgatggctaggaaaaatgattttttgtg

SEQ ID NO: 22956 - DNA, 408 bp, Gossypium hirsutum
  Clone ID: LIB3148-015-Q1-K1-A7
gattctgtttcggagcacaatggccattaatgtacgccatcatctccgaaatcttcggccttaaatactactccacgttgtacaacttcggttccgtggctagtcccgtcggttcttacattctgaacgttaaagtagccggacatttatacgaccaagaggctttgaaacaattgaaagctttgggtcgtacgaggaatcacggggaggacttgacttgcaatggagggcagtgttacagaaaggcttttcttataattatagccaccacattgtttggattccttgtttctggtattttggtcattaggaccagaagcttttacaaaagtgacatttacaagaaattcagggaagaagctcaggttgccgaaacagacatgggttcaagttctacttcaaaacaaa

SEQ ID NO: 22957 - DNA, 215 bp, Gossypium hirsutum
  Clone ID: GOSHI-09MAY01-C43108_1
gcccacgcgtcggttaattgcagttgtctttagcttgtagagttggatgttaaatggtggatgttgcatacgacaatgcagtctcttgttccggtatatctaactgataagactgtttcttggctattgcattttcagattccctttatgtaattatgtagtacattttccgattcagtgttaaatatgaaataccagtagtaataacatcagat

SEQ ID NO: 22958 - DNA, 417 bp, Gossypium hirsutum
  Clone ID: GOSHI-09MAY01-C43068_1
ggcatttggttgtggacatcactcatgcgtttggttgtgcgaaagacctcgaaacttgcccggggtgtcgatgtccaatgcagaccaaaataaagctctacttttgattcttttattcttcttgaaaaaaaaatatacatttcccatgattcttttgttgatttgttatttttgtgataggtttgaggaagtcaatatgtggtgcctatgaccaaaagatgagatgaaaaaaaatcttccttttggatttctgatatttcatttttgaattaaaatgtggcccaaaaaaaaaaaaaaccgccccactttaaaaaaagtaataatgggaaaaacctttgcttaaccaaactaataggctttgaaaaaaaacccttttttaccaattgggttaaaaaaaaaaggggcccccccttataa

SEQ ID NO: 22959 - DNA, 283 bp, Gossypium hirsutum
  Clone ID: GOSHI-09MAY01-C43308_3
tgagtgatgcacatgtggtcgttaaacagacataaagagcaatgacgttctcttcttggtaatattggggacctaagattaatgaagtttggggtggacgaaaaatggaccgaagtgtgaaacgccattgatgaaggactcgaatgcatgtacaaaagggtatggaccatgtgctggtgcatgaacctcagtacataggtgctcgccatggctgtgagagtctcgaccgctttttttcttttccctctttttcgaaagcgcacgcgtgggtcgagacagtaaa

SEQ ID NO: 22960 - DNA, 401 bp, Gossypium hirsutum
  Clone ID: GOSHI-09MAY01-C43308_2
gttttttatcaactttaagacactcaaattcaccatgtctaacacttgcggtaactgcgactgttctgacaagagccagtgcgtgaagaagggaagcagtaacaccatggtcattgagactgagaagagctacatcagcactgttgtggcagaggttccaactgagaatgattgcaagtgcggagataactgcagctgcaccaactgcacatgtggtcgttaaacagacataaagagcaatgacgttctacttcttggtaatattggggacctaagattaatgaaatttgggtcgaataatttgtgtttgtgtgttttcatgtttaacagtaatgtaatggccttatctatggactttggtttatgaaaaaaaaaaaatttttctatttagtcattttttt

SEQ ID NO: 22961 - DNA, 612 bp, Gossypium hirsutum
  Clone ID: GOSHI-09MAY01-C43308_1
cttgcaagctgtgtgaggcggcctaaatttattttatgcagtggtggaaacccttcagcttacatccccacttatactgctcaaaattcaccctccagtgcactattttctggaaacatttggagaaacttgtcttcgtggatgccgcagagggggacaacagctcagccggcacaagatgatcccagatttcctgggagaggcagaactcttggttctgttcaaaatactgctgtaaattcagattctaacttacaagctaggcttttggataatagtagacccactagtccatcagatattgcagcagctggtgctggggagaggctttcaaatgaaaggcagttacaagtgagtgatgcacatgtggtcgttaaacagacataaagagcaatgacgttctacttcttggtaatattggggacctaagattaatgaaatttgggttgaataatttgtgtttgtgtgttttcatgtttaacagtaatgtcatggccttatctatggactttggttaatgaattactatttagcatatatgatattcttggtatagcagcaaatttaaaaggttcccaagagatattccaaaaaaaaaaaaagaagggaggc

SEQ ID NO: 22962 - DNA, 575 bp, Gossypium hirsutum
  unsure (1)..(575): unsure at all n locations
  Clone ID: AW186874.2
gaggcagaactcttggttctgttcaaaatactgctgtaaattcagattcaaacttacaagntaggcttttggataatagtagacccactagtccatcagatattgcagcaggtggtgctggggagaggctttcaaatgaaaggcggttacaagtgaatgatgcagttgcagttggtgcaggaggttatccacttcctcagatgccgcaggtagcttctgaggaacaaatccagaaactcttatcaatgggttttgaaaggacacaagtagaagttgcaatagcagctgccgatggagatcttaacgtggctgtagaaattcttatgagtcagcagggctgatctgcaaaaaatataaggtcttacgatttttaaacaacaaatatccacttgagcttgatttcaagcggcttagttcttgcaccttgtgtccatattgtaattagtggtcatatccacaggagccaacaaagagcaaagaaacattatgaattggactaattgtactaaacttctgtttgaagctttctgcaatacatgaccttgctgaaaaaaaaaaaaaaaaaaaaaaaaaaa

SEQ ID NO: 22963 - DNA, 413 bp, Gossypium hirsutum
  Clone ID: GOSHI-09MAY01-C43278_1
gcagaaggcaagcattgcgggaactgctatcatgagcaacagctacgtatctacaggagcttcatggctttcaaacgcattcactgcagttgcgagggcagctgaggacgtaggtatgttgacaaaggagaaagttggaaaagcagaggaagaaaaaaagggttctgtctacaaggagagagcaaggatcatcgaagactttgcagagctccatcttgatgaatctaccaaggcagaaccttcagtaggtctagttgattcaacaactgataagcaagcttagaatgatatgaaatgattgcttttgaactttgattttccttcaatgccttgattctttcattggtgtacaatacactggtacatgggattggaattcaaaggaatttctgatatatattattatattgtct

SEQ ID NO: 22964 - DNA, 155 bp, Gossypium hirsutum
  Clone ID: GOSHI-09MAY01-C43208_1
cgcttaattcagcccgtgttatcagttttctctctctttccttgggaagcatacccttttgcaagatctaagctttaatattgaacttgtaagaacttatcaaggagtactcgactttggccacgtgaatttggacattatatgatttttagatt

SEQ ID NO: 22965 - DNA, 598 bp, Gossypium hirsutum
  Clone ID: LIB3582-007-P1-K1-A4
gtccgtctttcctgaacttaaacctattttgttattcaactttcctttttcccttttcttggtatcaaataaatatccctttttttaataaatattggatctttttttgctgtttgtttttggattcaggctttcaggatctgagattcttcacataagggttatggcgaatctaaatgcatcaacgtccttagttccttcagaatcctcagaacaaaggggatctgttgtggtggattcaaatgtgaatgtgcttccacctcctatgaaccagcaaaagcaaacctcctcagacggttccgtggctatcctttgggatatagagaactgccctgtcccaagcgatgtccgtcctgaagatgtagcggggaatataagaatggctttgcgagtgcatcctgttatcaaaggagctgttatgatgttctctgcgtatggagattttaatgccttcccaaggagactgagagagggctgtcagagaactggtgtgaaactcatagatgtaccaaatggaaggaaagatgctgctgacaaggctatcttggttgacatgtttttatttgctcttgataaccctccaccttcatctatcatg

SEQ ID NO: 22966 - DNA, 585 bp, Gossypium hirsutum
  Clone ID: LIB3825-015-Q1-K6-D5
aaaacagtagctctagttaacaaagcaaatcagttcctttaaacccatcacccaaaatacctttcttttgccacaggctttcaggatctgagattcttcacataagatatcggattggttttctctgacttaaggtttacatttcgttgtattggtttgtgctatttcttgccataaattttctgcttgttggttttctgatagaagagggttatggcgaatctaaatgcatcaacgtccttagttccttcagaatcctcagaacaaaggggaactgttgtggtggattcaaatgtgaatgtgcttccacctcctatgaaccagcaaaagcgaacctcctcagacggttccgtggctatcctttgggatatagagaactgccctgtcccaagcgatgtccgtcctgaagatgtagcggggaatataagaatggctttgcgagtgcatcctgttattaaaggagctgttatgatgttctctgcgtatggagattttaatgccttcccaaggagactgagagagggctgtcagagaactggtgtgaaactcatagatgtaccgaatggaaggaaagatgctgctgac

SEQ ID NO: 22967 - DNA, 564 bp, Gossypium hirsutum
  Clone ID: GOSHI-09MAY01-C78068_1
cccacgcgtccgaatttatagtcccacacagggatccatccttgcttccccggcagtggcgcatagccctgggaactcagaagtcatataaacaagatgcagccaaaaaagagaagcggcgactctatgaatctgaaagacgaaagcgtaaagctaccaattcgactaattggcaacatgcatctgataaagaggactgtcaatatactggtgtagagaattgcagtggagatgatgacatggataatgcagaggagtcttatgttcatgagggatttttagctgattggaggccgggtatttccaagctcttttcacctgaacatccttgctcgatcattggagacaagaacccacctaatgatatgcttacagaagagggtgcaaatgtcagagaacagtcaaatagctatatgtctgcagtcactcggcccttgagtggccataatctgggatctgcacatgtgttgaaccattctcagccgccttacaccttttctcattgtgcatctaatgcattgcagccaaaacactctgttcctaatatgatattcaatacctcta

SEQ ID NO: 22968 - DNA, 645 bp, Gossypium hirsutum
  Clone ID: GOSHI-09MAY01-C79978_1
cccagcgtccgatctaattcagcagtgagtgtacggcatagttaaaattttgtgaattagggttagtagcagtggccaaatggccaaccagttttacggttactcatccccatcaccttccgcctccactctccaccgttatctggactccgacgccgcgtctcagtctcagtctcatttgcttcaacaactccacccctccgctgctgccgctgccgctgctgccgcctcactcatcaaacgcccctctcaagttctctaccatcagaatgttttggatgcccaaaacacacttgggcagattgaagcttggtattctgctagctctttagtcaagcgacctagattggagagtgcaagcaatttacctatatatcctcaaaggccaggagaaaaggattgtgctcattatatgctcacaagaacctgtaagtttggagatagctgcaagtttgaccatcctatttgggttcctgagggtggaatcccatattggaaagaggttccacctgttccagctggtgaatccctccctgagagaccaggagagccagattgtccttattttttgaaaactcaaagatgcaagtttggttcgaagtgcaagttcaatcatccaaaagataaattggatgctcctggtga

SEQ ID NO: 22969 - DNA, 677 bp, Gossypium hirsutum
  Clone ID: GOSHI-09MAY01-C79828_1
caggtttatgagcacacccttaagctcaagaagctttagggtggaaagtactctaaatccaaagtcaagccttgggtcacagaaagaatcgaggcaacaagacccctatggtatcttcgacatggaagagtctattccaagggacattggcccttacaagaacctggtcatattcgcatcaaactctatggaccccaaatgcatttcaagttctattcctttacttaaaaagctaagggtgctgatgagcaatctccagaaagtggacctgagatcgttgacttaccagcaaaaattagcattctggatcaacatgtacaatgcctgcatcatgcatggatggtctccaatatggtgtgcctaataccccagaaaagtttttgacactgatgaacaaggcaactctcaacgtttggaggcaacacattatagtgcgcaagcaatggagcactatattctgaggaaaccagcatcttcaaacatgaaagaggcttatcagaaggatgacaaggatgatcaagaagccattgtccgcaaactttatggactccaattgatggatccgaatgtcacatttgccctgagctgcggaactcggtcttctcctgcagtgagaatatacacggctgatggagttgcaactgaactggagaaataatatagaatacttgcagctt

SEQ ID NO: 22970 - DNA, 510 bp, Gossypium hirsutum
  Clone ID: GOSHI-09MAY01-C79548_1
agaaaattggaccgtactgtgtggaatttatcaacatttcatgcatatgtgaattatcacgttaagtgctcagaagggtttatgcacagccggatgcggcggcgtgtggagtcacttattcaggctctgaattgtgccaaaccagatcaggagaagaccaagaaaacaccacaaacaagatctttcaaacgtctgaatctcaaggacagtcgaaccaattcaagttcataaatgtgctagctgttgatatgcccttgtcgttcgtaccaagaatagaagtaggtggactgccttcttgagtgaaaaatgatggtatgaaattattctatccgattttttttgcgaatgtggatactaactctacttttgaataggaatcctcgaatgtttgagttcaaaaaaaaattttttgaaaaagaaaacataagaaaaaaaaaaaatattttaactaaaaaaaaatccaaattgggaggctaactttaaaacaccaaaaaaaaaaaacacagaatt

SEQ ID NO: 22971 - DNA, 1308 bp, Gossypium hirsutum
  Clone ID: GOSHI-09MAY01-C79518_1
ccaaataccgtccatttggtgtttataaagatgctcggagcgtccttgtaattcataaccttgcgcatcagggagtggaacctgcagcaacctttaagaatttgggattgccttcaaactggtatggggcattggaatgggtgtttcctacatgggcaaggacacatgctcttgacacaggagaggctgtcaatattctaaagggtgccattgtgacatctgatcgaatacttaccgttagtaagggctatgcatgggaaataacaactgtccccgcggccgatggtttaaatcagctattaagcagtcggaggagtgttctgactggaattacaaacggcattcatattgctgaatgggatccatcttcagatgagcatattgctttccattattctgctgcttctctatctggaaaggttcaatgcaagactgctctccaacaggaacttggttttccaattaagcctggttgtcccttgatgggatttatcgggagactggactaccaagaagggcattgaccttgatccactgggcaattccagaacttatggaagatgatctacaatttgtaatgcttggctctggggacccactttacgaagactggatgagatcagcagagaatacttacagagacaaatttcgtggttgggttggatttagtgttccaatctctcataggatcactgcaggctgtgacatactattgatgccttcaagattcgagccctgtggactaaatcagttatatgcgatgagatatggaactgtccctgtagttcatgccacaggaggacttagagacacagtagagaatttcaatccgtacgccggagaaggtagaggtgaaggcaccgggtggaccttttctccgctcacaaaagactgtatgctaaatgcgctaaaaacagcaataaggacgtacagagatcacaagtcaacgtgggagggattgacgagaagatgcatgcaaaaggacttcacctgggaaaatgctgccattcaatacgagcaggtttttgagtgggcctctattgatccgccgtacattatgtgaattctatacatctctctcagggcctgttaatggctaatgaatcacagggacaaggacatagaagtaggcactattatgttttttcctccccgtctgggtataagctcccgttagctattctttgttgataagagtaattagtttgcaaaatgcacttaatttcattttaattttatatggttggtattacaaaagtaccactgtaatttttacaaacggagtaataaagacattactgccttgtc

SEQ ID NO: 22972 - DNA, 849 bp, Gossypium hirsutum
  Clone ID: GOSHI-09MAY01-C79498_1
gcaattaccactttatgaaggggtggtggagatttgacagccacagccatcggaaagcattggggttacgaggaaatgcaggtatggaaagatgttgatggtgttttgacctgtgaccctaacatatatcaacatgcataacctgtccagtatctgacttttgaagaggcagctgaacttgcttactttggtgctcaggttctgcatccgcaatctatgagaccagctagagagggtgatattcctgtcagggttaaaaattcttacaatcctaatgctccaggaactctcatcaccaggaatagagatatgagtaaggcagtactgaccagcgtcgttttgaagaggaatgtcaccatgctggatattgtgagcacacgcatgcttggtcaatttggctttcttgcaaaggtattctctatctttgaagatttaggtatctcagtggatgttgtagctactagtgaggtcagtatttctttgactttggatccatcaaaactttggagccgagagttaattcagcaggcaagcgaacttgaccatgttgtagaagaactcgaaaaaattgccgttgtcaatcttcttcagcacatctatcatttctctcattggcaatgtccagagatcctcacttatacttgagaaggcattccacgtattaaggaccaatggagtgaatgttcagatgatctctcagggtgcatctaaggttaacatatcattgatagtacatgacaatgaagcggagcagtgtgtgagggctcttcattcaacattctttgaaagcgatcctcctgaatagatcaatgaatacaattagatagtcagtcattggcattacaaaat

SEQ ID NO: 22973 - DNA, 532 bp, Gossypium hirsutum
  Clone ID: LIB3829-035-Q1-N6-D1
ctgttgaagttatttgaaatctattgctagtgttacagtgatcccaaacataattgaaactctctgcacactcctctatttctttttttgttgattcacctaaaaaaaagaaaaggacctatattacatcctcttctaaagatccatacctctcttgccttgtccctgtgatttttaacataaaaaactgtagatccttctttatatatacttgtatgtatcatattcatctttattttcggctgcttcacagagggggagatccttccttcgggcttttgttccggatgatatgtacttgcagatgactttgcaaagcaaatgttaagggggggaatgtaaaagggcttgtttatgtataaattagcagattgtcaccattggaactggtactctaactatctctctctattatgtgtgttgcttgggggagaaggggcctagatgacagcggaaatgccactagctatggcggaagtgaagggactatctggcagattgagtccgtcactctcctggtcgttgttgtcag

SEQ ID NO: 22974 - DNA, 435 bp, Gossypium hirsutum
  Clone ID: LIB3585-058-P1-K1-A10
cccacgcgtccgcaatctgctaatttatacataaacaagcccttttacattcccctccccccccgccctgtttaacatttgcttttcaaagtcatctgcaagtacatatcatccggaacaaaagcctgaaggaaggatctccccctctgtgaagcagccgaaaataaagacgaatatgatacatacaagaatatataaagaaggatctacagttttttatgttaaaaatcacagggacaaggcaagagaggtatggatctttagaagaggatgaaatataggtccttttttttttttagggtgattcaccaaaaaaggaattggggagggggggccaaaaagttccattattgttgggaacaactgtaccattaccaccagtttcaaattaccttaaccggccaagaatggcaccttgcagcaccttatcacccc

SEQ ID NO: 22975 - DNA, 601 bp, Gossypium hirsutum
  unsure (1)..(601): unsure at all n locations
  Clone ID: AI730491.1
gcccggtgactgtatcatcgatggtggtaacgagtggtatgagaacaccgagagaagaatccaagaagtttcaaataagggtcttctttacctcggtatgggtgtttccggtggcgaagaaggggctcgtaacggtccgtcgttgatgcctggtggatctcaccaggcttattcgaacatccaagacatacttgaaaaagtggcggcgcaagtcgaggatgggccttgtgttacttacattggcgaaggaggatcaggtaatttcgttaaaatggttcataatggaatcgaatacggtgatatgcagttgatttctgaagcgtatgacgtgcttaaacatgttgggggactttcgaatgatgaattanctgagatttttgctgaatggaatcggggtgagcttgaaagtttcttaattgagataacatcggatatttttagagttaaggatgatttgagtgatgggtttttggtggataaaatnttaaacnaaactgggatganaggttacgggaaatggactgtacagcaagctgctgagttgtctgttgctgcncctacgatcgcagcttcattggattgtaggtatntgagtgngttt

SEQ ID NO: 22976 - DNA, 409 bp, Gossypium hirsutum
  Clone ID: LIB3584-021-P1-K1-E11
ccagcgtacggtaacctgataaaattacgatggataagctcattgtgcatcacagatatatagtccaaacttagttgtgtcatctattctccaattatatatatgtactaaaataaaaaaggaaatattgatcataaccatttatactataagaagctgaattgtatgtatacaagaatagaaattggattaaagatgttaattgaaaataacatagagctatttttagagttaaggatgatttgaagtgaagggtttttggtggataagattttagacaagactgggatgaaaggtaccgggaaatggactgtacatcaagctgctgagttgtctgttgctgcccctacgatcgcagctccattggattgtaggtatttgagtgggttaaaggaggagtgggaaaatg

SEQ ID NO: 22977 - DNA, 627 bp, Gossypium hirsutum
  Clone ID: GOSHI-09MAY01-C79028_1
gctttttctttaatcttccttcctttctcaatttcggtgagcgaagtttcgatcgacagcaactccaactttcccttctaccaaaaatggctatgactattgaagtgcttgctgggctcgcttttatgttttcagctagtatactgttacaaattctggcttgtgcattatataacaactggtggccaatgctttcagctctcatgtatgtcctggtgccaatgccttgtttattctttggaggtggatcaactcagtttctaaccagtcgggatggtgggggatggatagatgctgccaaatttcttacaggggcatctgctattgggagttttgcaattcccattattctcaggcatgctcacatgatttcaactggtgcaatgttcatcgaatttacatcattcatcatattcgtttgcacagtcttgtgttttcaccgtgctagccttgaagacgactggtgatagatgccctcccggaaattttcacctacacttatgtacgtcattcacctagatctctgatagttcgtttacttctccatttgcaaaggaaatgaaacaggaacttttccctttttaaagcccttagtgtatatttttgaacaactgttggctttatttc

SEQ ID NO: 22978 - DNA, 633 bp, Gossypium hirsutum
  Clone ID: GOSHI-09MAY01-C79348_1
gcagtcgtgaaataaattgttagatgttgaaggttagagacaatatgcgtcttatttactggatcacgtggtggaattttcacaggcacaagtctctcataaaacctagcaaagaagaaaacggtggcttggcttgttcttttcttcttcacattttccagttttatttctcatctcaaaggaatattatttaaagattttccaaaaaaaaacaaaagtttatctgtctcaaatctaggtctaggagaggagaagcaaatttccccaaaaacccaattaaagaatcccaggttattattattattattattattatcatcattatggcattgacgctctggttcaacaaaaagatcgcggatccccttatccagatcctccgcaagggagcagaacccaagcagttggccttctcttcagccttgggaattactttgggaattttccctatatgccgggttacggggttgctttgtgggatggcaatagcgttgcttggatctcactgccatcctccaactgtaatgcttggtaatttcttggctactccgatcgagttgagcttggtggtgcccttccttcgctttggggaagcgttatctggtggacctcattttcccttaacttctgatg

SEQ ID NO: 22979 - DNA, 711 bp, Gossypium hirsutum
  Clone ID: GOSHI-09MAY01-C79228_1
cccacgcgtccgtgatggacaaaaacaaaaagtacaagatatccatgctcagaaactaaaatcccttgaagcacagattctggatcttaagaagaaacaagagaaccaagttcaacttttaaagcagaaacagaagagtgatgaagctgcaaaacgactacaagatgaaattcaatccataaaggcgcaaaaggttcagttgcaacataggataaaacaagaggcagagcaattccgtcagtggaaagcctctcgagaaaaggaactgttgcagttacggagagagggccggagaaatgagtaccaaaggcataagctgcttgctttaaatcagcgccagaaactgggtcgcgcttaggaaaactgaggaggctgccatggccaccaagaggctaaaagagttgctggaagctcgtaaatctgctgcccgtgataactcggctattgccaatgggaatggaacaaatgggcagaccaatgagaaagcgctacaacgttggctagatcatgagttagaagtcatggtgaatgtgcatgaagttcgctttgaatatgagaagcaaagccaagtgagagctgcattggctgaagagttggccgtgttgaaacaagtagatgagttagattcaaaggggccgagcccttcaagaggaaagaatggatgtgctaagggatcctccttgtcaccaaatgcaagagtggcacgaatat

SEQ ID NO: 22980 - DNA, 913 bp, Gossypium hirsutum
  Clone ID: GOSHI-09MAY01-C74978_1
gacaaagtcagatgtttctggcattgtcataataccagttcatgactggttggggtttggttttcttgggttggtgtgtctggtttttttttttttccaggagggatagtttcattactcacagagttctataggcacgcataaacagaggagagttcaagagcggcaatcatgggagccaacacttttcaaccaggctcatctcatacaaatttacaagtaccccaattcaatccccatgacatccaagcattttcacttaagcaagagcagcatcaaaggttcactcctctcaagcctgatattcctccatggctcgcgacccaaccaatgctaggggctggggctggtctttcctcatcatcatcttccattttctcccctagtttaacacttcatgagaatcccacccctatccctactcttgatccgactcttcctccctaccatccaacaacagtactttccccacacatgtcagctactgcgttgcttcagaaagctgctcagatgggtgcaaccctgagtaacaaacctggctcatcatccgcgccagctactactactgctatgagaccccacctacaaactcaacgtgtctgctgattttgttgccagcaccaacaacaacagcacaacagctggcttttggtctcaacttgctttcactaaagaagtcttagggaagttggatttatccatggttcgactcatcatgcagctgaagcttcaggtgctcctcacctcttcccttcttctacaggcatgatgatctttgctctccattggatttgattcacttctttgatgatatcattagggggattttgacgccaagaacagagcggactctatcatgatcatctcgaaacactgcgcaccaaatgcactggaatatatgacctaaataacg

SEQ ID NO: 22981 - DNA, 549 bp, Gossypium hirsutum
  Clone ID: GOSHI-09MAY01-C74458_1
gtttcaaaattttgtgggtcattatgcacaccgggaaggttcatgttgctcttgttgccagtcccggcatgggacatcttattccggtgctcgaactcggaaaaagactagtttctcatcacgggattagtgcaactatctttgtagtcacgatggatgcctctttgtctcgatcccaactcctgaaagtatcagggatcacggatgatttccttgatgttgttttgttgccggctgtggatatttcggctcgggttgataaaaccactgggatcttaaggcagatggcgatgatggtccacgaggctttaccgagcttacgatccgcgatattagcgatggaagtccaacccatcgctcttattgtcgacatgtttgcgaccgaagcttttgttgttgcggaagagttcatgatgttcaagtatgttttcgtcactactaatgcttggtttcttgcccttacagtccatggaccgaacctcgatagggaagtggatcaagatgatcacattaacaatcaaaagcctattcacattcccgggtgtgaac

SEQ ID NO: 22982 - DNA, 661 bp, Gossypium hirsutum
  Clone ID: GOSHI-09MAY01-C74408_1
caaaacctaagctattctctctgttatccggccgaaccgaaggctcctttcaactgccgttttgcctctatactcgacggacggtgctaaatctgactctatctggagtcgtataatccccatttgaacttcgatttcaacgaagcaaacaaggactcgaaggcgttcttccaaaaaaaaagaaaagataagtccgtttccttcttatattttgcgtgaaagatttatgtgccggaacaaaaaaaaaacaaatcgaaacatggagaaataaatctgaaatcaccttaatttttgattgcttctttgtattcagtgtgtaatgtgttttttgtgaaaagatcccatttacattcgatttcattggctttttataaccgaataaaaagaataataataaaagtacaagaaaatttcccttagatctatttgctatcaacctgttgtggtttgttagtttggtgtaggtacgaacggagccaggctgcctgaacgaaggcccacgtacagcactggagtaaccgcaaaagtttcctgaaccttgctcgggtcctgtgattcgaactgctgagggcgaaggccgttgctgcaacgcaatgactagggttctagtttttggaacagaaaatcaggccatttgggctcattttagaaatgggctatt

SEQ ID NO: 22983 - DNA, 755 bp, Gossypium hirsutum
  Clone ID: GOSHI-09MAY01-C74018_1
cccacgcgtccgtgggcgcagtaaatgggatgcatctcaatggaaaggtggatgagacttgcatgcagtcacgtgaaatatggactggtgttacctatgctgtagcggcaaatatgattcttgctggaatggagaaagaggcatttgctacagctgaaggcattttcattgcaggctggtcagaggagggtttcggatactggttccagactccggaagcatggacaatggacggccatttccgatcccttatatacatgaggcctcttgcaatatggggtatgcaatgggcactctctatacccaaagctatactcgacgcccctaaagtaaacatgatggataaaatcctgatatctccggcaacgttttcattgtctctcaccgagaccggagttagaaagattgctaataaagccaagtgcttcgggaattcggtattgcattgtgcatgctgatcatcatactcatgtagaaccccgacatgttaaattaagttgtcatcggcttcccttttaaccccattttcagcagaaattagaagctggtgcaggtttatagggaagctgggaataacataactgagcggcaaaaacgtggcctagcaaaagaaaaatagtgagccattctgataactaggacttgtagcacatttttttcttcttattcttattcttattaagaaaatgtgattttttcaaaaaaaaaaaaaaaaaaaaaaaaaaaaaaaaagaaaaaaaaaaaaaaaaataaaa

SEQ ID NO: 22984 - DNA, 557 bp, Gossypium hirsutum
  unsure (1)..(557): unsure at all n locations
  Clone ID: LIB3825-028-Q6-K6-D10
gtcttttaaaaattttcagttttagagtatgatgtgtatgattttggttgcagtttgggatgaattggagaaagaaaacaaanagttctttgaggcatacctaaagggcagagatcagagagcaactgaaatagagaaaaggcaaaggattcagaagaagcttaatactttctcgagtactcaatagaaaatttttaaactagatttttgagttttgaatctagattatcatcatttgaataacccaaagacatgaaacggcgccgtgtgaattggtacagtagttgggaaacgtgacggtatgtggcattgtgagagcaatatatggacaagggggttgcatgagttgatggcacgttgcataaacgtggcaccgccctctttgtttcttttgtaattgggtcgcttatttacacgtttaacgacaatctaagctatgagtgcatgttttgctagctttaacaattgaaagttaaatagggatctggggaccatgttcaaaggagacgacgttgcgtcaattctcaagagtcccatgtttttagtgtttttatagc

SEQ ID NO: 22985 - DNA, 503 bp, Gossypium hirsutum
  Clone ID: LIB3583-037-P1-K1-B1
caagctgattcttccttgtttggtagctctcttactagctacttttttttatttctttgcttcattgtgtatctgctgccttttcacctttatttctttctgctagtttcttctccatctctgtttctctatatatttccaactcttcgagctttatctacaagtctaggcagtagaataagagatttatttagaacttatagtaatttgtctgattaatgggcgactcttctgcttcatgtatcaacttggtgcagcatcttatagaagagtgtttgatattcaacatgagcaaagaagagtgcatggaagctttgtctaagcacgcaaacattaaaccagtcattacttcaacagtttgggatgaattggagaaagaaaacaaagagttctttgaggcatacctaaagggcagagatcagagagcaactgaaatagagaaaaggcaaaggattcagaagaagcttaatactttctcgagtactcaatagaaaatttttaaa

SEQ ID NO: 22986 - DNA, 584 bp, Gossypium hirsutum
  Clone ID: GOSHI-09MAY01-C74338_1
ccgactccggtattgcgtttaccctgcggagtgcgagcttctcaactaccatactaaacattactggtagagactatcccccaaaaatggcaagttccagcgcctccttcatcatcatcatcatcaccaccgtccttttgccatccctctcttcacagctgtccgatctcttcccttccaacaacccgccgcccttcctcggcaagcattcgcacccaatcaaacaacccaaccaccaccaacaataccgttatgaaacccggtatttttcccaaccggtggaccacttcagcttcttggacctccccaggtttccgacaacgttaccttatcaacactgaacactgggtcggcccttcccgttccggcccaatcttcctttactgcggcaacgaaggtgacatcgaatggttcgccgttaacaccggttttgtatgggacatcgctccccgcttcggtgccatgattctattcccagagcataggtattatggggactcaatgccgtttggaagtaaagaagaagcttatagaaatgccactaccctttcttatctaacagcagagcaagcccttgctgattt

SEQ ID NO: 22987 - DNA, 614 bp, Gossypium hirsutum
  Clone ID: GOSHI-09MAY01-C75878_1
gtttatcaattcaacaattgtcctctcatgtttatgtttttgggcaactgatgaattcctttatgcaatgggtaatttgcgtctgataatctttactgatgctatcaccttggagacctgatgcccttttcttgcgttacttttaaagcattatgtgctttgtcttttctaatttgaattgccttttggattcataattagcttgtcaagttgggttcaggttttatatcttatatttgagttatgattaagtgtatatctgtatattgactgtatattgattcaaagtgtcattgtactgcatgtgacatctcgtaacaactatttagccccagttttgtttaaggggacctgtaatactgaatggaaccttaaatgggtttgctgattttcttttttcttgagttctagtcttctccagtggattattaacggtgcataatataatgtcacctcttcagaattgtgtgcgttactttttaataaaccttagttttgatttacgcttctcatgccttcttcaagacaatctctgattttggtcagatatgctgtaaatgcttaatggatgagcaaccttggcaaggggactcggaagactttttctctcgctt

SEQ ID NO: 22988 - DNA, 888 bp, Gossypium hirsutum
  Clone ID: GOSHI-09MAY01-C75588_1
gaaataagatcactaaacggattaggtttttaggagtgtatttcagttcatataatttacgtattgacttttatcggtcagttttcctagtgcagcctggttcagcaccaaagcatgcacctaagaaggttaaatcaacagtcaaacttgacaagctggatgatatgagcaaggagtgggttgactctgatttcttgatatttaattcaggtcattggtggacgccaactaagctttttgatatgggttgctattttcaggcaggtagatcactaaagcttggaatggggatcgcatctgcctttagaactgcattggagacatgggtatcttgggttgagtcttcagtcaacagaaacagaactagggtgttcttccggacttttgaatcttcgcattggataggtcgaaaccgtaattcatgcaaagtgactcgacgcccttggctgaaaactaaagggagagaccatagccgaatttctgacattataattgatgttgtaaagaaaatgacaactcctgtgacagtgttacatgtaacccccatgggagctttccgtagtgatgctcatgttggcacttggagcgataagcagtcggtagctgattgcagccactggtgtcttcctggagtgcctgatacatggaatgaaattctcctatcaatgatgctctccaaggatggagtaaccgtttagtgaacaagaacttgcaatccttttacttctccttcccacccccctcctccgttctctgcattaagaaccatgttgctgttgaaattcccctcttgagaacaaggataaattagggttgttcgtacccttaatgaaatttatacaattattctgttgtgttgccaaaaaaggctcgcccagccgacgggaa

SEQ ID NO: 22989 - DNA, 599 bp, Gossypium hirsutum
  Clone ID: GOSHI-09MAY01-C75768_1
ctgaagtcatggctcaaagccatcgccgtgacgtaacctccgccgtcttcctccgatcgaccatcttcaccactgttatcaccatcattaccattcattgaatcaacctcccatttatttcattttccacacattttcaatttctaagcataaaaatccttatccaactcaaattcaaacgttatctagactttgggttgctgttttcatttggtttaaaaatggctattttgaagagctatggagcttgcttgagagagtcttccttccagtttcctcgctcccatcgcatcgataactacaagaggagaaatgtgaaatggaggtcgccccaagcagcaataatacccgatttccacctccctatgcgtagcttcgaggttaaaaataggacatcggccgaagatataaaggctcttcgactgataacagccatcaaaaccccatatctacctgatggaaggtttgatctcgaagcatacgatggtttggtgaatatgcagattgaaaacggtgccgaaggggtaattgttggtggcacaaccggtgaaggccagctaatgagctgggatgaacacataatgcttatcgggcatact

SEQ ID NO: 22990 - DNA, 643 bp, Gossypium hirsutum
  Clone ID: GOSHI-09MAY01-C75688_1
ccccgcgtccgatttgttttgagagatgggttgcgtcttaggaaagcaatcacaatcgtcttcatcggatcgccggcggcggagaaacagcgaagctccaccaaatccttcacgtgctcgtcgtcgccggagctctgacgagtcatcatcagttgtttcagtcatcgatgctgttgacggtgccatggatgtcaaaggactggaggggagaagacaacagcagcgaaaagctagacataccagtgatttcccggtgagcgttccggcgccggagacatggcggacgccactggacgcgaacctgcaagggtggccttcgtggctgatggccgtcgctggggaagccatccgtgactggaccccgagacgcgccagcaccttccagaagcttgacaagattgggcaagggacttatagcaatgtgtacaaagccagggatctactaacagggaaaatagtggcattaaagaaggttaggtttgacaatttggacccacaaagtctaaagtttatggctagagagattcttgttttaagaaagcttgaccatcccaatgtaatcaagcttgaaggtttagttacctcaagaatgtcttctagtctttacttggtttttgaatacatggagcatgatcttgctggc

SEQ ID NO: 22991 - DNA, 1050 bp, Gossypium hirsutum
  Clone ID: GOSHI-09MAY01-C75648_1
tctctttcttgccttgcccttttactttttcttgcagatcagatttatcttccatgatatttctttcaagttttctgccttcggaatcggttgcgtcgcttcacgaacttcgatttgatgtaagattttctacgataggagtattattgttaccggatctatgttttacattgcttcaggtgctttagagttgggaagcaggcgacggatggcttggtgtatattaatttggaagatctttgccttttacggagggttggtgaaggattagatacttggatgaggatttggacgaatggcgttgttctttccgatgttctaattcagccgtctgatctatggccgatgtgggattcacaggttgttatgcttatgaaaaggatgtgtaagatgtcagggcaaaagggccttaatattgatttggaaggggctgagtcctgatctatctttgtcatccaagacctttgccatgacaggtgcgcttgcattgcaggtaacccaaatttaataaaaattttattttcttggtgtttttgaggggagttcgcatcggggttgcccgggttctcccctctgctgtggtgtggtgtttcccgctcttttatttttttttctttctcttttctcgctttccactgtttttcctttgatactctgcaccattcgggatggattcatgatccaattcatcatcaccatcatcatggtctacatggaataagctcatgatctccaaaccatcgatcgcaaggccaaggtattctttacatatttaaaaccaaaatttgccctatctaattttacttttaaaatttaaatatgttttctaatctaactattgtcattacttttcaacatatttttttcttattaaaaatcactcataaatttttttgaaaggaattcactaattatttaattaaaaataaatccatttataattatatttactatctttgaaaaaaagtaccaagttaatttaatactatattaattgttttctttagagtgttattgggatgaagagccaatggttttatttctggcttt

SEQ ID NO: 22992 - DNA, 757 bp, Gossypium hirsutum
  Clone ID: GOSHI-09MAY01-C75618_1
gggggatctaacgtggaaagcgtagcacccaccgactcaccctgccgacactaaactctgggaaaaccattcagatgagagttttatgattgttaaatgaaacttgaaattgcaatatccctctcctttgcttgccttgggactttgggttgttagttaacgaaaagacgatgaggtttttccttcacacccacccacaattaatggcgattcccatgagactccaatcatttgcttctgctcagaaatgggaaggtggggtttcaatggttcaaggagcttctcgaggaattggtctcgaatttgttaaacaactgctggaaaagaatggaaaagggcatgttattgccacgtgtcgtaatcctactaaggcaacagcgcttcttgaattaaaaaatcagtttgctgaacgccttaatgtcttaccattggatgtgactgttgaaagtactatagaggagtcagcaaggtccataacaaaaagatatggctctcttaaccttctcattaatgcatcaggcattctttcaatacccagtgttctgcaaccagaaactacactgagcaaagtacagaagtcatccatgatgcttgcttatgaggttaatgctgtgggtcctattttattatcaagcatatgtggcctcttctgaaagttggaggactgcttggcactgacagggatgttgcagttgtggcaaacataagtgccagagtcagttccattggtgacaatcgtctagggggctggcatata

SEQ ID NO: 22993 - DNA, 668 bp, Gossypium hirsutum
  Clone ID: GOSHI-09MAY01-C75378_1
acgcgtttaggtaaatatggaggaaagcctcgtcttggtggtcctaggtcgacattgtgcatatcgtctcaggttgggtgcaaaatgggttgcaaattttgtgcaactggaactatgggatttaagaacaatttgacgtccggagaaattgtggagcaattggttcatgcttctcttttaactaacatacgcaacgttgttttcatgggaatgggagaaccactgaataattatactgccttggtggaagctattcgtgttatgacaggatcaccgtttcagctgtcaccaaagagaatcacagtatcaacggttgggattattcatgctatcaacaggcttcatggcgatctaccgggctggaacctagcagtttcattgcatgcgccagttcaagagatccggtgtcagataatgccttcagcaagagcttttcctttggaaaaactaatgacagccctgcaaacatatcaaaagaacagtcagcaaaaaatattcatcgagtacatcatgcttgatggaatgaacgatgaagagcagcatgcacaccggctcggcaaattgctggaaacttttcaagtggttgtaatttaataccatttaatccaattggtagctcaagtcaattcagaacccagagtgacccaaaagtatcagacttccaaaaa

SEQ ID NO: 22994 - DNA, 803 bp, Gossypium hirsutum
  Clone ID: GOSHI-09MAY01-C76948_1
tgacaaaaatggaaacagaaaattctaaagaaaccggtgaaatcgaaccactcttacgggacccaagggatgagcctaaatccgaagccaaccccaacccgaatccgaccaccgtgaagacgagagtccccgaagtagagatccgattgtatcgacaaggcaagggtccgatcgacgtgttcaagtcgagcttgggtggatgggaccagaaccagcttgaggttcgagacatactcgacaaatacggcttgaaatcgatttacgctttcagtccccagtcgggtcgtggcgtcccaatccgctttcatcccagaaatgggaggtctattcttggatacaaggacggatcggtggttcacattgacggcgagccacaggattcattaatcaaacctgtaaccaaggtcttggtaggagtagcagctattacacttctgataactctggtagccaaggatactccggaatggatgaagaaactaaagatttcgggcggagatttccctccttggctcctcgcttgtgttattatcgtgtttaccccctgaagaagaaaacgaaagatttcttaaaatttttggttggggaatggagaaacccttgaagccatttcttaccccccagataagatacccatcgttgttagatctttgtgcttaccaaaagttttttcacctatataataggtggatgtgttggaacgctccacgcctatgtaataatagtgccagaaagatgtgttggtaatccgctaaaattccatcaaactcatgttcctaatcttctgaaatttggaagtaaac

SEQ ID NO: 22995 - DNA, 585 bp, Gossypium hirsutum
  Clone ID: LIB3829-018-Q6-K6-E4
tcggtaaccaaccccaacccgaatccgagcaccgtgaagacgagagtccccgaagtagagatccgattgtatcgacaaggcaagggtccgatcgacgtgttcaagtcgagcttgggtggatgggaccagaaccagcttgaggttcgagacatactcgacaaatacggcttgaaatcgatttacgctttcagtccccagtcgggtcgtggcgtcccaatccgctttcatcccagaaatgggaggtctattcttggatacaaggacggatcggtggttcacattgacggcgagccacaggattcattaatcaaacctgtaaccaaggtcttggtaggagtagcagctattacacttctgataactctggtagcaaaggatactccggaatggatgaagaaactaaagatttcgggcggagatttccctccttggctcctcgcttgtgtagttatcgtgtttacacgcatgaggaagagaacgaagaatttttttaagaagtttggttggtgtttggggatacccttggagtccattcttagcccacatccgtttctcttcatttttaaatcttttggcttaccaaaa

SEQ ID NO: 22996 - DNA, 723 bp, Gossypium hirsutum
  Clone ID: GOSHI-09MAY01-C76968_1
catggaatagagatacggattgctagaatcttcaatacgtatggcccacgcatgaacatcgatgatggacgtgttgtcagcaatttcatagctcaagcacttcgcggtgaaccactgacggttcaaaaacctggaacacaaactcgcagtttctgttatgtctccgacatggttgatggtcttattcgtctcatggagggggagcacactggtccaatcaatattggaaacccaggtgaatttaccatggtcgagcttgctgagactgttaaggagcttattaaacccgatgtggagataaacatggtggagaacactccggatgatccacggcagagaaaacccgacatcacaaaggccaaagaattgctaggttgggagccgaaagtcaagttgcgggatggtcttccgctcatggaggaagatttccgattgaggcttggaatctctaaagagtgatcaaacctattagcggattatactaatagagatgagattcacttcttgcggggaacaatatctccagccttcagtctttgttctccaatacctcctattggtctttactatatcaaaggaaaaaaaaaaccatagccattgaaagtaggaattttgtgcaactattttaattttcagtccttaaagtggacattgatgatggtcttgatgccatgaattttgtttgccactgctatcaataaaaaaagaatcgtgattatctat

SEQ ID NO: 22997 - DNA, 513 bp, Gossypium hirsutum
  Clone ID: GOSHI-09MAY01-C76588_2
cccacgcgtgcgcggacgcgtgcgcggacgcgtgggcggacgcgtgggctcgccgcatcagccgcctcctgcggcccgctatcatttcctccaccaacgagggctacagctccaacagcatcaagctgaaatgttgtctaggaagagtaatagtgggattaacttcaactttgatagctctagctgcacacctaccatgtcatcaactaggtctttcatttcttctctgagtatagatggtagtgtagctaacatggatagtgggaatgccttccatttaatcggcgcacctcgatcctcggatcagggttcccaacacaaaaagaagtgttctggtaagggagaagatgggagtgtcaaatgtggaagtagtgggaaatgccactgctcaaaaaagaggaaacatagagttaagagatcaatcaaggttcctgctatcagtaccaagcttgctgatattcctcctgaagattattcatggaggaaatatgggcagaagccaatcaagggttc

SEQ ID NO: 22998 - DNA, 755 bp, Gossypium hirsutum
  Clone ID: GOSHI-09MAY01-C76588_1
tttatttcttccttgagcatagatggtagtgtagctaagttagatggtgtgggggtttccttccatttcactggagggtctcgttctttggatcaaggtccccgacacaagaagaagtgctctggtaggggtgaagatgggagtgtcaaatgtggaagtagtggtaaatgccattgctccaaaaagaggaaacatagagtgaagagatcaatcaaggtgcctgcaatcagtaccaagcttgctgatattcctcctgatgattattcatggaggaagtatgggcagaagccaatcaagggttctcctcaccccaggggatattataaatgtagcagtatgagaggttgccctgcgaggaaacatgtggagaggtgcttggaagagccgtcgatgcttattgttacgtatgaaggtgagcacaaccacccaaagttaccgtcacaagcaaccacataatctcagtggaaacattgctaaagaattcttcaagtctttcaatgttcaatctggtcatgtacatattttgcatggttcaagcatgggataaataggagcagtttctttcttcttttctcccttctttttgaggggctttggaaggttggctttccaagccttttctaaaaattcggcagccgacattaaaagcctagtgctggaccgaaacgagattgtggaattgaggtttaaattgtaaagaactgttccatcttccatggcaatgaaaagcttgaaaggggttgaactttttgaat

SEQ ID NO: 22999 - DNA, 607 bp, Gossypium hirsutum
  Clone ID: GOSHI-09MAY01-C76548_1
aatttgcataaccaaaacaagtgttttaactcctccttacaagcagaatcaatttatacccatttgttcaatttaattgaaatggaagataccaccattcaacctcttctcaccccctacaaacttggcaaattcaatctttctcatagaattgtattggctccattgactagacaaagatcttacaataacgttcctcaaccacatgccattttatactattcccagagagcttccaaaggaggtcttttgctggctgaggctactggagtttctgatacagctcaagggtatccagatgtacctggtatatggacgaaagagcaagttgaggcctggaaacccattgttgatgctgttcatgcgaaaggtggaattttcttttgtcaaatttggcatgttggaaggtttcaaatacaggttttcaccaaattggacaacctcaaatcttctgttatgaataaggcgtggacaaaactgcgagctattggagtagatgttgcggaacttcttcactccgaagcgattacggactgatgaaattccccaaattgtcaatgatttcaaatttgcgcaagaattgctaatgaaacctgttttgatggaa

SEQ ID NO: 23000 - DNA, 769 bp, Gossypium hirsutum
  Clone ID: GOSHI-09MAY01-C76498_1
ctgttttcggttcccacggcaccaaaagatcccatactaattaacgcatgtttcgaacaaaaaacaaaaacccaaaacttcagatccctctctatttgtttgttccttcttcctctggaaattctttccatttatacaaaaactcaaccccaaaaagaaattcaaaggaaaaagataaaattaagcaatcatggaggtggagatggacatgatggagaacttgccatctaccatatccccattactcctccggtcgatggcttcttctgtttttacttatgctgacaaattgttcatcaacttagctgagtaattcaagccctttgaaatcattcgttatgttctcatcacttcctttctcttctttcttcgtttactttcttttcttttcctttccgatttaccccctaaatcccagtcgcatgtttatacgtttaatcctcccaaaagcaacgaccgctatttgattggttctggggtcagcgattccgggatagctcgggccctttcgcaggtactatcgattgttaatgacattcctgttattcgaggaagtacgggatcgttcggtctttactgaaggacttataaaaaaaaccgtagggaagatgctgaaggtttacttgaattgaaccggcggttttgtcttcggctttttcgaagactctttcttatcttgaggctgctatggttgattgggggcaaaatagatcggtcataatggtgctggaactgctccggttcattattgggtgaaaagggctttacc

SEQ ID NO: 23001 - DNA, 641 bp, Gossypium hirsutum
  Clone ID: GOSHI-09MAY01-C76698_1
gaacactgtaaataaagctgccatgaacaaagactcagtgatttcgtgctagtattttactcgaacgttcttggcatctttatgcttgccccatgtattatcatcttctacagaaaaagaagcccaccagtgcttacatggtctaccatctgcaaaattttccttctaggcgttctcagttatggaggacagatatgcacatatattggaataggatatggatctccaactctggcatccgccatggctgatcttactccagccttcactttcatcttctccatcatctctcggatggaaaagctggacttagggatcaaaagcagccaagccaagtctttaggaactttggtatcgatcacgggggcatttgttgtgactttatacaaaggccttccactcaccacttctccaaggaagtacagctttcttcaccaagttcttgggattcctcactccaactggatcattggcggctttttcctagcctctcatagtgttatcttcgcaattattcttaatgttcagacgtggataataaggagatacccagcagagatgctagtaacactcatttgcagcatcattgtggccatcctatcctctgtgtctctttgatggtagagaaggacccaaatgct

SEQ ID NO: 23002 - DNA, 579 bp, Gossypium hirsutum
  Clone ID: GOSHI-09MAY01-C76008_1
ggccagaacggcctgctgcaccaacttcttcgaacagagcatcgtctcaagttgaagaagctcctgctgaggctgaaccaaagtttagcgcctttactggtacgggaagacgcttggatgggaagcctctgaagcagcagtctccaccagcttcttcatccgggtcaaaagacaaaggacctgctatttctaatgggaataatacccgaccttattcgggatcaagttcacaagctaccgcaggccaggctcaagggaaactcatattcggatcacatgtcaaccgttctaaggatacaaaacaggaatccggaaaagagactagatcggagcagcctgaaaagaaggaagagccaaagttccagccatttacagggaagaaatactctttaaagggttgattatattcatccacaattcatttaccttgggttgtttcgatacaggaaaacaccgtaaccatactttctggacattgtattatcgaaaaactgtaggttctcgtgtcaaaacgaagtgattccgttgtgaattttaaaatatttcaaagaacagaaagagaggattctacatgctggt

SEQ ID NO: 23003 - DNA, 731 bp, Gossypium hirsutum
  Clone ID: GOSHI-09MAY01-C76028_1
atttgaccttgctggcatcatgtgtggacaatttggcattccattctgggagttctttctctcaacattgattgggaaggcaattattaaaacttacatacagatggtttttattatctctatctgtaacaatcaactccttgattggatagagaatgagttgatttgggtgctcggcttcgtacctggatttgatacattcttgcccacacttacagcaaaacttcatgcagccaaagacaagtacttgtccacctcacaaccgctgccttcaaatatcaaggggaagtgggatttatcatttgcttcgatctggaacactgttgtgtggcttatgctaatgaacttctttgtcaagattgtcaatgcaactgctcagagatattataaaaaacagatggatgagcaggtagatgacaacgtgtctgcttcaactcattccgattaagaagagtctgactgcatttatctcgataaaacagttgtattagtgaacttcaaggtaacctgtctttccataagttattacccattggaactacttcaaaagaaacccctgcactaagctagtcccctgttagaaagtttgtatagacagaacaaaaattaggaacaccgacaacagaaggtagaggtttaattttattatatcccatgtaatgcttgcgctggggttttaatcattgtttttggactgtattttcttcccattgttaaagcactgtttcata

SEQ ID NO: 23004 - DNA, 742 bp, Gossypium hirsutum
  Clone ID: GOSHI-09MAY01-C76218_1
ataaatcaatgcttgtcccacttatgcaagaggataagagaactggtgaagggacccgtaaagggttttattcatacgacaataaacgcaaacctagtcctgatcctgaactatataaatacatcgagaagtcgaggagcatttcaggtgtagctgttgaccctaagtttgtgaaattgtccgataaggacatcgtggagatgatattcttcccagtggtgaatgagacttgccgggttttagccgaaggtattgcagtgaaagcggctgaccttgacattgcttctgttatgggaatgggatttccaccttaccggggaggaatcatgttttgggccgactctctcggatctaactacatttattgtagactggaggagtggaccaaaatgtatggagaattcttcaagccttgtgccttcttggctgaaatggcagccaagggtgctccattgagcgcgccggtggagcaggccaaatctagattataagaaagttttcgattgcggcactgcccatttctcaagctctctcctttgccatggctacacagatatgagttcaataagcatgtttacattgttaatatattcaatggatcatctttttttccccttaaaataattttattactttgattggatgggtttatttggggtataaacacatgtttgcagcactctttatgtaaaagctgacaggatctcagttgttatatgaagccttagtttagttttgggat

SEQ ID NO: 23005 - DNA, 387 bp, Gossypium hirsutum
  Clone ID: GOSHI-09MAY01-C77948_2
ccctcgcgtccgggattttggcttggagaaatcggtacttgaagtgagttttcgggatttcgacttttatggcaatcggctatggaggttttgcggaggatgctgccattttcatggcacttgcagcagctgttgacctcagcattgaggcatgcaagcctttccgaagaaagataaggatagggtcccgccattctttatgaaaaaaaaaaaaagaattaaggtgatgtatttccatgaacaaagaatggctctatatttgtgttgatttgtgtaacatttggcactgtgtatagatcttgtggttgataaattcctagacataaccaatatagtggaaagaagacttgaaaaaaagaaatgaatatgaaactaatggggcggccg

SEQ ID NO: 23006 - DNA, 805 bp, Gossypium hirsutum
  Clone ID: GOSHI-09MAY01-C77948_1
ccacgcgtccgcccacgcgtacgatttagtcgagacagggtagcaaaggtggacccattaggcacttattggacaggctcagctgacagttcagacatagagacggcgagaagagaaaggaaaggatggaaggtgaagatacacgatctctctgggtcggctgttgcggcagccttcataaccactccttttgttccatcaacaggttgtgattgggttgccaagtccaaccctggagcttggttgattgttcgtcctgatatttgcaggccagagagttggctgccttggggaaagcttgaggcgtggcgcctgcgcggccgcagagactctatttgctgccggtttcacttgctgtccgaagcccaagatggagctgaggttctcatgtccgagatactcattagtgccgaaaagggtggggaatttttcatcgatactgaccgacaaatgcggcagggaccaactccaatacccagtccgcaaagcagtggggacttttcagcattaagcccgattgccggtggtttcgtaatgagctgcagagtccaaggggaaggtaagagtagcaagccattagtgcagctagctatgcggcatgtgacttgtgtggaggatgctgccattttcatggcacttgcagcagctgttgacctcagcattgaggcatgcaagcctttccgaagaaagataaggatagggtcccgccattctttatgaaaaaaaaaaaaagaattaaggtgatgtatttccatgaacaaagaatggctctatatttgtgttgatttgtgtaacatttggcact

SEQ ID NO: 23007 - DNA, 889 bp, Gossypium hirsutum
  Clone ID: GOSHI-09MAY01-C77808_1
cggccgcgtgggcttttggagagaaagaacggccagtgctatcaatttttcatcttcgccgcctttgtctgatgggaattcttttatgtcttcattaacaggggacactgatagcatgcatccatctttgtcttctggttttcaattcactagtcctttccatatcccctgttctggtaaacctcagttttcttcctctttgaagagaaagtgtccgcccacgcgcgcggctgctctcaagtgtggatcttcctctagccggtgccactgctccaaaaaaaggaaatcaagagtgaagagagtcgttagagttccagctattagcagcaagatggctgatattcctcctgatgactattcctggagaaagtatggccaaaaaccaatcaaaggttctcctcatccaaggggctattataagtgtagcagcgtaagaggctgccctgcaaggaaacatgtagagcgagctatggacgacccaatgatgctgattgtaacctatgaaggagatcacaatcatagccacatctcggattccccagcacctttggtccttgagtcttcttagtcccgtcttgatccatcggacgcacccccccccctccttttcaatggtcatctaaatcgagccagccccctgaagtagggttgttcagatagtcaactgtccaacaggacaattagattgattaggggcgatatttgttgtttaaaaggacaatataggattccccattcttggttttgcccaaagacaatgttaagtaggactagtagggggtgggttcttttcatcgttctacttattaaagttgttatactcgattaccagaatttttgttcatttcatatataatattattcaaatatggtggtggatcttgtcgag

SEQ ID NO: 23008 - DNA, 1169 bp, Gossypium hirsutum
  Clone ID: GOSHI-09MAY01-C77578_1
cccgggtcctcccctcgccggtccggtttaaagttaaggggaattaattgttaatattaggaaagaaaaagaaaagcgccagaggaacaaagatgcagtgtgggatccaacaaagcgaaattggaagctgctctgacgagatgcggagctccgtttcggtttcggttacggatcggaaagagaccatggtctgcccgaaaccacgtcggttgggtcttttaaacacccccttcaacgaccaccctgttaggtccctgagatggcaactcagccatcaagtggagctttgtgattcaaaagaggagagtgatgctttggattttattcttacaaagggtggatgtggagtggaacaaggttgtacacaagtagcgttgtcgcccccatttttttgtgggtcgccgccgagcagagtatctaacccgttaatacaggatgctcgatttggggagcagaagattatgagcccattgtcaccggtgccaccttcatcgggcttgtactcatcttctccctcgtcgtcatcgaggaaaggaagctatgttagggcgaattttggtagcaaaccagcggtgagagtggaggggtttgattgcctcgacagggatcgtcagaattgtagcatctctgcactggcgtagaccccattgcaatcctgaaaacagtaaatagataacgcccaaaaaaggtgcttaaatatatatcacgtttaaaacagagtagcaaaaaatgacaggaaccctttgtcattgtgtaaatatgtttggtagggttcctgatctctatgtaaatgatggtgtcttgtaagtaaaggagttttcttggtcaacaaaaataaggcttaggtgtagcgtaaaacgctacgagctgcagatgatgggaattaatcttcgtgggaaatcatcttttcctactagttttggtttttatgggtcgttgaagttttgatgagcggcttatggagagaaatatgtacaaattcaagttggtaattgagctaaatttcagtagacaccaaaatgtgtataaatcaatttgggttctgttttgtttgttttgagtttcattatcttcctttcggtttagttgggatccatgaaaacaacatgcatcatacatgtggtgatgtctgcttaggggtgatgcgagtatgggtgcaaggtgggtgc

SEQ ID NO: 23009 - DNA, 588 bp, Gossypium hirsutum
  Clone ID: GOSHI-09MAY01-C77538_1
cggacgcgtgggaagaaaatcaaataaatcaaaagccctctggcctcagtaccgccgaaacctgttaatagcctgcttcccctaaatatttagaccgtggaacaacaaagataattcattagcttaatcaaattgggtatttcttatgtcaacctaaaatgaaggtaaaatttgtgtgcaggtagctgtatgactacgtctgatacgatctcaaaaaatagttttcctttcttcattgcctggtcctccccacataaaaaagcgccgcaaattgacttggcacgagcgctacttgaaatgatttaatagcgattgctgcaagaggagggatggagactttgaggcctgctttacagagggtcaggcatgacaagggcttctgcatatagagatgctcttgagagtttcatagaaggatatcaagaaggtatccagcagatcagggggaaaaaggaagattcttctaatgcacagcaaggaggcaatactgataaaaattcaacttgatagctgataagtgcataattggagatgcatgtgagtacttctccagcatacctattgtagatacaaggttagagatttggt

SEQ ID NO: 23010 - DNA, 662 bp, Gossypium hirsutum
  Clone ID: GOSHI-09MAY01-C77798_1
caacccttgagaaaactagattaacgcgagtggtatatctaaaaattagccaaaagctgcgtttaacattgacaaaactagataacgccgcggagcggaatatccgcagatcggggaatggggtcaacatctttcggtattccagagcataggtttggttccaatggcgagaaaatgccagttttggggttcggaacggcggtcttcccacccgtaggagctgaagctacaaaaatggcaattctccaatcaatcaaacttggttataggcattttgatacggctgccaagtacgggtcagagcagccattgggtgaagcaattcaagaagcactttcgattggattaatccaatcccgagacgagctcttcatcactactaagctatggtgcggcgatgctcatggagaccttgttgtccctgccctcaagagaagcttacaaaatctcaagttggagtgcctggatctctttctgattcactggcctgtcagctgtaaacccgggacttatgaattcccaaataaaggagggaaaacctccttcctagggatttcaattctgtatgggcagcccatggaagaatgtcagcggcttaacctcacaaaatccattggtgtcagcaatttttcctgcaaaaagctgactgacattctcgccat

SEQ ID NO: 23011 - DNA, 550 bp, Gossypium hirsutum
  Clone ID: GOSHI-09MAY01-C77778_1
cccacgcgtccgcccacgcgtccgcaattttcgcgttaactcaggtcgtctcctttttgactcagtctgacaaaaccacgctcaatcatatctacttccccatttttccttcacttcctgcatattctttgatccgttttctcccatggaaactttgtttacgagattgggcttctctttcttccttctttatttcttggtctcttgcgatctctctttatctttctctccggtggacaattatctcgtcaattgtggcgccttgctggatgccaccgtagataatcgtcgcttcgtctccgactcgtccgattcttctcactcgcatctctcttcacctcaattgttctcactctgtgctggaactttgctgccgggtctgcctccgatctatcataccgccagggttttcaaggcaccgtctaaatatgttttcgatgtcaaggatccagggacacacatgttacgtctccattttcaccgattcagttcaccacaattgaatcttgctgactctaaatttcaccgtttggtgtaatgggttggtagc

SEQ ID NO: 23012 - DNA, 645 bp, Gossypium hirsutum
  Clone ID: GOSHI-09MAY01-C77118_1
agcactttcaacaacaacaacaacaaaaaacagagcacatagaagccatttcttcacaaactcagtcacttagggagacgatgctgagacagctcttcgcaaaatcaacagccaaacatgccactttcagttttattctgtttaatccacacagggagatgcatagcagaaacaagaaagcaatggagttaatagcaaaagggtggagtgctttgaaagaagttgacagagttattgattactgcgagctcaatgataaacgcctcatccctctcctaagggcagcaaaggagaattttgagttggcattggaagctgataattccaatacacatgctaggtattggctgtccaaattgcatttgaagtaccatgttcccggggcatgtaaagccataggtgctgctttgttagtaaaagctgcagatatgggcgataaagacgcccaatatgaattgggttgtcgcctaagaattgagaatgactatgtccaatcagatcaacaagctttctattatttggagaaagctgtagaccagcttcatccaggtgctctttaccttctaggtgctgtatacttgacgggggactgtgtgaaaaagaatttcttcagcattatggtgtttccaccgggcatcggagaac

SEQ ID NO: 23013 - DNA, 250 bp, Gossypium hirsutum
  Clone ID: GOSHI-09MAY01-C77348_1
gtagcccttagtctgttactctgttgggtcagctgccttatttcgatttccttttagtactatctttctttagatttaggtggatatgcaagctcaaccggattttgaggtgtctaatattggtcatcaagccttgatcatgaaaggcaagcgtaccaagcgtcaaagatcatcgtccccttttggcgtcacggtgacttctagctcctcaagtgcttgcggcggcggcggtggattggcgcaggaatac

SEQ ID NO: 23014 - DNA, 1119 bp, Gossypium hirsutum
  Clone ID: GOSHI-09MAY01-C70518_1
ctaaatctgaaaaagagtacagaactaaatttcaaaaatatgtggagtataagaactttccttcaaatcctcaatgctcatatacaaatgtgtttgattttggtatcggacaggagtactttcaagcaaaaaaataaaaagtcggagcaatataaggctagcatgtaggtaaaagaaacattttagcattatttaattggatttgagttgtctagatacaactagtttgccatccgagtttcagcacatcatatgttgaattcctctgacatccctaactatacttgtaaactcggatatgagtctcaaatacgggtatgtatccaacacgggtaagttttttaagggtctttggagagtttgtcaaacacaggtacttcaagaaaaatgaaaaaatcgaagcaaaattgcttatttttttcatcattggcttgataatgttgaattcatgcctcgtccatcattttgtagattcgggaaatgaagactcaagcggttgtgattgccgcgccatttgcgtttaccctaggcctcttaggctctatctttgccctcttcttagcaatcaaggagtatatatggacgtatgcagcttttgagttcgcactcgttgcagtaatcgtgcacgtattctataccgtggtccatatgaaggctgttttctctatactgttatcgggaatgataagtttcgggacagctatggcactcaattcattgtatatccggtgtttcggttggcgagttcaggttgccggaaattcgaacccggtgtgattcggtttagtgactggtgctcctgcatttttatgcttattacctggtaattgaggccttaaatgtagatataatgtttgttgctaaatatcggatagcattaggtcgagcttgtatgcaacgagtgtcgtattaaatccgagtatcactttttaaatttaaatacgaatcaattaaattcagtctaatattttttaatgaaatatatataggagattgagataataatttctaaaaaaatatgtaaattactcaattattaattttttttatcacctaattctcaaaaaaagagaagacaaaaaaaataaaaacaaaaaaaggatcttcatggatggaaaa

SEQ ID NO: 23015 - DNA, 1003 bp, Gossypium hirsutum
  Clone ID: GOSHI-09MAY01-C70798_1
cgcttgcaaaaactggggtttttttcaagtgatcaaccatggggtgccttggaaattgctcgaaaagattaaggtagcagctaaagcattcttcgatcaacccgtagaggaaaaacgtaaggttaaacgagatgaagtgaatgctatggggtaccatgaaagcgagcatactaagaacgttagagactggaaagaggtgtttgatttcttgataaaagacccttcttttttaccagcttcgcctgagactgaggatgatgaaataaggacgttgagtaatcagtggcctgagactcctcctcagtttagggaagtatgccagacgtatgcaagagaggttgaaaagctaggttacaagctattggaactcatctctttgagcttaggcttgccatctaataggctcaatggctactttgaagaccatacaaccatgatgagacttaatcactatcctccatgcccttgccctgagctagcactcggcgtaggtcgacacaaggatgccggtgctttaaccatcgtcgctcaagatgatgtcggaggattacaagtgaggagaaaatcggacgatgtatgggttcctgttaaaccgaccccaaatgctttggtcatcaatgttggtgatactattcaggtttggagcaacgaagcttacgagagcgtggagcatagggtggtggtgaactcggaacgggaaaggtttccgattccagccttctttttccccttctcactacgtgatggtgaagccattggaggagcttgtgaacgagggaagcccacccaaatataaaccatacaactttggaaagttctttgtggctagaaaccgcagtgattataagaaacttgaggtccaaaacatccagataagtgattttaagatcatctaatttgtgccgttttgggagtgttggcaaaggttgaagctttctggtgttcgagttctatcatgcgcagatgctattcgcggattctctctcaaattattttgggttta

SEQ ID NO: 23016 - DNA, 631 bp, Gossypium hirsutum
  Clone ID: GOSHI-09MAY01-C70758_1
agacgccaatgaggcgcgtatagaaatcaatataggcgattgggagctccacgcgtgctttttcagcatctagttgtagcagtatcattctttttaaaggatgttgtatctagtgactctagtgtctatagcattatgggaatctggtcagtagttggagttgtggccatggtggttaccttctctcttggaatgggtgccattccttgggttataatgtcagagattcttccaataaacatcaagggtctagctggaaagcatagcaacactttccaactggttctttgcttgggtggttacaatgactgccaacttgcttttggattggagcagtggaggaaccttttacaatttacatggtggtgagtgctttcaccattgtatttgtgacactctgggtccctgagacaaagggtagaacacttgaagaaatccaatggtctttcagatgaaaccaatccttttccttgttccatattttttgcttataagaagccctggtcctgcaaatttcccattgttttacaatatagatgaaaaaaaaacagttctgtttgcaaatatatattcctatatgtattgtctggttacttgagtgatcaattcatttactttcttttagcaaaaa

SEQ ID NO: 23017 - DNA, 624 bp, Gossypium hirsutum
  Clone ID: LIB3582-036-P1-K1-F10
cccacgcgtccgagccacctttggagttggtgccattcaggtcattgctactgccgtaactacatggttggtggacaaagctggccgccggcttctgcttatagtctcctcttttggaatgactctcagcctcctagttgtagcagcatctttctttctaaaggatgttgtatctagtgactctagtgtttatagcattatgggaatcttgtcagtagttggagttgtggccatggttgttaccttctctcttggaatgggtgccattccttggattataatgtcagagattcttccaataaacatcaagggtctagctggaagcatagcaacactttccaactggttctttgcttgggtggttacaatgactgccaacttgcttttggattggagcagtggaggaacctttacaatttacatgatggtgagtgctttcaccattgtatttgtgacactctgggtccctgagacaaaggggagaacacttgaagaaatccaatggtctttcagatgaaagcagtccttctccttgttccatatttttttgcttataagaagccctggtcctgcaaatttcccgttgttttacaatagagatgaaaaaaaaccagttcttgttgc

SEQ ID NO: 23018 - DNA, 539 bp, Gossypium hirsutum
  Clone ID: LIB3828-025-Q6-K6-D4
aaaaattggacaggagaggctgctttatctgaaagacattggatttcttcaagtgttctcccctttgtctcagggacccagagtgtcacaaatacaatggtgaaagcactcaccatcatgtaaattgtaaaggttcctgttgaagatgaatgtaggttgagttagctgggaaaagccaaaacaacaaataaaatgcctcaggttgcttttgagttgagtttatctgaatggagtcaattcgggtttcgatcattttgagttttggttatttgagattctgatcatttcaggtttgggtcattttgagattggtttgagttagattgggttataggttttatagtcaaattgggttgagacgaactatgtttttggattcgggttagaattgaaaggttgggggtgcaggtgtgagtgagagaagagagagatgtacctccactgctccaatccaaaagcaagttggcagtcattgtaaccacccaagcaaagaaccagttggaaagtgttgctatgcttccagctagacccttgatgtt

SEQ ID NO: 23019 - DNA, 765 bp, Gossypium hirsutum
  Clone ID: GOSHI-09MAY01-C70688_1
tcctacgcgtccgcccacgcgtccgcaaggctggcccttggatggaggatcagattgactcaacatttgctgaagaactacttaagaaataatgcattttaccaggtctttcacatgtcaagcaaaaatattgatgcggatcaaagaataactcatgatcttgaaaagttaactactgacttatcggggcttgttactggaatggtaaagccatttgttgacattttgtggttcacctggagaatgaagcttttaactggacaaaggggtgtcgcgattttgtatgcttatatgttgcttggtctgggttttctaaggactgttactcctgattttggtgatttgacaagtcgagaacaacaacttgagggaacctttaggttcatgcatgaaagactgcgcactcatgctgagtctattgctttctttggaggtggtgctcgagaaaaagctatggttgagtcaagatttagggagcttcttgatcactctttgttacttttgaagaagagatggttgtttggtattcttgatgattttgtaacgaaacagcttccacataatgttacctggggtttgagcttattatatgccttggaacacaagggggaccgagccttagtttctactcaaggtgagcttgcgcatgcgctgcggttcctggcatctgttgtgtctcaaagctttttagcttttggtgacatcctgaattgcataaaaagttcctggagctatctgggagcatcaaccggattttgagcttga

SEQ ID NO: 23020 - DNA, 661 bp, Gossypium hirsutum
  Clone ID: GOSHI-09MAY01-C70048_1
tttcctggaactccttgccaaagtgaacagaagaagaagaaaaagaagagttcaagagggtgctgtggaagtggaaagagaaggaattgaacgccaagagtttagtgaagtcagtgaaatgtttgtttcttgtgaagccactgaggaacaagaaatcccagaagctgaagctgaagttgaaacagaggctgaatctgttttggtactaagggatgatgctgaagtaaatgaagaaagttcaggaagaagttcaaatgaagaaacaattctagaatgtcaagaacaagaaattgaaagaaaacaagaagacgaccagcaagagtcaacaataagagaagaaacttctccccatgtttcattttatcttgacaagctttatgttgaagaaaatgaaggtggccttgaagaagaactcctacaagaagctggagatgaaaatgaaactggtagtgttaaagcggaggaagaagaatataaagctgctgttgaagaagaagctgaagaagaagagagtacaacttcaacaatagaagagaaagaaattgagacaacccaaggaagatccgaatccgaatgcccggaaccagaaagtaagtcaaaggagagtgagagtcaagagatttgttgccagattgtttactattaatgatgtgtgagccaa

SEQ ID NO: 23021 - DNA, 865 bp, Gossypium hirsutum
  Clone ID: GOSHI-09MAY01-C70268_1
ttattatttgggaaatgctttgaaagatgttggtcgtgttgatgaggcaatacaatgttataataaatgtctcactttgcaacctaatcatccgcaagcacttaccaacctcgggaacatatgtatggaatggaacatggttgctgctgctgcttcttattataaggctacgttgtctgttacaactggcttgtctgctccattcaacaaccttgccgtaatctataagcaacagggaaattacgtggaagctatatcatgttacaatgaggtattgcggattgatcccttggcagctgatgggctcgtaaataggggtaacacttacaaggagattggtagagtgactgaagcaattcaagattatattcgtgctattaatatccgcccaaatatggctgaagctcatgcaaatctggcttctgcttataaggatagtggacatgtcgaggctgctatcaaaagctataagcaggcattgcttcttcgaccagattttcctgaagctacttgtaacctcctacatacgttacagtgtgtgtgctgctgggaggatcgggataaaatgttcaccgaagttgagggcatcatcccaaggcagattaatatgtcaggtcttcctagtgtgcaacctttccatgctatagcatatcccattgatccaatgcttgcccttgatattagccgtaaatatgctgctcattgctccttgattgcatctcgttttgctcttcctcctttcaaccatcctgctccgattcctatcaagcaagattgtggaaatcagaggctaaagattggttatgtaagcagtgattttggcaatcaccccttgtcacacctcatgggatcggtatttggcatg

SEQ ID NO: 23022 - DNA, 719 bp, Gossypium hirsutum
  Clone ID: GOSHI-09MAY01-C71928_1
aaatgactgtcaacaatttgactttttcgagaatctgcgtgagcaacaatggccatcgttaatagtttaagcataccaacttatattcctttgaaaacccaatcctttttcagtcctagatcgaaggcttttagtgttcttaacaaacccagaaaagttcccttctcggttcaatcgatgggttcttctgcttcttcccaaagacccgagaataacaacgctgttcaagatatcaatggtgcgtcccttgccgagacagctgcagttgactatacttctttaagtgatgaagaatggaagaagaggcttactcctgaacaattttatattactcctcaaaaggggacccttcgagctttcactggggaatactggaacacaaaaacacctggaacttaccactgcatatgttgtgacacacctcttttcaagtcattgactaaattcgatagcggaaccgggtggccatcatattatcaacctataggaaagaacgtgcaatcgaagttagacctgtcgattattttcatgcctcgcgaaaaaatcctctgtgccacttgcggtgctcatcttggccatgttcttttgacgaatgggtcctccacctacgggaaagcgttactgcatcaatattgcttccctgaaactgaacctgagttaaagagaaaaattataagcttggaattgcaggtgagaaaaatgtttttttttttttttta

SEQ ID NO: 23023 - DNA, 687 bp, Gossypium hirsutum
  Clone ID: GOSHI-09MAY01-C71008_1
aaaagagtgaagccaacaacccgagacccgaaacaagaaccggttgtcctgcaatggtagtcattaggcttgtggactctaaaaggtggagaatagttgaagtcgagcttgaacacaatcaccaggtgagtccacagatcaaaaggttttacaagtcccataagaaaatgattcttgcagccagaaaggcacgaccgccagcagaacctgtaacagaaatacataccatcaagttatatcgaactgctgccatggatgctgtgtctaatggattctcaaatgtttctgaaagggagggtattcatcaaccagatcactctaaacatctggaacttaaagagggcgacgcatatgctgtttataatttcttctgtcgcatgaagttgactaatccgaatttcttttacttgatggattttgatgacgacggtccgttgaagaatgtcttctgggcagatgctaggtccagggccgcttatggttatttttccgacaccgttgcaattgacacaacatgcttgacaagtaaatatgaacttcccttgatttcttttgtcggagtgaaccatcacgggcaatcaagtgttattgggatgtggcttccttggacacaagtcagtggaggactttgtctggatttttagagcatggcttaaatgcatgctagggcaccaaccacaagttatt

SEQ ID NO: 23024 - DNA, 386 bp, Gossypium hirsutum
  Clone ID: GOSHI-09MAY01-C71218_1
gaatcggagggccgacctagacctcacgcgttcggttgaacttctaaacaatacaaccttgaatccataccggggctctaagcacaattttgttgcttggtagatcatcccagaaatttcagtcaaccaagcattctttgcaatttatattcactttgtcactaaatatattagtagatcattagacaaagattcaactcctctttagggccaataactaaaatacaggggtctatttgtattcccggtgtaggatcagtcgcaaaatcatgtgtatttggtagtgcgccatgggaacagtcattgttattcaagaaatgattgaaccagaagaaataatttgatagtaagtgtaagatttgctcaaaagggtgagcatttgccct

SEQ ID NO: 23025 - DNA, 1088 bp, Gossypium hirsutum
  Clone ID: GOSHI-09MAY01-C71228_1
caaacatcccttatgcctcatacctgatacctggctcgcctccccgcccttcttcttcaaagcaaagaaaattcccactcttttctttgctttttctctcactattcatacccttttgacttttttggttgatttagtttttaacttgccaaaatttttaatatattcttctttatgtgggggctaccgattaaccccgcccaaataatggctgttgcttggtctgaaaatgcctcttccatggaggctttgtctttgtctcctcctatgtctccgccggttatcctaacccaagacgaattaaaaaaaatcgccgcttacaaagccgttgagttcgtggaatcaggcatggttctgggtctgggcacaggttccacggccaaacacgccgtcgaccggatcggcgagttgcttcgtcaaggcaagctcaccaacatcataggaatccccacctccaaaaaaacacaagaacaagctatttctttaggtatcccactttcggatctcgacagccaccccaccattgatatggcaatcgacggtgctgatgaagtggacccgcatcttaatctggtgaaaggcagaggtgggtctctgttaagagagaaaatggtggaaggagcttgcaagaaatttgtatgtatcgttgatgaatccaagttggtcaagtatttgggaggcagcggtttggctatgcccgtcgaagttgttcctttttgttggaaattcactgccaaaaaactccaaaacttgtttcgagattctggttgcgttgccaagctgaggaatgattgtaaaggggagcctttcgtaacggataatgggaattacattgtggatttgtatttgaagaaagatattggggatttgcaggtggcaagcgatgctatttcgaggattgctggtcgtggttgagcatggcatgtttcttgctatggccactactgttatagttgcaggggagcttggaatcaccatcaagaataagtagtacaaactcaaactaactttattttaataattagggaattgctattgcagctgggaatggattcttcctttttggtatttattgattgatgacaaga

SEQ ID NO: 23026 - DNA, 997 bp, Gossypium hirsutum
  Clone ID: GOSHI-09MAY01-C72588_1
cctctcctctcctgggaggtcatttttgtctcaccgtcgagttccgctggttcttttccggatctgacccgtatcccgtgtcggcacaggtactgcaccccaaattgccgagtccgggtaacgaagtttataagtatgttcatctcaggtgaagatgataagaatgaaataggtactgaaaatactgcatttgtgcatgggaaaccacctcaagatgctgctggacctccgaaagttgaatctgatatggaaattgttgatgagaatgaaatagttactgaaaatactgcatttgtgcatggggaaccacctcaagattgtgctggacctccgaaagttgaatctgatatggaaattcttcatgaaaaagtaaaaaagcaaatcattggggaagggccatggtcaaaagccatcaaagtattcaacatgcttcttgcactacaggggcatggactggaaaccactaagcataaatttgatgacacatggcatgaacaacaaccacttgaattggtcttaggcaaagagctccgggaaatgactggtttggctatgggtgtgtcaagtatgaaatcaggcgaacgtgcattgttacatgtgggctgggaattaggttatgggaaagaaggaagcttttctttcccaaacgttccaccaatggcagacatattatatgagggtgagcttattggatttgacgaaaccaaagaaggaaaggctcgtgctgacatgactgtagaggaaagaattggtgcagcggatagaagaaagatggacgggaattctttattcaaggaggataagctagaggaggccatgcaacagtatgaaatggccatagcgtacatgggtgatgactttatgttccagttatttgggaaggatcgagacatggctttagctgtcaagaatccatgtcatctgaacatggctgcttgtttgataaagctcaagcgctatgaagaagccattggacactgttccatcgtattatcag

SEQ ID NO: 23027 - DNA, 490 bp, Gossypium hirsutum
  Clone ID: uC-gsronu33B109e09b1
tcgttcacgcgtccgcccacgcgtccggccttatcatcttttttagccttattttattcgtcgaataagcgatttctgtttttcgattttctctctctttctccggaaaaaaaaaaagaaaattttttagatctagaatctgcgatcatggagatggagcgcgtgacggggttccctcatacgcatatggatcgccgaccaagaaagcgtccgcgattgggctgggacgtaactcagctgccaccgcaggctcaggtaggaatgttttgtgcacaagaagttgggagagtgacaggctttgcttcttccactgcaaaagcacctgcagattatgctagtactattactactagttcttctgtagttctaaagggaggagtggctcaaaatggttctcccccatggcgagacgatgacaaagatggacattacatgtttgagcttggagataatttaacctctcgctataagatacagagtaaaatgggcg

SEQ ID NO: 23028 - DNA, 218 bp, Gossypium hirsutum
  Clone ID: LIB3493-059-P1-M1-G4
atcgtttttagcctattttatgcggcaaataagcgatttctttttttcgattttctcactctttctgcggaaattttttttttttttttagatctagaatctgcgatcatggagatggagcgcgtgacggggttccctcatacgcatatggatcgccgaccaagaaagcgttctcgattgggctgggacgtaactcagatgccaccgctggctcatgt

SEQ ID NO: 23029 - DNA, 741 bp, Gossypium hirsutum
  Clone ID: GOSHI-09MAY01-C72648_1
agaagacattattcgtctgattgagatggttcctcagattctgagatagaatcatctgaatctgatagtgattctgactcatatctctcatcttcctctgacattagttcctcaagtgatgatgggcacaaaaagaggaagagatattttaaaagaggaaaatataggcgtggaaaaaagagagagagacgacgtgacaaaaagagaaaaaggcgtgataagagagcaaagcgtaggtcaagaagggcatcagacagccttacagatgatgacagtgagagtagcagggaaagcagcagtgacaatgatgatcaaggaaaaccacagaagcatgaagggccttctcagaaaagtgttgggaaccaatccccttctgctacagtgagagcaattcctcccagaaagactgaagaggctggtttggtgaaggagtgtgaagctcctagggaaaatggagagcgaaagagcaatggcattgaagaagatgctaaatctgacagaagtgcagagagacaacctgatgtggtagatgatcgcccgagcaaatctaggagcagaagtgcaagtcctaagaggaccatgagtaagagtataagtccatggaggagtcaaagacggtgcccaagtctaagcccaaggcgaagtgtgagcaggagcccagttgcaagtagaaatcctcatgtttttcagaaagaagtgggagcaggaatcctgctagaagcatcagcagaagcccaacga

SEQ ID NO: 23030 - DNA, 419 bp, Gossypium hirsutum
  Clone ID: GOSHI-09MAY01-C72678_1
tttgtcacgcgtccggcaacatattaatggctggtgttagctaagctagccaacagcaaccattcacattcatcattcttttttattttgctttatattccatgttgcccaattcttgaaagtaaccgttgcggctcggattgattggcggcttgataatcggagtcggagaaaatgcggggaaaggcggtttccgggaaagcaattctggtattgtgcctggctagctttcttgcaggttccctaataactagccgaacttggacttctcaatctcataacaacaaccatcctattgtgaaccatgttactgctagcaataaattgggagaatttgatcacaaattacgtaaattaggtgaaggaaaggcagaagatataatgggagaagtctccaaaactcacaagggtatacagtc

SEQ ID NO: 23031 - DNA, 565 bp, Gossypium hirsutum
  Clone ID: GOSHI-09MAY01-C72178_1
ggaaaagctctcctattcctatcaattgcagtagagcccctagaaatgataagccctttaatgtggaaatccctggggaaggttttctgtactctgagctttgggctggacctgcttattccaattcaccacctcctagttctttgccaataccgaaattctcgcttcgggtgaagaggacagtgtctcttgatttgcctgctgcttaccccattgttgatgttcaccaaactgctaagtctgcacctgcatctcctaccagggagcttgacccttctgtagctgaagttttttgtagtgctgcctctgcgaccaaggctttgcgtcgcattctcaatcttgacaatactgatgactgaaaagagtgtaggagtttttcagctcctgtaaataagtttactgtgcaaatttccgaagttagttttagattgtatataggttgaataagatggttggtagcatgagtcagtatgaattaatggcaatggtaggtcgacaatctccagattttgctttatgatgggttatgagaggttggtgttgggttcgagaaaatgacaagatg

SEQ ID NO: 23032 - DNA, 593 bp, Gossypium hirsutum
  Clone ID: GOSHI-09MAY01-C72018_1
cacagctccatgattttgtgacgagaaatagcaagctaaaacaactcggaaagcctatggtccctaatctcgaccgaggcttgtggcgatactcgcgtcatccgaactatttcggcgagcaattgtggtggtggggcctggttgtattcgcttggaacttgggacatggatggacctttgttggagctttgattaatagcatgtgcttagcttacgttaccgtgctcgtcgagcggcggatgttgaaacaagagtaccgagctgaagcatacaggttatatcaaaagacaacctcaggatgtgtaccttggttcaaatcttctgttatagcagtaaaagataaggatacttgaactaaattttttgtttccttgccatgttttttgtcatgttggtggattctatactatttatgtcctgtctttgatgtggtgagcacttgtgatgtattctgctatgtctctatttgagctcaaaatggttgttgtctttggtaatcaaagaaatatcactgtatgaaatcatgtaaattctttgtttgtttatttgcaataaaattttttttcttgattttcataaaaaaaaaaaaaaaa

SEQ ID NO: 23033 - DNA, 465 bp, Gossypium hirsutum
  Clone ID: LIB3493-034-P1-M1-B1
cggacgcgtggggccgccctttttttttttggttgggttattttatttttcatcacgcaaccggattgtttatttgcacgagtaataaaaacgaagtacttcccatgaggggagttcctgagtacaagaataggtttttacccttcgtttacctggcgtagcatctggagagcctgacaactactggaagaggggattggctggagaatcggaaatggtcatggagtcaatatatggaacgatgcatggatcccgggagctttgattaatagcatgtgcttagcttacgttaccgtgctcgtcgagcggcagatgttcgaaacaagagtaccgagctgaagcatacaggttatatcaaaagacaacctcaccatgtgtaccttggttcaaatcttctgttatagcactaaaagataaggatacttgatctaaattttttggttccttgccatgttttttgtcatg

SEQ ID NO: 23034 - DNA, 510 bp, Gossypium hirsutum
  Clone ID: GOSHI-09MAY01-C73938_2
ccactgtctcaccttaaaagacagtcaccttcatcgcaacgttagataaaatgattattagcaataaaggacgacaatgaagaactgtgaaagagtcgctagcttagctttagcagaccaaaatggccttcttctttatttgtttcatttgatggattgattacagcaatggcctaccacttgcctcgtgttgtatgtatcatatttaaattattggatccaattgatatttatcttgttgccttaaagattgttgtcttcactgatatcattaatttatcaggtcatgagggacaagtcaggtaacatatgtatagtttggtaagacttgagaaggcctaaatgtgctagaaaaactgtcaaaaaaagtagctagaatatttggagtcctaagaatttagatataaagaaagcttgttctattcagggatcagttagagaggaactcaccttttccactacttttgctcccttcaaaagttgtcatgcctctactattgacatcacata

SEQ ID NO: 23035 - DNA, 1254 bp, Gossypium hirsutum
  Clone ID: GOSHI-09MAY01-C73938_1
gtcaccttcatcgcaacgttagataaaatgattattagcaataaaggacgacaatgaagaactgtgaaagagtcgctagcttagctttagcagaccaaaatggccttcttctttatttgtttcatttgatggattgattacagcaatggcctaccacttgcctcgtgttgtcatgagggacaagtcaggtaacatatgtatagtttggtaagacttgagaaggcctaaatgtgctagaaaaactgtcaaaaaaagtagctagaatatttggagtcctaagaatttagatataaagaaagcttgttctattcagggatcagttagagaggaactcaccttttccactacttttgctcccttcaaaagttgtcatgcctctactattgacatcacatatttctgttatcagatgaagattgatgttcaattcagtgagtgcattctcttggcgtcaatggtataatatgagtatgtatttgttgagttggaccttgccaatcaggtattgcaacaccaagggtttttgctgttaatctggggatatatatggtgtgaatgggccaaaaaagggtttttgctgttaatgtagacattagtttgaatgttattttgcttctccttttgctaaagggttaaagtttaaacatcatttattgattagttgagttaagttagtttatgtgtcttgttttttggcttgtgaatatcagtccatcagacttaaataatcattgagaagcttaattttactattagaattttcttttccttattgtatccaatacatattatcttacatccatgtccaacatatttatataactagctgcaaattgctcatggttgtaatttttaatcttttatgcatattttcaatgctgaattgatttcctctgttaaaagttatgtgaatacctttgctcttagaaactttgacttgatatgttacatacatttcatacaggcttcttttgcaaaaactcagactttgctctagagccaacagtgatcacaggcatctatgcttcacaatggatccaaactgtttcagagttaaattatactgaactctaatgacattgtctttttatcttacagtttacgtgcatgtgcttgatggtgggtgatatgatgatgatacaatatagtggttgtttagaagtaaattacatatataagttattcatgactttcatcttgactatttaaaatttatgatcatatctactgtatatcttttatttagtatcctat

SEQ ID NO: 23036 - DNA, 541 bp, Gossypium hirsutum
  Clone ID: LIB3826-001-Q1-N6-F2
aatgtcaaaaataacattaacacgacagaaatacatgaatacatcaaaatcttcacaaaattcaaatgactgccctgtaaaatgacaaaactaacctctccagttttggttaaacctatccattgcaatgaaatgaagtaaagactgaccacaataaatggagaaatgttattacaagaaaaaatataaataaaatctcactaaaaaccttgacgccatccacattagtagggcttaatgcagtaaatgggaacaaaggtacaaatggcgtcattaaaaaatgcatgactccttaaggctgcttagtttggtcttgcggcctgctctgctgttttctcaagcagcagtttccgatgcttgaccatgctgttcctcaatcaatgattgaactctcttcacagaactcccaacctcctctagtttctgtagtaaagcaagatcccctgaaggaggaacaacatcatgcttacgtggagaatgccaagcagatggtgaaagaatctttgaatttggagcatcttcaattgcagaaacttgtcgg

SEQ ID NO: 23037 - DNA, 354 bp, Gossypium hirsutum
  Clone ID: LIB3582-020-P1-K1-A8
cccacgcgtccggctgttcttttataaccctaggctatccattatgatgctctttattttaaaggatcaaccctccacctcaatataatatttgacaaataatttgtctggcaggtttaattttccttttttttttattgcagcgtcctccacgtaagcttgatgttgttcctccttcaggggatcttgcattactacagaaactagaggaggttgggagttctgtgaagagagttcaatcattgattgaggaacagcatggtcaagcatcggaaactgctgcttgaggtatttcaaactacggaatggcacataacgttttctttattagtaaatttctcatgccccgggttt

SEQ ID NO: 23038 - DNA, 729 bp, Gossypium hirsutum
  Clone ID: GOSHI-09MAY01-C73178_1
ggcggagaatcagactctatgtcgctttcaacgctaaaaccctaattctctcttaaaccctaaaattattcattggaagggccatttgccaaatttcactctttcaacatgcaaatgcccttgagatgagcctctccatcttccccacttttagtatatctcaaaaatcaatgttacccacttctatttcaagcatgaaatccctaatttcccctcccttttctcccttatctcttcatttccccaaaaccaaaccttttgccttcttctctttaccctcaaaaccccccaatgtttcgtaccctaaatttctccacgcaaaaccttcaatgccttcgccaagacccccgattttttcaatcccgattcgacaatcgcatatagagacaccccaatcttcttcgccgtgcggtgaggtccacgtcatcgtcggacccatgtttgctggcaagacaaccacacttctccaccgaatccaagctgaaagcaacaatggcagaactgtggctgtaataaaatcaaacaaggatacaaggtatggattggattcaattgtgacacatgatggcatgaaactaccatgttgggcattagcaaatttatcatcattcagacaaaagattggccccgatgcttatgatcagcttgatgtcattggaatcgacgaagctcaattcttcgaagacctttatgacttctgctgtgaaactgcggagcatgattgcaaaa

SEQ ID NO: 23039 - DNA, 694 bp, Gossypium hirsutum
  Clone ID: GOSHI-09MAY01-C73358_1
gtgctctgaattcgaaaaaggaagacgaatcgtcgcattcaattaagttggtgaacttcgtctccgagcaacagttagatgaagcaaaaagaactagaggtgaacgaattgaagatggcactgcccagagggataggcctctgtacgagattttgaaggaaaataaagacaagaaagatgcagagtttaatgaacggttcaaacataggccacccaaagctttggatgaagacgaaactgagtttcttgataaattggagatgtcaagaagggaatatgaacgacaagtggcggatgaggaagctgaacagttgcgaagtttccaagcagctgttgcagcacagtccaatgtcgtgcttgaactaaaagaaacaccacctgttcttgcaaaccaggaacaaaaaacagttgggaagaagaatccagccactcggcctctaggtatgctcataaaagtgaagccacaagcaaaaagggcaaaaaccgagcaggaggaaaaactcataaggggaacaaaggcacctgatgttgataatgtggaatcacctaaaagtgatcccgataagtcccttaatgttgctaagactggtcttgtttcatacagtgatgaaagtgaagatgatgattaggattattttattttcaatattactggaattactattactgatatagtttatggaatcttgtttct

SEQ ID NO: 23040 - DNA, 670 bp, Gossypium hirsutum
  Clone ID: GOSHI-09MAY01-C73368_1
ggaaaaatcaaacattgctgtgaagaaaacaatatagcattccgtttcgtggaaactcaattagggaaagggaaattaacagctcccgggctataaaccctaaaagctcttcccaaatttggttgagaagaaatggagaattcaactcaagaatcccacctgagatccgataattcggtaacctacgaatcagcttacacagtttatgccatggccttatcttccacgccttcctccaccaatatcaaccatcaacgcatcgctctcggcagcttcctcgaagattacactaacagagtcgacataatctcatttgatccagaaaccctctccttcaagacccacccaaagcttgccttcgaccacccttatccacccaccaagctcatgttccaacccaatcgaaaatccgcttcatcctcttcttcttgttccgatcttctcgcttcaaccggcgatttcctgcgtctctgggaagttcgagaatcttccattgaacctgtcactgttctaaacaatagcaaaaccagcgagttttgtgccccgttaacttccttcgattggaacgatgttgaacccaagagaattgggacttccagcatcgacacaacttgcaccatttgggacatcgagaaatgcggttgtgaaacccaattgatcgctcatgata

SEQ ID NO: 23041 - DNA, 549 bp, Gossypium hirsutum
  Clone ID: GOSHI-09MAY01-C73258_1
cgatctcgcagcgtctaagaacaaggaacttgagaaattagtgctccaaaggcagctggttcctgttaaccggaaatttgacgtcatgtctccgggagaaacggtctcccggtcacctctagacaagcctctgaaccagcttactgaggatgacatttctcaggtcactcgtgaagattgccgccgttacctcaaagaaaaagggatgcggagaccgtcttggaacaaatcgcaggcgattcagcaggtgatctcgttgaaaactcttctagaaacgacgtctgattccgacgccgttgaagctcggaagaaactttaccctccctgcccggaatatccgcctcgcgtgcgtgtcgtttctgattcaaacgttctaccgagggaaatgacaccgaataacgggatattggttccagtttccgaatccgttccttgtcccctttcaaatccctcgaaatccgatttttccggcgacaattcttgccgaacggtcatctccggaaatgattctgttttttcaagattgcaggtgcagcaaaagagccagca

SEQ ID NO: 23042 - DNA, 865 bp, Gossypium hirsutum
  Clone ID: GOSHI-09MAY01-C68548_1
cttttgcctctctcgttacgttaccgactttacattttcttttttatttcattttgccgctggggaagaaaccgccgtgaaaaatggaatctccagctcaacgccgcctcaacgctatccaatctcacctcctcccctccgccgtatccgccgccgaggatgaatccttgatcggacgtaatgttacctcctcctcttcatctccaccgttctttgttgatcaacagtacagtgtgattcttcctgagaaattgcaaactggaaaatggaatgtttacagatcagctcggtctccgatgaagcttttgagtcggtttgacgatcatcctgaaatcgggacgctgcatgaaaactttgtacatgctgtggagacatttagagattacaagtacttgggaacgcggattcgggtggatgggacagttggggagtataagtggatgacatttggagaagcggctacagctcgggaggctataggttctggtcttaggtattatgggttagaacaaggagcttgtgttggactttattttataaaccgacccgagtggctggtggttgatcatgcttgttcagcatattcgtatatttcagttcctttatacgatactctaggtcctgatgcagttaagtttgttgtaaaccattccggcattaaagctattttttgtgtcccagaaactttaaatacgctgttgagtttcatatcttctattccatctgtacgtctcatagtggtggtgggaggagctgatgaacacttaccttcactcccctcaacacctggtgtgaagttcgtatcgtatttaaaattacttggtcagggccgcagaaacctgcagccattttgccctcctaagcc

SEQ ID NO: 23043 - DNA, 772 bp, Gossypium hirsutum
  Clone ID: GOSHI-09MAY01-C68658_1
cttcttcaattcttgtttttgtggcaaacacatggcaagctcaaggactgtttgtgtaatggatgcttccggtcaccttggctccgcccttgtccacttgctcttacatagaggctacactgtccatgctgcccttcagccccatccaaatgggttccaatcagttgaggagctgtttccttgtagtaataaaaatttgaagatattcgatgcagacccttttgattaccacagcattacagctgcattgaagggatgttgtggtttattctactgctttgagcctccatctgaccattctacttatgatgaattcatggcggaaattgaggccagagctgcacacaatgtgttggaagcatgtgctcaaacagatacaatagagaaggtggttttcagatcctccgtaaccgccgtcatatggaacgaaagtcgaactggttccgacctggacgaaaagaactggaccgacatcaatttttgcaagaagtttaagttatggcatgcactgtcgaaaacgttggcggaaaagtcagcttgggcactggcaatggaccgaggcataaacatggtgaccattaatggaagattgttgatgacgcctgacctaaccatcacaaatccatatctaaaaggagcacctgagatgtatgaagatggggtatctgttacagtggatctaaggttcataccgacgctcatatctgtgtgttcgcccccccccccccccttggacgatatctatgcttcaaccatgtaatcaattgcagcc

SEQ ID NO: 23044 - DNA, 684 bp, Gossypium hirsutum
  Clone ID: GOSHI-09MAY01-C68168_1
gtctcaacattttttgatcaagttgtgacgctttccactcatccttatgggtgccgagttatacagagaatattggagcactgcaaggacccaaagacacagagtaaggttatggatgagattttaggatctgttagcctgttggcccaagaccagtatggcaattacgttgtccagcatgtgctggggcatggaaaacctcatgaacgctcaatcatcattaaggagctggctgggaagattgtccagatgagtcagcagaagtttgcttctaacgttgtagagaagtgcttaacttttggtggccctgatgaacgtcagttgttggtgaatgaaatgcttggttctaccgatgagaatgagcctgttcaggcaatgatgaaagatcagtttgcaaattacgttgtacagaaagtactagagacttgtgatgaccagcaacgtgagctgatcctttctcgaattaaggtccacttaaatgcattgaagaagtacacttacggaaagcacattgttgcacgtgtagagaagcttgttgctgctggggagaggaggattgctgctcagtctccgaatccggcttagctggtatatgaaggaacatgttttgtacagctaacagaagctatgtgtttatttccttatctttgatcttcagccatggttcgaccccatctttttaga

SEQ ID NO: 23045 - DNA, 617 bp, Gossypium hirsutum
  Clone ID: GOSHI-09MAY01-C69968_1
agattactgcctcgtgttggtgcaatgcagttaagtgactctctggatgatcttgcagatatttgtgtaagagttgacaaaaggattttccgttgtcatcaagttgttttagcatcaagatcagaatattttaaaacaagattgtctcgtatgaaagaatttcatgaaagaacagatgcattttctagtgatacccttccatatctagaagaacatgatttgagagctgaggcatttgagaaaatgatcgagtatatgtacactgatggtttgacagatatagaccctgatcaggcagatgaaatgtttgatgctgcttctcgttatctattatttcctttgaagcgtgctgtcgctgatgtcctgttgccacatctagagatggtctcaccggcagaattgtgccattggcttgtattatctgacatgtatggtgttttgaagatacgtgagtattgtctagataccattgcttgtaacttcgagacatttgccgacacaagtgagttccgagcaatgcttttgaccctgccaccgccatctggagattcgtcactccggactacagttccaagtgccccaggtgctgttatcaatacagaccaaagccatctttt

SEQ ID NO: 23046 - DNA, 819 bp, Gossypium hirsutum
  Clone ID: GOSHI-09MAY01-C69918_1
gaaaaggaactacatgagttagaatacctttggggctataacagggaagaatcttgcaacgacgaggaagtactggaaggattggaacctcactcaaatttgaaaagcttaagtattatgtactataatggaaggcactatccatcatggttggcaaggtttactaatattagtggtccaagtgcttgttttcaacccatcaatttggtgaagttgaagctgtctaattgtaagaatttagagaaactgccaactcttgggcactaccccaatctcaaaattcttgaagtagaaggtttaaataatgtgaggtgcattggaaaagaattttatgtcagtgatgatgacagtagttctgataagaataagccaatcaccttatttccagcattggaaaagttgagcctgtggaatatggaagaagtagaagaatggttagaagtggaaccaacagttactgtgtttccttcactaaaagagctacatattgaaggttgctgcaagctaagcagtgttccaagaatgagtagactttcttgtcttgaggcactcactattacaggtaacaatgcattaagttgtataggagatgaacaatttccctttccctctagcctcaaaaaattcaccatacagaggtgctataagttaacgacagttccaagtgtagagggcggtatctcttttcttcagcatcttgaggtgaagctttgtgaccggttatgtaaaataggacaaggattacttacttccacatgtctaagagttgtggtcatatgtgactgtcctaatttgatctccattccagtatatggcata

SEQ ID NO: 23047 - DNA, 465 bp, Gossypium hirsutum
  Clone ID: LIB3583-043-Q6-K1-D7
tgccgtaaggaaaggagcagccgccatgtccgctcacctgcagtggatggtcgtgcggaactgctccagcttcctgatcaagaggaacaagcagacgtacagcacggagcccaacaacctgaaagctcgcaactccttccgctacaacggtctgattcaccgcaagactgtgggcgtggagccggcggtcgacggcaagggtgtggtggtgtcctgaagcggagatcaggccagcggaaacccgctacctcctatgtgcgaactaccatcaacaagaatgcccgggccaccctcagtagcatcaggcacatgatccgcaagaataagtaccgtccggatctgcgcatggctgccatttccagagccagtgctatcctgcgcagtcagaatcctgttatggagaagaggaagcggtcccgccccaccaagagctcctgagcacttgcccctgtacccagatcaata

SEQ ID NO: 23048 - DNA, 488 bp, Gossypium hirsutum
  Clone ID: LIB3583-043-Q6-K1-D8
gcgccacatgtggtgaaggactgtactagggactggactggctctcaaacaacattgcaaacacggcatagatggcgtcattgacttgtcactctcatacaatgccaaccccttcagcaattattgatgtttctacttccgttacaacgttttgatttaccataggactgtgggcattgagccctttgccatcggcaagggtgtggtgaaagtactgaaacggaaatcaggccagcggaaacccgctacctcctatgtgcgaactaccattaacaagaatgcccgagccaccctcattagcatcaggctcatgatccgcaagaataagttccgttcggatcttgggcatggctgccattagcagagccagtgctatcctgcgcagtcagaagccttttatggtgaagaggaagctgaccctccccaccaagagcttctgagcaccttgcccctgtacccatagaaataataaaggttaaccatattgg

SEQ ID NO: 23049 - DNA, 944 bp, Gossypium hirsutum
  Clone ID: GOSHI-09MAY01-C69478_1
gcagattacgtttctatatggccaaccaagttccaaaacaagactaatggaattactcctcgtcgatggcttcggttttgcagtccaaagctcagtaacataatcaccaagtggttaaaaactgaccaatgggtgaccaatcttgacctgctttctggtcttcgagaattggccgataatgctgattttcaagatgaatgggcctctgctaagatggctaacaaacaacgtttggcgcaatacatactgcgtgtaacaggagaaagcatcgatccaaacagtttattcgacatacaagttaagcgtattcatgaatacaagagacagctgctgaacattttgggtgcgatctataggtacaagaagttaaaggagatgagtcctgagctgcggaaaaatacaacttcccgcaccattatgattggagggaaagcatttgccacatatacaaatgctaaacgtatagtcaaattggtgaatgatgttggtgctgtagtcaacaatgatcctgaagtcaatagctatttgaaggtcgtatttgttccaaactacaatgtgtccgtagctgaaatgcttattcccggaagtgagctttcccagcatattagtactgcgggcatggaggctagtgggacaagcaacatgaaatttgctctaaatggctgcctcataataggaacacttgatggggctaatgttgaaatccgcgaagaaataggggaggagaatttcttccttttcggtgcaagagctgatgaagtccctcagttgcggaaggacagagagaatggattgttcaaaccctatcctcggtttgaagaggccaagcatttcataagaaggggagcatttggaagttatgactacaatccacttctcgattctctagaaggtaactcgggttacggtcgaagtgaatatttcctcgtcgggcattgatttcc

SEQ ID NO: 23050 - DNA, 627 bp, Gossypium hirsutum
  Clone ID: LIB3825-009-Q1-K6-F12
tataactactccttttctctcgatctgttagggtttcttttaattctaggtaaattgtgctctctattttttcccttattttaatttcagattatttctttataattttgctttttttgggtttctgaaataatgattcatttatgttgttttgacaaatctgtattaagaagtaacggaatttttccctttgatttggtggctggaagattgaagaagggattttatttattgttcttttgcaaacattgcctttgtcttttgttttgataatttcacaggggttcaaagcatcattgtcttatggttattttgggtttttaaacttgtgagattatttgtgtttctagctgttggtttcaattagatgaggctaacatctccatcactggtgtatagaggtatcttcaccatgttcctcgtaggttcaagatatgtttcagggaaggtaggaaaatgctaatgtccttaggctcattgctttctgattttagttccattgcgtatttctattcttgtaagaaattttgggtttttttcttttctttcaaaatgttcttattttttattggaggtgatgtataggtattgaagcagcaccaaggaagaaggttgcagcagcttctg

SEQ ID NO: 23051 - DNA, 544 bp, Gossypium hirsutum
  Clone ID: LIB3584-056-P1-K2-C2
tttatttataattttgctttatttgggtttctgaaattatgattcatttatgttgttttgacaaatctgtattcggaagtaacgaaattttgccctttgtcttggtggctggaagattgaaggggttttatttattgttcttttgtaaatattgctcgtctttcgttttgataatttcacagggggttcaacgcatcattgtcttatggttattttgggtttttaaacttgtgtgattatttgtgtttctagctgttggtttcaattagatgaggctaacatctccatcaccagtgttaaatgatttaaattattctatattaggcctcaaccgattgggatcttatacatatatatatataggtatccatattgttagtaatatatgacaagaaatttgggagcccttcatgaggtctaaggtttcaactttgtcttatggaatagaatcagagctatggtggtgtgctattttgcggaaggtttctaacatccaattaattggccttcaagaagagctaaaagacgatctttttaaacgatg

SEQ ID NO: 23052 - DNA, 558 bp, Gossypium hirsutum
  Clone ID: GOSHI-09MAY01-C64808_1
cccacgcgtccgcttcaattccgatttctcaccttcttttagaaaatggggcaggctcttgggtgtattcaagtggagcagtcaactgtagctataacagaagcatttgggaagtttgatgatgtgcttcagcctggttgtcattgtttgccgtggtgtttcgggaaacaggcagccggtactctctccttgcgtgtgcagcaactggatgttcgatgtgaaacaaaaaccaaggataacgtgtttgttaacgtggttgcttcaattcaataccgagccttagctgaaaaggcacaagatgctttctataaactcagcaacactagagcccagattcaatcctatgtctttgatgttattagggcaagtgttccgaagttggagctggatgcagtatttgaacagaagaatgatatagcgagagctgtggaagaggaacttgaaaaggccatgtcacattatgggtacgagattgttcagactcttattggggatattgaaccagatgagcatgtgaagagggcaatgaatgagattaatgcagcggcaagaatgagg

SEQ ID NO: 23053 - DNA, 690 bp, Gossypium hirsutum
  Clone ID: GOSHI-09MAY01-C64478_1
agaaaattgaaaattcagatttaaaagattctaatttcttgaaccaaagcggtgctttttcacttttggattcaattagcgaataaaagaaaaccctaacggaccttccattttcaaagctctcaccaaatcaggaactcaaagattgcattaagggattgctgtatttggtgggagtggtagaacatcgattccgggttttcagaactgatggatacggatagagagagacacagcgccagagaaacagctttttatctgtttactcagcaaagtcttccggcttgcaaacccgtcttaacaccaggatgggttatagcaatatttttgtttatgggtgtcattttcattcctgggggcctggtcactctgcgtgcttctcattgtgttgttgaaattggggaccgatatgatattgattgtgtacctgagccatctagaatggataaagtttcatatatccaagatgactcaattcccaagaattgttctcatttcatgaaggtgcacaagtacatgaaagctccaatttacatttactatcaactcgataattattatcagaaccaccgaaggtacgtcaaaagcagaagcgataagcaactcttggatggccagaagtatcatgacacagttcttgtcaacctgtggagtcgaataacaataggcctattgttccttgcggattga

SEQ ID NO: 23054 - DNA, 487 bp, Gossypium hirsutum
  Clone ID: GOSHI-09MAY01-C64778_1
caccaccattgttgttaaacataatgcagcaccctctaaaacaccaccttacccggacccttttagctttaacctcactttctcacttcccaccagcttcccccctcaccccatgccgcaccgtatgtggcaccaccgccataaactaccctttcagcatcgacgacggctgtggcgccccacaataccgctcaatgctgaactgcacaggtaccgacctgtttttcatgaccacttcggggcggtacaaagtccaatcaatcgactacaacaaacaaaccatggtggtttacgaccctgccatgtcgacatgttccattcttcagccccaccatgatttcgttatgaccgacgttgaatccgtcgtgataccgcctagttccgacaccgtttttgcccttctcaattgttctatcgactcgccggtgcttaaccggtacaagaacctttgttttaacttctcagggcattcgtgtgatgagcttta

SEQ ID NO: 23055 - DNA, 646 bp, Gossypium hirsutum
  Clone ID: GOSHI-09MAY01-C64118_1
ctactcctaaacctcatagctcgagcttcaagcgttccagagagtgcagtgtaaggccatggcctttgctatttccaatccaacttccattgcttcttcagtgtcaccatcgctacttaaatcgacccaagcgagagcaaggactaattcatggcgtcttaacacccaccatttaaactcacaggttgtttcccggttaaaaagtgagggcggtggtcgccgtgtttggcgccggagaaaattggcgaagaaggatgaaatgttgcagtacaagttggagaggatgccgttcttagaggagcaagttcggaagataagggaaggagggaaactgttgacgatggacattgagagactgttgctatctgaggacaatcgttttgattttgtgaatgatgtagcggctgaggccaaagaatatgttgagaataaccgggatgaatatggaggttcgaagaaagctatacttcatgtgcttagtaaccgtgtcaatgattcggggttttaccggccggatgcttatgccgaatctgaccctttcaagcctggacctacttttttgaaggaagaatttacataaaaggttttaaaggtaacatatgtgttttaagactgtaataggttgaatgctagtgtacatgatgat

SEQ ID NO: 23056 - DNA, 548 bp, Gossypium hirsutum
  Clone ID: uC-gsflnu33B078h10b1
tcttttctccaaacatgtattctctaaaatcatatgttttggttgtaagcttaatctttattccctttttggctaacaattttcttgtttttgttaactccataacttcttcgtcttcttattcttcttcgtcgggtaatcaatacaccacttttttcaacgctatatcttcttccaccaatcccaaggcttccttaaactccggtaagaaccaaacgacgtcgtctctgatatcatccagcttctgcgacgtatgggacgtgacctgctctgggaggtgttgggcctggcccgggagcccgacaacgtcgagtggattaaagggttgagaaggaagatacatgaaaaccctgagctagcttttgaagagtacgaaaccagtaaactcgttcgatccgagttggaccgtatggatattgaatataggtaccctttagccaaaacgggtattcgggcttggattggaaccggtggcccgccctttgttgccatccgagctgacatggatgcccttcctatacaggaagctgtagaatggaagcataaaa

SEQ ID NO: 23057 - DNA, 402 bp, Gossypium hirsutum
  Clone ID: LIB3272-001-P1-K1-C12
cggacgcgtgggaatattccactttattcgacgccatagcttccgtcaacccaaaggctcctttaaactccggtaagaaccatacgccgccgtccggttcacgtggttcctcaaccagctgcgaggtatgggacgtggcctgctctgaagcggttttgagcctggcccggaaacccgagaacgtggagtggattaaagggttgaggaggaagatacatgagaaccctgagcttgcttttgaagaatacgaaaccagtaagctggttcgaactgagttggatcgtatggaaattgaatatagataccctttggccaaaacgggtattcgggcttggattggaaccggtagcccgccctttgtagccatccgagctgacatggatgctctgcccatacaggaag

SEQ ID NO: 23058 - DNA, 853 bp, Gossypium hirsutum
  Clone ID: GOSHI-09MAY01-C64368_1
cacaaattgcagctgttggatcctgctgcctggttggtgtcatatgtggtggaaccctctatgttgccaaccttggtgattcacgtgctgttttggggagagctgtgaaggcaacaggagaggttctagccattcagctgtcggctgagcataatgtgtgcatagaatctgtaagacaagagctgcagtcattgcaccctgatgactcacagattgttgttttgaagcacaatgtatggcgtgtaaaaggtcttatacaggtttccagatcaattggtgatgtatatttgaaaaaggccgagttcaacagggagcctttatattcaaaattccgccttcgggaacctttgaaaaggccaatattaagtgcagacccatcaatatcagttcaccaactgcagccacatgatcagtttgtgatatttgcatcagatgggctgtgggagcacttaagcaatcaagaagctgttgatatagtacaaaatcatccacgaagtggaagtgcaagaaggctggtaaaaactgctctaaaagaagcagcaaataagagggaaatgaggtattctgacttgaagaagattgaccgcggcgtgcgtcggcatttccacgatgacatcacagtaatcgtggtgtttcttgactcaaaccttgtgagcagggctagttcggttaagggtccggatctatcagttaaaggaggaggagtcaactttcgtcctaatatactggctccttgtgccacaccaacagaagctggcagtacctaatcgtgctgcatgcttttatttgttgtatcattgtctaatgtgaatacacctggtagaatccaaaagccttaagaggaacaagcctt

SEQ ID NO: 23059 - DNA, 465 bp, Gossypium hirsutum
  Clone ID: GOSHI-09MAY01-C64318_1
caaatttttttttttttgatttccgcttttcagtttgggggatttttgcaccttgatatcgactcattgtttcgacgctttggcctctcatcgatccacaaagatgattgatgatcagcagctggggtttcttgccaattttttaggggtttttatatttggactggtaattgcttaccattacgtgatggccgatcccaaatatgagggaaactgaaaccgttagacagttaaattatattacatgttagataagaacttagattatgttcgtaaacatgttagttttctttgcataattgaactgcttgttttggtcaatcttcttttacatactaaagattgatctatgatcgattttcgttagatttgaaggatattaacttttgtctttcaatgcatttagtgatgcttttgtctcgttagcgatttggcccgctcgggcgcgcgggatatttgccttgg

SEQ ID NO: 23060 - DNA, 426 bp, Gossypium hirsutum
  Clone ID: uC-gsronu33B076e07b1
tccacttgtccgccagttttcccttcttctttttttccctgtgatgaagatgggttttaggagctaccatgttgatgaatttcaagcccttaattgcattgaatggctgaaaccatcttgctgacctactccttcttcatcactatcactctcgctatcatcttcatcgacttcatcgtcttcgtcgtcttcgaatgatcagcacgggcacgattataaaccccatggctatcttgaaactgcctgtttcatttcaacagcagctacaacaacacgatggtgggcagcttgcgcaggaacctattcaatgcctaccactgatcagcaagcttacagagaacaaatcattgaaaggggatgatgttgggaattctcgatcagaatccaaccttgaaaaggtggctttttattctttaaacttttgaa

SEQ ID NO: 23061 - DNA, 405 bp, Gossypium hirsutum
  unsure (1)..(405): unsure at all n locations
  Clone ID: LIB3272-003-P1-K1-H7
ccctgtgatgaagatgggttttaggagctaccatgttgatgaatttcaagcccttaatttcattgaatggctcaaaccatcttcctcacctactccttcttcatcactatcactctcgctatcatcttcatcgtcttcatcgtcttcgtcgtcttcgaatgatcagcaagttcagattataaaccccatggctatcttgaaactgcctgtttcatttcaacagcagcaacaacaacaagatggtgggcagcttgggcaggaacctattcaatgcctaccacttttaagcaggcttacagagaacaaatcattgaaaggggatgatgttgggaatattgttaaagaagaaaatatagagaaagttacagtttctttgcacattgngttgcctaacagtagtactgg

SEQ ID NO: 23062 - DNA, 714 bp, Gossypium hirsutum
  Clone ID: GOSHI-09MAY01-C64268_1
tcgtttcttgtgatctcctgaaaaccgaggtttctggaatggaagaaagaaaagtaaagggagaggttatgtgcggcactctcgacctgactgctctcccactagattgtgtcaccctcattatttccttgacctcccctcgagatgcctgtagattgtcgcttgtttcaactgcttttaattcggctgctgaatccgatgctgtttgggaaagcttcttgccatcccaataccaggaattaattccctcatcgctctctttctcgtccaagaaacaactttatcttagcctctgtgaaaatccccttctcattgaagctggacgaaagagtttttggctcgaaagagtgagtgggaagaaatgttacatgctgtcacccagggacctctccattatatggagtgacaccccagattattggagatgggtgtctatacccgaggccaggtttgacgaggtagcagagcttctgcacgtttgctggtttgaaatccgtggaaggattagtatctccatgctttcacccatgacgcactacaaggcttaccttgttttccaagcagataatgtttatgggtttgactatcatccagtgaatcttagtgttggagttgttggcactggaggtagcaagagaagtgcctatttgcaaccaaaaaaagacggagacggctatattcgcagataagagaggaacaacctacaccgggtga

SEQ ID NO: 23063 - DNA, 264 bp, Gossypium hirsutum
  Clone ID: uC-gsronu33B039c02b1
tcatagtacgtttgctggtttgaaatccgtggaaggattagtatgtccatgctttcacccatgacgcactacaaggttaaatttgttttgcaggtagatgaagtgtaagggtttgatattaatgttttaacatattattatgtcttattctatttttgtcttttatatctctttcttaattggattaaattagttttaattagccttcctgttttggttccagttattaaaataattaattcagttttttttggttgattgggt

SEQ ID NO: 23064 - DNA, 648 bp, Gossypium hirsutum
  Clone ID: GOSHI-09MAY01-C65868_1
acccattgattttctctctgattcgatatccagggcagggaattagccacgaaatcgataaagcttttcgcgatacccagaggtgaaacaaattgtcacagcctagacgggtgcacgggtgattatggcagacttagaaaatttgcttcttgaggcagcgggaagaactggtactgggggaaggaaccgacactcacttccaccatctagaaggcgacgtgaaggttcatattcagatgggggaagtgactctagggatgatgattcggatgatgatcatgggtatgcaagtagaaaaccgtctggttcacaagttccattgaagaagaggttagaccctgctgaaagagatgatgatcagggcagtcaggaagaaggtgattatgatgatgctggttctggtcgagagcgtgacagcagtgatgaatctgatgttggtgacgatctttacaagaatgaggaagacaggagacagcttgcgcagttgactgaactggaaagagaaatgattctgtcggaacgagcagataagagaggtgataagaaatttactgagaagattagatcgaagcgggaaaacgataggcctagccggtcacagagagagactccgcctcttccttcttctcgcggagtgcggtcatcggc

SEQ ID NO: 23065 - DNA, 496 bp, Gossypium hirsutum
  Clone ID: GOSHI-09MAY01-C65468_1
atcaaattcaattttaaaaatttctttcaaatataattatcaatttgagttttaaaatactcaattactaaatttacttccacctgatttttagattcttgagattgattggcataagagcttaatttatttcccctcgcttccacccgatcgttgggatcgattagtattagtattgagaagtacttatgggaattggttttaagataactccagtactagtagctgtggtcaataaaaattaaagaagggattctcagattctgttttgttgtgttgctctctgtggatacacaagataattagggtttaattagatttggattcaagattccttcttcatcgtcattttcctaaggaagctacggagcaggcggggctttcttccttcctcgttgcgctttctctatttaatatttgcattatctttatgccattgcaataaaattgtaaagattgttctttggtttggggactttttttaccgctcatactt

SEQ ID NO: 23066 - DNA, 461 bp, Gossypium hirsutum
  Clone ID: GOSHI-09MAY01-C65748_1
cttccattctcttcccttccctgggcctccaaaaatccacgtctctctctctcgtcaagacaacgaaacccacaaaaacctgttgggtgtccaaattcaccacaaaacatcaatggcgaacctcaaagcagggacaagaccaccatgggttggtcttggtgctgctgtctgggtacagatagcatctgggaatgcctacaacttccccctttattcccattcattgaaatctgttctggggtttaaccaacatcagctgacaatgcttggtgttgctaatgatattggtgaaaacgtgggattactccctggtattgcttagtaacaagttcccaccttgggttatcctattgattggatcttttgcttgtatcttgggttatggcgctctttggcttgctgttagcaaaactgttctatatctgccttattggctgctatggcttgcactttgtgtcgct

SEQ ID NO: 23067 - DNA, 471 bp, Gossypium hirsutum
  Clone ID: GOSHI-09MAY01-C65288_1
cggacgcgtgggctaatattctctaaacatggctctgagatggtttctgcattcagcatgtcatgttctggggtacctacatgagtctgatgacatgcagtactgcaagaacatggcaagtgaacaaagtggaggagtgactcagagctcaaaggtgtcctccaacgctgagctgacggtggttaaagcgaaaatgcatccgggttcggggtttcagatgccgctgcactatcctcgttacgcgaaagcggattacgagaaaatggaggagtggaaagtggacatgcttctcagggaatatggactaagtttggagggcaacctcagccttgatatgagagcatatgcaatgggcacattcttgtggcctcatcagtattgatccatcttctaatcatcatcgcgccttaatcaagctgctagctaatatcatatgcatacagttatatataattaaatatagtacatgta

SEQ ID NO: 23068 - DNA, 580 bp, Gossypium hirsutum
  Clone ID: GOSHI-09MAY01-C66598_1
cggacgcgtggggccttccgtcttttctttccccaaatttcctagtgtttacaagtctagggtttttctttttcttcttctccttcggctctctctaaggcttcacccttgatattgatcatggccaactctgatcaaattgcagattcactaggggaaattgtctctagattcacaagccgtgactgcaaaagttcccgataccgtaaacaaggatctttatggtgataatggctcatatgtgtaccagcagacttatggttatatgccatatggggtgtattctatgcctagttcacctcttcctgctatgggacatgacggtcaacttcatgctctgcaagaataccattatccaagtccttattaccagccactgcctcaaactagtcaagccaatgtttctcaagttgaggtttcaacttctggtgtaggtgatcaagcttccttatccattgaaacaaataagggaaatacaagtactatcacaaatggtgggggcttgagtggtaatagcggatcaggttcattgaaatcaactttcaaaagctcctcgttaaatccgaatgcttcctacaaa

SEQ ID NO: 23069 - DNA, 395 bp, Gossypium hirsutum
  Clone ID: LIB3272-032-P1-K1-D10
gccgactgtcgtgtatccggtatacccgagaagaaaagcccatgtttattttgcgtctgggcgctcccccttcaaccttctcttgctttgtttaccaccatcaagatatagagatttgttggagcttttaacattgagatctgtaccattcttttttcggtttctttgcaaggttagttgatccttggagtgattgaggggcagctggatgctgttttcttacatatgttaatatggaaaagaaaaaggcaatctctcaatacagagagaggctggacaacacactgtcctctgctgaactgactgatcccgagacacttaaaacccttgtcaagaatcagattctacgatgtgcacaacatgagaaagaagaatctagtgtacatttattggac

SEQ ID NO: 23070 - DNA, 367 bp, Gossypium hirsutum
  Clone ID: LIB3083-110-Q1-L1-C7
aggcagccgactgtcgtgtatccggtatacccgagaagaaaagcccatgtttattttgcgtctaggcgcttcccattcaaccttctcttgctttgtttaccaccatcaagatatagagatttgttggagcttttaacattgagatctgtaccattcttttttcggtttctgtaatttcacttttctctggttctgattattccttcttataattttcattggagatcaatttcttttttcctttgattttcattgagcttcatgtaagttgaacttctttcattgcttgccttgactgataatatgacttgtcgatcttatgaggttagagatatgaatgtttttttcttgttttatagaattcctt

SEQ ID NO: 23071 - DNA, 390 bp, Gossypium hirsutum
  Clone ID: GOSHI-09MAY01-C66778_1
caaaaaaaaaatcccaaaagccatggaaaaagagaagctggacttcatactggttccgacgggtctactcgtgcttgctctctatcatgtttggcttctttttaccattctcaagcatcccactagaaccgtgatcggcttaaatgctgaatctcgccaccaatgggttctctccatgatgtctgatcccttgaaaaatggtgttttagcagtacaaacaatacgcaacaacataatggcatctacacttttggcaaccgtggcaggcactctgagttcgttgattagtgttttcgtaaccagcagctcggactctagcaacacaacttcagaaatattttatggcaataagagtcgtctactctcttcaatcaagtatttttccatctt

SEQ ID NO: 23072 - DNA, 593 bp, Gossypium hirsutum
  Clone ID: GOSHI-09MAY01-C66648_1
ctttggagaaatatgtcagctcctacactccccatggcagccggtgttgcagctgtctcttcttcactttacaataacaccaaaccctcctctcttttttcttcatcgattcacttccttccttcaagacttagctctaagcagttaaaaccttccaacctcaaaacccaaagcctcaattcccttgcctttgtctcttaacttatctctcccacgtctgccctgcttttcagcagcttttgacagcttccaagttactgaagatgaccaaagcagtggagaagaatacccagaaacagaatctcaagaccttgaagaacaaccacaacaagaggaagctgaagaagataaggtttcagagtctggcggtgaagaaggaaagttgtatgttgggaatttgccttattcaatgacttcttctgagttaactgagatttttagtgaggctggtagtgttgctaaagtggagattgtttatgatcgagttacggataggagcaggggatttggctttgtaacaatggggagcgttgatgaggccaaagaagcaattagactgtttgatggatctcaagtcggaggtcggacagtga

SEQ ID NO: 23073 - DNA, 480 bp, Gossypium hirsutum
  Clone ID: GOSHI-09MAY01-C66628_1
ctatacccctatgaccgacccttatattagttcactctctcttttccctttggggttttgggcttctctcagtttctcaatcccaattgtttttaaaatggcttcttccactgctcaaatccacgtactcggtggcatcggtttcgcttcttctcgaaaacccaaccaccatgcacccagaaccgttttcttcggtcaacgacttggtaaaccgtcgccgttaaacgcagccttcttacggttagcgaaaaccaatggaaaacggtacaatgttgggccggttagagttgtgaacgagaaagtggtcggaatcgatctcgggactactaactcggcggttgcggctatggaaggagggaaacccacgattgttacgaacgcggaagggcaaagaacgacgccgtcagtggtggcgtatacaaagactggggataggttggttgggcagattgctaaacgacaagccgtcgttaaccctga

SEQ ID NO: 23074 - DNA, 638 bp, Gossypium hirsutum
  Clone ID: GOSHI-09MAY01-C66168_1
ctcgaacccaacaatttgttgcatttctgggtacacttcatatttcaatttcatcaggtaccaaattttatttgctccacgggagggaaagttagtgttaggcgagatcaatatgaaatcgccggcgtcaggcttcatggaaagcccctctaaagttcaggatgccaaccagctgaaaatttaatacccattaggcttgacatagaagtcgatggacagcgctataaagatgctttcacttggaacccttatgatccggattcagaggtggtgatgtttgcaaaaaggactgtaaaagacttgaagcttgcccctggtttccttccgcaaattgttcaatccattcagtcacagcttgccacctttcgatcatatgaaggtcaagacatgtatgttggtgacaagatcattccaattaagcttgatcttcaagtcaatcatacagttatcagggatcagtttttatgggacttgaacaactttgatagtgatcctgaagaatttgctagaactctgtgcaaagatttaggtattgaagaccctgaagttgggcctgcagttgcctttgcaatcagggagcaactttatgagattgcaattcaaaatgtaacttcagcaagggagaacagaataagcaa

SEQ ID NO: 23075 - DNA, 423 bp, Gossypium hirsutum
  Clone ID: LIB3585-001-P2-M1-G3
cccacgcgtccgaagtttgaaaagtaaaactcttttattctctctgggccaagagaaggattcaactcgaacccaacaatttgttgcatttctgggtacacttcatatttcaatttcatcagttaccaaattttatttctccacgatccggattcagaggtggtgatgtttgcaaaaaggactgtaaaagacttgaagcttgcccctggtttccttccgcaaattgttcaatccattcagtcacagcttgccacctttcgatcatatgaaggtcaagacatgtatgttggtgacaagatcattccaattaagcttgatcttcaagtcaatcatacagttatcagggatcagtttttatgggacttgaacaactttgatagtgatcctgaagaatttgctagaaactttttgcacagattttag

SEQ ID NO: 23076 - DNA, 486 bp, Gossypium hirsutum
  Clone ID: GOSHI-09MAY01-C66128_1
acttgcaacaattgtgtctttcatctccatccctccaccacttcctcaaaagtccatcttcctcacgcgtccccttctttttccttcatagcttccagacaggtccagggaatgcagaaagatgtgcttgcatgctgtgaactttttatctgaagcacataaagttgtatccggttctgaattacccgcattcattcccgatgatgttggatgctcaacagacagcaaattcattccctgtatccatattgtaaatagagttgaaagtaaaatctctgccatgttgaagggtgacctcgttgaagacggttgagcactccggttatagccactcctgctctttagatgttatacatatatatagttactgcaggaggtaaaaatttatctaagggtgttaagatttgaactttagaatggaaaataaagggaaggtgttgatgcataagtatgaattcggaagattgttaggacaaggaaactttg

SEQ ID NO: 23077 - DNA, 687 bp, Gossypium hirsutum
  Clone ID: GOSHI-09MAY01-C66048_1
tccctttctttctctctcctctacttactattcatttttctctcttgaattttctcgaaaaattttggcaaaagccttgtgagatgtgaaaggaaagggaagtctgggtgttgttttgtctgacttcaaaaatggcttctttgtactgcaataatcaggtaagagattcttgttttaccaacgcacgccatggaagatcatgttccaaagctcaagcttgtctcgaaaagattcttcatttaatttcaagcatcccaccaccatgtgaaattaacccaaaccctttcaagaagagagggttcgatattgatttaaacttgagattaggctcttttgtcgacgatgatgacgagagcgaagaaaaatccgattgttttgctgagaatagtttcaatgaagagaaaacaggtaccggtgaagctacagcgacggatgtttcttccgatgttacagatattccaaaaagcgaagagtttaagagcggcactgagggtgaagttaaagcttcggcggcggcgtttcatgattcattggatttgctaatagaagcggcagagatgatctcagccagggatatttacctgaatgaaaagaaaaaggaagtcaaaaaagttgaaaaatggcgtcggcgacggtaggaattcatggaaaaggttaaggactactcgttaactttgtggaaaaaag

SEQ ID NO: 23078 - DNA, 602 bp, Gossypium hirsutum
  Clone ID: GOSHI-09MAY01-C66298_1
tcttcctctcctctctttctcaaccctagccgccgtactcctgcgccgccaccaatcggaaaagccaccaaacgatctgcctttcctctttcttttaatccaccgcgccatatcttttcagaacccacttgaaagccattaaaacaccaaatcgacttcgactttctcttgccccgatctaccgcctccgccgtcagatcgacacgggatatcaggggaagcttcccttccccgagatataacctctcaaatatgttctctcttcctccttttcttttctgctgattttttctgctgtaatggttgtgaaatgatgattgagcagtgttggtgaaggtggtggctatggtttagagaggggcggagagtgatcttgatggtgggcggttgggggcctcgggagttatgagatggtggaggttctgggtagtgaaattgcggtggaaatggggaagatgatgggtatggtgggggattgggcggctttgactttgactcagtgaggataagtgatggcaaaaatgttgaggtttatggttagttaatttatcgatgtgtatgtaggataatttgacgtaggcttgcagctggccgagctggct

SEQ ID NO: 23079 - DNA, 601 bp, Gossypium hirsutum
  Clone ID: GOSHI-09MAY01-C67928_1
gtttggttaccatcaccaccaccagcgccaccaattgcgaaaagccgagtcgaagaagcggaagccgagcgctcgcaagctggcttacagtccgaagcgagccatggttgagctgaggcactcgggcagctcgctcgggagccgagcctcttcttctccgatgaaacgcgacgaggatgcttcccctctcatcttcaacgatcacgtccttcgagatgatgatgacgatcatcctcgccattcttttcgagatcgttaccgttcgttttggtcacaaatttactcgtttttccctttccttaatgatgatcctaggttttctcaacacggttccaggatctcgcttctcttgctccttttcatcgccgtcgctggattgatttcctttttctcgatcttacaacgattaaattctccgtatttgtgtaaaaaagatggcattgttcttcactgtccgcgagtcaaggagaatccttcgctttgggagaatcctttctctgcaactacttcttggaagccttgtgccgagcggcgtgacggtggaatgtcggaccttcctcccgagaatgaaacgagtggttatatatttattcatgctgac

SEQ ID NO: 23080 - DNA, 1147 bp, Gossypium hirsutum
  Clone ID: GOSHI-09MAY01-C67808_1
gtcaaccactaactcccagcgatctggagagaaagaagagatgaaagtgaagtcgtggttagttgcatcggcgccatttgcagccatggtggctgtggagtgcctggatgttggcttaaccaccctcagcaaagctgccatgtccaaaggaatgagccactttgtccttgtcgtctactcaaatgctctagcttccctcattcttcttccggcggccttcctcttctccaggaaaaagcggccaccaattgcttgatcttttctgtgcaaaattttctgcttaagcattgctgggatcactttgatgcagaactgtgtaatcaccggtgtaagttacagctctccaacccttgcttctgctcttgccaacttaatcccagctttcactttcttgcttgctgttatcttcaggatggaaaagctagagttgaaaagcccaaagagtcagatcaaagtgttgggcaccttggtatccatttctggagcactcattatgaccctttacaagggtcctccagtactttccccaccaattcaaccgcatttacacccatctccttctaccatgttaacaacatctaacaattggctcataggtggcctcttcatcgctactgcctctttgtcactttcagcaaacatcgttggtcaggtaatttaatatgctatttcataatccacaatgctttggctacttcaaactgatactttccctactaaatttgaaggctgcggttctgaaagggtatccatcggagataacgttggtttccttctattgcctctttgggaccattcaatctgcattggttactttgatttttgaaagagaccccaacgcttggatgttgagtccagatatcgagctcatttctgtggtctactcagctttatttggaaatgtggtaacattcggcgtgcaagcatggtgcatacggcgtaaagggccggtctttgtggccatgttcaagcccttaagtattgctattgctgccttcttggggttcattttccttggtgaaacgctttatattggcagtattgtgggagcagccataattgtaacgggcttttatggggtgatatgggcacagtcggacaaggaagaagtggcaagacacaaccacccccccttagaggacatgat

SEQ ID NO: 23081 - DNA, 445 bp, Gossypium hirsutum
  Clone ID: uC-gsflmaxxa096e06b1
cccacgcgtccggatgaaaagcccaaagaggcagagcaaagtgttgtgcaccttggtatccattactggagcactcattatgaccctttacaagggtcctccagtactttacccaccaatacaaccgtatttacacacattttcttctaccatgataacaacatctaacaattggctcataagtggtcttttcatcgctactgtctctgtgtcactttcagcaaacattgctggtcaggctggggatctgaaagggaatacatcggagataacgtagggtctcttctatagcctctatgggaccatgcaatctgcattggttactaggatcctcgaaagagaccccaacgcttggatgatgagtccagatatcgagctcatctctgtggtctactcagctgtattagcaaatgtggtaacattctgcgtgcaagcatggtgcata

SEQ ID NO: 23082 - DNA, 651 bp, Gossypium hirsutum
  Clone ID: GOSHI-09MAY01-C67548_1
atgctcctacagctgactcataaatcttcatcaagctgcatggctctgtacgtatggggatgaatcgaggggcattatgaaaaggtatcaggcatcgagctcacatcctgctaatcctgagaaatttttaacatacatggtgccgtctcttggtgagctatcaaaggatatgtctgacgaacacgaagacatcacatattcttgggttcgagaataccattgggatgtacgtggcgacgatgcatatgacccaacgacataccttggttcgttcgatgaaggagaagctcgctatgtgcctcttcccacgaagcttaatttaagaaaaaagacgcccagagagggaagatcaggtgatgagattgaacattttcctgtacctgctagaattactgggaggagaagaccaacagttgcagcaatagaactccatgagccagaggtttattccaactcaaggggtggtatttgtagctcaaagatggcaaggctagatgcataagatggccatggaagaccacacaagctttcacgacaccaagatattgaccaatatagtggagctgaagatgatgtgtctgattgatgtatgcatatgaaaatgacggttagctatggttagaagtttttgaggcttgtgcactaaactga

SEQ ID NO: 23083 - DNA, 446 bp, Gossypium hirsutum
  Clone ID: GOSHI-09MAY01-C67518_1
tgaggacgcattcagaaaactgtgtaaacaaaggttcatctcggttttgccctgaatcaggtatttcatctcctcaagggcttgaagattcacatcggatacctgttgagaatcaattgcgtgaagtaatgacagtccatagctcgggttctgagaccactcctcatgactctgaactggcgaccttacactcccttggagaagaatcgataccttcgggtttaggatttctcgtgtccaatagggaacaaggccacggagatggaggtgtgcttcatgttgatgttgtgagcattacttccaatattatatccaatggcggtgctgatacaagtaatcgtgaagccaggaggaacagtagaagattgttctgggatgcattttccaggcacagttctagaacacttaatgattccccgtcaaatgataggaacgatgtagcatct

SEQ ID NO: 23084 - DNA, 504 bp, Gossypium hirsutum
  Clone ID: GOSHI-09MAY01-C67778_1
ctcacgcgtccgcccacgcgtccggaaaataaaaaataaaaaagaaatcgatgaagaaaaaccctagaaccgggatcgagatggctgtgtagatgcatgtcggcggaataacgttggatctgaattggttcctgcaattcattttcacgctcttcattgtcgcattggcgtctcttcgcttgctgaagaacacggcgtcgaactacttcgaggtcgacgccaatttcggtcgggaccaaccaatgccttccatccccatggacgccgatcacttcccttgcgccgtatgctctaatcccgccttcaagaagtgctctcggtgcatatccggtcgttattgctcctcagcctgccaacaggtggactggaaggatgggcataagacaaagtgcataggcttttcaacacatactacaaccaccaaaccgttttcaggagttgctctggttcctgtcagtggaacctctaagattatcaagaaaccgagaaaggttcttttcccat

SEQ ID NO: 23085 - DNA, 599 bp, Gossypium hirsutum
  Clone ID: GOSHI-09MAY01-C67188_1
cccatttgtccggttccgttccattcatctaatttggcggctcatgttctagtaaactgcaattggacggttttcatttctaaacctttcccccccaaatttctgatacttgtaccggtgaaaatggaggcattgggcggtaattgcgcgttttggggttggaaacttccggagataagaaacacaaagaggccgtttccgtcaaagtcaaaatcctcggattcatccgcagagtcaacgggcagtcgaggctaccgtttcccgttgaagcaagcggtgacagcttcctcactcgctctcacgggcgatactattgctcaactaagctcccattggagaaaacggaaagattccatttctggttccagtgatacaagtaaggatatcatgccaagcgtcatttcagatcatgattggcttcgtgccttgaggatgacttcttatggtttccttttatatggtcctggctcatatgcttggtataaatatctggatcactgttcgccacatcagacaccccaaaatataatgttgagggttttactaaaccagatagtgctttggcccttgggtaattggcgttgtctttgcatggaaca

SEQ ID NO: 23086 - DNA, 585 bp, Gossypium hirsutum
  Clone ID: GOSHI-09MAY01-C67068_1
gaagctttttgctggagaactaaccataatgctgaaaaggagcggcgatctgaattctataaccaaccatggattgaagatgctgtaatccgttacctgaatcgcaagtctatgggaggggattctcttggaagcacttgagcagggctcttttgaattgttgactttttcataccaatctcgaggcttctaatttctaactcctgtcctgcatattattgcttattggttcggggaacatcaaatgccacaagcaaagaactgtcccattgagcactttggatcgaatgaaaatttccaccaagttatctgaattcaccacggtgttcaccacccctatcagcaaacaccagtttgattcactaatccctctagaatatttactttgctattccgctttcgagcgtttgagatcgatgcttataaaaggactatgcagttgtaatgtgagctgatttgtttgcttttaggtgtaggtcaaacaggagtattgtatccttttagttcactaatcattagttcattaaatctgaaaaaaggagaattggcttggcttttgattcttttggcattttccttttctat

SEQ ID NO: 23087 - DNA, 757 bp, Gossypium hirsutum
  Clone ID: GOSHI-09MAY01-C67038_1
attttccggcggcttatcagcgttacaatccctaccggaagaagtcgacgacgatgcctctaaaaagggttttcttttggcagcccaatgcgggatcaaccgtgaacagccaaatcctaaacgaagtttcgcaatgcgtcgagagcatcaatggcgtcaaagaaggtcgttggaaagccactctcactttttataaacccatgttacgagatcaagcgttatccgccgagttcccgcgtgaattcatcgggatttcgcttccagaacaaccaaacaagtactatttcgtgcttcggttcaataagattgtcctggaatctgattcttctattcagttgataatggagaaattgcagtcttataaatccagggtcgcccttaatttcgaggggtttcaataccaactaggcgacttccaactgagagtacgcgcagttgtaccttctcattctgacaattcgacaggaatactgatggaggtggagtatcttccgatttcttccctagagaaatccgtactaatcatggacgagttctctgatctttggcaagacgcgatttccactcgatcattgccacgccgtttcatacctatagaacctctcttcctccgattacggacttgcggaccactgtacttcaccacacacgcgccgtccagtactctcatgtctcgactcaacttattgccctcggttcgtgccattatctgccgcaagactctcggatatctatacccccccctgcgtctagaccc

SEQ ID NO: 23088 - DNA, 404 bp, Gossypium hirsutum
  Clone ID: GOSHI-09MAY01-C60938_1
atgtcccgcgcgctcctccgctcgctccactccgctcggccccgcgccgtccgtcaacatgatccgctgcggcctggcctgcgagcgctgccgctggatcctgcccctgctcctactcagcgccatcgccttcgacatcatcgcgctggccggccgcggctggttgcagtcgagcgaccacacccagacgtcctcgctgtggtggaaatgttcccaagagggtggcggcagcgggtcctacgaggagggctgtcagagcctcatggagtacgcatggggtagagcagcggctgccatgctcttctgtggcttcatcatcctggtgatctgttgcatgctctccttcttcgccctctgtggaccccagatgcttgtcttcctaagagtgattggaggtctccttg

SEQ ID NO: 23089 - DNA, 418 bp, Gossypium hirsutum
  Clone ID: GOSHI-09MAY01-C60508_1
ctctcatactcatttcgattcacacatacatcctgcggcgccagccgagccatttgtcttccacttgttatatccctcttttgccttccgaaaagagcagcaaaatcaagtaaggttgatttaaacccagcttctttatcacagagcttcttcctttctgttcttatctttttgatcaatcgtctctgcttgataatggcaactaggcttcaatttgaaaattcatgtgaagctggagtcttttccaagctgaccaatgcctactgcttggttgcaatcggagggtcagaaaacttctatagtactctcgagtcggagctggcagatgccattccacctgctaagacctctattgctggcactagaataataggacgtctatgtgctggaaacaagaatgggctacttgtacccccac

SEQ ID NO: 23090 - DNA, 357 bp, Gossypium hirsutum
  Clone ID: GOSHI-09MAY01-C60648_1
cccacgcgtccgggatcttcactttacaggcattttaatcccttaaatctctctcaaccaaaaaaatgtcgggacgtggaaagggaggcaagggtttgggaaaaggtggagcgaagaggcaccggaaagttctccgggataacattcaaggcattacgaagccggcaatccggaggttggctcgtagaggtggcgtgaagagaatcagcggtttgatctacgaggagacgcgaggtgtgctcaaaatctttctggaaaatgtgattcgtgatgccgtttcctatacggtgcacgctaggcgcaagactgttacggccatggatgttgtttatgctctcaaaaggcagggcaggacac

SEQ ID NO: 23091 - DNA, 563 bp, Gossypium hirsutum
  Clone ID: GOSHI-09MAY01-C60158_1
atgtggagcaagatggctgtggagctgggcgtgctggttgtccggccctggcccggaaccgggctgggcagagtgatgcggactcttctgctgctactgtggttggcgacgcgcggaagcgcgctctactttcacatcggagagacggagaagaagtgctttattgaggagatcccggacgagaccatggtcataggaaactaccggacgcagctgtatgacaagcagcgggaggagtaccagccggccaccccggggcttggcatgtttgtggaggtgaaggacccagaggacaaggtcatcctggcccggcagtatggctccgagggcaggttcactttcacctcccatacccctggcgagcaccagatctgtcttcactccaattccaccaagttctccctgtttgctggaggcatgctgagagttcacctggacatccaggtaggtgaacatgccaacgactatgcagaaattgccgctaaagacaagttgagtgagttgcagctacgagtgcgacagctggtggaacaagtagagcagatccagaaagagcagaacta

SEQ ID NO: 23092 - DNA, 384 bp, Gossypium hirsutum
  Clone ID: LIB3196-010-P1-M1-F6
atacccctaatttgtgaaattaccaaaatacccctaatttgtgaaattactgaaataccctcgacctataaaattattgaaatacccttgacttgtaaaattaccaaagtacccccgatttacagaattattgttttaccctcgatttacaaaattattaaaatacccctataaggtagaattaccgaaatacccttgtagggtagaattatcgagatacccttgtggggtaaaattaccattttgcccctagggtgttgaatgaatgttttgcccttgtgggcaagtgactaacgtggactgtgtggttgacggaattgattgtgaatatatgttggtgatatgaatgacttgactgcgactggttgattcaaatatgggcat

SEQ ID NO: 23093 - DNA, 370 bp, Gossypium hirsutum
  Clone ID: LIB3196-058-P1-M1-F10
ggtatttcaataattttgtaaatcgagggtaaaacgataattctgtaaatcgggggtactttggtaattttacaagttgagggtattttggtaatttcacaaattaggggtattttggtaattttacaaaccaagggtattttggtaattttacaaactaggggtattttggtaattttgtaaaccaagggtatttcagtaattctagcctacagatatgagattcacatagtccaacccaatatttactacacaatcaaagaacttatccaattgggcccgtaggcccattgggcccatatagccccttttggcccatcgcggcctgaagtagccctcctacagctagagtagtgagaaatacacacct

SEQ ID NO: 23094 - DNA, 475 bp, Gossypium hirsutum
  Clone ID: GOSHI-09MAY01-C60008_1
atagaaaaataaagtagggcaaagtggataggaagtggtgggtggtagtgggacggatcctttatacagggtggttcaagggaggctttgctgtgagggatatgccatatgcatatttgggggaagagcattcttggcattgataacagcaggtgccaaggccctgaggtgggattgtgtttagagcattcaagcaagaaggccagggaggctggattaaataatctccaaatgcctcttaaaggaggtggtggtaactctaatttaaatgtcagataaatggttgaaagaaagttttcactctggctaggtgggaatcctaaatcatctctttacaatcaatactttctgattaatgtatctaattaaatatatcagacagaggtgtctggcatttattacttcgaggtctgtaattcaatgccaatttgaatttcttccaatgtttctatagccaaaatgatttttcagcttt

SEQ ID NO: 23095 - DNA, 592 bp, Gossypium hirsutum
  Clone ID: GOSHI-09MAY01-C60318_1
gaggaaccatggcatggttcggtatggatggagtaactagcctcgttccattttatttcctattgtgataatgttattaatggatggtagtgcattgcttatgacttactgagttataaactcactcggtgtttccttgtcacctattctaggtttcttggactcgtctctttttgcgtggtcgggccgtcatcgaagtcattacaccggatagcaagttttggtactttcttcttagttggcttaggagaacatttcggcatgtataggctattatgttgggttggaactttggtatgtaatctttcagccatgcgaaaatggcataaatgttcggttgggcttggggtcctatgatacttagttataaaacgtagtaaatgggttttataatgtggtcatgactgatattgggccaattcggttttggttgaataatagttgaggcctaatcgatttttatgccatatgtcatggttgattaattttggtgttaaaattcatgatatggcaatagtgtaatagggagatgtttgtcaatgattagcctttggcatggctagccatgatcataatttgtgaaatgcatgat

SEQ ID NO: 23096 - DNA, 497 bp, Gossypium hirsutum
  Clone ID: GOSHI-09MAY01-C61418_1
cttgttctagatcgcgagctcacccacatcatagtttctgagaaagagagctagctagggttttataaccctttcagccccacactcccaactccattcattctctctcttttcttttgcttaatacaaatggcattaatggcagatcaccattccttggcagttgcatttggtgtcttaggtaacatcatctcagtccttggatatctggctccactaccaacattctacagaatatacataaagaaatcaacggaaagtttccaatcactgccttaccaggtggcattgttcagctcaatgctatggctttattacgcgttaatgaaaaagggtgccttccttctcatcaccatcaactcctttgggtgtgttgtagagactatatacatagctatgtacatagcttatgcaaccaagaacagcagggtgtctgctataaaactttttgtagctatgaacgtagcgctcttctcattcatcattattctcacaca

SEQ ID NO: 23097 - DNA, 674 bp, Gossypium hirsutum
  Clone ID: GOSHI-09MAY01-C61408_1
cccacgcgtccggccaatccttatcaactctactctaactatttgggttctggaccattgcacttggagtataagaatggggttgatccagagccaggaagatgtagacgtacggatgggaagaaatggaggtgcagcaaagaagcagtcccagaccataaatactgtgagagacacatgcatagaggccgacagcgttcaagaaagcttgtggaagcttctcaagctaccagtagtggtagtcgtattatcagccatggaaatgctggcaccaacctctccatttctctgcaacttgataacagtaatactagcagtagtggcagcagcagcaatctttcttccggctttattggtttctccccaaagagtgttcttcgtggaagtaacccaaaatctgaatcttcaatgcacatttcaagagcattttgaagtgaaagaaaaaaagaaaggtttagcaatgccagatctcaaacgtttgatgtaggtttcttgggttgcttggtggtgagtagtgatgatgatgggctccatttgtaatggaatttgtaagcttggaaacgtgacgatagttatgtttccacgggccccttttttttttttggtcatcggttgctctttttcacactgctgtggttaaatgacaatgaaatgctaaacttttatatggttcc

SEQ ID NO: 23098 - DNA, 510 bp, Gossypium hirsutum
  Clone ID: LIB3825-006-Q1-N6-E11
catgataacaactgggctcatatctcatatggtaattgttgttaatagtacatgaaccatataaaagtttagcatttcattgtcatttaaccacagcattgaaaaagagcaacagatgaccaaaaaaaaaaaggtgcacgttgaaacataactatagtcacgtttccaagcttacaaattccatcagaaatggagcccatcatcatcactactcaccaccaagcaacccaagaaacctacaaacaccattaatgtttatcacatatcaaattttacacacacacaaaaaaaccctctcccaaaggcttttggctttacctacatcaaacgttaaaaatctgtcattgttaaacctttctttttttcttttcttctaaatttcttgaaattgtattgaaaattcaaattttgggttacttccacaaaaaacactctttggggagaaaccaataaagccggaaaaaagattgctgctgctgccactactgctagtattactgttatcaagtt

SEQ ID NO: 23099 - DNA, 607 bp, Gossypium hirsutum
  Clone ID: GOSHI-09MAY01-C61698_1
gcatcatgatacaaatgtatcggtgcaccatacacggagctgttggtggcttagagatggttcagacggtgctcagcctcaaacaagctttcttgagcctcctgatttcaaccgtcattcttcaaaccacccatacgataacttctctgagaggaatgtgcaagatgaagaccaatttcttgattggagggattcttggaggttatcccgaacgacttacttggatgatcttgaagccggagaggatgtaaatcttcattttgatgatattcacagtggacccccagaaactcccactttaaatttaaggcccacgagcttcaattgatctataatcacttagtttgtgatgtggtagtttccttcagatgaatgaaattgaaactaggtttctaatgctggactaagttttatagtgtcgatgttaagaaacccatgtattcgttgttgtatatagtattcgttataaggttatttctttaaggacctcaaatcttgatttgcaatggaccatactcaagaaaaatgattacactgttaaatttgtgatctgtgtataaacaaacaataaatagccattgatcaattaccatgtattcctttgaac

SEQ ID NO: 23100 - DNA, 557 bp, Gossypium hirsutum
  Clone ID: GOSHI-09MAY01-C61638_1
cccacgcgtccgctttcaaagaaacctaggtgcttaccccaggtactgcgccgctcttgcgtctacgacctccacccaggctccgattgcaacggagagggtcagagatccgacggcttcctacgacaaggtacgactccttccttttcttcccttttttgttgtttcgcttatagatataaaacagaaatgaaaagaaacggccaaaagacaaagaaaaaccaaggaaaaaaaactaccatcacctttcgaatttttgatttttttatttctctctgaatctttttttgtacacaatatgcctgtgtgtctgtgtgttgatatcgtaaaaaaggaaactttttacagattttgttggctcttttatagccgaaacgaaaataaaataaaatacaatcgtcctttttctttttgctgtgctatttttgtttgtttgtttgcaagtacggcctggaggagaagaagcacgtgtgcgtactgaggctcgcgcgagtgacagtggcgcgcatgcgaggccagaggttgattgcggcttgattgcttgcttgaaccgccgc

SEQ ID NO: 23101 - DNA, 339 bp, Gossypium hirsutum
  Clone ID: GOSHI-09MAY01-C61098_1
ataaaatagttatcctggggcctacagccataccattttgaaggtgtcttatctcctcggatctagggaggtaagcagggtcggcctggtagtacttggatgggagaccacctgggaataccaggtgctaaaagctttaagaataaaaaattgtgatcttactttgcgtttatcccatgttgagttctgcgctgggcagagggaacacacggtaaatgcgttgtggggaattacaggctacttgagggagtgacagtctggtcgttactcccgccttcctccatcaatgccacgctggcatcctcttacgcagtcaggctttagggctgatgggttcag

SEQ ID NO: 23102 - DNA, 372 bp, Gossypium hirsutum
  Clone ID: GOSHI-09MAY01-C61088_1
gcaccttcttgtttcttgtgttcggtgggtttaaaagtgtgcacaattcttcctcggtgcgacacaaatcagttggtgtctcgtcacttttttggactcctagtgcaattaggattctttggtagttacggttcatactctttctaattgattgatatagactctactaaagaactcacaagactgaattctacctctttgagaatttgattttccttttggagtgattaacggtgaggtttgttaattttttttccgagtgttgagtgttcgttttgcaggtattccaaaagaaaaaaaataagatgcatagactgggtcaagtcgatgatgcccataatgatgtccatgataaatttaaagagatccaac

SEQ ID NO: 23103 - DNA, 406 bp, Gossypium hirsutum
  Clone ID: GOSHI-09MAY01-C61298_1
atcgccaagggagcaggacggagccatggacccggccaggaaagcaggtgcccaggccgtgatctggaacgcaggctggctgctgctgctgctgctgctgctttgcagaggagcgcacgccctggagtgctacagctgcgtgcaaaaagcagatgacggatgctccccacacaagatgaagacggtgaagtgcgcgccgggcgtggacgtctgcaccgaggcagtcggggcggtggagaccatccacggacaattctcgatgggagtgcggggttgcgggtcgggactccccggcaagaatgaccgcggcctggatcttcaccggcttctggcgttcatccagctgcagcaatgcgctcaggaccgctgcaacgccaagctcaacctcacctcgcgggcgctcgac

SEQ ID NO: 23104 - DNA, 250 bp, Gossypium hirsutum
  Clone ID: GOSHI-09MAY01-C62918_1
tcggttcaattaatcaatcacacctggaatcgctaatagcccgtgagtggattagttactcatggaatccctaaacataataaactcgctcatagtgctatgcatgaaaaataaatgaagaatcagtggtagagaatcgtgattgctttcgacagatgaatgcgcaaaacccattcaacggttgactagccctacatatcaagtgctccgagaacacgaatgaaaagaatcgcaacgaaatatagaccct

SEQ ID NO: 23105 - DNA, 535 bp, Gossypium hirsutum
  Clone ID: GOSHI-09MAY01-C62868_1
ttcatcatcttcatattcggcattagcatcaaatataatagcccatttcttcccactttgaatttatgcatccatttaatcatagtttgtttaagcactcatacaacaagattcatccaatttaacaagaaacaaaaactttattcctccatagctacaatggccgaaagatctagacatctcaatactgaaatttctaacatgggttgcctaaagaatttggtagggagttcaaatttatctagcatttcaagtaatttaacacatccatatagctaacatgctagtagtatcaaggcatcaactaaaattttgaagcctcttagccgaatcctaactctccaacaactctaatttcatccatgagataaatagaagtaggctaaccctccaaaggatgtgtaaacctccaaaagcaacattgaacataccttaatctcaagaaccaccttggccgaacttcccctcttcttcttccttccattcggccatgttgaacaacaaaggaagaattttgtttttccggacgcgtggg

SEQ ID NO: 23106 - DNA, 677 bp, Gossypium hirsutum
  Clone ID: GOSHI-09MAY01-C62838_1
gtacaagtgttgcaagcagaccattcgcaatagttactgtactggtgctgccggtattgaagctgcagaagcagccacagacttgatgaagtcaaacattgctcgtaaagcgtcctccgaagatgccccagctcctgcacaggagaggaaacacgttacttggggaaccgatgttcctgaggacttggttctcgatgaaaaacttctcaccgaggctcttaagaaggaggaggagaggaggagagaggagaaagatgaaagaaaacggaagtataatgtcagatggaatgatgaggtaactgctgaggaaatggaggcatatcggatgaaaagggtacaccacgatgatccaatgaaggatttcttaaattgaaaagcatgttgataaatgtaagaacaaataaaatggatacttttagctattatgatatcgtcattgagttgtgatgaaaatcatatgttcttttgttttgtttgtgcgatacaccatgtattttcattctacatcaatgacataggtttcccctaaaaaaaaaaaaaaaaaaaaaaataaaaaaaaaaaataaaaaaaaaaaaaaaaaaaaaaaaggggccgccccttttgaagatcccagttttctttcccggtccttccgatctatatcttttttattggggcccccaaattcaattcactg

SEQ ID NO: 23107 - DNA, 365 bp, Gossypium hirsutum
  Clone ID: LIB3196-042-P1-M1-E2
cggacgcgtgggtgggagattcatacaccgactctgaattctgaaaccatcctctttctttatatagatatatagtatggctctcttgtagttatcttcatcaccccacctccggcccctttctcgcgctcttttcttttttctttctttttcaagccatcttcttctacctcttcttattctcttggttttcagcatatataattcaactcctccttcagtaatggtggatcttcaaactgtctgctgcatgtgcggcgacgttggttttcctgacaaactcttccgctgtaacaagtgccaccaccgctttcaacactcgtattgcagcaactattacagcgagttggcagagccaattggac

SEQ ID NO: 23108 - DNA, 307 bp, Gossypium hirsutum
  Clone ID: LIB3585-058-P1-K1-D2
acgctctctttcaccaaatcttcttcctcctctttatattctcttagtttttttttttcaccatcaacaatggtggatcttcaaactgtatgctgcatgtgcggcgacgttggttttcctgacaaactcttccggtgcaacaaatgccgtcaccgatttcaacactcgtattgcagtaattactacagcgagttcgctgaaccaattgaactgtgtgattggcgccaaagcgaagcatagaactcgaggcaaggaaggtcttcatagaaaccaacaactgtaaacgagagtggaattatcaaccgat

SEQ ID NO: 23109 - DNA, 357 bp, Gossypium hirsutum
  Clone ID: GOSHI-09MAY01-C62588_1
taaaaacagagagaaatggctctacacgagccaaattcggcgagaaagaaggccactgttatagccatggatgaaatcccctgcccgaaccttcacatttctccggcattcgggttctaaatcactaagacccaggtacgtgcgtgagtgcatcactgatgtggcatggtggagcagcgcatgacgcggaggaagcgcgagacgtgcggtgcctggagactgccctgggttgtgacggctgatgggggttttggttttggttttattatttttttgggctgtgggggtttatgtaattgggcttggtttgtaattttgttttaggtgtttgatttggggtgtgatttggacttaaat

SEQ ID NO: 23110 - DNA, 849 bp, Gossypium hirsutum
  Clone ID: GOSHI-09MAY01-C62698_1
ttctactagaggggatcctttagggaatgctggaaaaaccttaaaggaagaaattcataagaaaattgaaaaatggcaagaaccacctcctgcaaagcagcctaaaccacttcctgttcctgattctgaacctaagaaaaagaggggtggtcgtcgcttaaggaagatgaaagaaaggtatgctataacagatatgaggaagctagcgaacaggatgcaatttggagtacctgaggaaagctctttaggtgatggactaggtgaaggttatggaatgcttggtcaggctgggagtggcaaactgcgtgtttcaattggtcagagcaaacttgcagccaaagttgctaagaagttcaaggaaaagaattacggaagcagtggtgccacctctgggctgacttcaagtttggcattcacacccgtgcaggggattgagctcacaaatcctcaagctcatgcacatcagcttggcagtggaactcaaagtacttacttctcagagacgggaacattttcaaagatcaagaggacatagaaagggaagaagctcacctaattagatgacatttggttatgctgtaattacgcatttgataagagttttatagactaaagcacaagttttgttagcttagctggctatagttgtcccttctttgtaagctaccagtcactgtttccctgttatcttccagaatcccctgtttttaaagaactgatgaaggcagcaatcagcaggtgaaagattgaagagaaccatcagcagcaaccagtgtcatagggtcatgactcttctcttctcaaaggacatgtatgataaggtatgataggatgtataatgcatccaga

SEQ ID NO: 23111 - DNA, 497 bp, Gossypium hirsutum
  Clone ID: GOSHI-09MAY01-C62318_1
atcggcgagggcgagagcggccccatgggcaacatcatgatcgatcctgtcctcggtaccgtgggcttcgggtctggtctccatgggtgggccttcaccctgaagcagtttgcggagatgtacgtggccaagtttgctgccaaaggggagggccagttggggcctgccgagcgggccaaaaaagtggaggacatgatgaagaagctgtggggtgacaggtactttgacccagccaacggcaagttcagcaagtcagccaccagccccgatgggaagaagctgccacgcaccttctgccagttgatcctggaccccatcttcaaggtgtttgatgccatcatgaatttcaagaaagaggagacagcaaaactgatagagaaactggacatcaaactggacagtgaagacaaggacaaggaaggcaaacccctgctaaaggctgtgatgcgccgctggctgcccgccggagacgccttgttgcagatgatcaccatcca

SEQ ID NO: 23112 - DNA, 474 bp, Gossypium hirsutum
  Clone ID: GOSHI-09MAY01-C62278_1
cttgtcgcgtggggtatatgtatatatgtattcgtatcttcttcaatctccaccccacttcctccgccctcgcgtccctttccattgaaaagaaaaatcttaagaaacagtgatggaaggtatttcagcgaccatgtacaagaacttgaaagggtactggcaaaggagaggctacatcaagctaaatggtacgaaaggaggaggacggcggagcaaggtggagcttgggtcgtcgcgacggaggcgattctggaagataagggtgaaagcgaagctgagattaccttcgcccaagaagttctttgtttggctacgtgatgcgtacgtgaaaatgatgctggggttggctaactccgggatggttagtaccggctacggtggagctattggggaccatcatgggattgcagccttgcggaagcggccggttggagtgcgctgtgagaagatcgtcctctagataattcgtgtgat

SEQ ID NO: 23113 - DNA, 597 bp, Gossypium hirsutum
  Clone ID: GOSHI-09MAY01-C63848_1
gaagagagagagagattttgatgggtcgtggcggcgtcgacgaggcggtgataccgtacaatctgaacggcgaatccaattggtggcacgacattaacgattcaccgctctggcaggaccgcatttttcacattctcaccgccctttatggcctcgtcgccgtcattgctctcgttcaattggtacggatacaattcagagttcccgaattcggttggaccacgcagaaggtcttccattttctaaattttcttgtgaatggggttcgcgggctagtttttattttcaggcggaatgtgcaggacttacatccagagatcgttcgacacatcttgctggacatgccaagtctagtgttcttcacgacatatgcacttttggttttgttttgggctgagatctactaccaggcacgtgccgagtcaactgatggactgaggccaattttctttacaataaatgtggcggtttattccattcagattgcaatgtggctggtattatggtggaagtatatcccagttttggtcatcatatcgaagatgttctttgcaggtgtctcattgtttgcagcccttggtttttactatatggtgg

SEQ ID NO: 23114 - DNA, 657 bp, Gossypium hirsutum
  Clone ID: GOSHI-09MAY01-C63548_1
cggccgcgtgggtttttacaattatgttccttcttgtattttgtatcgtttctcattttctcaggtgagtgttcctcgcactagcttgttcaagactgttacggttcgatgcggtcactgcaccaatcttttgtctgtcaacatgcttggtctccttcttcctacaactaatcagcatcacgttggtcattctttcttcactcctcacaatctcctggaggagatccgaagtagtgcaacaacaaatatggtaatcaatcagccaaacccaaataactctcttatgcctcctattcatggaggtgctgaagatattcccaaacctccggtggtcaatagacctccggagaagagacagcgagtcccatctgcctacaaccgcttcatcaaggacgaaatccaacgcatcaaagctggaaaccctgatatcagtcatagagaggccttcagtgccgctgccaagaattgggcccacttccctctcatacatttcggacttatgcctgatcaacccgtgaagaaaactaacgtgcaccaacaggaaggagaggagatggtgatgaaagatgggttctttgctccaaacaacgtgggtgttaccccttaccaaacaagtccaaactactgctagggtttcggtgccttctctcttttact

SEQ ID NO: 23115 - DNA, 658 bp, Gossypium hirsutum
  Clone ID: GOSHI-09MAY01-C63208_1
cgtgaagaccttggaagtggttctccccatgggttggcatctttggggaataaagctgcagcagctatcacctctggtttcatggaacagtcacccactgctgctccaaattctctactccatgatatgatgtgttctttatctactgggtttgacggatcttcatcatttgaacagtggtgtcaacagggtatggaacaccaaaggaaaccccattgattttcaagaacccaccactgatcatctctcaaaagcaaaagaatcccattcccaaggcaataacatgggagggaatgatgggatgacaagagatttcttgggtcttaaagcatttccccatagagatttccccaacttagctgcacttaatcatcgtttaaacccttcttcaaggtttgggcaacaaaaccagcacagtcaaacaccatggcaaggttaggttatggttcttcagattcccaacttctacatatgatgctgagaaatatagttctcctctggtaccttcattttcatagtttttaataagcacttaatttctttcaatttttattatagttcaattattttattatataatggaacaactttcacatatgttcatctatatataaaattaatagaagcattatttgattgcttcaaacgtattcaacgt

SEQ ID NO: 23116 - DNA, 1881 bp, Gossypium hirsutum
  Clone ID: GOSHI-09MAY01-C18998_1
ctttctctcctccattatcttctctttcaggcttccttcgtttaccactattacttttcctactcgttgcttagactagtatttttttccatttatatattcatttttctcatagacgttcgtttataacaagaaattagataacagtccgacacacatacacagagagtgagagagagagagagagagagatctttgatggattgatagcttttttattatagatttagatttacagagatcaaaggaggagtgaatgggcagcaagagaacagcggaggagaacaagacgaaaggaattttgcaattaggaaattacgaattagggaggaatctcggcgaacgaaatttcggcaaagttaaattggctaagaatctccattccggcctcactttcgccgttaagatcctcgaaaagtccaagctcattcaactcagcatcgccgatcagataaagagagaaatcgctactttgaaactcctcaaacatcctaacgtggttcgcttacacgaggtgttggcaagcaaaaccaagatttacatggtcctagagtacgcaactggaggggaattgtttgtcagaattgcatccaaagggaagctatcagaagcagaaggaagaaagttcttccagcaattaattgatggtgttagttattgtcacaacaaaggtgttttccacagggatcttaagctggaaatgttctgattgatgataaagggaacatatagatatctgattttggccttagtgcattgcctcaacatattaggggggatggcttactgcatacaacatgtggaagtccaaactacgtcgcgccagagattttggcaaatagagggtatgatggtgccacttcagacatatggtcatgtggtgtcatcttatatgtcattctcaccggttatctccctttcgatgatagaaaccttgcagttctttatcaaaagattttcaaaggggatcctcagatcccgaaatggttgtcacctggggctcggaacatgataagaaggattcttgacccaaaccctgaaaccaggataacaatggcgggtatcaaggaagatgactggttcaagcaagactatactcctgctgtacctgatgatgaggaagaagatatatatattgatgatgaagctttctcaatgtgtgaagtgggttgtgatggaggtaggactcaagaatcacctactctcattaatgcttttcagttgataggaatgtcatcgtgcctagacctttctggtttctttgagaaggaggatgtatctgaaaggaagatcagatttacctcaaatcgttcgggtaaagatttgcttgcaaagatccaagacacggtgacagagatgggatttcgagtccaaatgagaaacggaaagttgaaagcaacgcaagagcacacggtccaaaaacgtcttgccagtctttcagttgcagctgaggtgtttgagataagtccgtcattgtacgtagttgaattaagaaaatcatatggcgattctacagtttatagacagttatgtacaaagctatttaatgactttggcgatcctcagggccaaggcctggtgtccacagaagcttgagtgacacacaggttgggttggctccaccaacatttaaggatctcagttagatctgtgagccttagaggggatgaatttatttaggctatatattttatggtataggtgatgtttttttttttttttgaactttcacaaaacagagattcaaagtaatagtatttatgtcgaggaagcagcagtttatgctctagagactgctttccgcatgttcatattagattgcttatgttttattggaaataattttcaattttttgaaaaatgttatattttctggtgttt

SEQ ID NO: 23117 - DNA, 289 bp, Gossypium hirsutum
  Clone ID: uC-gsflnu33B111c04b1
tttgtcttaggcgatcctcagggccaaggcctggtgtccacagaagcttgagtgacacaggttgggttggctccaccaacatttaaggatctcagttagatctgtgagccttagaggggatgaatttatttaggctatatattttatggtataggtgatgttttttactacccattttgaacctctttcacatatcagaaatgcaatggaactatccgattggtgagagatcaaatcaatattgctgtagggactgctaccaacatgttcagagttaactcgttatgtg

SEQ ID NO: 23118 - DNA, 684 bp, Gossypium hirsutum
  Clone ID: GOSHI-09MAY01-C118890_1
attttctttattccaatgcacatgtcggttctttttctttccccaattctggtcgatttagaagtttcactttcattccaaccctaaataagatgtttgaattttctttcttcacttttttttattagtagttgtttcctatactcttagacttttcttaatcattgttattattttatttatgaaaaacgccgcttttgaccattattctcgtttaagcctataagggacagacggcagagtacagaccagaaaattcccaaagtcgtctgtgcttttcttttttccttattttttaccaagttattattattcctcttcaaaatttgatgtggttttatttgaagtttgtttagcaagaggagatgggttttgctatatccgatgagctattggggactgtcgttccgattgttgtttactggatttattcaggaatatatgtgtgtttagggtcttttgaaaattataaattgcattcgaaagcggatgaagaagaaaacaatttgggcttccaaccaaatggtctttaaggggttcttttggcaacattctgttcaggctgttgtccccatcctttggttcccttgttcggggagcgatgctggggcatttgctcaaaagtccttctccttatattatctctattaaaaaattgttcccggcaatgggtgtttctgggat

SEQ ID NO: 23119 - DNA, 531 bp, Gossypium hirsutum
  Clone ID: GOSHI-09MAY01-C18878_1
caagttctcgctttctcagataccaaatgtctcaaaggaaatcaaggttgacaaggttggggttccgagattcaatgatcaaccagaaagcttattcctttctgttaatgataaatcgaatgataagaattctgagagaatgttagctcatctggggatgagcaaatcgagtgatcctgataatgcaagtcaatgcagctcaatttaccatcacgagagaggttttagttctcattcaggagaagaagggagctccggaacggttcgaaagcagtcttcattgtcatatggaggactagtgacggcctctcccttagttggtctgccagaaatttcacatcttgggtggggtcactggtttactcttagggatctcgatctcgccacaagtcacttcgccgcagagaatgtgcttggagagggtggatatggggtggtttacaagggtagactgatcaatggaacctgagtagccgttaagaaaattcttaataatctgggacaagctgaaaaagaatttagggtggaagt

SEQ ID NO: 23120 - DNA, 909 bp, Gossypium hirsutum
  Clone ID: GOSHI-09MAY01-C18808_1
cccacgcgtccgcaaaggagtaatcatttctgtagcaactggggcagccattttggttctaggcctcgttggagttggaatatatgctgttcggcaaaagaaacgtgcagaaaaagctatcggattgagtaacccatttgcatcctgggcaccaagcggcaaagacagtgggggtgcaccacagttgaaaggagcaaggtggttttcttatgatgaacttaagaagtgcactaataatttttctgacagcaatgaactaggatatggagggtatgggaaggtatacaaaggaacgctctctggtggacgatctgtggcaattaaaagagctcagcatggatcaatgcagggtgggcttgaattcaagactgaaattgaattactttccagagttcatcacaaaaaccttgtcggtcttgttgggttttgttttgatcaaggagagcaaatgctggtttatgaatttatggccaatggaacacttcgagagagcctgtctgggagatctggcatttatcttgactggaaaaggagactccggatagctcttggctcagctagaggtctagcttacctacatgagcttgcaaatcctcccattatccacagagatattaagtccaccaacattttgttggatgaaaatttaaccgcaaaggttgcggactctggcttgtcgaaattggtatcagacagttcaaagggccatgtttcaacccaagttaaaggcacattgggttatttagatcctgaatattacatgacccagcaattaaccgagaagagtgatgtttatagctttggagtggtaatgcttgaactcataacagctaagcaaccaatcgagaaaggtaagtacgtagtgcgggaggtgcgaagcgtgatggatacgaaggacgacgagcatta

SEQ ID NO: 23121 - DNA, 648 bp, Gossypium hirsutum
  unsure (1)..(648): unsure at all n locations
  Clone ID: LIB3543-040-Q1-K6-H7
ctctggctggtttatgaatttatggcggggtgggagcgtgggggnagagcctgtctggtaagtttaagttatgcacaaggcctaacatgagctctcctgatatctgacatggaatcatgagttgtagggagatctggcatttatcttgactggaaaaggagactccggatatctcttgggtgagggggggggctagcttacctacatgagcttgcaaatcctcccattatccacagagatattaagtccaccaacattttgttggatgaaaatttaaccgcaaaggttgcggactttggcttgtcgaaattggtatcagacagttcaaagggccatgtttcaacccaagttaaaggcacattgggttatttagatcctgaatattacatgacccagcaattaaccgagaagagtgatgtttatagctttggagtggtaatgcttgaactcataacagctaagcaaccaatcgagaaaggtaagtacgtagtgcgggaggtgcgaagcgtgatggatacgaaggacgacgagcattacggattgagggagttaatggatccgtgcataagaagctcgggaaatctactaggatttgggaaattcttggagttggcaatgcaatgtgttgaagattcagctacagatcgt

SEQ ID NO: 23122 - DNA, 507 bp, Gossypium hirsutum
  Clone ID: GOSHI-09MAY01-C18598_2
gcgcccacgcgtccgcccacgcgtccgcccacgcggccggaaaaaacggtgggattgaaaggggtttcagctgtccctctttgaacttcagcttcaggtcttcaaactcaatagctgaaaggaaaaacatatttttacttcattcattcaaattcccacacgaaaagggggaaaacccagaaattttaagccatgaaacagttacacaagcaatcaagcattaaccataggcgagatgaagagatcttaatacctcaaactcctccttactcacccaaatccttaaaacaccccagatctctccctagatccattaactatctcttcaaagaacaacgccttttgttcatcttcatcggcattttaatcgggtctactttcttcatcctccaaccaactctctctcggttaggcccaaccgagactcacccttcgatccccaaatctttctctaacaacggcgtttcccacacccaagagttctccgtttccaatcagaatcctatt

SEQ ID NO: 23123 - DNA, 947 bp, Gossypium hirsutum
  Clone ID: GOSHI-09MAY01-C18598_1
ccttcgcttccgtctcatctccttccttcaatctccagctttttttttttcactttttatttttggctgaaaaaaaacaatgaattgaaaggtgtttcagcttttcctctttgaactttagctgaaaggaaaaacatatttttacttcattcattcaaattcccacacaaaaaggggaaaaacccagaaattttaagccatgaaacagttacacaagcaatcaagcattaaccataggcgagatgaagagatcttaatacctcaaacacctccttactcacccaaatccttaaaacaccccagatctctccctagatccattaactatctcttcaaagaacaacgccttttgttcatcttcatcggcattttaatcggttctactttcttcatcctccaaccaactctctctcgtttaggcccaaccgagactcacccttcggtccccaaatctttctctaacaacgtcgtttcccacacccaagagttttccgtttccaatcagaatcctattcatggcaaaatgggtcgtgttcccgtcgggatcggtcgacggaggatgaggatcgtcgtcaccggtggtgctgggtttgtcggtagtcacctcgttgataagctaattggaagaggcgatgaagtgattgttatcgataatttcttcactgggaggaaagaaaacgtggtccatctttttgggaatccgaggttcgaattgattcgacatgacgtcgttgaaccgattctcttggaagtagatcagatctatcatttagcttgccctgcttcaccggttcattataaatataatcccgttaagaccatcaagacaaatgtgatgggtactcttaacatgttggggcttgcaaagagagttggggccaggtttttgcttacgagcacgagtgaagtttacggtgatccccttcagcatcctcagaaagaaacct

SEQ ID NO: 23124 - DNA, 434 bp, Gossypium hirsutum
  Clone ID: LIB3197-059-Q1-M1-H5
aaaaaaacgatgaattgagaggtggttcaacgttccctctttgaacttcagcttcaggtctgcaaactcaatagctgaaaggaaaaacatatttttacttgattcattcaaattcccacacgaaaagggggaaaacccagaaattttaagccatgaaacagttacacaggcaatcaagcattaaccataggcgagatgaagagatcttaatacctcagactcctgcgtagtcacccaagacgatgaaacacccgacatttgttcttagatccatgaagaatctatctatacagaaaaggcttaccaagcatcttcatcggcattttaatcggttctactttcttcatcctccaaccaactctctctcgtttaggcccaaccgagactcacccttcgatccccaaatctttctctaacaacgtcgtttcccacac

SEQ ID NO: 23125 - DNA, 474 bp, Gossypium hirsutum
  Clone ID: GOSHI-09MAY01-C118400_1
tgcgccccctggtgccgccgcggcgtaattggggggtcccacgcggccgccttttcgtgcggaaacgttgaccccgttttatcaaggacataagaacactagttacttaaaccctgttttcgtagggcagcaatttgttagacttggtgctgatgagacatcggagtttaatgaagacagggttaatggggtttatgatatcgatgtgaagttgtatttgaggattaggtttaagcttgggagggtcaaaactggtaggtttaagcctagaatttcatgtgatttgaaggttcctttgaacactgggaatggtagcttcggtggtacgtttaaaaccactagatgtgatttggatttctagtatgaatctgattcatgctttggtccagtctgtgattctatcttcattcagggatgtatacattttgttcttgtttttgctataggtatgtgaatatatgttgatttttggcg

SEQ ID NO: 23126 - DNA, 402 bp, Gossypium hirsutum
  Clone ID: GOSHI-09MAY01-C18798_6
aagaaatggatattgcaacagaggcacccaaagctcctttgacaagtgaaaggaaggggcgagcggaccttgaagataaaatacccaaaccctatttggcaagggcattgaacacttcaagtgtggaaaatccacatggaacagtaccaggacacgacaacaatgtaatgagtgttcttcagcaacatgcttcctttttttgatcaagacaaagatggaatcgtttatccccgggaaacctacagaggtatgagaaatctaggtttcggtcggttcgaaagctttcttgctgcaatcctcatcaatggggcattgagttactggactctccctggatggctaccaaatttacatttccctttatacatagatagaatacataaatgcaagcatggaaatgac

SEQ ID NO: 23127 - DNA, 1261 bp, Gossypium hirsutum
  Clone ID: GOSHI-09MAY01-C18798_4
cccagcgtccgcaacaaagcacccaagcaccattgacaagtgaaaggaaggttagagcagaccttgaagaatatatacccaaaccctatttggcaagggcattggctgctccagatgtggaacatccacatggaacaccagggcatgacaaccatggaatgagtgttcttcagcaacatgtttccttttttgatcaagataaagatgggattgtttatccttgggaaacctacacaggttaatatatattttttccagttccaatcttttttctccaacttattttcattttttatgaaaaatatttatgtatactacagctatgagaaatcttggtttcaatccattttcaagcctttttattgcaatctgtatcactgtgggaatgagttatcaaactctcccgggatggctaccaaatctatattttcccatatacatagatagaatacacaaatgcaagcatggtagtgattcttcgacatttgacaatgaaggaaggtttatgccaatgaactttgagaatacattcagtaaatatgctcgaactgagcccgacaagttatcattcggagaagtgtggcacatgactgaggctaatcgaaactcgtatgatttcattggctggctaatgacaaaggcagaatggatgcttttgtatctgcttgcaacggatgaaaatggttatctatcaaaagaagctgtcaggggatgttttgatgggagtttgttcgagtatgttgccaaaatgaacaaggctgggaagaataaggtttgctgagtgcaggttgctagtttaaaatatatgcattgcttttgttatcaaataaagttgtttgcagaagtaatgttacaacaattgtttcgatagaacaatgaaatagataattctacctttataaagctttatttgtgggtgtgcaatcgtttgcacatgtaaaattcggatgctggtaatcattaattctgatcactattcgatatgatcggctactaattctagtaaattttatttcaggtttaatttatgtcacgaagatgttagaacttgagccaattttgtgcaactgcatgggaaataatattcaacttggtatggagcacaagttggctggcgcacttgaagaaagatggatgtcataagattagtagttattttgtattgggtttttttattttattatattaggtgatttcgttaattaggttattattatcttttgttttattttattttaggatttttatcattttaattatt

SEQ ID NO: 23128 - DNA, 826 bp, Gossypium hirsutum
  Clone ID: GOSHI-09MAY01-C18798_3
gatggatgttgcaacagaggcacccaaagctccattgacaagtgaaaggaaggttcccacacacctcgaagaacacatacctaaaccctatttggcaagggcatttgctaatccagatgtggaacatccacatggaacaccaggacgtgacaactatggaatgagtgctcttcagcaacacgcttccttttttgatcaagataaagatggaattgtttatccttgggagacctacagaggtatgagaaatattggtttcaatccaatttcgagccttgttattgcaattaccatcaatgtggcattgagttattggactctccctggatggctaccaaatctatattttcccatatgcatagatagaatacataaatgcaagcatggaagtgactcttcaacatatgacactgaaggaaggtatatgccaatgaactttgagagtatttttagcaagtacgctcgaactgtgccggacaagttaacactgggggaactatggcacatgactgaggctaatcgaaactcatatgatttcattggctggtatttcaatcacccttttctttgaattccgtgtactttctattcatttaaaaaaaaatggaatttggtttgcaggataatatcaaagggagaatgggtaccttttgtatataattgccaaggatgaaaatggttatctaacaaaagaagcagtaaggggatgttttgatgggagtttgtttgagtatattgccaaaatgaagggtggcaaggttcactgactgaggttgctggtttaaaatatatgtgtgtttttggttgatcaaataaagcttgaatt

SEQ ID NO: 23129 - DNA, 916 bp, Gossypium hirsutum
  Clone ID: GOSHI-09MAY01-C18798_2
aacagagcacccaagcaccattgacaagtgaaaggaggttagagcagaccttgaagaatatatacccaaaccctatttggcaagggcattggctgctccagatgtggaacatccacatggaacaccagggcatgacaaccatggaatgagtgttcttcagcaacatgtttacttttttgatcaagataaagatgggattgtttatccttgggaaacctacacagggatggctaccaaatctatattttcccatatacatagacagaatacacaaatgcaagcatggtagtgattcttcaacatttgacactgaaggaaggtttatgccaatgaactttgagagtacattcagtaaatatgctcgaactgtgcccgacaagttatcattcggagaagtgtggcacatgactgaggctaatcgaaactcgtatgatttcattggctggctaatgacaaaggcagaatggatgcttttgtatctgcttgcaacggatgaaaatggttatctatcaaaagaagctgtcaggggatgttttgatgggagtttgttcgagtatgttgccaaaatgaacaaggctggcaagaataaggtttgctgagtgcaggtttaatttatgtcacgaagatgttagaacttgagccaattttgtgcaactgcatgggaaataatattcaacttggtatggagcacaagttggctggcgcacttgaagaaagatggatgtcataagattagtagttattttgtattgggtttttttattttattatattaggtgatttcgttaattaggttattattatcttttgttttattttattttaggatttttatcattttaattattatattttgtatcgtctcttagacatgaattattttcttcctttgtttaatacaattttgacttctctt

SEQ ID NO: 23130 - DNA, 858 bp, Gossypium hirsutum
  Clone ID: GOSHI-09MAY01-C18798_1
tttttttttttttttttttttttttttttttttttttttttttttttttttttttttttttttaataaacaattaattcattcttcttgtcacaaaacaactaattttctctttgctattttacatttaaactccattgaaaaccataatttcctggcttaagctaaaggtataatacatgcaatttgtcataggttcaatgctaaataattaaaaaaaggtttcggtcgcttcgaaagctttctggctgcaatcctcatcaatggggcattgagttactggactctccctggatggctaccaaatctacatttccctttatacatagatagaatacataaatgcaaccatggaagtgactcttcaacatatgacactgaaggaaggtttatgccaatgaactttggaagtattttcagcaagtacgctcgaactgtgcccgacaagttaacattcggagaactatggcacatgactgaggctaatcgaaacgcatatgacttcattggctggataatatcgaagggagaatggatacttttgtatagactggcaaaagatgaaaatggttatctgtcaaaagaagccgtgaggggttgtttcgatgggagtttgtttgagcacgttgccaaaatgaataacagtggtagcaaaaagagctatagattgaaggaatgaaggttgctgcttttaacatacgtgtagtttgagtatgttgcccaaataaagaataagaatcagtgattcaagcaatgtagggtgctagctaggatttaaaatatacatgggctctttctattgatcaagtaaacttcttccatctacttcaattaaaatcaagatttcatctgtttgtcc

SEQ ID NO: 23131 - DNA, 445 bp, Gossypium hirsutum
  Clone ID: LIB3135-054-Q1-K1-B2
cccacgcgtccgcccacgcgtccgaccaaatttatattttcccatatgcatagatagaatacataaatgcaagcatggaagtgactcttcaacatatgacactgaaggaaggtatatgccaatgaactttgagagtatttttagcaagtacgctcgaactgtgccggacaagttaacactgggggaactatggcacatgactgaggctaatcgaaactcatatgatttcattggctggataatatcaaaaggagaatgggtacttttgtatataattgccaaggatgaaaatggttatctaacaaaagaagcagtaaggggatgttttgatgggagtttgtttgagtatattgccaaaatgaaaggtggcaaggttcactgactgacgttgctgtgttaaaatatatgtgttggttttgggtgatcaaataaagcttgaattaaa

SEQ ID NO: 23132 - DNA, 824 bp, Gossypium hirsutum
  Clone ID: GOSHI-09MAY01-C118780_1
tcggtatcaattgacataagcacatcttactttgttgcttggaccatccggatagtggctgctatcatgatgcttcagagttctatggatcccatccttgcagtagaggcatttttatctggaataatgctctcatcagttgggggtaaagtcactcgatggagattcctgcgccgtgtgtacaagaagctgttcaagttagccaaagtcattggaagaaacactcaaattcctgatttatcaccagatctatattctcatgacgaatatacgtacaggaagcctgaagactctaatttccttaatcgacggtctaagcccttaccccttgcttcttgcaatacttctcttctaggaactaccaagacatctccgagtcagctgtcagatacagactctttcccatccacctttcacaacacaccagagaggagaaatttttctaaaggtgagtgggagaagttcaccagagactccacaaaaagggctgtcaaagaacttgtttcttcgcctgatttcagcaaatgggcagccgcaaatgctgagaggatcactgtaacacctagaagtagtttgagcagtgcttccaccagatctcgccgttggtggtttctttggtcataaaaaagtagctaatggtcgattgtaggttgaatacattattacagttgaaagatggtggcaaattcaaaattaacattcgccatttttagggcttgacgggcgaagttttggaatggctgagaatggtgcccttgttttgtcttaggtgttttatgtttgcaatgttagaaattataactgaaaatgtatctggtttttct

SEQ ID NO: 23133 - DNA, 308 bp, Gossypium hirsutum
  Clone ID: LIB3135-055-Q1-K1-H4
gtatcaggtgctcgctgtgttggaactctgttgtacgagatgaagcgtcgtgggaaggactgtcgctttggagtgatctcaatgtgcataggaactggaatgggggcagcagctgtttttgaaaggggagactgtgttgatgaactctgcaatgcttgagctgtcaaaaactaaggatgctccatagatatgcttgttgctaccttacaatttgtattaaatatatgacttttcattttcccatgattagatagttgtttgtgagttgtcaaagctttcattttgaaaaatcaaaataaagtttacat

SEQ ID NO: 23134 - DNA, 217 bp, Gossypium hirsutum
  Clone ID: LIB3197-060-Q1-M1-A4
gtttttgaaaggggagactgtgttgatgaactctgcaatgctcgaggtgtcaacagctaaggaccttatatcaaaggatgctccatagatatgcttgttgctaccttacaatttgtattaaatatatggctttccatattcccatgattggatagttgtttgtgagttgtcaaagctttcatattgaaaaatcaaaataaagtttacaagttatttg

SEQ ID NO: 23135 - DNA, 582 bp, Gossypium hirsutum
  Clone ID: GOSHI-09MAY01-C18058_1
cccacgcgtccgtaacaatcgctgttgtgaacaaacaaacgcagacttgggcttcaatggcggtgaaattcttgatagcgttaatcttagtaattgcagcatctctttgctgggtatcgtcggctgattcgtctgaagctgctttcgtcaaaaagaccatctctgcccacaagatcgtcatcttctcaaagtcctattgcccgtactgtaggaaggcaaaatctgtgttcaaggagttgaaagaagttccattcgttgtggagcttgatgagcgagatgatggatggaatattcaggatgccttgagtgagattgttggtaggcgtactgtaccacaggttttcattaatggaaaacacatcggaggctcagacgatactgttgaagcatatcagagtggaaaattggctaagctgttgggtattgaggtagagaacaaggatgatctctgagtccataaacaaaattgaatgtttgttgccagagtaaattttgattttattgcttttaaggtacttctttattgtacttcaactttgaactgtgaaccttatgttccataaagcaactttccgatgtcct

SEQ ID NO: 23136 - DNA, 447 bp, Gossypium hirsutum
  Clone ID: GOSHI-09MAY01-C18008_1
cggacgcgtgggcggacgcgtgggctcctccttttgtaccaccaccgccaatttcttctccaagtgggaatagtgtcactggtgcaatagctggaggagttgcagcaggtgctgccttactgtttgctgctcctgcaattgcatttgcgtggtggcgtcggcggaaacctcaagaatttttctctgatgtacctgcggaagaggacccagaagttcatcttggacagctgaagaggttttcattacgagaactacaagttgccactgacagttttagccataaaaatattctgggtagaggtggatttggtaaggtttacaaaggaaggttagctgacggttcactggtggctgttaaaagattgaaagaagagcgtacacctggtggggagttacagtttcaaacagaggtagagatgatcagcatggctgttcatcgaaatctcc

SEQ ID NO: 23137 - DNA, 867 bp, Gossypium hirsutum
  Clone ID: GOSHI-09MAY01-C18258_4
tccgtctggtgccgctgcaagcctatttcgcaaacagcaaacggagcagacagtcagataagcagagaaaatggaggctgccagaactgttaaggacgtttcccctcatgacttcgtcaaggcttacgccgcccatctcaagcgttccggcaagatcgagcttccttcatggactgatattgtgaagactggtaaactcaaggaacttcctccctacgatccagattggtactatatcagagctgcttccatggcaaggaagatatacttgaggggaggtctaggtgttggtgcctttaggaggatttatggaggggctaagagaaatggaagtcgcccacgccatttctgcaagagtagtggatctgttgcccgtcacattcttcagcaattgcagaatgtgaacatcattgatattgatcctaaaggtggaaggagaatcacatcaaacggtcagcgtgatctggaccaagtagctggaaggattgcggttgccatctgagaaattttaagagagctgttgccgaaggctgtgttaatcaattttcgtgttggtatatccgctacgtgggaattttttttttaaattttaattttagaaaccaatgtggttggtgtttaactatgaccatgaattttgaattctaatggaagattgtatggtgaagttgcccttctgcatgtttacagttttcattctcactggattgtccagcactgaacacttagttctgattcagttttgtgttttaaagtaatctaggtcgtttaattagtaagaatttagctttttcgacaaatattggttgttttattggtaatagtaaatgtcggaattagtgtggagtgatgagttgaatgttcttt

SEQ ID NO: 23138 - DNA, 855 bp, Gossypium hirsutum
  Clone ID: GOSHI-09MAY01-C18258_3
ctcgcaagccgcacacggagtgatagtcgcagcacgcgataaaaatggaggcagccagaaccgttaaagacgtttccccacacgagttcgtcaaggcttatgccgcccatctcaagcgctccggcaagattgagcttcctccatggactgatattgtcaagaccggtaaactgaaggagcttccaccctatgaccctgattggtactatgtcagagctgcttccatggctaggaaaatatacttgaggggaggtcttggtgttggtgcctttaggaggatctacggaggagctaagagaaatggaagtcgcccacgccatttctgcaagagcagtggatctgttgctcgtcacatacttcagcaattgcaggatgtcaacatcattgatattgatcctaaaggtggtaggagaatcacatcaaacggccaacgggatctggaccaagtagctggaaggattgcggttgctatctaagaaattttaactttctgtttttcatgttcctgagatttagtcgtttgaaaattgggttttcataggaagctgttttaaacattttccgttttggtatattaagttctgaatttattttgattttgatttttattgaaaactgatgtatgctatattttctttctgccgcatgtttggtcttgatcatcgtgattcctatgagttgggtgttttacatatggacaatcaagtttttgcataaatggatctggagggttccaggaaaatgtctttaagatgtagggtttgggattttaaatctagatttggatttccagattctttgtattactcaaattgaggatattttgaattaatggagttttcatatttagatctg

SEQ ID NO: 23139 - DNA, 730 bp, Gossypium hirsutum
  Clone ID: GOSHI-09MAY01-C18258_2
gcgccctatttctcgcaagcagcttccgccgcagggaaaataataatggaggcagcgagaactgtgaaggacgtttctccccacgagttcgtgaaggcctacgccgcccacctcaagcgctccggcaagattgagcttcctccatggaccgatattgtcaagggtggtaaattgaaggagcttccaccgtacgaccctgattggtactatataagagctgcttccatggcaaggaaaatctacttgaggggaggtcttggtgttggtgccttcaggaggatatatggaggagccaagaggaacggtagccgcccacgccatttctgcaagagcagtgggtctattgctcgtcatattctccagcaattgcagaatgtgaacatcgtcgatcttgataccaaaggtggtaggaaaatcacatcgaatggccaacgggatctcgatcaagttgctggaaggattgcagttgccctctgagaaatttcattatatggattgagttaagaaaaattagtttgtttgcaagattactgttttatgagatggtgttcaaatcagattctctttgtgtccatgtctggtatcttcctttctatatctagaatttttgttttcaagttcattatggtttttttgttgactatgaccttaaaagttttgaaacttgcttttagaaaaatttactagtgaaatgatcccgggagacataatgcgtgcgtgcttgtcggct

SEQ ID NO: 23140 - DNA, 710 bp, Gossypium hirsutum
  Clone ID: GOSHI-09MAY01-C18258_1
cccacccctccggccgcccaaagaatcaaatctctgctactgcatagtaaaagagagaaagagcgacaatggaggcagcaagaacagttaaggacgtttcccctcacgatttcgtcaaggcttacgccgcccatctcaagcgctccggcaagattgagcttccttcatggactgatattgtcaagaccggcaaactcaaggaacttcctccatatgatcctgattggtactatatcagagccgcttccatggcgaggaaaatatacctgaggggaggtcttggtgttggtgcctttagaaggatttacggtggggctaagagaaatggaagccgtcctcgccatttctgtaagagcagtggatctgttgctcgccacattcttcaacaattgcagaacgttaacatcattgatattgatcctaaaggtggtaggagaatcacatcgaacggccaacgcgacctggaccaagtagccggaaggattgcggttgccatctgagtaacttttaatacccaaatttgcttgtttttgctgttaagcaattttcattttaggtaccgagagagtgaagacatggaatatttttattttagggtttgttgacttgttctctctttatcaccgtcgatcttgaaccttgttgatgaaaactcgaatctttaaattttgcctttttttattgtctagcactcgagcatggatttcgaa

SEQ ID NO: 23141 - DNA, 355 bp, Gossypium hirsutum
  Clone ID: uC-gsronu33B076h05b1
cccacgtttcctctcaagccgcacacgcagtgatcgggggaggagttgatataaatggaggctgtcagaaccgttaaagacgtttccccccacgagttcgtcaaggcttacgccgcccatctcaagcgctccggcaagattgagcttcctccatggactgatattgtcaagaccggtaaactgaaggagctcccaccctatgaccctgattggtactatgtcagagctgctttcatggcttggaaaatatacttgaggggaggtcttggtgttgttcccttttgcaggacctatctatagttctttgtccttttgtactttttccctccctcttttctctgtcctttcgtttttt

SEQ ID NO: 23142 - DNA, 232 bp, Gossypium hirsutum
  unsure (1)..(232): unsure at all n locations
  Clone ID: LIB3083-016-Q1-L1-F9
tagcctcccatttattctaatctctnctactgcagagtntttgggaaatttagcgacgactttaggcatcactaacatttaangacgtttcccctcacgatttcgtcaaagcttacaccccccatctgaagcgctccagcatgttttttcttccttcatggactaatattgtcaagaccggcaaactcaatgaacttcctccatattatcctgattggtactatatcaaaac

SEQ ID NO: 23143 - DNA, 534 bp, Gossypium hirsutum
  Clone ID: GOSHI-09MAY01-C18218_2
gtttttctcgtccttaaagctcatcttctaatttggtgccatctttggatctctcacttttctacctttcagatttcgtgacggagaggagatatctttatttttctgaacttgcaactgagccctcccggccgatttggtcttttgatccaacggctaagagggctctttttagaattttccctaatacgacgactgcaatttctttttaatagaagaggaaattttcattacagcaactggtccaggccttttcgttcgtctttacaatacttccctccgtttgagcacttccagatctgaagaaaaatgcctcccgccgctcctcgatccggagatgcgatcttcgccagcgtagaacgcgtgaatgcagaactattcactttgacttatggagcaatagtgcgtcaattgcttactgacttggaggaggttgaggaggttaacaaacagcttgatcaaatgggctataatataggaattagactaattgatgagtttctagcaaaatcaaatgtgtccagatgtgttgac

SEQ ID NO: 23144 - DNA, 1059 bp, Gossypium hirsutum
  Clone ID: GOSHI-09MAY01-C18218_1
gtttttctcgtccttaaaactctcttctaatttggtgccatctttggatctctcacttttctacctttcagatttcgtgaaacggagaggagatatctttattcttctgaacttgcaactggaagaggaaaatttcattacagcaactggtccaggccttttcgttcgtctttacggtacttccctccgtttgaacacttccagatctgaagaaaaatgcctcccgccgctcctcgatccggagatgcgatcttcgccagcgtagaacgcgtgaatgcagaactattcactttgacttatggagcaatagtgcgtcaattgcttactgacttggaggaggttgaggaggttaacaaacagcttgatcaaatgggctataatataggaattagactaattgatgagtttctagcaaaatcaaatgtgtccagatgtgttgactttaaggagacagcggaaatgattgccaaggtgggtttcaaaatgttccttggggtcactgcatctgtcatgaactgggatgctgatggcacttgttgcagcattgttttggaggataatccccttgtggactttgtagagcttcctgatacttgtcaaggcctctactatcgcaacattttaagtggtgtcaataggaggagccctagagatggtggcaatgaagacggaagtcaacctggattcgtgatatgcttagaggagatgatgcatatgagttgcaggttaaacttttgaagcaagttccagaagagtatccttacaaggatgatgagtaacatgccttacttacctctattaatggccttgcgcacttgccgatgttctatttccattgtttttctgtttctgaagaacattaatatacgttttgtatgtcatcttgaccacaatgtatcttccattttcatttagggtttatatgatctatactccgaagttattaatgttattaatcctgcacatcagtagtgatggcaaatggggggattggattggattttggtatggaccctttgggtcaggtattctaaggttgagcattttgatggttgaatt

SEQ ID NO: 23145 - DNA, 1792 bp, Gossypium hirsutum
  Clone ID: GOSHI-09MAY01-C18208_1
tctctctccctctcccatatataaataagatcggcggatattggcaaacggagtgaaagatcccacgcgtccgcgaaattggcagaaaatgaaggtttccgtcaaaactctcaaaggcactcacttcgatatcgaagtcaaacccgaagatgcggttgcggatgtaaaaaagaacatagaaactgttcaaggggcagatgtttatcctgctgcacaacaaatgcttatctataagggaaaagttcttaaagatgacacgacactggctgaaaacagtgtcactgaaaatagctttattgtgatcatgttgacaaagaataagggtgcatctggtgagggttcaactgcttcaactgctcctacaaagaaagctcctgaggcaagtagtctgccaacagctccagcaccagcttctactgcacctgttgcaacgtcagctacggctgcacctgccgctgaatctgctcctgttgcttcaagtactcctctgtcagattctgatgtttatggccaagcagcatctaacctggttgcagggagtaacttagagggaacaatccaacaaattcttgatatgggtggagggacctgggacagggacactgttgtccgcgcccttcgcgctgcttataataacccagagagagctgttgaatatttgtattctggcatccctgagcaagctgaagctccacctgtggcccgtgctcctgtagttgggcaaaccactagccctgcagcaccacctcaacagcctgcacaaatggcagctattcctactagtggacctaatgcaaatccattagacctctttccccagggccttccgaacatgggtgcaagtggtgctggggctggctctcttgattttttacggaacagtccacagtttcaagctttgcgagcgatggtgcaagccaacccacaaatattgcagcctatgcttcaagagttggggaaacaaaatcctaatctaatgagacttatccaagagcatcagggtgactttcttcgcttgatcaatgaacctgctgaaggtggagagggaaacattttggggcaattagctgaggcgatgccacaagctgtgcaagtcacacctgaggaacgtgaagccatagaacggcttgaagcaatggggtttgaccgtgcaactgtgctccaagtgttctttgcgtgcaacaagaatgaggaacttgcagccaactaccttttagatcatatgcatgattttcaggattgagttggtaaaagaaatggcttggggaagtacaatatcattttctctttcgttctttgggtccattgtcattcatgttccccctcccctccccccaaaactctaccgactttattcttaatcaagtgatgtaagtgtttggtgtagagacaagggatgtgaagatgttaacttcatttttttttcttttttctttttatttccgaaggacccattatttataacgttatatacaagtttctttctaagcttgtgtgtattgtacttcacattttatgctattataagcacttgccacgaggagctccacccaactttcaagtttttcgatcaacactcttccctataccttgtgcatgaatttggtagcccgtcagaatggttagagttggcagtggaaactctagaaccgtggaaacagtttgaataatatgcagtgaaatttatggtcgcaaaacatgtaaaatttttctattttccaaatatgttggccatgtataacacctttagtgtattcgtaatatacattatcgaatatcattagaaaagagg

SEQ ID NO: 23146 - DNA, 356 bp, Gossypium hirsutum
  Clone ID: LIB3149-005-Q1-K2-H3
ggaacttgcaggcaactaccttttagatcatatgcatgattgtcaggattgacttggtggaagaaatggcttggggaagggcaatatcattttctctgccgctctttgggtccattggcattcttgcccccccccctatccccacaaatctctaccgaatctattcttaatcaacagatgtctgtgttcggtgtagagactacggatgcgaatatcgtaactccattctctcttctctttactttttaatcccgacagacccattatttataatgttatatacaagctcatttccaaacttgtgtgtattgcactttcacatagttactttgctctcactctttgattctcacttg

SEQ ID NO: 23147 - DNA, 447 bp, Gossypium hirsutum
  Clone ID: GOSHI-09MAY01-C118210_1
ccgctccggaataaccgtctcgacccacccacgcgactacttttcgtgcaaagacgcgtccgcccacgcggccgtttttccagacctgaagcctcttccctctccccttccccctcccccatccttgccatactaatctactacttgtcgtcagccagcagcggtttcacaaatacaaagtcccaaaacaaaaaagagtgaagaaagaaactgaacgaccccttttctcaggcgctatctccggctctgcgataacgcgagcgatcacaccaacccctgcccatggatgttgtgcccagcatcaaggctagtggcccgatcgacccttttcggcagcaagggctagacccttcttcactgatctgctagcaaggccccctctgccgatgcccacgttcaccgaaggcgtggacttaagtgatccccaatatctgacccttctaaaac

SEQ ID NO: 23148 - DNA, 364 bp, Gossypium hirsutum
  Clone ID: GOSHI-09MAY01-C19958_3
gaagacacctagagaggccattgaaggatcatatatcgataatgaaaagcccacgtactggcactgtttctattaaaggccgtatccttgccggtccttaccatactgcaaaaatggtaaggaccattatcgtccgaaggaactaccttcactgcatcaagaaataccgctcgaatatccagttctttggccttcattctcaacaaaaggttacatcatcctatgttgtggtcattgatcgtggaggcgttgccagtcatgctgcatctatgcttccgagatcaggagttggcatgctcctattgctgggctgtgaccagtttactgagaacactgcttatctgcggtctatagaacttaaact

SEQ ID NO: 23149 - DNA, 750 bp, Gossypium hirsutum
  Clone ID: GOSHI-09MAY01-C19958_2
ctttgatctttctttttattgtatattatacggagaaagcatttctcaaacaacccaaggtgtttttatgctgtaaaaaaactgggaaaggaaagagacctggaaagggagggaatcgcttctggaaaagcattgggttaggctttaagacacccagagaggccattgaaggaacatatattgataattaagaaaagcccatttactggcactgtttctattagaggccgtatccttgccggtacttaccatagtgcaaaaatggtaaggaccattatcgtccgaaggaactaccttcactgcatcaagaaataccaaagactttcagcagcatgatcccaaaatggctgtggaaaaccaaaattgtcaagcaaattagccaaatgctggtgaatcaccttggactaaatttgaccaaagatgatctacaaaatgtggttgatttaatggagccatatggtcagataagcaatggaatagaatatctaaatcctccccttgatgtcagtaactaacttgcttgtcattttaaatatgcaagtcaattgctattaataattttctgttggattctttttggactggaaaataatttctggggatagtctaagaatcttaaattttatagaaagccaataaagtgcttgctggacgaaatgtggtgattaattgaattgcaaggtcatacatgctgttaattttttaagagctgataaatgagtatgacatagtgctcataaatgttctaag

SEQ ID NO: 23150 - DNA, 638 bp, Gossypium hirsutum
  Clone ID: GOSHI-09MAY01-C19958_1
cggacccgtgctgtgtctttgcagagtatcgggtagtcctttcaatcctcagccatggcggaacagacggagaaagcatttctcaaacaacccaaggtgtttttaagctctaaaaaaaatgggaaaggaaagagacctggaaagggcgggaatcgcttctggaaaagcattgggttaggctttaagacacccagagaggccattgaaggaacatatattgataagaaatgcccatttactggcactgtttctattagaggccgtatccttgccggtacttgccatagtgcaaaaatggtaaggactattatcgtccgaaggaactaccttcactacatcaagaaataccaaagatacgagaaaaggcacagcaatatcccagctcatatatccccctgctttcgtgttaaagaaggagatcatgttataatcgggcaatgcaggcctttgtcgaagacggtgaggttcaatgtcctaaaggtcattccggcggggtcttcccgtggtgggaagaaagcttttacagccatgtgagaggttagcttttgaaatggcaaaaaattgtagtgttgaggtgtgtgtttcgctgtatgaactttggttgggttttggtttaactgttttattttgatggaaac

SEQ ID NO: 23151 - DNA, 338 bp, Gossypium hirsutum
  Clone ID: LIB3148-007-Q1-K1-A5
ccgggtaggaatggccgggaccaacccgtccgcccacgcgtccgtaatggagccatatggtcagataagcaatggaatagaatatctaaatccttcccttgatgtcagtaactaacttgcttgtcattttaaatatgcaagtcaattgctattaataattttctgttggattctttttggactggaaaataatttctggggatagtctaagaatcttaaattttatagaaagccaataaagtgcttgctggacgaaatgtggtgattaattgaattgcaaggtcatacatgctgttaattttttaagagctgataaatgagtatgacatagtgctcat

SEQ ID NO: 23152 - DNA, 449 bp, Gossypium hirsutum
  Clone ID: uC-gsflnu33B089c12b1
ttgtttatctccagatagcaaactcaacctcgatgatattcttcaagttcgtgaagaatcagacatatatgtgttaggttttcaggaaatcgttccgttgaatgctggaaatgtgcttgtgatcgaagacaacgagcctgcggtgaaatggctcaccttaataaaccggtcactaaacaaggcgaattatgttcctttaagaggacccagatccgttggttcacccgagggttcactggttttccctaaaattaaacttagaaaggccagcaaagctttgaggacagagaataaatggaagctgaagagctgcaactgtcctataggtttggaaaggaagaatagcaaagaattctgtttccggtgccctcaatcgcaaacgaatgaaaatgatatttcatccgaagatgatgaagaccgaccttatgggccttctagggcaaactcga

SEQ ID NO: 23153 - DNA, 401 bp, Gossypium hirsutum
  Clone ID: uC-gsflnu33B089d12b1
tgtctcacgcgtacggatccctccaatatttggcatggatgaatttgggtggtgttatgagtggaattctgcaatgacaaagttaacctgttggaaccgagatgaagtggaggataaaatgctgttggagcgaggagcctgcggcgaaatgggtcaccttaataaaccggtcactaaacaaggcgaattatgttactttaagaggacccagatccgttggttcacccgagggttcactggttttccctaaaattaaacttagaaaggccagcaaagctttgaggacagagaataaatggaagctgaagagctgcaactgttctataggtttggaaaggaagaatagcaaagaattctgtttccggtgccctcaatcgcaaacgtatgaaaatgatatttta

SEQ ID NO: 23154 - DNA, 732 bp, Gossypium hirsutum
  Clone ID: GOSHI-09MAY01-C19938_1
cgttccgcggacaaccaagccggtggtttgtcttgggacacgaaaggatatttcaagtccttacacccatttggcacaccggcggccggagaaaagtcgccggtaggaaaatcctcgaaagaggatctgatcgtttggcttttattacgggtcagctccaaaacctgcctactcctcctcactctcatgaacaactccacgccaaccctcctccgccgcaagatccacctactgatttttcgactcaacccgccgtttctcctgatgtcgacgatgaagcctccggtcctttgtcgctcaaacatcaccctgtttctgatgctgatcagggtcagaccagtgcttataatggtggaattgatgaaggatcagcatccagcggacgggatagaagcattgagccttcaaatggttctgcttttgatacaagtggtgaaccgaattcatttctggtttcatcaaatgatcgaagttcaccaatttccacgtcagggacagtacagggttcagaaacatctgctcggaaacataacttcttcacccctaaacaaataagttctgccattgatggatctgagaaagcacgccttttatgttcagtaattgtgggtgttttagttgtattgttgcatttggggtttcctcttccaggaaacaagttcgtagggagcattcttaactttaggccactttacttggttttgttgaccaatgtaacattggtgatggggc

SEQ ID NO: 23155 - DNA, 822 bp, Gossypium hirsutum
  Clone ID: GOSHI-09MAY01-C19818_1
tgacttggcagcttccaatgatgatggaaagttcctccttgctgcaaggaagtgccgccgtcctacctgcacagattatatcatctcattaaattgcaatgatgtgtcaaaaggaagcagtacttacattggaaagttgagatccaactttttggggaccaaattcacagtctatgatgcacaacctccaaatgctggagcaaaagttactaaaagttgctccaccaggctaattaatatgaaacaagtttctcctcgtgtcccagctggcaactatcctgtagcccacatctcttatgagttgaatgtcctgggttctagaggtccaaggagaatgcactgcgtcatggatggcatcccagcatcttctattgaacctggaggtgttgctcccacacagactgaattcctacacagtaatctggataccttcccatcactgctgttctttagatcaaaatcaacccgttcagagagtttccagtctggacctttgtctgaccagaaagatggaatgctagtattgaggaacaagtcaccgaggtggcatgaacaactccagtgctggtgtctgaacttcaatggacgggtaacagttgcatcagtcaaaaactttcagctggttgcatctcctgaaaatgcagctgctggtcaggagcatgagaatgtcattctccaattcggtaaagtggggaaggatgtattcactatggattatcagtatccaatctcagcttttcaggcatttgctatatgccttagtagcttcgatactaagatcgcttgtgagtgatatgcaaacaggttgtgcgaaatgcaatg

SEQ ID NO: 23156 - DNA, 520 bp, Gossypium hirsutum
  Clone ID: GOSHI-09MAY01-C19808_1
ttttgtgttggctagtaacagtgagcctttgtttaacctgtttgggttcttggtttgtgttggttctactgctggtcgtgctttaaagtctgtagttcaagggatctggggaactagtgaagctgagaagctacattccatgaacttgctgctgtatatggctcctatggcagcaatgattttgttaccgcttactctatatattgaaggaaatgttgcaagaatcacacttgacaaagccaagactgattctttcattgttttcttgttggttgggaatgctacggtggcttatttggtgaacttaacaaattctttggttaccaaacatacgagtgcccttactttgcaggttttgggcaatgccaaagccgcgttagcagcgatcgtgtcggttatgatcttcaagaatccggtgaccgtgatgggcatggctggattcgctgttacaataatgggagttgtgctctactgcgaagcaaagaaaagatcttaggtcactacacactgacaataaggt

SEQ ID NO: 23157 - DNA, 397 bp, Gossypium hirsutum
  Clone ID: GOSHI-09MAY01-C19598_1
atagagctttccacacccgcgggagaggtcccccgggacctcctcggggctgctataactatgtccctgcctcatcacgcgccaccaccgccaccagaaaaagcagtgcaggtcctggagtcacccccaccgatgatgacgatgacgccatctcagctaccggcgctttataagcagcgctcgttgtcgccagacattttccgcgacgaggcatggcttagaaggaaagggaacagcaagaacagagggagcaagagcgtgacggacgaagaccttgatgaactcaaggcttgtattgagttggggttcgggttcgagtttgactcacccgaggtggatcaacgtttgtccgacactttgcctgctcttggcctctactatgctgttaacaagaact

SEQ ID NO: 23158 - DNA, 478 bp, Gossypium hirsutum
  Clone ID: GOSHI-09MAY01-C119560_1
ctctcgcgtccgatgacctcgtagagttgaatcacctctcaaaactactgtataatcaatatgctgaactgattttgctgcagaacaaagattgttgcatatatctttgatcagcacagtagcctgcaaaatgttaaatctttagtcggtcaagagaaaagtaaagagaaatttgatttggttgaaataaattttcactaaaaatatttccatggtaatgcaaaatgagatctagggataaaataacttgacatttgacgaaaaattctttaccttctcagagcttagtgctctagagttagtcaaaatatagaagcatataggttctttcctaaactgttcaacaagtgattctatactcctgcagatggcaaacataagtgaaggtaggaattccttctagatggcaaaactgttatataatacagctgacatgatagatatatataactgtcatatatcaataatagtatagagg

SEQ ID NO: 23159 - DNA, 1179 bp, Gossypium hirsutum
  Clone ID: GOSHI-09MAY01-C19578_1
cgacaggctgctgataatgaagatgctggtgggcactataatttaggagtaatgtaccttaaagggatcggagtgaagagggatgtgaagattgcttgtaagtgttttattgtggcagccaatgcaggtcgaccaaaggcgttttatcagttggctaagatgtttcgtactggtgttgggcttaaaaagaatcttcctatggctactgcattatacaagctagttgccgaacggggaccatggagttccctctctagatgggcacttgaatcatacctaaaaggtgacatgggcaaagcattcctcttgtattctaggatggctgagctaggttacgagatagcacagagtaatgctgcatggatccttgacaagtatggtgagcgcagcatgtgcatgggtgaatctggggtttgcacagatgcagaaaggcatcaacgtgctcattctttgtggtggcaagcttctgagcagggtaacgaacatgcagcattacttattggggatgcatattactatggcagaggaactgtgagggattatgagcgtgcagctgaagcttacatacatgcaaaatcccaatcgaatgctcaagctatgttcaacctgggatacatgcatgagcatggccaaggacttccttttgacctccatcttgccaagcggtactatgatcaggcattagagctaagatcctgcagcaaagttgcctgtcacactggcactggcaagtttggtgggtacgaaagaactatgctgactgtttcctggtccacgtaattgattccctgccggaagtttatcctagagttgaaggatgggtggagaatggtgatcatggagggagggaaatgcaacaatattgacactatttgtctgtctactcactgttctataccttcgtgagcgacaacgcaggcatgctattgctgctgcgggggcacacgaacctaatgagcatgttgtacctgctgcacgctaattgtcagtgttggtattaagattagatgtgtttttttcaaaagtaaaatctccatagcaaaaatgtatagatcggcttctttggccctgttctagagagctcctacattgtaccatagagaatattctagtccaaaaaagattaacataagttgaaaaacgatcttttgcctctaatatcaaaacatgtactttatg

SEQ ID NO: 23160 - DNA, 470 bp, Gossypium hirsutum
  Clone ID: GOSHI-09MAY01-C119500_1
caacattacacatcaacacctgaagaagctgctgcagatgccatcaaagcaggtctggatttggattgtgggccttttttggcgcaatacactgaaaatgcagtaacaagaggattgttaaaggaggctgatgttaacagtgccttggcaaacacgctcacagtccaaatgagactcggcatgtttgacggtgaaccgttctgctcaaccattcgggtacttggggctcaaaagatgtgtgctcacctgctcaccaagagctcgccctcgaagctgcgagacaaggcattgttctgcttaacaatcgtggtccttcattgcctttatctcatttacgtcaccgcacggttgctgttatcggacctaactacaatgctactgttacaatgattggaaactatgcttgtgttgcatgtgcatacacatctctttgcaagggatagggaattacgcaaagacaattcataaat

SEQ ID NO: 23161 - DNA, 774 bp, Gossypium hirsutum
  Clone ID: GOSHI-09MAY01-C19478_1
gtttcgcccaaaaaaaatgattgattatcaaaatttgtagcgtgaagtgtaatgaagtgcaattagagatccatttcattttttttggggggtatccagattaatattttcaattagaatgatttatggttggcttggttggaccgaaaaatgaagcatccaggctccgtttagaataaaacccaattggtaatacatttgggagtaccacctatatcataatcataaatcttttttatttacaaattcgaaatagaaataagaacgatttcaaactattaatcaatcgaataatatgagaaatacgttgaatatttggcggaaaacatgaaagaaaaaggaattaaaataaaaaaggaaatgaaatcatagcaaaaagatgtggtattgggtcatttgtcctatatgcgcaaatcaaaatcgggcggatctttactcggagtagagcataaacctaaaaaaattgaataaaaaattgatgaaacccattcaggaacaagaaaatgacatcgtgatttggattgaatcccaatgaaaaaaaaatagatcaatgaaaagtttgtgcgataagtttagcgaatttttctatattatagattataggaaaacgggccaaaacttatctttctttaatttcattttatttaaaaaatgtaagataaagccccttcgttagaaattagaagttagaaaaggcacactagaacaaacgaatgatggctggaatctacacattgattctttgttcgcaatttttgttgatccgtatgcatc

SEQ ID NO: 23162 - DNA, 416 bp, Gossypium hirsutum
  Clone ID: LIB3147-056-Q1-K1-B5
cccacgcgtccgcccacgcgtccgcccactcgtccgcccacgcgtccgcccacgcgtccgcgcacgcgtccgcagattaatattttcaattagaatgatttatggttggcttggttggaccgaaaaaatgaagcatccaggctccgtttagaaaaaacccaattggtaatacatttatgattaccacctatatcataatcataaatcttttttatttacaaattcgaaatagaaataagaacgatttcaaactattaatcaatcgaataatatgagaaatacgttgaatatttggcggaaaacatgaaagaaaaaggaattaaaataaaaaaggaaatgaaatcatagcaaaaagatgtggtattgggtcatttgtcctatatgcgcaaatcaaaatcgggcggatctttactcgg

SEQ ID NO: 23163 - DNA, 822 bp, Gossypium hirsutum
  Clone ID: GOSHI-09MAY01-C119450_1
cttcactcgtccgcccacgcgtccgcccacgcgtgcggcctaaacaaaagcaggcagccagagtggttacatggtacatatccaatatataaacaaaaggcgacggatactgggaaaactctaatcagttgtaataaatatatggtacaattttttaaaaaaaatgaaaataataaattaaaatttttttaacaaagttataggatttacatcacaatttgcttgcacgtcctctataaactaatgccaaaccccaatctgtcaacttgccgctcgcccacgcgtccgaagagccacccttcttgtttcttcttcttcttcttcgcctaacaacccctttctctctcttctttgatttggttgtttctcacctttaaacgctgttgatcatcaagctctaatcagtaatcatggacgctggtgatcctagtttcaacaaagctagtaacccttatgttactgagcaagagttagaagataacgacaacgtttcatcagaaaccggcgctgagtctcctccttctaccacgtttcaacagcatcaaactctctcctaaaagagggagatccatacagaaaagagttgtgtcagtgcctatcaaggatgtcgaagggtcccgctttaaaggtgagagtgctccaccatccgattcttgggcttggcgaaagtacggccaacaacccatcaaaggctctccttatcccagaggttattatcggtgtagtagctcgaagggatgcccggcaaggaaacatgtcgagaggagtcatgtggaccctaagatgttagtgatcacgtactcctgcgaacacaatcacccc

SEQ ID NO: 23164 - DNA, 640 bp, Gossypium hirsutum
  Clone ID: GOSHI-09MAY01-C19768_1
gccatgtaatcatttatatcattcggattgcattatcccatggctggtgcagcacaactcgtgcccggtttgccgtcaagagttgccaccacaaggatcaggtagcagccagagttataaccccaggggtcaaagtaggagcagcaattttggaagtagttccagtggaagggagagccaaagcagcagacgtaatccattttcatatttctggccattccgttcatcaaattcaagctctagccataatggagccgcgggaagtagttccccacggcatgtgcatgagaacaatcagtcgatggggtataatggatggccttttgactgaggtctgtagttgtgtgtacctgtagtgtttgggcaaaaattagttgcactgaatgtggattgagggatcttaaaagagtctgtctctgtaaaagtgaatgaggtcaatttcgtcctgcaaactgtgtttcactctttagccagtacttgtgggttttcaatctactatgaggactataactcaataactgcagtcttgatggcatgctatgctatgctatgcttccatgtttcaataaactaagcatcatgtatgatatgggtttacaagtttggttgagttaatactaaccaagattacatcaaaaaa

SEQ ID NO: 23165 - DNA, 592 bp, Gossypium hirsutum
  Clone ID: GOSHI-09MAY01-C19688_2
agttaaaatatcagtgagcaacgaaccaaaggagatctcattcttccaaaactcttatctttcagaaaaaaacaatgtacggtaaagccgcaatctgtttatcattcgtcattcgcttcctgatttcatgttcaatctatgtcggcaccgttgatctcagatcatacttcttccccttacttcagtcaccccaggttccacgctcactctgtgcttccggcccccctctccgcgtttacatgtacgatctccctaggaaattccacgtcggcatgatggatcgtcggagcttcgagggaccggctcccgttacggcggataatctccctccctggccctccaactccgggataaagaagcagcacagtgtggagtattggctgatggcatcgcttctttttggcggcaacggcaatgaagacagggaagcggttagggtttcggatcccgaatccgcggaggcccttttttgtgccctttttttcctcgttgagttttaatacacacggccataacatgacggatcctgaaacggaggttgatcgccgattacaggttgagttacttgaattcttgcaaagtccaagtacta

SEQ ID NO: 23166 - DNA, 634 bp, Gossypium hirsutum
  unsure (1)..(634): unsure at all n locations
  Clone ID: LIB3543-048-Q6-K6-D1
cccagcgtccgcgtattttccagctaatttggagcacgaaattggcgtttccttgaacttacagcttacaacggtactgtaaataatttctttctcttttggtttgcttcaaatgtggataaaaggaagttgaagtctttttgtctttcggagatccaagcacagttaaaatatcagtgagcaacgaaccaaaggaaatctcattcttccaaaactcttatctttcagaaaaaaaaattcaccccaggttccacgctcactctgtgcttccggcccccctctccgcgtttacatgtacgatctccctaggaaattccacgtcggcatgatggatcgtcggagcttcgagggaccggctcccgttacggcggataatttccctccctggccctccaactccgggataaagaagcagcacagtgtggagtattggctgatggcatcgcttctttttggcggcaacggcaatgaagacagggaagcggttagggtttcggatcccgaatccgcggaggccttttttgtgccttttttttcctcgttgagtttaatacacacggncataacatgacggatcctgagacggaggntgatcgccgattacaggttgagttacttgaattcttgcgaaaat

SEQ ID NO: 23167 - DNA, 648 bp, Gossypium hirsutum
  Clone ID: GOSHI-09MAY01-C119640_1
atttatggctcgaggcagaagctgctttatgttccaccaattacatggctcgtttcaataagattaagattgaaatagaagaatccaaattggacaaaggaaaagaagatgcatcagatgaggataaaaaatctagttctaagttttctgctcaagtaaacaccaataagaaattaacacaatcagctgagagtgaatcacctactgctgtttctaaccagaattcttccatcaaaagctcttgctaccatgctgatgatgtgacagccagatttcaagaactaaaacagcggcttaacaattctagttctgttcatactagagagcttgatgaactttcgagctccaagctttgtccggatttgggatgggtgttgacctattggcacctgaagtaaaggacaactctactctaggcctgtcatctcaagactccattgtacaagggatagcctgccagacagaagatggtgaagcctctgtaatggctaggtttcaaattctgaaaaatcgcgactttgacaatttggatcccaatgagtggaaggaactacttcaaaggtgttgatcttcattgcaggatgacaagcaataccattgtaagactatcgagatgtacatcgtgtacctaaaccgttacagatctgt

SEQ ID NO: 23168 - DNA, 902 bp, Gossypium hirsutum
  Clone ID: GOSHI-09MAY01-C19178_1
gacacattgtttttcccttcgatcgtattattttttctcaattaacacttcatatttttcttgttctttcaagaacctaactttttgaagcacatgattggtttgcgtcgtttcattttcttcttcttcgaataaaaagaaaaggatgccagatttgaaagggggaattcgacgatcaaagaggatcaatgacaaccaggagacccctgctgtcttagctacaactgctcagcgtggtggtgctaatagaggtcgaggtcgaggtagaggacgcagagcaatgaaccaggatgacaatgcagtgcttgttggccctggtgcttgtggcaggggttgcagtggattaaacttgccagtgaagcacccggttgagaaaactgctgaaagattggttgctgttgaggaagaaggaagcactagtccacttcctgaaagggtacaatttggtaactctcctgtgtacatgttggatagaaagttgggtaaaggtggttttggacaagtttatgttggaagaaggatcactagtgccataggatgcactggtgctgatgcctttgaggttgctttgaaatttgagcatcgaaatggtaagggatgtagttctggtcctccttatgagtggcaagtatacagctctcttaatggctgctatggacttccatcggttcattacaagggtcaactaggggactactacatactcgtcatggatatgcttggtccaagtttatgggatgtttggaactcaaacaaccagatgcttacacaagatatggttgcttgtatagcagttgaggccatatcaattttagagcagcttcattacaaaggctttgttcatggagatgttaagcctgggaactttttgcttggtcagcctgggacctcaaatgagaaag

SEQ ID NO: 23169 - DNA, 501 bp, Gossypium hirsutum
  Clone ID: uC-gsflnu33B109b08b1
ttctctggtgtaactgcttgaattctggcattgggcctccatcgacttgggaagactgatgttccggcatatgatggatcttggactgaatggggtgcggtatctgacacacctgtggacacttgatcttaaatcttaatgcaaagctgtcaaaaagtgccgaagagtcaagcttgcaatcgaccagtttcagttctcagatatggagacatgaagggtttgtatctagaaaagcctcaggtgtcattcatcaattggttgcgttccaatatggacctgtatgtgacgctacacattttcagaaactgtgtttgacaacaaaaccgatgaatactgaagtgtattatggtgttcttgaaacatgtatgctgattcacatgaagaggcaacagggatggtcacttgttttgcagaaaaaaactgtagaaagtgaagggtgatgatgattgagtcctgataataacaatttatggcagacaagtggtggtaatttaactaaag

SEQ ID NO: 23170 - DNA, 335 bp, Gossypium hirsutum
  Clone ID: LIB3083-012-Q1-L1-A3
tttatatctagaaaagcctcaggtgtcattcatcaattttggcgttggaatatggacctgtatgtggtgacgctacacattattagaaactgtgtttgacaacaaaaccgttgaattctgaagtgtattatggtgtttttgaaacatgtctgctgtttcacattacatggcaacaaggattgtcacttgtttggcagcaaaaaaactgtccaaaatgaaaggtgatgatgattgaggcattgtcgaattgattaaaagtaggaataaataagcgcgtgcacaaatctctttgcaatttcagaccactatgttaacaatttcaccggcacgagggg

SEQ ID NO: 23171 - DNA, 608 bp, Gossypium hirsutum
  Clone ID: GOSHI-09MAY01-C19088_1
gttttatgtgcatttgtgggtttcatccccaaaattgaaagccaaatctttcaccgttattggtagatattaaaaaagatggtgctggttttggctttgggggatttgcatataccccatcgggcggctgatctccctcccaaattcaagtccatgctggttcctggaaagatccaacacatcatttgcactggtaatctttgcatcaaggaagttcaagattacttgaagacactttgtcctgacttgcatattaccagaggtgaatatgatgaagatacaagatatcccgagaccaaaacattaactatcggacaattcaagttgggattgtgccatggccatcaggtcattccctggggtgacctagactccttagccatgctacagaggcaactggatgtagacatacttgtaacaggtcacacccactcagttcaccgcttacaaacatgaagccggagttgttataaacccggggtctgctactggtgcattatagcaacatcacttatgatgtcaaccctactttgtcttgatggatatcgatggactacgtgttgtggtctatgtctatgaactcatcgacggagaagttaaagtcgact

SEQ ID NO: 23172 - DNA, 408 bp, Gossypium hirsutum
  Clone ID: LIB3145-055-Q1-K1-C7
gaggtgaatatgatgaagatacaagatatcccgagaccaaaacattaactatcagacaattcaagttgggattgtgccatgccatggccatcagacagagatcttgctctctttttctgaagctgctaaaggatgcacgaaggatctacagttttatgcatttgtaacttgtgattcatgcggtaagtagcgcctaaaatttgttggaatcatgttgtgttcaagaaccatacaagcacaaatgtaatccactaaatgcataattccaagtggagagaaaggtaacctgcaagacctgcattctacaaatatgttgccttcatgttcatcttgaatgcactagaactgtttgctttacctagagcttctttctaaagatcaatataccgatattgctgtgggaacata

SEQ ID NO: 23173 - DNA, 694 bp, Gossypium hirsutum
  Clone ID: GOSHI-09MAY01-C19028_1
actccacacataaagcagtggctcaaagaccaaaacatgactgctaaagatgcttatcaatattttgtactcaaggctcaagaaatcgcaatctcaaaaaactggacgcctgtcaactgggaagaaaccttcaattcttttccgtcaaagcttaatccacgaactattgtgcacaactggttgggttccggggtttgtccaagggctgttgcgaaaggatacagatgcattttcagcaatcaaggtgcttggtatcttgaccatctggatgttccttggaatgaagtctatagtgcagagccactagaaggaataaataatgtgtccgagcaaaatcttgttctaggaggtgaagtttgcatgtggggcgagacagctgatacatcagatgttcagcaaacaatatggcctcgagctgctgctgcagcagagcgattatggagcaaaagggaggctgtatctgcacgaaacattaccttagccatattaccccggcttcattacttcagatgcctattgaataggcgcggggttcaagctgctcccgtcacaaacaaatacgctcgacaacctccatttgttgccggatcatgctacgagcaatagttcctcagttcattactagtcggattgctccagacctgcctgtatctgctccttggatatgttgagagtacatctggaaccttaaatt

SEQ ID NO: 23174 - DNA, 497 bp, Gossypium hirsutum
  Clone ID: GOSHI-09MAY01-C19358_1
ggaaggtatggttttattcaacagatctaattgtattgtgcttttctccacattctaatcaatgttctttttatgaaaaaaactaatcttgttattgagttctgattactgggttgttgatactgaagcggaatcaataaaaagatacaaatttcctctcttttaagcaattttgaaatctggttttcttcaaaaagagaaaaacaatatggttacagttaatatagggatgcttcattacattctagaccatgtatatggtgcatttgtgcatagaacaaagattagcccaccgttcttctcaagagggtggggtggaacaaagcttgagcttctggagagattgataagccagttgttccctgaagttgaaggccaaaactggcctccaagcttgattcaacccatttggagaactgtttgggagacccaaaatgcttgtttgagagaaggtgtgtttaggaccccttgtgatgagcagttgcttagtgcatttg

SEQ ID NO: 23175 - DNA, 501 bp, Gossypium hirsutum
  Clone ID: LIB3585-032-P1-K1-D5
tggggccgcgcgtccgcccacgcgtccgcccacgcgtccgcccacgcgtcttttttcttctcaagagggtggggtggggcaaagcttgagcttctggagagattgataagccagttgttccctgaagttgaaggccaaaactggcctccaagcttgattcaacccatttggagaactgtttgggagacccaaaatgcttgtttgagagaaggtgtgtttaggaccccttgtgatgagcagttgcttagtgcattgcctcctgaaagtcataatgcgagggttgctttccttgtcccaaaagatgtgccacctcaaaagatggcatgtgtggttcacctagcaggcacaggagaccatacatttgaacggagattgcgtcttggtggaccattattgaaacaaaacattgcaactatggtgcttgagagccctttctatggtcaaaggcgtcctatgctgcagcgtggtgcaaaactcttgtgtgtcagtgatttgctttta

SEQ ID NO: 23176 - DNA, 372 bp, Gossypium hirsutum
  Clone ID: GOSHI-09MAY01-C19318_1
ctttactctgctctcaaaaaatagaaaaccaggtcagacttcggccgcattatgtaatggattaatttttttaaagatccgataatgtaatttttttttgtgattttttcaaccaatcagatggcttcgattcgtagaactctgtcgccggcatatcaccaccgttcttaccagaacggcgccggattctcctctccgtctcacatgtttttacccaacgggaacagcaaacattcctcttcaaggcatttaccgctgttattcactgccttaaatctagtctaccgcacaggatggcggcgatctttgtgctggtgtctcttctttttccttatagggttcgtttttggaatcacgctgtttggaaacatg

SEQ ID NO: 23177 - DNA, 586 bp, Gossypium hirsutum
  Clone ID: GOSHI-09MAY01-C19278_1
aagaaacgaaaagaaaaggaaaattaaaaaccctttgcttcccctccccgttgtttttagttttcttttggctaaagaaaattatggaaccgagtcagacgatcgaggatgaatcacaaccatccatcgccagcgtgacccgtcgcatccaacgtttgtctcttcaccttatcccacttccgttcctccaacgttcacctcagctggacatgctgacatgcgccaaggccaataagcaggaggtcgacgtagcctccctttcaagctacatgagagggaggcatagggaaattcaagagaagatttttgatttttttaactcaaggcctgatttgcaaaccccgactgagatttcaatgaaagaacatagggagctttgtttgagacagcttttggggttggttagagaagcaaagatcaagccttttagatatgttgttgaagatcctgctaagtattttgctatttctgaggcggttgggagtattgatatatcacttggtatcaaatttggtgtccagtatagtctttggggaggttctgtgttgaacttatgcactaaaaaagcaccggataagtattttga

SEQ ID NO: 23178 - DNA, 1423 bp, Gossypium hirsutum
  Clone ID: GOSHI-09MAY01-C19208_1
tcggggagaatagtccaagctcctttggggttgttccctcgaccttggccaccaaatgctgatgcttctgaagccagccagttttttaaagtcatcgaatatttccggctacttggacgtgtgatggcgaaagctcttcaagatgggcgacttttagacctgccactatcaacaccattttacaaacttgtgcttggtcaagagcttgatttgtatgatattctgtcttttgatggtgagtttgggaaaattttgcaagaactgcatttccttgtttgtcgaaagcaatatttggaatcgactggtggtgaaagtagtgctgctgttgatgaattgtgcttccgtggtaccccgatagaagatctctgtttggattttacgctcccacgcgtcccagaatacatactgaaaccaggggatggcactgtggatatcaatagcgtagaggaatacatatcctttgtcgttgatgcaactgtcaaggctggaattattcggcaaatggaggcatttcgagctggatttaatcaggtttttgatgttgcatcattacaaatatttactccccaagagttggactatttgctatgtggtcgcagagagttgtgggaggccgagacacttgctgatcatataaaattcgatcatggatatactgcaaagagccctgcagttgttaatttacttgaaattatgggagaatttacaccagagcaacagcgggccttctgccaatttgttactggtgcgcctagacttccacctggtggtctggcagtgctgaatccaaagcttacaatcgttagaaagcattcgtcgtctgcaattgctgctacttccaatggaagtggaccctcagaatcagcagatgatgacttgcccagtgtcatgacttgtgctaattacttgaagcttcctccatattcttccaaggaaattatgtataagaaattgctatatgcaatctacgaagggcaaggatcttttgatttatcatgagtgagtgttcgcaaccaaaacatacaattgtgtagtatagttctgaacaacacaatgtggggtcaacttatctcacctgctgcgatcatttttgatatttccaagtggcgtattaattttgctcaaataatggtttctctcttcactgatgtttccatacaattagtggcattggcaaagctccgtttctactttaatggtggatcatccaaaatttgcgtccataggccccccaaattctggatgacttataagaagaagcagaaaagaaaatggaaggcggattttgtggagaattggttcaggcaggcagctgcttaaacttttgtatataaataggaagtttatgtgtatgttttcttttttcttttggtttgacaatttattggctggtaagatataatatatttacatatatatcgtt

SEQ ID NO: 23179 - DNA, 518 bp, Gossypium hirsutum
  Clone ID: uC-gsronu33B007e02b1
gggccttttgccaatttgttactggtgcgcctagactggcacctggtggtctggcagtgctgaatccaaagcttacaattgttagaaagcattcgtcgtctgcaattgctgctacttccaatggaagtggaccctcagaatcagcagatgatgacttgcccagtgtcatgacttgtgctaattacttgaagcttcctccatattcttccaaggaaattatgtataagaaattgctatatgcaatcaacgaagggcaaggatcttttgatttatcatgatggcattggcaaagcttcgtttctactttaatggtggatcatccaaaatttgcgtccataggccctccaaattctggatgacttacaagcagaagcagaaaagaaattggaaggcggattctgtggaaaattgattcaggcaggcggctgcttaaaacttttgtatataaataggaagtttatgcgtatgttatctttctactttaggtctgacaatttattgcctggcaagatataata

SEQ ID NO: 23180 - DNA, 504 bp, Gossypium hirsutum
  Clone ID: GOSHI-09MAY01-C14998_1
tccactcgtccgcccacgcgtccgcccagaaacccgtccctctccttctacgcagaggaatcaaaatcatgttgttcttttcgtgggtcggagacttggtgggaagagaagtgacggtggagctgaagaacgatttggctatcagaggaacccttcactccgttgatcaatacctcaatatcaagctcgagaatactagggttgtcgatcaagacaagtatcctcacatgctttcggtaaggaactgtttcatcagaggctctgttgtgagatatgttcaactacctccagacggagtcgacattgaattgcttcatgatgccactagaagagaagctcgtggaggctgaaaaagcagcttttgttgacaaattcagtgtgcttttaatgatttagattttttgcttcaaagattgtgacaagttatccaggatttattcctttttgcattaatgtagacaaactggcttttgatttttgtgtatcggcaaattttattggatg

SEQ ID NO: 23181 - DNA, 626 bp, Gossypium hirsutum
  Clone ID: LIB3543-013-Q1-K6-E4
ccccgcgtccgccccgcgtccgctcgacttctggagatttctcacatatctcttggcttctgattagaggatcaaaatcatgttgtttttttcgtatttcaaggacttagtgggaagagaagtgacagtggagctgaagaatgatttagcaattagaggaactcttcactccgttgatcaatatctcaacatcaagctcgagaatactagggttgtcgatcaagacaagtaccctcacatgctttcagtgaggaactgtttcatcaggggttcggttgtgaggtacgttcagctacctcccgaggaagtcgacattgaattgcttcatgatgccacaagaagagaagctcgagttgtgttttgaaagtgaacgtccattgctgtcctgcatgtcccaagaaagtgaagaaaatgttgcagaaaatcaatggtaaagaatattaaaaaaaaaacaccttttaaaaatgctttcccattttttttatttgattttgtcacctaggggtggatgccgtcgacatagataccgaaaacgggctggtcactgttcatggcattgtccaactctctacgctcattcaaacgatatcagaaaagatgggcaaaaaagcagagctttacgccta

SEQ ID NO: 23182 - DNA, 442 bp, Gossypium hirsutum
  Clone ID: LIB3189-050-P1-K1-A11
gaaattttcattttcttcttcctacattgctttctgttctctgctgccttctcttcttctcgacttctggagatttctcacatatctcttggcttctgattagaggatcaaaatcatgttgtttttttcgtatttcaaggacttagtgggaagagaagtgacagtggagctgaagaatgatttagcaattagaggaactcttcactccgttgatcaatatctcaacatcaagctcgagaatactagggttgtcgatcaagacaagtaccctcacatgctttcagtgaggaactgtttcatcaggggttcggttgtgaggtacgttcagctacctcccgaggaagtcgacattgaattgcttcatgatgccacaagaagagaagctcggtgaggctgaaatactttttaatgaacatctgatttgagatacttatagtttctg

SEQ ID NO: 23183 - DNA, 577 bp, Gossypium hirsutum
  Clone ID: GOSHI-09MAY01-C14908_2
agatggggtggaagaagggagtgccagagttcgaagagaccgggccagatgacttcgacccggccaatccctacaaagacccggttgccatgctggaaatgagggagcatatagttcgagagaaatggatcgacatagagaaggcgaagatcctacgagacaaagtcaggtggtgttaccgcatcgaaggagtcaaccatctccagaagtgccgccacctcgttcgcctgtaccttgacgccacccgcggcattggctggggcaaggatggccgccacccgtccctccacggtccgaaggttgaggaggttgagtcagaatgagtggctgctttcagctaaggaagggactgagtttggcctgcagacgtgagggacctgagtaactgctcaatgatatggctgttattgctgtttttattgtaagagtgtttagaatccaaaatcttgctatccataaccgtacatcaggtaatgaaataagtttgtcgtcatttccctgttggattgctgatgtgataagatttagaagacaatacatattttttctgctatatttgagtgactattagaatttg

SEQ ID NO: 23184 - DNA, 603 bp, Gossypium hirsutum
  Clone ID: GOSHI-09MAY01-C14908_1
cccacgcgtccgaaactgagaaagagtatgggcaggaagaagggagtagcagagttcgaagaaacggcgccggatgacttcgacccggccaatccctacaaagacccggtggccatgcttgaaatgagggagcatatagttcgagagaaatggattgacattgagaaagccaagatcctccgtgacaaggtcaggtggtgctaccgcatcgaaggggtcaaccatctccagaagtgccgccatctcgtacgccagtacctcgacgccacccgtggcatcggctggggcaaggatggccgtcatccctccctccacggtccaaaggttgaagagatcgattcagaatgaatggctgcatttggtcatgataggtgactgactttgggcagcaaagtaaggagtgtgggatttgaataattgtccacctacattgtcactattggtttttgtgttgtaagactcttataacaaagatcagacgtgatgccatcttctttttccattctggttagcatccaaaatcttggtaaattacttgggccaggtgtgcgttaacacgtcctcagattaatggaataaggtccttgggatttcatgcgctgg

SEQ ID NO: 23185 - DNA, 261 bp, Gossypium hirsutum
  Clone ID: GOSHI-09MAY01-C14878_1
cccacgcgtccggtccaatgaagtttgtaatagagaggataaacgaacaatagcacctgagcatgtactcaaggctttagaggtgcttgggttcggaaagtacatgggagagctctatgctgcatatgagcagcacaagattgagacactgcaggactctttgaaaggtgggaaatggagcaatggggccgagatgaccgaggaagaagcagtagctgagcagcaaagaatgtttgccgaggcacgagcaaaaatgaatgg

SEQ ID NO: 23186 - DNA, 640 bp, Gossypium hirsutum
  Clone ID: GOSHI-09MAY01-C14808_1
acctacgcgctcacgcgtatcgactgaaattgaaaagaagaaaaagaagaagaagaagaagagcaatgaaaatgaggatgctattgaggctattgctgttgttgatggtgcaattgatgtagagagtgatgaaattgaaaagaagacaaagaagaagaagaagaagaagaagaagaaagagaatgaggaggctattgaggctattgctgttgttgacggtgcaattgatgcacgggctgaggatgttgaaaagaagaagaagaagagcaatgaaaatgaggatgctattgaggctattgctgttgttgatggtgcaattgatgtagggagtgatgaaattgaaaagaagaaaaagaagaagagcaatgaaaatgaggatgctattgaggctattgctgttgttgatggtgcaattggtgtagggagtgatgaaattgaaaagaagaagaagaacaaagagaatgacgaggctattgaggctattgctgttgctgttgttgatagtgcaattgatgcaggagtgatgaaattgaaaagaagaaaaagaagaagaagaagaagaacaaagagaatgaggaggctattgccgttgttgatggtgcaattgatgtaggagtgatgaaatgaaaagaggaaaaag

SEQ ID NO: 23187 - DNA, 696 bp, Gossypium hirsutum
  Clone ID: GOSHI-09MAY01-C14468_1
ctcccaaaccttctccccctatccctatccatatacctcaacacctccttcgccacctcaacgacatacgcgccaccatcaatcacctcactgcctccacctctgatcccaaacgcacttcccccgttccccatgatctcatcctccattcccaagtcgcacccatcgcttcttcctgccaccgccacccttaccttctccgtagatacatgaattacactcctttttcaacttgcccttatgatctcgacctccaagaaacgcttattctcaacggctgccacccacttccacggcggcgttgcttctctaaaaccccgccaaagcccacttcctcccttcctcttaatcctttcccaactgccctgcccgactcctctgtcatctggaccaaatactcctgtaaatcttttgcctgtcttttacaaaacaaccccatagacttcgatctcaacgcccgacgctcatcccttctaaaatacgcttccgagctcgaccttcccgtttaccggttcatgcaattggcttagtcagcttactttgtgatccgtcttggcattgacataggcgggggaactggaaccttcgctgctttgaggaaaattttctacaatgtcacgatgctgaccaccaccttgaacgtctatgcgcctttcaatgaagccgcggctgcaagagggttgatgcctttacacg

SEQ ID NO: 23188 - DNA, 746 bp, Gossypium hirsutum
  Clone ID: GOSHI-09MAY01-C14418_1
gcatagcccaaatcaaaactacccaaacccaattaaaacccaattacaaagcccaaaacaaatcaaccctagcccactcttaacattttcagagagcaaaagaaccctagccacctctgccttcagccgccactctgccccatgcgcgccgcacgtcagcagggcttttccctcacgctatcaccggccttcacgtgtatctgatccctctgacacttgcaaataagaacccacacgcaaacagtagcagccaccaagcaaaagaaaaaaatggatctgtgtaactcggctataaaagccgaaataaatccctctataattttttacacacactagtaattcaaaaaagcaaaacagaagtttgaaaatattgattttgattttctttacttgttttcttttcgttttccagtttctttttattttttattataaatctacttaataaaaaaaggggccccccataccaagaggatgaagcgcacaacttacctaaaatcctccgtggttgtgtcgtccgagtccttctcaccgtccctaaaatcggacccaaaagtgggaagagagagacatttttctctcgatccgtgggctgagaaggcttagcctttaaacatgtaacagggctgaaaagcccgttctgtgccgctccgaccatcgtccacggcggaggagcggcgggatggcaacgacgccccaaggctaggtcaaaaccctagcagagaaaatagggaggggtttaaaag

SEQ ID NO: 23189 - DNA, 391 bp, Gossypium hirsutum
  Clone ID: LIB3189-035-P1-K1-H2
aaaaacaaaaaaatcaaaccaaatcaataaaagtccaaaatttgcagtccatgttttacaaatatctgggcccaatttacaacatgcatagcccaaatcaaaactacccaaacccaattaaaacccaattacaaagcccaaaacaaatcaaccctagcccactcttaacattttcagagagcaaaagaaccctagccacctttgcctttagccgccactctgtcccatgcgcgccgcacgttagcaaggctttttcctcacgctatcaccggcctttacgtgtatttaaaatccttcgtggttgtgtcgtccgagtccttctcaccggtcctaaaatcgtacccaaaagagggaagagagagacatttttctctcgatccgggggctgaga

SEQ ID NO: 23190 - DNA, 1279 bp, Gossypium hirsutum
  Clone ID: GOSHI-09MAY01-C14428_1
atttttggaatacattgttagttttcttgactctctggctcttccccactccttgctctgccgtactgcacgcatatacgaactcgttgccgagcactttgttgacatcaactgttcagactgcaagggagccagatcttccatattcacccttccctgtgactcagtcgatgccaacaagatacagcaatgccacctcttccattagtggtccaaccatttctatgccagaggctctaagagcaactggtatttctgcagcgcagcccacacaacagtcactgcctggtgcgagtgttgctacaggacctgcacttccgcaacatctagccatgcaccctttttcccaacctacacttccattgggacactttgccaacatgattagttatcctttcttacctcagagttacacctatatgccatcagctttccagcaaacatttactggtaatagtaactatcctcagtccctggcagcagtgctcccccaatacaagaatagtgtttctgttagcagtttgcctcaatctgctgcaattgcatctggctatgggtttgggagttctaccaatattcctggaggacttcctctgaatccgcctacagcacctgcaggcacaaccattggctatgatgatattctgagttctcagtacaaggacagcaatcatttgatgtcgcttcaacagactgagaattcggccatgtgggttcatggccctggctcacgaacaatgtctgctgttcctggaagcaattattacagcttccaggggcaaaaccagcagggtggtggatttcgacaagggcaacaaccttcgcagcattttggggctcttggatacccaaatttctaccattcacaaacaggagtattgggggaccatcagcagcaaaaccctatggatggatccctgagtgggtctcaaggccagccatcaaagcagacccaacagttgtggcaaaacaattactaatgttatcacctccgggtttttcagggtcttggtagtgagtttgaaagtggccaatctaaggcattcgtgcgattgaataattacatgtatggttgataggggtctgaagagaccttgaatggctactgccctgtgccacgaggttgtattttacttatttattgtctggttatgttaacttaggaacacagtgtgctaatttgggatggtggacgttgcccttcacttctctttccccctcatatgtttccctggtcccctttccccttttttatagtgaaaatttgcctttttttttt

SEQ ID NO: 23191 - DNA, 708 bp, Gossypium hirsutum
  Clone ID: GOSHI-09MAY01-C14738_1
caataacaagaaactctctgctagggtttcttttccatgccgccgccgccaccgctcaagccattccacggcctccgacgacgccccgacctccgatcgcgacggaggtggaccgattcgacggtttcggctaaagattcagccaactggggatgtacgtgggacacgtacgtgcgcaaagggtggtggtgcagggctgatgtgcggcggctagggttgaaggttgtatgctgctagggttgctgctggaatttagttagtgggctgtttagtttgggttaggtgttgggccattctaggtttagttgggcccgggcattattgggtttgtacaaattttacctagcaaggtttggttttttagctaaagattgcttcatgatctgccaccaatttgagggccccaaggtactgaagatgatattcacccttttatggacacgcgttgctttcaatcggcccagtttcggcttcgttagagggcaccaatttgattagaagtggttacatggacacaaccatgatggaagcctagcaatactcttcaagggccaatggctatttgatttataggttagatatgttgaaatcgagattgggatatgtaatggtagagatttattctatacaaatgtctacgctgctaaatttcatttatcaattctgtttattgtaaatataaattcaaatttgagtataattttttcg

SEQ ID NO: 23192 - DNA, 637 bp, Gossypium hirsutum
  Clone ID: GOSHI-09MAY01-C14728_1
acgcccacgcgtacgcccacgcgtacgcggacgcgtgggcagatacacttgcttctcactttagaacggtgtatggccgattcaacaccgcttctgtctcactgtgataaaccggcagaaccaaaacggccgcctcgatctctcgatgagaccatcgagggctgtatcggagacttcgggtggtggcaattcttgcaagcaatactcgtctctcttgcttgggtctttgatgctcagcaaaccttcatcagtgtattcactgatgctgagccatcctggcactgcacccaaggcggagacgagtctgtttgtaactctttgtccaacatttgcgagctccccaagaattcatggtcttgggattggccttcccacacatcaatcatagcggaatggggcctggaatgtgcgccttctttcttcactggcctctctccgtcgcctttcctcctggggttgctattgctggggacttggcattttctaagattagttgattaaacttttggaccttaaatcaagcctctttaatttaagtctcatgaggtattttacttatattttcacgtttttcactcaattttaggaatattagtcctagaaaatattattggtatgcacttgattgtatgtaaat

SEQ ID NO: 23193 - DNA, 619 bp, Gossypium hirsutum
  Clone ID: GOSHI-09MAY01-C14698_1
cccacgcgttcgaaattaataaaatcttgatatagttgctctgctatccgctcacccttatagcgtgactaccaactaataccccaacatgttcaaccagtgggccgctccacatactccaaagcccacaaaagccccgcggccgcccgtttatgaaatgaacgagagacacagaagcagccctgcagttttgaaactaagccaaaaacccgtaaactctctgggtgatctggttcctttcaccaacaagctctactctggagacttgcagaaaagggtgggcatcacggctggactctgtgtgctgatccaacacgtcccggagaaaaaaggcgatcgctatgaagccatatacagcttctactttggtgactacggccatttgtctgtccagggaccctatttaacgtatgaggattcctacttggcggtgacgggaggatctgggattttcgaaggagcctacggacaggtgaagttacatcagatagtgtttcccatgaagctgtactatacattctacttgaaagggataggtgatttgccaactgagcttctagggaagccagtgccaccatcgcctgcggtggagcccagcgcggctgctaaagctacggag

SEQ ID NO: 23194 - DNA, 435 bp, Gossypium hirsutum
  Clone ID: LIB3135-024-Q1-K1-G11
gggggcacgcgtccgcccactcgtccgcccactcgtccgggcttccaccacctgcctcaaaccgagcccttgcatcatcttgccgtcccaatctcacagagctttagcttccaatttctcttattcaaagccttttcccttccatggcctcaacctctcatcggtcactgaaaccagttccttcacctcatcaagatcctccaaccccttcactaccactgccttcttcttcaacaagttcaagcaggaggccgctccacatactcccaagcccacaaaagttcaagagctacacgtttatgaaatgaacgagagagacagaagcagccctgcagttttgaaactaagccaaaaacccgtaaactctctgggtgatctggttcctttcactaacaagctctactctggagacttgcagaaaagggtgggcatcac

SEQ ID NO: 23195 - DNA, 374 bp, Gossypium hirsutum
  Clone ID: LIB3189-043-P1-K1-H11
gtttggatcagtttcaatggcatccaccaccaccttcctcaaacccatcccttccatcaacttgccttcccaatctcacagagctttagcttccaatttctcttattcaaagccttttcccttccatggcctcaacctctcatcggtcactgaaaccagttccttcacctcatcaagatcctccaaccccttcactaccactgccttcttcttcaacaagttcaagcaggaggccgctccacatactcccaagcccggtaagcacacttcctgattgttctttttcttattcaatttcaaatctttatttgattgactttaacgtttggggtttcagcaaaagttcaagagctacacgtttatgaaatgaacga

SEQ ID NO: 23196 - DNA, 333 bp, Gossypium hirsutum
  Clone ID: LIB3145-044-Q1-K1-G7
gcataagcatcatcatcttcctagtcttaggtttggatccgtttcaatggcatccaccacctccctcaaaccgatcccttccatcaacttgccttcccaatctcacagagctttagcttccaatttctcttattcaaagccttttcccttccatggcctcaacctctcatcggtcactgaaaccagttccttcacctcatcaagatcctccaaccccttcactaccactgccttcttcttcaacaagttcaagcaggaggccgctccacatactcccaagcccacaaaagttcaagagctacacgtttatgaaatgaacgagagagacagaag

SEQ ID NO: 23197 - DNA, 573 bp, Gossypium hirsutum
  Clone ID: GOSHI-09MAY01-C14618_1
atgatcagaggctttttttccttttttaaaatttttcttttttcattttgctgaaaatctaaggctttatttggctttaaaaccatttctttttttctaagtgaagtagatttcaaaaccagcaaaaacaatggaaataatcgaaacccaaacagctgtttccaatttcgagccgttttacaacatgtcttcttcctcggagaataatggtggtggatttgaaatgtcgtcgttgatcgacggtcgagattattcaggcgagaatcacgcgcacggtggtggtcacggtggggtttttcgccactcgaacgcggcggctgttaaggttcagaaagtgtataggagttaccggacacggcgtaggttagcagattccgctgttgtagctgaagaactctggtggcaggctttagattatgctaggcttaaccacagcacaattgcgttctttgataatttaaaacctgaaactgctgcttcaaggcggcatcgcgttcttttaaatgcttctaagatccggcaagggttggctggagatgccaaagcacaaaaattggcttttcacattggatt

SEQ ID NO: 23198 - DNA, 967 bp, Gossypium hirsutum
  Clone ID: GOSHI-09MAY01-C14628_1
aattacaaaatgtaaattttattaatataaatctattatttaacataaaaattggggtcagacaggtaaaaagaaaaatgggacaaatattggattcggcccatcaaggaaagccctaacgaaagaaaaaaagaagaagaaggaaaactgagccataaacatcagatccaacccaaaatttcacaaccaataaacaccatatatataaaaaccctagcccgcatcccgggcgcccacgcccccccccgtttctcattttcaagtctgcaaaacccctagccagccacttccccgccgcctctccgaaccatgggccgagtccgtaccaagacggtaaagaaatcctctcgccatgtgatcgagaggtactactctcgcatgacgcttgatttccacaccaacaagaagatcatcgaagaagtggctatcatcccttccaagcgtctccgcaacaagatcgccggcttttccacccatctcatgaagcggatccagaagggtcccgttcgtggcatctctttgaagctccaagaagaagagcgtgaacgtcgcatggatttcgtccccgacgaatccgccatcaaggttgatcaaatcgaagtcgataaggaaactctcgatatgctttcggttctcgggatggctgatattcccggccttgttaaggtcgatccggttgctgttgcggttccccaaatcgggttcggtcgcggtggtggacccggaaggagattttaaggggtgggtatccatggatttgatgggttcttaaatcttaagtttgttatgcttatttttgatagtttttttctctataattttatgttccatttttgaaccattatagttgtttcaaccttaattggtactcaacttattaagctttatgtgaacttgtttatgaaggtatttgaagtgggtaattttcagtttttcccctctgaatccaaaaaaaaaaaaaagacaa

SEQ ID NO: 23199 - DNA, 608 bp, Gossypium hirsutum
  unsure (1)..(608): unsure at all n locations
  Clone ID: LIB3829-016-Q1-K6-A11
gtttaagacccacaaaccagggtacccacccctgtaaaatctaccttttccggggtgccagcacactcgnagtacncgtatacccgcatatttgggtgcaacgcgctaacagacacaccggtatctgacctgtaacaagggctcgggtaatatgcacgccatcgccgtgcaaccgaaaagcatatggagagtttccttatcgacttcgatttgatcaaccttgatggcggattcggcggagacgaaatccatgcgacgttcacgctcttcttcttggagcttcaaagagatgccacgaacgggacccttctggatccgcttcatgagatgggtggaaaagccggcgatcttgatgcggagacgcttggaagggatgatagccacttcttcgatgatcttcttgtcggtgtggaaatcaagcgtcatgcgagagtagtacctctcgatcacatggcgagaggatttctttaccgtcttggtacggactcggcccatggttcggagaggcggcggagaagtggctggctaggggttacagcagacttgaaaatgagaaactgatatggttcttagaacttggaatgtgaattatgggttttatatatatg

SEQ ID NO: 23200 - DNA, 399 bp, Gossypium hirsutum
  Clone ID: LIB3493-039-P1-M1-H7
ctattacacccatctcatgaagcgggtgcaggggggtcccgttcgtggcatctctttgaagctccaagaagaagagcgtgaacgtctcatggatttcgtcccctacgaatccgtcatcaaggttgatcaaatcgaagactatgatgaaactcttgttatgctttcggttctaggcatggactagattatcacccttgatagggtgctagcaggttgatcaaggaatgtcaaaccttgttgccaagtcaagcgatgaaacatgacatggtacaaccggcttcgtgtgatctgtagtgcattgcaatcaaagagcttgcaaaaccagtttcccttctttgtgagccctaactgattgtagatgttcatccaaaagcacaaacacctattggttattgatta

SEQ ID NO: 23201 - DNA, 370 bp, Gossypium hirsutum
  Clone ID: LIB3189-043-P1-K1-A4
aaaaaaactgtccccccttaatttaaaggtactatttttttatgacccttgattcgcacaccagggtgaatatcatcgaggaagcggcggtgaaccctaccaagcgaatccgcaacaagatcgccatctgttacacccatgtgatgaagcggatccagaagggacaccgacgtggcatctatttcaagctccaacaagaagatcgagaacgtcggatggatttcgtactcaacgtatccaccatcaagcttgatcaaatcgaagtcgataaggaaactctcgatatgatctcagttctcgggatggctgatattgccggccttgttaaccacgatccgcttgctatcgcagttccccaaaccatgatcgg

SEQ ID NO: 23202 - DNA, 1140 bp, Gossypium hirsutum
  Clone ID: GOSHI-09MAY01-C14198_1
ctttgttctaatgcttggcacccgcagactcccatttcctgcatttgcatttgacttaattcactgctctcgttgccttatcccttttacagcttataatgcaacatatttcgttgaagtggatcggttacttcgtccgggtggatatttggtcatctccggaccccctgtgcagtggcctaagcaagacaaggagtggacagacctccaggctgttgcaagagcattgtgttacgagcttattgctgtggatggaaacacagccatttggaagaagcctgatggagtttcatgtctaccaaaccaaaatgaatttgggctcgaattatgtgatggatcaaatgacccaagtaatgcatggtactttaaattaaaaaagtgtgtgacgtcaacgtcttctgtgagtggagaatatgctattgggacaattcccaagtggccagacaggctaacaacagctccttcaagggccttggtcatgaaaaacgggattgacttgtttgaggcagacacgaggcggtgggcaaggagagttgcctattataagaatactctgaacctgaagcttgggactccagcagtacgcaatgtcatggacatgaatgcattttttggaggttttgcagcagcactcgtatctgatccagtatgggtgatgaatgttgttcctgctcggaagccattaactcttggtgttatatatgacaggggccttattggagtataccatgattggtgtgaacctttctcaacatacccacgtacttatgattttattcatgtagctggcattgaatcactaataaagctcccgggttcaagcaagagcaggtgtaaccttgtggacctaatggtggagatggatcgaatgttgcgtcctgaaggaacagttgtgattcgagattcacctgaagtaatcgacaaagtggcacgcatagctcacgcagtaaggtggtcggctaccataaacgacagggaacctgaatcacacgggagggagaaactcctggttgcaaccaaaaccttctggcagctaacttcatcctcctcgttgagacagacttgttctttataatgtaggtattttccttttcgtttcaatttttttattatctcgagccaagttgtcttcctcatgca

SEQ ID NO: 23203 - DNA, 613 bp, Gossypium hirsutum
  Clone ID: AI055434.1
atccctttcacagcttataatgcaacttatttcattgaagtggatcggttactacgtccaggtggatatttggtcatctctggtccccctgtacagtggcctaagcaagataaagagtgggcagatctccaggctgtggcaagagcattgtgctatgagttgattgctgtggacgggaacacagtcatttggaaaaagcctgatggagattcgtgtctgccgaaccaaaatgaatttgggcttgaatcttgtgatgaatcaaatgaccccagtaatgcatggtactttaagttaagaagatgcgtgacgtcaacgtcttctgggaatggagaatatcctggtgggattattccgaagtggcccaaacggcttaccagaacttctttcaggccttgggcttgaaaaacgggatggatttgttcgggcagaccagggaggtggacatggagagttgcctattataagatactctgaatctgaagctgggagtcagcagtcgcaatgtatggacataagcattttggagtttgcacacactgtttaatcatttgggatgaagtgtctgctgagcatacttgtgaatttgcaagcttatgattcagatgtggaactc

SEQ ID NO: 23204 - DNA, 825 bp, Gossypium hirsutum
  Clone ID: GOSHI-09MAY01-C14158_1
ataagaagagatttagggggataaccggattctatttgacttacgctactaatactaattcatacatggactatatgttcttcttctcctcctgatattgatcctgctcgacctttgacgcaagtcaagaaaaggagtcctttttcatccttctgcccagactatcgcctaatcaaaaatcaatcatggctgtgaccatcaagcgagcggccctcatcgttgccagtcttggcgtcttatcttttatctttggagtcattgccgaaaacaagaagcctgccgctggaactccaatttctggaaaagatgtggttatttgtaagtatccatcggatccttcggtggttctgggctacctatcggttgcatttctgatactatctactctcactggctattggtccctgttttacccctacaaaggaaaatctgttccacagtctgttctcttccgaaacactagtttcttcgtcttcttcaacattgccttgtttacaggtggcttagcagccactctgctcttgtggccgacgatcacagagcacctgcacttgattcgtaatgttcatcacaatctctccaccgaatgtcctactgctaagactggactccttggtggtggtgcgtttgtttcccttgattcagccctcttttggttagttgccctgatgttggctgataatgcccgagaggatcactttgatgaacttgaaaaagacaggaaagttgagcatgctcaggttctcgcatctgctgaataccatgtcaaagggggtgctgtgtaatgcattcgtggctcatgttccatcatcaactgccaaatcc

SEQ ID NO: 23205 - DNA, 421 bp, Gossypium hirsutum
  Clone ID: GOSHI-09MAY01-C14138_1
tttatcgcgtccggaaaaaaaaataaagcctaaaaggtaaaaggttaacagattgtagggaaaaagaaaaaaaaatggtgagattatccaaatggcttctaaaagaagcaggaaccggagttaacaatacactttcagagatcctcgtttgtccgctctccaaacaagctttaagggtttgcgaggaaccaccttctcttatcagcgattctattggtgtctcttttcctataaaggatgggatcccatgtttggtgccgacagatgggaagatacttgatactgatgatacaatgaaacatgataatgctgctgatgattcagctaacaacaagtaacgaatggctagtcggggatccttgtatcttgctatttccatggtgctatggatggcaaaggacgacctcacctatttatcttt

SEQ ID NO: 23206 - DNA, 456 bp, Gossypium hirsutum
  Clone ID: GOSHI-09MAY01-C14048_1
ctcgaatttgacgcgattttcttttcagaaaaggaaaatccttttttcgcatgccataaatatgcagcgcgattcaaattttaatgcttcgagaaaacagaggaaaaaagagaatattacgcgctttttagttcgctgttgactgaaaaactccgctcattacttcgatccgatcattattctcagacgaagttcaaattttctgacggctgctttgcaggataatgatgttttctccaattagcacagctttggatttgtgaaggttttttttatgaggaacaccgatttgtagaaatgtctgaagcggagtgccctttgttaaaccaaatgaggatgccagagattcagttgggtgctcatactgtaaggtctcatggggttaaagttgcaaggactcacatgcatgactggatcattcttttgcttctcaatgtgatagaggtcattttaaat

SEQ ID NO: 23207 - DNA, 256 bp, Gossypium hirsutum
  Clone ID: uC-gsronu33B087a08b1
tcgttttagaaaaggaaaatcctttttccggatgccataaatattcaacgcgattcagattttaaagcttcgagaaaacagaggaacaacaacaacaaaagagaatataacgcgctttttagttcgctgttgactgaaaaactccgttcatttcttcgatccgatcgttattctcagacgaaggtcaaattttccgacgtgaggatgccagagattcagttgggtgctcatactgtaaggtcctatgggggttaaa

SEQ ID NO: 23208 - DNA, 458 bp, Gossypium hirsutum
  Clone ID: GOSHI-09MAY01-C14018_2
gcagaatacttaccaacaatatctggccgcaaaggaactgaagaagcagtcttggagataccacagaaaatacaacacatggtttcagcggcatgaggaaccaaaaatcgccactgatgaatttgaacagggaacctatgtatactttgattttcacatagcaaatgatgaccaccaacatggatggtgtcagagaattaagacggagttcacatttgagtataactatcttgaagatgaacttatttgctgaaacgtaatgtaagttgtgtcacccccggaaatttcattgcaacttttttgaaaagcctcatgatgaagatgagatgagatgtcaagctttgattagacggttcatcttccaattatgccttttttgttggatattagttctgttgaaattcattacgaccaaagatattgggaacattggtagcagtctttgttaatctattggc

SEQ ID NO: 23209 - DNA, 782 bp, Gossypium hirsutum
  Clone ID: GOSHI-09MAY01-C14018_1
cgtgggtagtggtcttggggggattggccggagaatgattccgatcttggtgccattggtgacagcctcagtgggtgaacaaattctggaggaatgcatgatcaattatacaatatgcagatgcttgaggctgcatattacaaaattccccaaccgaaagactcagaacgggggggggggtacactccaaagcaccctgcggcaacacctgctagttaccctcaagttcaggcacccatagtgaataatcctgccttctgggaacgcataagcatggatggatatggcactggcactgatacactgtttgttgcattttattatcaacagaacacttatcaacaatatctagctgcaaaggagctgaagaagcaatcttggagataccatagaaaatacaacacatggtttcagcggcatgaggaaccaaaaattgctactgatgaatttgaacagggaacctatgtatactttgattttcacgtggcaaatgatgaccaccaacatggatggtgtcagagaatcaagactgagttcatctttgagtataactatctggaagatgaacttatagtataggaggcttataggtgcgtaaggctatacaactctaatctgctgtgttttgctttgtatatataaatactgtttatcatccattgaatttcattggaactagcgtcagtctgagggcacatgtgaaattcaaagatcaaagatgatatttaaacctctgatttagaattattattttatgatgtctattcctgactttcattatt

SEQ ID NO: 23210 - DNA, 380 bp, Gossypium hirsutum
  Clone ID: LIB3829-018-Q6_N6-B6
agacatcataaaataataattctaaatcagaggtttaaatatctttgatctttgaatttcacatgtgccctcagactgacgctagttccaatgaaattcaatggatgataaacagtatttatatatacaaagcaaaacacagcagattagagttgtatagccttacgcacctataagcctcctatactataagttcatcttccagatagttatactcaaagatgaactcagtcttgattctctgacaccatccatgttggtggccataatttgccacgcgaaaatcaagactatataggttccctgcccaaacctatgacaccctatgagcggtcccttgagctcttactaccactagtgaactttctcggggaccaaca

SEQ ID NO: 23211 - DNA, 811 bp, Gossypium hirsutum
  Clone ID: GOSHI-09MAY01-C14008_1
ccccgcgtccgcccagcgtccgcccagcgtccgggaaaaataaaattcaatgaggatttggttcatcctacacgcacacgtcacgggcatcctgcttttttatgttatcgggacttgtatgtaattattgagagtgaagatattatacataaggtggctattccaccaaaaagttttcttttagttcaaaacgatcaatatgtagaatcagaacaagtgattgctgagattcgcgcgggaacatacactttaaatttgaaagagagggttcgaaaacatatttattctgactcagagggggaaatgcactggagtaccgatgtgtaccattcgcccgaatttacatatagtaatgtccatctcttaccaaaaacaagccatttgtggatattatcagggggttcgtacaaattcagtgtagttcctttttcgctccacaaggatcaagatcaaataagcattcattatctttctgccgaacgaagatatatttctagattctcagtgaataatgatcaagtgagacacaacttatttagttcggatttttcggataaaaaagaagagaggatttacgattattcagaattgaatcgaataataggtactgggcattgtgatttcatatattctgctattctccacgagaatgctgatttattggcaaagagacgaagaaatagatttattattccatttcaattgattcaagaccaagagaaagaactaatgctacattcccattccggtatctcgatggaaatacccataaatggtattttccgtagaaaaagtattctttgcttttttt

SEQ ID NO: 23212 - DNA, 889 bp, Gossypium hirsutum
  Clone ID: GOSHI-09MAY01-C14028_1
gctaaaagtagtgttcttagttgcgtaaccttcttctctaggaatattttaccattcctgtactttttttttttatctttataggaactactcttttttctttatgggtgggtaggatttcaaaagggttgtaacattagttgttgatgcgttgatggaacaaggatcaatcaatggaggctactaatccgaatccgagttcaatgagcggcgtcgctgctgcttccgccgccgagcttctatgctgtgcgaacgcgagagcactgttggattccgtcgacgcatttctattcgattgcgatggtgttatttggaaaggcgacaagctgatcgatggagtcccacagacgttagatatgcttcgatccaaggggaagaaactggtattcgtgaccaacaactctaccaagtccagaatccaatatgctaacaagtttcagtctcttggactttctgtcaatcaggatgagatattttcgtcttcttttgctgctgctatgtacttgaaggtcaaccagtttcctcctcacaagaaggtttatgtcatatgcggggaaggcatatgacaagagttgcaacttgctggatttacagctcttggtggcccaaagatgcaaaaaaagggctcaatggaaatcaaatggctctttgagcatggataaaagtttggacaagtggtggtggataaatcagatattactattccaaactcagtattgcgacctttgattcgtgaaaacccgttgcttttaatggttcaacgctataatttgacccttacgacttcagaatgcctgtcggaacatggtgtgccgtgggtaaggacagacccctgtatggaacttaaccttgaggctttatgggaataattactctctaagggctgggg

SEQ ID NO: 23213 - DNA, 1202 bp, Gossypium hirsutum
  Clone ID: GOSHI-09MAY01-C14388_1
gacatctacttcagagcaatgggatttgtccaatccttttatacaaatgcctgggaatttgatggaaggtgggggttctaaaaagtaccacgttgctctcacggcaacggatgctccgtatagccaatggcagtgtcgaattatgtattattggtataagaaggtaaaagagatgcctggatcagatatgggaaaattcactcgaattttgcattcagggaagcccgacaatttgatggaggagattccaacttttgttgttgatcctcttccacagggtttagatcggggttacattgtcttaaatagaccatgggcttttgtgcaatggctggaaaaagcaatgattgacgaagaatacattctaatggctgaacctgaccatgtatttgtaaatcctttgcctaacttggctcgtggaaaacatccagcagggtttcctttcttttacattaagccgtctgaccacgagcatgttattaggaagtattatcctgaggagaagggtcctgtgaaaaatatcgatccaattggcaattctccagtgattattagaacgtctgtgctggagaaaattgcacctacatggatgaatatttctttgaggatgaaagatgacccagtgactgacaaagcatttggatgggtgctagaaatgtatgcatatgctgtggcatctgcactgcatgacgtgcaccacatacttcataaagacttcatgctccagccaccatgggatacggaagtagggaagaagtttataatccattatacttacggatgtgactacaatttgaagggagaattaacgtatggaaagattggagaatggcgtttcgataagagatcgtaccttagtgggcctcctccaaggaacctctctttgccccctccaggtgttcctgaaagtgtggtgagacttgtgaagatggtgaacgaagctacagaggatattcccaattgggatacactaaatcgtggctgagatctgatcttactaatctgcgcatccattttgacgctggtatcaatctgctttccaactagagttatggacatgaattacagaggtagctgagacagcagtatacatagagaaaagggtatgtttacaagttaaaggagggatatatcatttttttacacttatatttataatcatgaaatgccttcttttgtgttaagtatgatgtcgatttatc

SEQ ID NO: 23214 - DNA, 575 bp, Gossypium hirsutum
  Clone ID: GOSHI-09MAY01-C14348_1
cggacgcgtgggctagcacgaagaagaattggccaaaacttccattggggatcagacttctcattgctgctcattctatgtctgtggatgcttttagccgctacgatggcaacgcagtaaatcgacgtctcatgaatcttttcgaccctaaagcctctccatcaagaaaacctgataatggcgttgtgtcttccgacgtcgtggttgacaccacccgcaaactttggttccgcctatacagcaacactaccaccgctggcaaaatgtccattcccattatagtctacttccatggtggaggctttgcgtatatggcggccaattcaatgaactacgatgacttatgcaagcgacttgcgcgtgaaattcctgctgtagttgtttccgtcaactaccgtctgtcgcctgagcaccgatatccgtcacagtacgaagatggttttgacgttttaaaattcattgataaccctgattttgaaggcttttctgcttttggtaataccgataccagtagcaagaaggctttttttaattgccggagacagtgcaggtggcaacctggcgcatcatgtggc

SEQ ID NO: 23215 - DNA, 585 bp, Gossypium hirsutum
  Clone ID: GOSHI-09MAY01-C14368_1
gcctgctgtctctaatgatttgactgctgcaaaggtggatgttaaggtaactcctggcatggaagctgcaaaaagatatatatcttctttgagtacctcagcaagcacagctcaactggcaaatcatggtttggttgttataccgtttctcagtgcatttgtcagcttgaaggtgcttaatctatctggaaatgcaatagcaaggattactgctggtgctcttcctcgaggacttcacatgttgaatctgtcaaggaataatatatccaccattgagggtttacgtgagcttactcgacttcgtgtgctgaatctgagctacaatcggatatttagaattggtcatggtttggcttcttgttcctctcttaaagagttatacttggctggaaacaagataagtgagggtgagggtctccatcctctctttaaattgactgttttgcatctgcgtttcaacaaaatctctactgccaaatgtcttggccaacttgcagcaaactataattccttgcaagccattggcttggaaggtaaccctgcacagaagaatgttggagatgaaaatctgaagaagcatttgca

SEQ ID NO: 23216 - DNA, 432 bp, Gossypium hirsutum
  Clone ID: GOSHI-09MAY01-C14328_3
cccaatgctgcctctgatgttcctagcatgaagtgcatagctgatcgcgttgatgggggggatcttctaaatgggaacaagatgtggtgcactaatggccccgttgctcaaacattggctgcttatgcaaagacagatgtcacagctggctcataaggaattacagcatttattgttgagaagggaatacctggatataccactgctcacaaattggacaaacttgcgatgcgaggaagtgatacatgcgagcttgtctttgagaattgcttcattccacaagaaaatgttcttggcaaagaaggaaaaggagtctatgtattgacgtcaggactagatttggagagacttgttttgtccgctgggcccattggtataatgcaggcatgtcttgatgttgttcttccttacatacgagagaggtcacagttt

SEQ ID NO: 23217 - DNA, 962 bp, Gossypium hirsutum
  Clone ID: GOSHI-09MAY01-C14328_2
tctttcacgcgtccgcttcatcttcatctccatctatttcttcttaattgtttctctgtatataattttttagattttcaattataatcggaaaaaaaaaaccaaaaaatcaaataaaaatgcggaggataattgctgcaagttctttttgcagcaaaattttgagaaaagaaagacagcgggcttttttctcttcaacttccttactctttgatgaaactcaattacagttcaaagaaagtgttaggcaatttgcagaagaaaatatagcgcctcatgcttccaaaatcgaccaatctaattctttccccaaggaggttaatttatggaagctcatgggggattttaatcttcatgggataactgccccagaggaatatggaggacttggtcttggttacttgtatcactgcatagcaatggaagaaataagccgtgcttcggggtcggttggtctttcctatggtgctcattctaatctgtgcatcaatcagctggtgacgaatcgaaaccccagcccactatgagagatgcttaccacagctcatccgtgcagagcatgtatgagcccttgctatgagtgaacccgatgctggctctgatgttgttaccatgtaccgcaaagctgatcgtattgaagctggatcccttatcgattgctactcgatgtagcccactaatggacgcatcgctgacactttgctgtttatctattgtcaaatttaaatagtgtttccgatggatctacaatttattgttataaagtgaatcttggatcacctatgcttaaagttggataacttggattcatgaattaacttgtgtctattcttttaattgcatctttctaaaaaatttattgcaatagtaatagtgttattctagtgctagttttaattgataacttctggatgtgacactttattatagttattatttttattaatttaaatttattcccg

SEQ ID NO: 23218 - DNA, 862 bp, Gossypium hirsutum
  Clone ID: GOSHI-09MAY01-C14328_1
gcctgcacggaccgggacggactggccggaccgacccacgcgtatcatatgatggctgaacgttctttttgcagcaaaattttgagaaaagaaaggcaacgggcttttttctcttcaacttccttactatttgatgaaactcaattacagttcaaagaaagtgttaggcaatttgcacaagaaaatattgcgcctcatgcttccaaaatcgaccaatctaattctttccccaaggaggttaatttatggaagctcatgggggattttaatcttcatgggataactgccccagaggaatatggaggacttggtcttggttacttgtatcactgcatagcaatggaagaaataagccgtgcttcggggtcggttggtctttcctatggtgctcattctaatctgtgcatcaatcagttggtgaggaatggaaaccctgcccagaaagagaaatacttaccaaagctcatcagtggagagcatgtaggagcccttgctatgagtgaacccaatgctggctctgatgttgttagcatgaagtgcaaagctgatcgggttgatgggggttatcttctaaatgggaacaagatgtggtgcactaatggtcccgttgctcaaacattggttgtttatgcaaagacagatgtctcagctggctcaaaaggaatcacagcatttattgttgagaagggaatacctggatacaccactgctcagaaattggacaatacttggcatgctaggatagtattcatgtgtgcttgttctttgagaattgtttttatatcattatgttatcttgatttttcttatattgcttatgtttgttctcttttgttatttttactatttcttttgtttatgt

SEQ ID NO: 23219 - DNA, 807 bp, Gossypium hirsutum
  Clone ID: GOSHI-09MAY01-C114270_1
atatatacccaccaggttctttcggatgctgttcaacaagttggtcagggacttccataactaccctgcggtttggggactggttcaaactatattgagttacggcttcggtggagatagctcaaattgggttggggtgctggggttacctcattataacatgaatgacatgccaggcctgtcatttcgtgtgattcaccaccttgcacaaataaagagaacgaagaaatttagaatgtatgatttcgggagtaaagcagtcaatatggaggtgtatggatcaccagaaccgatagacttgggggaatattattcacttattgatattccggtcgatttatggctgggaagaaggaccaaataatcacttcatcgatggttaagaagcactatagattgatgaaggattcaggtgtagacgtatcatacaatgaattcgagtatggacacttagacttcacatttgcccaccacgaagaactcttagcattcgtgatgtcgcggctgctgctcgtggagcctgatctgaagcgccagtctagtccgaaggaggctctaaagttgaaaaaaacagggcaagctaggtctggagtctcctccgattgatccatcatcgatcaagtacgtacaaaaaccatgcatttccatgtgttttagcttttggatttggcatgcatttccatgtgttttagcttttggatttggcatgtatcttgttgtattgaatgttttggatgcttggtagatgcttttttggtgtacgtgagtgaatagttggatcatcaaagacatcttttacatcattgg

SEQ ID NO: 23220 - DNA, 706 bp, Gossypium hirsutum
  Clone ID: GOSHI-09MAY01-C14278_1
cccacgcgtccggatcaatttgactaggaacggatcacagagactgagagtgaagacacccacccaatcaaccttgtgaaaatggcgacaccccaattcctatcatccttccggtactccgacagtctaacagtcgtagctatctccttttgcactgccattgtctgcgaagccatctcatggctcttaatctaccgcaccaactcttacaaatccctcaaatcctctatcgacaaagccgccaagaaactcgaaatcatgaaaaccgaccaaaaccctagcaagttatccaccaaaaaatccaaaaccaagaagatcgaccgtgtcgaaaccagcctcaaagaatccagccgtgacctttccttattcaagttcaaatctggggctgtcgtcgccctcgttttgatcgtcgtttttggcttcttgaattctcttttcgaaggcaaagttgtcgccaaattgccctttaagcccatcgggatcgtgatgaagatgagtcatagaggattaaaaggggacgattctaccgattgctccatggtctttctctacttcttgtgttccatcagtataaggactaatttgcagaagtttttggggttttcgccgccgcgaggtgctgctggcgctgggttgttcccaatgcctgatcccaaaactaattgagtcttcttttcagggattaaggatctgggtatgtgtttca

SEQ ID NO: 23221 - DNA, 1021 bp, Gossypium hirsutum
  Clone ID: GOSHI-09MAY01-C15988_1
agatgtcagtgatatcgtgcttttggatgtgtccccgttgtcacttggtctcgaaactcctgggtggtgtcatgaccaaaatcatcccaagaaacaccacacttcccacctccaaatcggaggtcttttcaacagctgctgatggccagacaagtgttgagatcaatgtactccaaggtgaaagagaatttgttcgggacaacaaatctcttggcagcttccgactcgatggtattccaccagcaccacgtggtgttccccagattgaagttaaatttgacattgatgccaatggcatcctttctgtaactgctgtcgataaaggaaccgggaagaagcaggacatcactattactggtgccagtactttgccaaatgacgaggttgatagaatggtaaaggaagctgagaagttttcaaaggaggataaggagagaagggatgccattgacacaaagaaccaagctgattccgttgtctaccagaccgagaagcagctgaaagagcttggagacaaggttcctggtccagtcaaagagaaagttgaggcaaagttacaagaactcaaggatgcaattgcaggggactcaacacaagggatgaaggatgccatggctgcactcaaccaagaagttatgcaactaggccagtcactttacaaccaacctggtgccggaggcagcagtgcaggacctgcacctggtggtgaaaccgggccttcagattcatcaaacaagggtcctgaaggggatgtaattgatgcagatttcactgacagcaagtgaaaaagctcggttttgaatcattctgggtattggtgtgagaggtgggggattgcattacctgtcatttttgatccatggtggtgaaagaaaacaaatggatttaggatttaatagagtatgaagcagcatatatatatatatagaatgtccaaatagtgattaatatagggtgttaagcccttcacttgaacattgttttgaattgttcaatatgcatgccatttcttgagtttgac

SEQ ID NO: 23222 - DNA, 271 bp, Gossypium hirsutum
  Clone ID: GOSHI-09MAY01-C15918_12
aaaaaagattaaagaaccacaaaggactcctcgcgtctatcttcaatccgagacttggattccgagttccggcattccctatagtcccgacatggtccttggagtctaaacagcttattatcaatccccccccccttagtatgcttattatcatatcattgttctaattatgtcatttttactaattagtaaacagtttttttaatcttttatctatctatgtatatatgttgaatttattggtttccgaagttgttgtttccattcactt

SEQ ID NO: 23223 - DNA, 686 bp, Gossypium hirsutum
  Clone ID: GOSHI-09MAY01-C15918_9
gcggcaagcattttccagaactgtatgcctcttttgagggaacccgggcccagaccaaaccggcttggttcctgcacagggaaggattgatcttggaccaaactcaccatttgtccttcaaaactgcaccatctcggccgcccctgattacatccaagtgaaggatacaaacaaggcatacttggggcgtccttggaaacaattcgctaggtccatcataatccaatctaggatcgacgacatcattcaaccagagggttatgcccccatgacaggcaccatagaatagacacttctttcattgccgagtttggaaacagggacccggtgccgataccagccgtagggtagcatggaaaggtatcaaaaagatagatataaatgaacccaacaaatggactcctcgcgtctttctggaatctgagactgggatgccgagttccggcattccctatagtcccgacatggtccctggagtctagacagcttattatcgataccaacgccattagtatgcttattatcatatcattgttctaattatgtcgttttttactaattaattaaacagattttttaatcttttatctatctatgtatatatgttaaattctttggttccccaattgttgtttccattcatttgttaatgatgcttgcaaaagccaaaaattaagttaacgttt

SEQ ID NO: 23224 - DNA, 510 bp, Gossypium hirsutum
  Clone ID: GOSHI-09MAY01-C15918_7
cggacgcgtgggcggacgcgtgggcggacgcgtgggcggacccgtgcgcaagaggaaactacttcgggaaaattcaatggatttgacacctaacgtcgcggtcgctaaggatggtagtgggaaatatgattgcatcacagaggccttagctgaagccccgttgaatagctgcgatcgatttgttattcacattaaggctggtacttataaggaaaaaatcctcgtgaccaaggagatgactaatgttatgtcccttggtgatggcccaactgagaccatcatcaccaactgcgttaactgctgtaaggataatgttaaaacattcaacactgcaactgttggtgtggatggggctggtttcatggctaagggcattgggctcgataacccagcaggacccgaaggtcatcaagcagtggcttttagggcatcctgtgatatggtcgacatgtttaattgtcatttcactgggtaccaagacaccctttacgctcacaaagagaaacaatt

SEQ ID NO: 23225 - DNA, 1017 bp, Gossypium hirsutum
  Clone ID: GOSHI-09MAY01-C15918_6
gcccccacagtcttcaaactaagttcctttctttctttttttgactttctttcaaggaaagaaagggagaaagattttatgctttttttattataaaataaataaaaaaaacaatggcgaacaacgttgctgttattggtatttgttcggtgttcttggtagcagtggtggtggcagtagtggtgggtgtgacacagacacaaacaaaagaggagagtgattcaaagagcaatagcatatcgagttcaaataaagcggtgcaggcggtttgtcaacccacacatttcaaagatgcttgcgagaagagccttgcgtcatctaattccaccgacactaaggagttgataaggccgagttcccaggcagcgatcgtaggaagttaggaaagtgttggcgaatccaacgacgattcaagacttaattaaagatgactacaacggagaggcgcttaaggtttgtcaagaagtgttggatttatcgattgatgacttgcaattgtcgtttgataagatgggggaatacgatgtgagtaagatcgatgattacttactgaacctgacagtgtggttaaccggtgccttaactacccaacaaacatgtgtagacacattcgcgggggtaagtaatgaacaagcgagaaaagatgcaatattagtgctagagagactttgcatggcatgcttacacgctctatagctttataccatgagtcactgaagttatccaccgtgctgaaagaccttaacattccatgcctcgcaggcatcaacacgactgggtttgaacgtaagctcttgtctaatgatggacctgagtggatgggccatgctgagaggaaactacttcaggcaccaattattaagcctgatgttgtggttgctaaggatggtagtgggaaatatgacaccatcaccaaggccttggaagaagtccctaagataagtcccaatcgatttgttattcacattaatgctggtatttacaaggaatatatcaatgtgaccaagcaaatgacta

SEQ ID NO: 23226 - DNA, 882 bp, Gossypium hirsutum
  Clone ID: GOSHI-09MAY01-C15918_5
gtgataaacaataagaagccccacaacttcaaataaggttttcttctttcttgctttcttttcttttcttcagggggaaagaaagagagaagaagatcctttttttgaaacaataaaagttgtttaaaaatggcgaataatgctattattggtatttgtgcggtgttcttggtggccttggtggtagccgtggtggtgggccctcccctccgaaaaactaagagcgatggtgaagagatatcgagttcgaacaaagctgtgcaagccctatgtcaacccacgaattataaagagacgtgccagaaaagcttggcgtcgtcaaattctagcgacgttaaggagctgataaggacaggtttccaagccgggctagtcgagataaagaacgtgttggcccgttcagtgactgtccaagagttgatcaaggatgagaacaacaaagcggcacttggtgtttgccaagaggtgttggacttagccattgatgactttcaaaagtcattcgacatgctaggggaatacgacatgagcaagatcggaaaataccttttggaactgaagacctggctaagcggtgcattcacgagtcaacagacatgtatagactcattcgcgcaatcaagtaacgaatcatcgcagaagatgcaatcaatcttgaaaactagcatggagattactagcaatgctttagcgatgcttaatgggttatccaccatcgtgaaggaacttaacattccaaacgtcggcaacatcgacaccacgggggtcaatcgtaagcttttgtcggctgaggatatgcctgagtggattagtcaagctgaccggaaactccttcaagcaaagccaatggatttgaagcctaacgttgtggtttctaaagat

SEQ ID NO: 23227 - DNA, 895 bp, Gossypium hirsutum
  Clone ID: GOSHI-09MAY01-C15918_4
ccgaatcggaggttcgacccacgcgtacgcccacgcgtccgcacagcaggacccgaaggtcatcaagcagtggcctttagggcaactagtaataaagtcatcatgttcaattgccatttcaatgggtaccaagacaccctttaccctcacaaagggcaacaattttatagggattgtgtcatcagtgggacggtggacttcatctttggggattcggcgagcgtgttccagaattgtttgatcatcgtgaggaagccaggtgagaaccaacacaacatgattacagcacctggaaggcaatacatagacactgactcagcccttgtacttcaaaactgtaccatcacgggtgcccctgattaccttccggtgaaggacaagagtaagacgtaccttggtcgtccctggaaacccttggcgagagccatcataatgcaatctacaatcgaagacatcattacaccagagggttatgcccccatggacggcaccaaaggattggacactgcctactttgctgagtttgaaaacaagggacctggtgccaaaactgaaggtagggtcacatggccagctatcaagaaaattgatacaaatgaagccaagaaatggacccctggcgtctttcttggatctgaccaatgggttccacaagccggcattccttattatactgacatggtccctgtagtgtaaactttcaaaaccatcgccattagtcttttattattattattattattattattattattattattattattattattattatatatccttctcccgttccggagtataaaaggaaaaattcatcattattatggaagttgcaatctgtaattattttcttattatagaattaaaagtaataatatgttattagagatac

SEQ ID NO: 23228 - DNA, 701 bp, Gossypium hirsutum
  Clone ID: GOSHI-09MAY01-C15918_3
cacagccattgtgcttcaaaattgtaccatctcgggcgcccctgctacctcccggtgaagacagataagacatgcggcggagtgtatttccaaaactgtcagatcgtcgtgaggggaagccaggtgaaaaccaacacaacatggttacagcacacggaaagaaagaagaagaaactaacacagccattgtgcttcaaaattgtaccatctcgggcgcccctgactacctcccggtgaaggacaagaacaagacgtaccttggtcgtccctggaaacaatttgcgacaactatcataatgcaatgtcaaatcgatgacatcattacaccagagggttactcccccatggaaggcaccgtaggactggacactggttactttgccgagttccaaaataggggacccggtgccaacaccgagggcagggtcacatggaaagctatcaagaaaatcgatatggatgaagccatgaaatggactcctcgcgtatttttgcaatccgacgaatggctggcacaaactggcgttccctttgatcccgatatgacccctggagtttaaacttccaaaaccatcgccattagtcttcttttattatcattatttgaaataatgttgtcgattattgattaatctgaacaactttgtcctatttttataataataataatactatattcaactcttattgaaggcactctt

SEQ ID NO: 23229 - DNA, 1966 bp, Gossypium hirsutum
  Clone ID: GOSHI-09MAY01-C15918_2
tatttgctcccagcagccccacacttcaaaagttttttttctttcttttcctatctctatttgaaatctgtttcaagggaagaagaaggaaaattttatgattttttgagggtttgctaagaataaatagaaaacaatggcgaacaatgttgctgttattggtatctgttcggtgttcttggtggcagcagtggtggcagcagtggtgggtgtcacgcatttaaaaaacaacggtgattcgaaaagcggtgaaatatcgagttcgacgaaagcggtgcaaacggtttgtcaacccacacagttcaaagaggcatgcgagaagagcctggagtcatctaattccaccgaccctaaggagctgataaggacgagtttccaagcagcgatagaggaaataaggaaagtgttggcgaattcagcgacgatacaagacttgaataaagatgacaacaacaaagcagcccttaaggtttgtaaagaagtgttggatttatcaattgctgacctgcaactttcatttgataagctggggggatacgagatgagtaagatcggtgattacttactgaacctgagggtgtggttaagcggtgccttaactaccttacaaacatgtgtagactcatacgcggaggtaaataatgaacaagcggagaagatgaattcaattttgaagacttcaatggagcttacccaaaattctttaaccatggtgactaagttatccaccatcttgaatgaccttaacattccaggcctcaatatcgacacaactgggtttgaacgtaagctcctgtctaacgatggacctgagtggatgggccacgctgagaggagactacttcaagcaaaaccaacagatttgaagcctaacgttgtggttgctaaggatggtagtgggaaatatgataccatcaccaaggccttggctgaagtccctctgaaaagtcccaatcgatttgttattcacattaaggctggtacttacaaggaaaaaatccttgtgaccaaggagatgactaatgttatgttcatcggtgatggcccaactaagaccatcatcaccaatgaccttaactgcattaaggatcatccgcttaaaacattcgacactgcaactgttggtgtggatggggctggtttcatggccaagggcattggattcgagaactcagcaggacccgatggtcatcaagcagtggcttttagggcatcctgtgataaggtcgtcatgttcaattgtcatttcactgggtaccaagacaccctttacgctcacaaagagaaacaattttatagggattgtctcatcagcgggacagtggacttcatcttcggggatgcggcgagtgtgttccaaaattgtcagatcatcgcgaggaagccaggtgaaaaccagaacaacatgattacagcccacggaaggaaattcccatacactcactcagccattgtgcttcaaaattgtaccatctcgggtgcccctgactacctcccggtgaaggacaagagcaagacgtatcttggtcgtccttggaaagctttggcgaggaccatcataatgcaaagcaatattgatgacatcattacaccagagggttactcccccatggaaggaaccgtaggactagacaccggttactttgtagagttccaaaataggggaccaggggctaaaaccgaaggcagggtcaaatggccagctatcaagacaatcgatataaatgaagccaagaaatggactcctggcgtctttcttgaaactgaaactgacaaatggatttcgcaaaccggcactccttgttatcctgacatggtccctggagtgtaaacttccaaaaccatcgccattagtattcttttattatcattattagtaatcatgttgtcaattattgattaagttaaacaattttttcctatgttttatttatattaataagatattctttattatggaaggtgc

SEQ ID NO: 23230 - DNA, 2919 bp, Gossypium hirsutum
  Clone ID: GOSHI-09MAY01-C15918_1
tgcaattgctaaagaagttgaagctgagctggtttcgagggacataggctgccatctggttgaagtgctggaagcagtcaatttagttctttttgagtcaagaggcttgacaagatcccccgttcttgtagattctaagcattcgtacttacactcagtactgagctccagatgtggcagtgcaattttgcttagcataatttacattgaagtttgtcggcggcttggtctaaccattgtcggaccccggggtggggaagattttttgatatggccccagacagggtacccagaggaacgtcttcaaagtgacttcacgacacagcttgtttgctattgtcaatggaaggtgtgtggaggaccctagatcaatggcatcagattttactggtacttcactgttagggcttgagatagctacaaaccgggatattattgggattgcattagccaatttgattaggcttcactggaaacgtgcttcaagatcaaatcatggattgatgctgacttctccccttaggcatgttaatgatgccagtgagaaacccaacatgatggataaatccaatgtccctctgctgcgcccgcaagatcttaggctagctatcatggcttcagaaagattgttgattctgcagccacataattgggcgctgaggagggaccatggcatgatgctgtattataatagggaatatggaaaggcagtgcaagagctgagcatttgcatggcctttgcgccggaagaagaggcagagattcttgaaccatttgttgagaaattgcatttgatgcggctggagtcatcatggaagtctttgggacacacaggtcgactcactgtgccttgaattttgtacataaccttctgtccatctgaaatcctccttgtattaagggatgagttctgcgatgcggcacttggtgtttgccaagaggtgttggacttagccattgatgactttcaaaagtcattcgacatgctaggggaatacgacatgagcaagataggaaaataccttttagaactaaagacctggctaagcggtgcattcacgagtcaacaaacatgtatagactcattcgcgcaatcaagcaacgaatcatcgcagaagatgcaatcaatcttgaagactagcatggagattactagcaatgctttagcgatgcttaatgggttatccaccatcgtgaaggaacttaacattccaaacgtcggcaacatcgacaccacgggggtcaatcgtaagcttttgtcggctgaggatatgcctgagtggattagtcaagctgaccggaaactccttcaagcaaaaccaatggatttgaagcctaacgttgtggttgctaaagatggtagcgggaaatatgatactattaacaaggcattggctgaagtccccgtgaaaagtcccgatcgatttgttattcacattaaggctggtacttacaaggaaaaaatcaacgtgaccaagcagatgactaatgttgtattcatcggtgatggcccaaccaagaccatcatcacaaatgacattagtgtcgctaagaatccaccggttagaacataccgcactgcaactgttggtgtggatggggctggtttcatggctaaggacattggattcgataactcagcaggacccgaaggtcatcaagcagtggcctttagggccactgctgatagggtcatcatgttcaactgccatttcactgggtaccaagacactctttacgctcacagagagagacaattatataccaactgtctcattaccggaacggtggatttcatcttcggggatgcggcgagcattttccagaactgtatgctcatcgtgaggaagccagggcctggccaaaattgcatggttactgcacagggaaggaatgatcttggaacaaactcagccattgtgcttcaaaactgcaccatctcgggcgcccctgattacatcccagtgaaggatacgaacaaggcatacttggggcgtccctggaaacaattcgctaggtctatcataatgcaatctcagatcgacgacatcattcaaccagagggttatgcccccatgacaggcaccataggaatagacacttctttcattgccgagtttggaaacaggggacccggtgccgataccagccgtagggtagcatggaaaggtatcaaaaagatagatataaatgaagccaacaaatggactcctcgcgtctatctcgaatctgagacttggattccgagttccggcgttccctatagtcccgacatggtccctggagtctaaacagcttattatcgataccaacgccattagtatgcttattatcatatcattgttctaattatgtcgttttttactaattaattaaacagtttttttaatcttttatctatctatgtatatgtgtgcaatctgcggctccccaagggcaactcttgcaaaaaaaggatatgaaacgcccccgcgtccggctcatgaattctggaggtcagattcaccgtcttgctaaatcagtttacaaggttgaggctgaagctgtagatttgatggacggactgcgagaaatccctggaagggaggcattgaaactacgagcagaggttgcttcaatggcatcacttttgaggcagcaaagggtttcacttgacagaaggataaggaaaatatctgagttggggatacctgtctgatacactgtgtgtggacctctcttgttatatttgatattatttgataaggatttttgaactgatgctgcattttctagaatcccatgttactcatagagattaaacttaattcggccgaaataatctatctagtacaattgaactgtgagtcactaaatcattttgctatgtatgatttttagatcaaggaatgggaaagaattctttcttctttttggtgc

SEQ ID NO: 23231 - DNA, 615 bp, Gossypium hirsutum
  unsure (1)..(615): unsure at all n locations
  Clone ID: LIB3828-012-Q1-N6-C7
gtatctctaataacatattattacttttaattctataataatgaaaaaattacangattgcaacacttccatgatataatcgcatgcaatttctttcccttttcattctccaaatcgcaaaaaggatatataataataataataataataataatactaatgataataataatcatatataataaaacactaatggccatggtttagaaagcccacactacagggaccatgtcagcctaataaggaatgccggctcgtggaacccattggtcaaatccaagaaagaccccaggggtccatctcttggcttcatttgactcaattatcttgatagctggccatgtgaccctaccttcagatttggcaccaggacccttgccctcaaactcagcaaagtaggcagtgaccaatcctttggtgccgtccatgggggcataaccctctggtgtaatgatgtcttcgattgtcgatcgccttatgatggctctcgccaagggtttccaaggacgaccaaggtacgtcttactcttgtccttcaccggaaggtaatcaagggcacccgtgatggtacagttttgaagtacaagggctgactcagcgtctatatatagcctt

SEQ ID NO: 23232 - DNA, 489 bp, Gossypium hirsutum
  Clone ID: LIB3828-007-Q1-N6-A11
gttcaataagagttgaatatattattattattattattattattattacaaaaataggaaaaggttgttcggattaattaataatcgacaacattatttcaaataataatgataataaaagaagattaatggcgatggttttggaagtttaaactccaggggtcatgtcaggatcaaagggaacgccaatttgtgccagccattcgtcggaattcaaaaagacacgaggagtccatttcatggcttcatccatatcgattttcttgatagctttccatgtgaccctgccctcggtgttggcaccgggtcccctattttggaactcggcaaagtaaccagtgtccaggcctacggtgccttccatgggggagtaaccctctggtgtaatgatgtcatcaatttgacattgcattatgacagttgtagcaaactgtttccagggacgaccaaggtacgtcttgttcttgtccttcactgggaggtagtcag

SEQ ID NO: 23233 - DNA, 342 bp, Gossypium hirsutum
  Clone ID: LIB3145-030-Q1-K1-H1
cccacgcgtccgcccacgcgtccggcaataagcatccccacaacttcaaaaagtttttctttctttcttttcctatctctatttgaaatctgtttcaggggaaagaagaaggaaaattttatgattttttgagggcttgttaataataaatagaaaacaatggcgaacaatgttgctgttattggtatcttttcggtgttattggtgacagcagtggtggcagcagtggtgggtgttacgcatttaaaaaataatggtgattcgaaaagcggtgaaatatcaagttcgacgaaagcggtgcaaacaacaaggagctgataagaatgagtttccaagtagcga

SEQ ID NO: 23234 - DNA, 764 bp, Gossypium hirsutum
  Clone ID: GOSHI-09MAY01-C15908_1
agcgaggcgtgcgttcgacattggcccaaaaaaagaagtccaaaacaattggagacagcgagacatggcagatccagtagtagcatcacacttgagcttagtgctcaaagctccccccactatttcttcgccttcccaatttttactgcaacaacactcaaagccaatggcttcctctctcaatagcgccgcctctttgcgtctcttcgcttcttcatcttcttcctcttcctccgccgccgctagactttctctccgttccacttccctttctttctcttcttctctcaaatccctcgctttctctactctttctcgccacaagaggggatcggctgtcagtgtgtcgagtaccggagggtttagctctgtagccagtccgaaatgcgctgcttcggatcctgatcagttgaagagtgctagagaagatatcaaggagcttctcaaatccaaattctgccatcctattctggttcgtctagggtggcacgatgctggtacctacaacaagaacattgaggaatggccacgaaggggtggtgccaatggaagtcttaggtttgaagtcgagctgaaacatgcagcaaatgctggtcttgtcaatgcattgaatcttcttcagcatatcaaggacaagtactctggtgtaacttatgcggatttgttccagttggctattgcgactgctattgaggaggctgggggacccaaaattccaatgaaatatggaagagttgatgtctctggtcctaatgagtgtcctt

SEQ ID NO: 23235 - DNA, 1719 bp, Gossypium hirsutum
  Clone ID: GOSHI-09MAY01-C15928_1
gtttccttttacatccaaataccctttgcctttgaagtttgaagctttcaaactgttggcaatgttgaatcttttttttttttttcaaaatatttgacagccaacatccatgaattattgtctttcttcatcaatttctttcctttttgtaaaggttgatcctttttattctactcaattacataaatttctaccctttccttttaaagattttattttgtcctttttgttgacctttacttatctccctttgttcatgtaaaaagggtttttttttctttttgggtgtgtttatttgttgaagtttcaaacaatacccttttctttctatatatgaattaagtctttttttggttcatttcttcttcctttctgtcgataccctttctttatagtatctcccaataaaaaaattgaagggaattgagtaggtgtttttatctctaagactttgaagcataaaaatgatgatgatgacaatggaaggaatgatggatcagggtgtattggacgatataataagaaggttgttggaaggtaaaggaagcaaacaggttcagctttctgaaggagagatccgtcagctttgtgttaatgctcgtcaaatcttcctttcacagcctaacctacttcagattcatgcccccattagaatctgtggtgatattcatggacaataccaagatctcttaagactctttgagtttggtggctatcctcctgcgacaaactacctgttccttggggactatgtacatcgaggcaagcaaagtttggagacgatttgtttgcttttggcctataagatacggtatcccgacaaagtttttctcttaaggggaaaccatgaagatgcgaagatcaatccaatttacggattttatgatgagtgtaaaacgcgattcaatgttaggctttggaaaatatttacagattgcttcaacagtttaccggtggctgcactcgttgatgagaaaatactttgtatgcacggagggttgtctccagagttggaaaatttggatcaaataaaggaaattcaaaggccaacggaggttcctgataatggtcttctctgcgatctactttggtccgatcctgatccgaagatcgagggctgggcagacagcgatagaggaatttcatctacttttggagctgatgtagttgctgaatctttggacaagagtgaccttgatctcatttgtcgaggccatcaggttgtggaggacggctacaaattctttgctaccgaagattagtaacaatattttcagctccaaactatggtggagagtttgacaatgctggtgctttattgagtgttaatgaagatcttgtgtgctcctttgagatattgaaaccagctgataataaatcgttaccaagcggttctaagcccctgaagaagcaccaccaaagatggggaaggtttgatgttccatgaatagggattgctagggatgtcattctgctcaaacccaaaacatgatgagctgaattgacaaatgttccgattacttcattgtacgagtaaacttccataagattgttgcttgcaaacgaagtcgtcggaacagtctgtagattaactacccattttctcttctgtgcagtaacacatttgtttttgcattggacacaactgccgaatcactatcagtgtgcaatctatggattgatctgccttgatttgtgttgatatacttagtatcacct

SEQ ID NO: 23236 - DNA, 445 bp, Gossypium hirsutum
  Clone ID: GOSHI-09MAY01-C15808_1
aaaacgaaaaggaaaagaaaatgggagaaaatgagaggacgatgaacaacatcgagggcatgggagttgcagagcgttcaagagctaaccacaattacagtggtgaagacgaagacgacgacaatattaccagtttctcttttccttccgtcaaatccagtcctcgcaacgcttcttccaaatacgacttcgtcaaggtgagggtctggttgggtgataacgccgatcactattatcctttatccagatttttgctcagcagaatgttaactgtcacaaagattccgaatcatgtagctattaaaatcgcttttgagcctcaagaagctgcttatagacaacagcccttttggatgtctcaccagactggatttggaagttaatctttttaagctaatggagcggcgtggttattgggaagagtttataaatgggtcaagatgat

SEQ ID NO: 23237 - DNA, 657 bp, Gossypium hirsutum
  Clone ID: GOSHI-09MAY01-C15588_1
cccacgcgtgcggatataaacgcgaaccctctgccaatctcatcgtcatttcctgactgtttgatctttttcttttgctcgatctgaatctggttaaaataacagaagaacaatggaagagctgaaatcagctgtggaggagcacatggaattaatggcggatctagttcagaagctatcctcggagcttcgttcgggcctccgacccgcctatgataactttatgggcttcttccatgcaatcgactggaaggagccatggttaatgtgcttactggcattccatgttttcttattgatagtaacaatcttctcgaggaagaatactaacttccagatgtgtttgttccttctggcattgctcggtgtttattttgcggagttactgaatggattccttggtgacaactggaagaaatttgcaaaccagaactattttgatccaagtggactttttttgtcagtactctggtctggtcctcttctcattatcgcaatcatcatcttgataaatactctcttttccatgtgttacctaatagttagatggaaaaaggccgagctccagcaccgtgcatggcttgctcgcaacagcaggatgaatatgccaagttccgctctttagcacgataggcatgcatacatattatctcatta

SEQ ID NO: 23238 - DNA, 674 bp, Gossypium hirsutum
  Clone ID: GOSHI-09MAY01-C15558_1
cttaaaccttcgtctgtaaacttccatttttgactctgaaaaaaaaaaaaaaaaactgcgtttagtctccatttctgtctttgaagcttaaattttggaccaattaggcttttttttttccttgatttgagatttgggtttcttctcctttcttcttttttggttcagcagcagcatgcggtggtggttcagtcaatcggttgatgtgtttcgaaaagttatctctttgaacttgtattgtagagtgattctgtaattccccccataatcagcaaacaaagccctttttttagccattcactctttagtcttacactattctatatatatcttccatgggatccactttcttcattgttgttccttgttatgttcgtcagattagctgattagtgaatcatcttcaaaacccatctctcaaatttgtgttccaaaagttttcattttagtttgtggaagatcctctttgtatattgaagggttggggggaaacgtagttatggtgtgccaagcagctagccaaacaagattccgggcattgaagtatgaaaatggtattgcagggagtgccaccattgtagttagagttatagcatgctttcaacctcttcaagattgccaggctgaatattttcgtcatttgcttaagcctgttacgtagattgggttcttta

SEQ ID NO: 23239 - DNA, 883 bp, Gossypium hirsutum
  Clone ID: GOSHI-09MAY01-C15548_1
cattttcaagcaatggcaatccccatgggaccggctgtccgttagttttatctgataatgctcctgcaggcatacagggagccaggcatgctcaatttgggttatctgtatccgacctccatcttaataataaactgcagtccggactttttctgcccggtttccagcggttcgatccccactctagaatttccgatggcatcatgatggcaaggcgccctaatggtactgataatctttcttgcttgttaacaattgggaattctaatgtgaatgacaaatctggcaacacaaaaagacaccagtttttactctttggtcagccgatacttactgagcaacagctctctcgtagctgttcaagtgaagttgtctcacaagttattaacggaaatagttcgttagatggaagtgccgaaaaaacaaaagatacttctgatggttctcgatcttctcttgagaagtcatctactgctggatttttgtggcaccaggattatagaagcacggaaaccggcctcgatattggccattgcaaggtattcttggactcggaggatgtcggacgaactcttgacctctcagttgttggctcttatgaagagctgtacaggagattggccaacatgtttggaatagaaagatccaagatgttgggccatgtgttgtatcgagatgcaacaggtgctgtcaaacaaactggagaagaaccattcaggtatcaattcgaaaaaccggttcatctttttcgttctttcaatctacctttgggtttatatttacacaatcttcccatgctatattgtagtgcatttatgaaaacagcaaaaagattgacaataaggatggattcaagcaatgaaactgttgcaaggtcttggct

SEQ ID NO: 23240 - DNA, 639 bp, Gossypium hirsutum
  Clone ID: GOSHI-09MAY01-C15458_1
cttcgtttaaatctttttgggagcaaataataacaaaaatggctgagttgaaatctgacaatttgcttgagatgatgaagtttcatttgggtactgatgctggtaaagagcttactaagaagattggtcttgtttaccaactcaatattgcccccaagaaattgggggttgatgaggttacttacgttgttgatctcaagaaaggagatgttatcaaaggtgaatatgaagggggaaagcctgatgttatattttcattcaaggatgatgattttcttaagattgccactgggaagatgaatccccaggttgcttttatgaggggtttaatgaagattaaggggagcttgagtttagctcagatattcacttcctgattttttcccatagcctgctttggtgggtactctgtggtttatctttattgttaactatgtattgcttcatttttttgtttttttttttattatttatttcttttttatttatttattacttatttttttattgtcttcttttttttcttgttttgtttttttttctttttttttttattttatttatttttgttatatttttatttatttatcttattttttttttttattattttttttattatattttatattctttttt

SEQ ID NO: 23241 - DNA, 1726 bp, Gossypium hirsutum
  Clone ID: GOSHI-09MAY01-C15788_1
cttggctccatgttatcttcctttttgtgagagggtattgtaaagatgcgcgtgggtttcaatgagtttggtggggggattttagtgggcttattctcttctcttgaaagaaactcaggctggagattgaggcttaattgtcatggatcctgagtttgggaagtccttggatacttcaaagaaggattcttggaggacctcattgcttttagcgtaccaaagtcttggtgtagtttatggggacctgagtacttctcctctttatgtctacaaaagtacatttgctgaagacattcaacattcagagacaaatgaagagatttttggtgttctatcctttgtcttctggacccttactttagtccccttattcaagtatgtgtttgtggttcttcgagcagatgacaacggagagggaggtacttttgcactgtattctctgatatgccgacacgcaagggttagtcttctgcccaacagacaggtcgccgatgaagcactctctacgtataaacttgagcaccatcccgagaaaaggagcagttcaagagtaaaactgtaccttgagaagcataaggtcttgcacactgctttgttaatcctggttctccttggtacttgtatggtgattggagatggagttctcactccagcaatttctgttttctctgctgtctctggccttgagttgtccatgtccaaggaacatcaccagtatgcagttattccaatcacttgcttcattttggtgtgtctttttgctcttcaacactatggcacgcatagagtcggatttttctttgctccgattgtgttaacatggctactatgcataagttcccttgggatatataatataatctactggaacccgcatgtctatcaagctcggtctccatattacatgttcaagttcttgaagaagacaaggaaaggtggatggatgtccgggggaggcatactgctctgcataacaggctcggaggcgatgtttgctgatcttggtcacttctcttatcctgcaattcagactgcttttacctttctggtttatccagctcttatattggcatacatgggccaagctgcttacttgtctcaacatcatcatacgagttaccaaatcagcttctatgtctcagttccagaaagtgtgagatggcctgtgctcataatagcaattcttgcttctgtcgtgggaagccaagcaatcattagtggaacattctccataatcaatcagagccagtcacttagttgtttccctagagtgaaggtcattcacacctctgacaagatacatggccagatttatatccctgaaatcaattgggtgctcatgatcctctgcattgctgtgactattggctttagagacacaaaacacatggggaatgcatcaggattggcagtgatgactgtgatgttggtgacgacatgtctcacatccctggttattatcctctgttggcacaaaccccctattggggctcttttctttcttcttttctttggttctattgagttgctttacttctcagcttcactcaccaagttcactgaaggggcttggctccctattctcttggcccttttccttatgacaatcatgtttgtttggcattatgcaaccatcaagaaatatgaattcgatctccacaataaggtatcactagaatggctattagcattgggtccaagcttaggaattgctcgagtaccgggt

SEQ ID NO: 23242 - DNA, 467 bp, Gossypium hirsutum
  Clone ID: LIB3145-008-Q1-K1-F10
taggtctggaaaacccggggcgagcgaggcgtccgcgcggctctgacaagatacatccccacatttatatccctgaaatcaattgggtgctcatgatcctcttcattgctgtgactattgcctttagagacacaaaacacatggggaatgcatcacgattggcagtgatgactgtgatgttggtgacgacatgtctcacatccctggttattatcctctgttggcacaaaccccctattgtggctcttttctttcttcttttctttggttctattgagttgctttacttctcagcttcactcaccaagttcactgaaggggcttggctccctattctcttggcccttttccttatgacaatcatgtttgtttggcattatgcaaccatcaagaaatatgaatttgatctccacaataaggtatcactagaatggctattagcattgggtccaagcttatgaattgct

SEQ ID NO: 23243 - DNA, 669 bp, Gossypium hirsutum
  Clone ID: GOSHI-09MAY01-C15698_1
aaacactctctcaacttctctctgagtccctgtcttctcttctctggggctcgcctcttcgattctttcctttcctttccctccactttctctccaattttcctttctctttccctctctttctcaggtccttgcaaatggcggaagcttctaaagtcattcatgttcgcaacgttggccatgaaatttctgaaaatgatttgcttcaacttttccagccatttggagtgataacaaagcttgtaatgctccgtgcaaagaatcaggctcttctccaaatgcaagatattccttcagccatcaatgcaatgcagttctacactaatgttcaaccaactatcagggggaggaatgtgtatgttcaattctcatcacatcaagaactgacaaccatggatcagaatgctcaaggacgaggtgatgagccgaatcgaatcctcctggtcacaatccatcatatgctttatcctattactgtggaggtgctacaccaggttttctcacctcatggatttgtggagaagatcgtcacatttcagaagtcggctggctttcaagccctgatccagtatcaaggacgccagaatgctatctcagctagaacttctcttcagggccgtaatatttatgatggctgctgccagcttgatatacagttttcaaaccttg

SEQ ID NO: 23244 - DNA, 573 bp, Gossypium hirsutum
  Clone ID: GOSHI-09MAY01-C15678_1
cttacgattatattgttcttctagtgggttctaattttctgtcacgggggagacaatgggagcttcattgcctccgaaagaagctaacctcttcaaactcatcgttaaatcatgtgaaactaaacagtacaagaaaggactgaaggctgcagatgctatacttaaaaagtttcctgatcatggagaaacattgtcaatgaaaggggttgaccttaaattgcatggatcgtaaaactgaagcatatgagctcgttcggttaggtttaaagaatgatttgaaaagtcatgtctgctgggacgtgtatggtctcctctatcgatcagatagagaatacagggaggctatcaaatgctatcgcaatgctttgagaatagatccagacaacattgaaatactacgggacttgtcactcttgcaggtctgccgccctttcctcttctgtaattcctatttttagactcagtatttaatctaagatgttcatcagtagtatgcttgatcacatgctcactcaaattcttgacattgatgcttggcgttcttgaatggttaaaggagtttctcttgtaagc

SEQ ID NO: 23245 - DNA, 440 bp, Gossypium hirsutum
  Clone ID: GOSHI-09MAY01-C15638_1
ttcttcttctgtttaacaacgctcctacttgggccatctccactcaatttttggcaacaaaatccactcatggtaccgccaattctttcccttccttttctcactttcacgttagctgcccttcatcagggcaaaaaggaggtttgagaagaagggccagagtccgtacttatgggatcaagtgttcggcataagtagattatgcaaaaggttctgcacctgtgaatgaaaaaagcgtttcagtcactcttttagctggaggcaaaggcataagaatgggttttatatactttatcacgaatgattgaagtgaaagaaattggcgagggctgcgatccatcgtacgacgacatcttcaaagaagccagagacaaaatttatgtagaccttaagttcacgctccctgggaaggagagacaggattctgttcacagtgggct

SEQ ID NO: 23246 - DNA, 449 bp, Gossypium hirsutum
  Clone ID: GOSHI-09MAY01-C15198_1
ggccaaagctttaacctcgtcctgaatcgttggttttaaagagactcgcttgctcgttacatccatttcactttcacatttggcattgacccttctgcttaataatcgaagaaaatggcgatggtttcgatgaaattctttgtcccttccttaaattctcctaatctacgccccaccaagcgttactcaggcatggctgttgcagcttcaaaccaggatgctgttgctttgggggtcacagtaacacaaggggaaggcaatttacccaagcttctcctcacttctgatcatggcagtgaagctgagatttatctatttggtggttgcattacatcttggaaagttccaagtgggagagaccttctatttgtacggcctgatgctgtatttgacaagaagaagccaatcagtggaggtattccacattgtttcccacagtttggacctgc

SEQ ID NO: 23247 - DNA, 629 bp, Gossypium hirsutum
  Clone ID: GOSHI-09MAY01-C15108_1
cccgatttgctattgcctccttccctgttaaatcatcaaacaagccaaaaccctaagcagcctctcccccacccccaccccccctctttttcgatggcaccaaaacgttcaaaccccattgaaggcccaccagccgcttcttcctctgaagaagatgaagaggtgacttcttctgaggaagaagaagaagggtcttcaactgaggaagaagatgaggaagaccccaaaaccgagtcaactccattgatccaaaagagcccaccacccagaaagccggaaaccgctacgcctggcgtcgttaacgatgaatctgatgaatccggttctgattccgaatccgaatccgacaccgctacaccgaatgttaaacctcttgcgacgaaacctatggaggaaagtttgaatgcaaagaaacccagatctaataagcccttgacttctcccattagggcttcttcatctaaacggcctggggagttggagttggatgctaaagaagccaaacgacccaagaagaagggtgggggaagaaagggttggctaccacacccgcgctggaggatgtgaaaaagactggtgaagatgcaaaaaagcagctttttcagcggttggtcagtgaagatgatgag

SEQ ID NO: 23248 - DNA, 607 bp, Gossypium hirsutum
  unsure (1)..(607): unsure at all n locations
  Clone ID: AI727005.1
catcaaacaagccaaaaccctaagcagcctctcccccacccccaccccccctctttttcgatggcaccaaggggtgggggggggggggaattcccaccanccgcttcttcctctgaagaagatgaagaggtgacttcttctgaggaagaagaagaagggtcttcaactgaggaagaagatgaggaagaccccaaaaccgagtcaactccattgatccaaaagagcccaccacccagaaagccggaaaccgctacgcctggcgtcgttaacgatgaatctgatgaatccggttctgattccgaatccgaatccgacaccgctacaccgaatgttaaacctcttgcgacgaaacctatggaggaaagtttgaatgcaaagaaacccagatctaataagcccttgacttctcccattagggcttcttcatctaaacggcctggggagttggagttggatgctaaanaaaccaaacgacccaagaacaaggttggggaanataggttggctacaacacctgctgtggaggaggtgaaaaagactggtgaagatgccaaaaagcagctttttcaccggttgttcagtgaagatgatgagattgctttgttga

SEQ ID NO: 23249 - DNA, 404 bp, Gossypium hirsutum
  Clone ID: LIB3585-033-P1-K1-H6
ccacgcgtcagggtaaaaccctaagaagacaaagcccccatcctgtctgtctctttttcgacggcacaaaatcggtagaccctattgaagatcgaccagccgcttcttcctatgaggaagatgaagaggtgcctctttcagaggaagaagaagaagggtctacacctgtggcagaagatgaggacgacctcaaagccgagttagctacattgatccaaaagagcccaccacccagaaagccggaaaccgctacgcctggcgtcgttaacgatgaatctgatgaatccggatctgattccgaatccgaatccgacaccgctacaccgaatgttaaacctcttgcgacgaaacctatggaggaaagtttgaatgcgaagaaactcagatctaataagcccttgact

SEQ ID NO: 23250 - DNA, 742 bp, Gossypium hirsutum
  Clone ID: GOSHI-09MAY01-C15058_1
gatttctcgatttttttcgattccatttttgcaatctctatctctaggttttacttcatagagaaaaaaggggacgattagctgaaagaaagaaaaaaagcaaaaacaatggcgtcgtcaagaggaggaggaagccaacaagtgatcagaacgggggatatggagaagatgagcttagatcagctcaaagcagtcaaagaacaagcagatattgaagtcaatctcttacaagacagtcttaataacatccgcgccgccaccggccgcctcgagaacgcctccgccgctctccacgacctttccctccgccctcaagggaagaaaatgttggttcctctcactgcttccctctatgttcccggcacactcgacgatgccgataaggttctcgttgatattggcactggatacttcgttgagaaaacaatggctgaaggcaaagattattgcgagcgtaagatcaacttactgaaatccaatttcgatcaacttatcgaggttgcatctaagaagaaaacattagccgatgaagctggacttattttacaagcaaaattgaagcagtcatctccttcgagttaggaattgcgtgacctcataatcatctcattatcattaagttcttaagggttgcttagaaccttattgcacgtgatgtcaaactttatcttcttaaagctttcgtttttgatgaaggtagggaccatgatctttccggttggtcatttatagagattaatgt

SEQ ID NO: 23251 - DNA, 545 bp, Gossypium hirsutum
  Clone ID: GOSHI-09MAY01-C15068_1
ctctaatactactcactatgcggaaagctgttgcgcctccgggtaccaatcccgaattccaggctacgacctcacgcgtatcggttatcatgaattttctctctctagaactcgcctttctgtgtttgtttccctagaaaaaaaaaaccccaaaatttcccccaattcaagatttgtgttttcttcttcaaattgaatccgaatcttttataaaatttctcttttgggttttcaagtgatgtctttattgccaaagagcgattcaattcatatccgtgaggtatgggatgataacgttgaggaagaatttgctttgattcgtgaaatagttgatgattatccttatgttgccatggatactgaattcccaggcattgtattacgtcccgtaggttatttcaaaagcagttatgattatcactatcaaactttgaaagacaatgttggtatgttaatacttggtcaattaggtcttactttctcagatgggatgggagccttccctacatgtggaactgataaatactgcatttggcaattcaatt

SEQ ID NO: 23252 - DNA, 279 bp, Gossypium hirsutum
  Clone ID: uC-gsflmaxxa040c08b1
ttcacgcgtccgattccaaacaggaagtcctagagagagagagagagtgaaaggaaagaactttcaggaattttctctctctagaactcgcctttctgtgtttgtttccctagaaaaaaaaaccccaaaatttcccccaattcaagatttgtgttttcttcttcaaattgaatccgaatcttttataaaatttctcttttgggttctcaagtgatgtctttattgccaaagagcgattcaattcatatccgtgaggtatgggatgataacgttgaggaa

SEQ ID NO: 23253 - DNA, 566 bp, Gossypium hirsutum
  Clone ID: GOSHI-09MAY01-C15398_1
aaaatatattcctagtgtcggtgacctctgtccttgcaagtagttaccagttaaaatgggggtttacgactgtccgatgagaacacttcttttgctgctttggaaccagatccagccgctagcattttgaaccctgcatttctcttttaacacatccatcgttcaatgcgcttgttttgatctatagatcttaggttcggagtctctgtgtgtgctttggtgtgggggttttctagtgacaaaaatagaatggggaaacaatcaaagtcaggagggtgtttggggtggttactggcgatagtaatattggctctggttgtgggagccattgtttatgcagtgaagcagaaaatcgatcacgccaatgataataagccatctcccgttccaggtcctccaggcgctattgacaagaagtatgccgatgctctcaaaatcgcaatgcaattctttgacattcaaaaatctggtaagttagtgaataataagatatcatggagaggagattctggacttaaggatggaaatgaagcgaacttggatctttccaaggggatgtatgatgc

SEQ ID NO: 23254 - DNA, 903 bp, Gossypium hirsutum
  Clone ID: GOSHI-09MAY01-C15248_1
tttattttacttgggatcaggagattccaaagcgtggtaaaataatctttctttgttgatttggtctgggacataatcctgtagttgtagagtcttagtcattagccatttaaagccactttgaactgtgtactcgcctgatttgtccccttaccatattataacatccggttgagtcctgcttaccaatgggatagacaagattacctcagcttgatccctatccagggtgggtagctaagaatcattccagatgtttcttgaattcaccgttctctatcctccagcctgttctttcttctaataagctttcgtgcgtttcaaatgctgcgccaggtaaaagaggggtaagctcctaaccttgcatttaaaaacttaccacatagataatattttaacttcataatgcacgcaaacaaacagacaggttgggtgattagtctccatccctatttagccagcagggccatattaaatgttactaaatccctaaacctcataccttcaaacgcttttggactacatatcgcgaaccaactacaccagtgaatatctttattagtttttaaatttcgccaccaaaatttactcatcaggttttctaattctttacaaagcaatattggtaatttaaaacactgcatgacatatatcggaagtgcttgtaaaattgatctaataaaaaatctttaccactaaatgacaaattacacactccaattcttcgatttttgaataattctttcttttagttctatgaatgcacccttttttctcctccataccattgttggtaagcctagaatttttttagattatttgaaattcggacccccaaaaatccccctatttgctctttaaggtcgtcttgtacattttactaaagtaaattaataatttttg

SEQ ID NO: 23255 - DNA, 408 bp, Gossypium hirsutum
  Clone ID: LIB3147-031-Q1-K1-F2
agttgtagggtattagtcattagccatttaaagccactctaaactgtgtactcgcttgatttgtcccttcaccatattataacatccggttgagtcctgctcaccaatggagtagacaggactgccttggcttgatccctttctagtaagttctagattacctcgtagtttcataaaaatgagtctttgttaattagatctgctacttttgaatggttgatatttatgtcttgattctttactcttccatcagtaggggtaggtagccaagaatcattttaggggcacgtttggttgagaggaatagaatagagctgtaatgtaatagagttgtaatggaatagagctctaatagaatagatctgtaatgaataattcagttgtttggttgaatggaatggaatagag

SEQ ID NO: 23256 - DNA, 664 bp, Gossypium hirsutum
  Clone ID: GOSHI-09MAY01-C15238_1
tcgctgagccaaatggttccatcagagagcacatagacagtggtcgtgtggaaggtcctacttcatctgctgggcatccaaaagaggttcaagtagaaaagagggaaaagcaaagtgttgaatatggaatgtcaccaactcttagagagatagctagagagtctctagaggatcattctagattaacaggtggcattttgggtcctactgcagcaagcagaaaggataaaaagggaccaaaaggccacaaagcttcagaaattgccaaaactaaaggagtcacttctgaatccgaaattgggtttggactgccttccgtgatcactcagagtgaacatgggaaagcaggggaaacttcaaaaaataacaatttaagggagggttcccatgttgaggtactgagagatggagatggcttaaaagtagcatggttcccagctgatattctggatttaaaagatggcaaagcttatgtgtgttacaacgagcttcgatcagagggtgagctatgtgcatgtttcatgttgaaccaactaaatggtgattgctaggaaagaagatctgtcagacaatcattgttcttaatttttatgcaactccttgatgtgtatccaatttcactttctcttttgggattcttgcatgattatctctattctgaatc

SEQ ID NO: 23257 - DNA, 1052 bp, Gossypium hirsutum
  Clone ID: GOSHI-09MAY01-C16998_2
gatttttcttacaagtgcgctcggttggtgtattgaatggcttcaggcatattttcttgttcttgatgacatcatggacagctctcacacccggcgtggccagccttgttggtttagattgccgaaggttggtatgattgctgtaaatgacggtgttatacttcgcaatcacatcaccaggattctcaaaaatcactttcgtgggaaaccttactatgtggatctgctagatttatttaatgaggtggagtttcaaacggccgcggggccggtcgcggagcggattacaacacttgaaggagaaaaggatctatccaaatactcattgcaacagcaccgtcgcattgttcagtacaagactgcctattattcattttatcttcctgttgcgtgtgcactggttatgtgtggtgaaaatcttgacaaccacatcgatgtaaagaacattcttgttgacatgggaatctactttcaagtacaggatgactatttggattgctttggcaatcctgagaccattggtaagattggaactgatattgaagattttaagtgctcttggttggtggttaaagctttggaaatctgtaatgaggagcagaagaaagtgttatatgagaactatgggaaaccagaccctgccaatgttgctaaagtgaaggctctatacaatgagcttaatctcaagggcgtatttgaggactacgaaagcaagagctatgagaggctcgtaacctcaattgaagctcatcctagcaaaccagtgcaagcagtgttgaagtcattcttagggaagatctacaagaggcagaaatagaatccagtttccaaagatgaatgtggctggaaaacctctcccactcttctgttctatgctcatttgtttgtcttaatattttataatcaatcatcttcttgttttctattccgacaaacattcggtttcagatttaaataaatttcatagagttctgtctctagccaatttgaataaaaaaaaaaaaataggatgcatgctcttctgtttaaaaaaaaaaaaaaaaaaaaaaaaa

SEQ ID NO: 23258 - DNA, 820 bp, Gossypium hirsutum
  Clone ID: GOSHI-09MAY01-C16998_1
attggccttttttttcctcttttcaccaatcaccggtattcaaatactagtacaaatacagctgcagcaatttgtcaattacttatttgctgcttcactgtactttgtggacaggagaggagagaagccagtttcaatcgtccctcaagagaaactgtcacgaaaaaagacattgggtcttcccaaatcttggctttgcattgatggcggatctcaggtcagcatttctcaatgtgtattcccagctcaaatcggagctccttcaggatccttctttcgagtttaccgatgattctcgtcaatgggttgaacggatgctggactacaatgtgcctggagggaaactgaatcgtggactctctgtgattgatagctaccgcctgttgaaagatggaaaggaattgacccaagatgagatttttcttacaagtgcgctcggttggtgtattgaatggcttcaggcatattttcttgttcttgatgacatcatggacagctctcacacccggcgtggccagccttgttggtttagattgccgaaggttggtatgattgctgtaaatgacggtgttatacttcgcaatcacatcaccaggattctcaaaaatcactttcgtgggaaaccttactatgtggatctgctagatttatttaatgaggtggagtttcaaacagcttcaggacagatgatagatctgattacaacacttgaaggagataggatctatcaatactattgcacacaccggtccatggtaatccaagatgccaatattattttaattccgggcggggccctgtatggggtaaaacttgcact

SEQ ID NO: 23259 - DNA, 466 bp, Gossypium hirsutum
  Clone ID: GOSHI-09MAY01-C16948_1
atcgccgccggagggtcgtcttaaagggcccgcgcgccgccgccccctcggcccgccatgctgctatccgtgccgctgctgctcggcctcctcggcttggccgccgccgagcccgccgtctacttcaaggagcagtttctggacggagacgggtggacttcccgctggatcgaatccaaacacaagtcagattttggcaaattcgtcctcagttccggcaagttctacggtgacgaggagaaagataaaggtttgcagacaagccaggatgcacgcttttatgctctgtcggccagtttcgagcctttcagcaacaaaggccagacgctggtggtgcagttcacggtgaaacatgagcagaacatcgactgtgggggcggttatgtgaagctgtttcctaatagtttggaccagacggacatgcacggagactcagaatacaacatcatgtttggccctgatatct

SEQ ID NO: 23260 - DNA, 745 bp, Gossypium hirsutum
  Clone ID: GOSHI-09MAY01-C16978_4
cctcacctcgcagtctctaaacaaccaaacacagtcctacattttaggagtttttgtttttcgaatctgcggcggagataatgatgcacagatttatttcggtcaggaggttattttcggaaactaaatgttctcttccttgccaactacgacgacgttgcttctctcaggtggctcgaaatgagattgataacagggatgatcttgttcgtaaaatgcctccttttgattactctccgcctccttacaccggtccttccgccgacgagatcctttccaaacgcaaggagtatcttagcccctccatgttttacttttacaccaaaccgttgaacatagtggacgggaggatgcagtacttgttcgatgataagggacgaagatacctagacgcatttggagggattgctactgtgtgttgcggccactgtcatcctgatgtggtcgacgcaatcgtcaaccaaaccaagcgcttacaacactccaccatcctttacctcaacaatgccatcgctgatttcgctgaggcccttgccaataagttacccggcaatctcaaggttgtattctttacaaattcagggacagaagcaaacgagttagcaatgatgatagcgagattatatactggatgccatgacataatatcattgaggaacgcgtatcatgggaatgcagcaggaactatgggagccactgcccaaagtaactggaagttcaatgttatccagagtggagttcatca

SEQ ID NO: 23261 - DNA, 569 bp, Gossypium hirsutum
  Clone ID: GOSHI-09MAY01-C16978_3
cccactcgtccggttgtacctgacattgtcacaatggcaaaggggatcggaaatggcatccctctaggcgctgtgataaccactcccgagatcgcggaggtcttgacccgacgaaattacttcaacacctttggtgggaaccctgtatgtacggctgcagggttagccgttttgaacgtaatcgaaaaagaaaagcttcaagacaatgccttcgtcgtaggatcttatttgaaagagagactaattgcactaaaagataaacatgaccttatcggggatgtgagaggacgaggattaatgcttggagtcgaacttgtcccccgcctccgcccccgctctccggcattgcttgaaacacttcatttaggggaccaagtgaaaggttaggtttcttcacattaagcctgccatggaatgtactttgtttaagctactgatgtactggtaatcttatagtagagatcggtgtattggttgggaaaggtggattttatggcaatgtatttagaattacacctccaaaaaaaaaaaaaaaaaaataaaatataataaaaaaaaaaaaattataa

SEQ ID NO: 23262 - DNA, 770 bp, Gossypium hirsutum
  Clone ID: GOSHI-09MAY01-C16978_2
agtatgcaaaggatgttcaagatcttatccagtttggaacttctggcaacgtcgctggtttcatttctgaagccatacagggtgttggtggaatcatcgaattggccccaggttacttgcctgctgtttatagcaccataaagaaagctggaggcctttgcattgctgatgaggttcaggctgggtttgctcgcacagggagccatttctggggatttgagaaccatggagttgttcccgatatagtaacaatggcaaagggcattggaaatggcatccctctcggtgccgtggtaaccacccctgagattgcggaggtcttgacccgccgaagttacttcaacacctttggtgggaaccctgtatgtacggctgcagggttagccgtcctgaacgtaatcgaaaaagaaaagcttcaggacaatgccttcgtcgtaggatcttatttgaaagagagactaattgcactaaaagataaacatgaccttatcggggatgtgagaggacgtggattgatgctcggagtcgaacttgtcactgatcacgagctcaagacaccggcaaagcttgaaacacttcatgtattggaccaaatgaaagagatcggtgtattggttgggaaaggtggattttatggcaatgtatttagaattacacctccactttgctttactacggaagatgcagatttttttgtagatgctatggattacaccatgtcaaagatgtaacgcctctattattctttcgtgcaaacgaggttgtagctt

SEQ ID NO: 23263 - DNA, 1241 bp, Gossypium hirsutum
  Clone ID: GOSHI-09MAY01-C16978_1
cctcgtttcgctcctttatcattgcataccgccaccaaacacagtcctacatttttggaacttctcttctcttctctttccaaaaagtaaaaaccagaaagagatccaaaaaataatggtgcacggttctattagtccatggagaagggtgttatcggaaactacatattctctgcgacgggggcaatttggtcgacgacgctgcttctctctggtggctcacacagctgagcttgataaaaacaatatcgattctgttcctaaattgcctccctttgattactctccgcctccttatacccgtccttccgccgttgacatcctttccaaacgcaaggagtatctcagcccttccatgttttacttttaccagaaacccttgaacgtagtggatgggaggatgcagtatttgttcgatgagaaccgacgaaggtacctagacgcatttggaggggatgctacggtgagtagcggccactgtcatcctgatgtggtcgacgcaatcgtcaaccaaaccaagcgcttacaacactccactatcctttacctcaacaatgccatcgctgatttcgctgaggcccttgccaataagttccccgccatccccaggggggggggcggggcggattcagggacagaagcaaacgagttggcaatgatgatggcgagattatatactggatgccatgacattatatcattgaggaacgcgtatcatgggaatgcagcaggaactatgggagccactgcccaaagtaactggaagttcaatgttatacagagtggagttcatcatgccataaacccagatccataccgaggtgtttttggttctgaaggagagaagtatgcaaaagatgtccaagatcttatccagtttggaacttctggcaacatcgctggtttcatttctgaagctatacagggagttggtggaatcatagaattggccccaggttacttgcctgctgtttatagcaccataaagaaagctggaggtctttgcattgctgatgaggttcaggctgggtttgctcgcacagggagccatttctggggattcgagaatcacggcgttgtacctgacattgtcacaatggccaagggcatcgggaatggcttccctctcggcgccgtgttaacctcccccgggttcgccgcggttttggccccgcccctgttgcttgtttcctttgtgtgggcattcctgtttgttctgtttggggggttgggctgcctag

SEQ ID NO: 23264 - DNA, 306 bp, Gossypium hirsutum
  Clone ID: GOSHI-09MAY01-C16928_1
atgttactgaggtctccagcgtcttctccctcctgtgtaaaatggcaactcttaaggaaaaactcattgcaccagttgcggaagaagaggcgacagtcccaaacaataagatcactgtagtgggtgttggacaagttggtatggcgtgtgctgtcagcattctgggaaagtctctggctgatgaacttgctcttgtggatgttttggaagataagcttaaaggagaaatgatggatctgcagcatgggagcttatttcttcagacgcctaaaattgtggcagataaagattattctgggacttgcc

SEQ ID NO: 23265 - DNA, 610 bp, Gossypium hirsutum
  Clone ID: GOSHI-09MAY01-C16598_1
cccacgcgtccgcccacgcgtccgatttttaggaaaagaagcaacaccgatcttccctttccactccccttcccctttccttattattttcagtaagagtttgctttgatccgtgaaattttttatacttaagtcggcaatctctccctataaattaatcaacaaatttccccaagtttctcatcaaaattaaaaattttcaatcgtcttctctttcaatcttcttgatttcgaagcaacctctcgattccgaatatctcccagaagataatcttctctttacagcttctttttctatttcagttttgatttctttgttcgtgatttctcgtaaatttttatttggtgtaattagggtaaggtttcatcaattaattggatctatttcaataaatatattggcatctgtttgtaaagatcttatttttttcaggtttcaagatctaaaattccagtttgttttgtccagtcgattgatttgccaactttggtattgttgattttagggtttcatgggttagttctgatctggcttaagaattttatgaactttatttgagtttttttatttagggtctgatttggttagtgcttcatggttgaataaact

SEQ ID NO: 23266 - DNA, 724 bp, Gossypium hirsutum
  Clone ID: GOSHI-09MAY01-C16448_1
cggacgcgtgggtttctttccttgttctattatatatatttatcttcatcatcagacatatatacgtgtgttgcgtgaatgctcattacatattttcacaccataggagaggaagatattatatcaagctagaacatctcccttttacatcaactaagtaaagcatgcaaattcccacagagaggaaaacaggcgtctacacatacataggtcaatggccaatttactccgtggcatggtccgtccgcaacgacaaaagatctcgccttgccattggcagtttcctcgaagactacagcaacaaggtggaactggttcagttcaatctctatacatccgatttcacgactgacaatcggttagttttcgatcacccttacgctcccaccaacctaatgttctttccgtccgaggatacctctaatcccgatatgattgccacgtccggcgactaccttcgtctttgggaaatccacgacgatcacatcgagcttaagtccttgcttaatggcaacaagagcagcgaattcagttccgccataacttccttcgattgggctgatttcgacacccgccgtgtggccacctccagtgtcgacactacttgtaccatttgggaccttgagagcgaggctgtagacactcaattaattgcccacgaacagaagttgttcgacatttcttggggcgggttcatgtgtttgcatccgtgtctggagaagga

SEQ ID NO: 23267 - DNA, 963 bp, Gossypium hirsutum
  Clone ID: GOSHI-09MAY01-C16408_1
gagggccttacttaaagagaaaggaatggtagagagtaactttgataaagaaacagttggatgcatcaggacaactgatactcatagtggaaatcaaggttcaggtcttcgcagggagccctccttctctcgctgggctgatgaagatgggataatccattttgaacacccttccgagagtactgctcctagcgtagaaggttctgattttgagttgcctatgcttaatcagagtgggttagacaacggatttgtagacgggattagatacggtaaatttccagagcagcgtatgcacttaaatggtggaagtgccatggaagatttacatgggaaagatagaaatgggaaatatacaccttttgatgttgaaaatgagtatgttggggatggaagatcatcaaatatcagtgttgatggagccaattctactggcagcccaaaagcatctagcaactctatttctactgcagatgtgttgaagacattgttctttatacttgtatggtacactttcagcacatttttgacattgtacaacaaaaccttgttgggagatgagttggggaagtttcctgctcccttgttgatgaatactatccactttgcatttcaagctttattatcaaatgcaataacgtggtattggtctcatagatttcagccttcggttgcaatgtcatatagggattacttctacagagttgtacctacagctctttcaactgcactggacgttaacctgagcaatgtatccctggttttcatatctgttacttttgcaacaatgtgtaaatcagcagctcctatatttcttctcctatttgcttttgcattcaggttggagtccccaagctttaaactcttagggatcattgtggtaatctctattggaattctattaacagttgcaagggacactgaatttgagttttggggttttatctttgtcatgcttgctgc

SEQ ID NO: 23268 - DNA, 585 bp, Gossypium hirsutum
  Clone ID: LIB3825-019-Q1-N6-F8
gagtcatacaccagcgaaatccagacatgacagcagcaagcatgacaaagataaaaccccaaaactcaaattcagtgtcccttgcaactgttaatagaattccaatagagattaccacaatgatccctaagagtttaaagcttggggactccaacctgaatgcaaaagcaaataggagaagaaatataggagctgctgatttacactgcagggtacacaggaagaatattttagtcaataacaccaacagaaaaagaaatatcaaaaagcatattcacagagtaggccaatttgatgagactaaatatacatcacaattaagagtacagaagagttaacaaaccattgttgcaaaagtaacagatatgaaaaccagggatacattgctcaggttaacgtccagtgcagttgaaagagctgtaggtacaactgtgaaaggcaaagtctatctgtacattagttgatagaaaagttaattaacagagaaatgcagaggtggaaaagccgtagaagaacaggagaccagcattttgaaaccttaaatctaagtgtaacgatgcacctggctagtgatgcaattttaaa

SEQ ID NO: 23269 - DNA, 374 bp, Gossypium hirsutum
  Clone ID: LIB3083-009-Q1-L1-B8
cttgttattgttatagtagcgtggacaatatacaaggagtgtttatctctgggggatatgtaccttttgatatcgaaaatgaatctgctttgaatataggatcatcagatatttgtgatgatggagacattgctactgggagtccaaaagcattgcccctgaattctgacagctccatttctcttgtggatgtgttgaaaactttgttctttatacttgtatggtacactttcagcacatttttgactttgtacaacaaaaccttgtttggagatgaccttgggaagtttccagctcccttgttgatgaatactgtccacttcaccatgcaagctgttttatcaaaactgatcacatggtattggtctcataaa

SEQ ID NO: 23270 - DNA, 617 bp, Gossypium hirsutum
  Clone ID: GOSHI-09MAY01-C16798_1
tgatttttcatctccatctccatctccatctctatctccttgctcttcctcctaaaaccctaaaatagaaatgctctccttgcagctcttctccgcaaatcctaagcccactctcctcgactctccgctcaacccccttttgtaccccaaatgcctaaaacctccaaaaccctaccccaaatcgaagcccgcccccatttcttctgtccttcaatggaatagaaagcctgagctggccggtgagaccccacgcgtcgtcgttataacatccggaaaaggcggggtcggaaaaaccacaaccaccgccaatgtgggtctttccttagcccgtctggggttctccgtagtggccatcgacgccgacgttggcctccgtaacctagacctcctgttaggcctggagaatcgcgtgaactatacggtcgtggaggtactcaatggcgattgccgactggaccaggcattggtaagagataagcggtggtcgaacttcgaattgctttgcatttccaagcccagatcgaagctccccattggattcggtgggaaagcgttggttttgctagtggacgcactgaaagcgcgtgaggaagggtcaccgattcatactaatagat

SEQ ID NO: 23271 - DNA, 1760 bp, Gossypium hirsutum
  Clone ID: GOSHI-09MAY01-C16698_1
acctttggtttggtttctccggcggcaatgtttcctaagcaataatatacaaaatttaagggaaaaagaggaaatttttgtcttcttcaatttccgacaagatttatagggttttagcttaactacgatgcaaagatgcttcatttctagtgtttctgttttttagggttgggttttgattttatgtctgggttttggttgattgattccatggctgactggcaacagcttttgcaatcgattttcttaggtcttatattctcttatcttctagccaagctaatctccttagtcgtttctttcaaagacgataacctttcgataacccgagcccgaagcagcaatgtccagggctacgagaaaatcgacgattcgggttccggatccgacccgattggaagtactgagcacttgggactgcacaagtcggattcggtagtcgccgaattgggaagtattagggccgagagtgatggcgatggtgatggcgtggatgatgatgacgacgattgggaaggggtggagtgtacggaactggatgatgcgttcagtgcggcaacggcgttccgtggcggctgccgcggctgatcggttgtcgcaaaaggttccgaacgaggtgcagttgcagctttacggtttgtacaaggttgccaccgaagggccttgcactgctccccagccttccgctttgaaaatgacggctcgtgctaagtggcaagcatggcacaaattgggtgctatgcctccagaggatgcaatgcagaaatacattgatgttgtgacagagctatatccatcttgggctgctggttcagctatgggcaaaggtggggctgataatgcttcaagtaaagatgtcaaaggaccaatgggaccggttttcagctcttttgtgtatgaagaggaatctgaaaatgatttgaaaatggatgctatccacacttttgccagagaaggagaactggataatttgcttaaatgcattgaaagtggtgtttctgtgcatttgcaagacagtgaaggcaggaccccgatgcattgggctgtagatcgtggccatcttaaaattgccgaagcacttcttagcaggaatgctgatgtgaatgctaaggacaatgaaggtcaaaccccattgcactatgctgttatgtgtgagagggaagacattgccaaattacttgtaaaacaaaatgcagacaaagatacgaaggataacgacggcaactctccagtcaacctatgtgactcagattggccttggttgcaacgtgcaggcaaagcggaatgacctgtgttttattcccaagtttggtttaagttaaaaagtacttgaaaaaatttctcatggatgtatatgggtataagtaaccttttgcacttctttccttagttatatgctaatgtggggtactctgatgttcattggcctcacctccttaattactgctttctttaccaccataagtagatggaaaagaattggaaggtggctttagccggtgaaatggaattctgataccatcatttgtttggatagagtctagaggtatgtagccggacatggccagagaagttggatgttactcttcaaagggatccaatgcgggcagtgcagtgaacctaattagttgtttgatctgatggtagatatgataaaccgtagattccatcaccctaaatctgttcccatcaaacggagactccgtcaccccaaaaactgatgtaatttcacaatataaatgggcaaactgcttaagatt

SEQ ID NO: 23272 - DNA, 545 bp, Gossypium hirsutum
  Clone ID: GOSHI-09MAY01-C16608_1
acggccacgcgtccgagaggctggaattgcaaatgggaccaaacccacttgatagcgaaaccacaacacgacccgccaattgtcaatactacatccttagcagcaactttgaaagtcgtacctttttctccatcccgaggaaacaagcggcggcgctgcccgctctccgcctctaacttctttatacgtctaactcttgttttccgttaaccgaatatgacctgtcgtcctcaacacccatatgtgtaaaaagcactctcattggtcggtgtgtatgtaatgaaacaaaagctgtcacattttttgtcctgttttcttcccccttccatctttatttcgctgtagaaaaaaaaaatctttcaaaaccttttttcttttttgtccctcgaagcatctctcagctgccaagtacttgcatttcagcttcaattgagaatttccatcaataatcctttaattttcagttaaagcaacatcttttttttgttgaacacagagatggatgtagttcggtttcagttggaatgaagaactttacagacaca

SEQ ID NO: 23273 - DNA, 438 bp, Gossypium hirsutum
  Clone ID: GOSHI-09MAY01-C16628_1
cttctgctgaaatgctttgctttctagtttctagacagaaattcgatcagctctagtagtttaataaggtatataaagaagaaagatctccttgaattttatttttgaagtaagaaggtgaatatgggtgcttcggaggagaacagtgccttgttcccaatctttgggttcacgataatggctctgccattagtgccagacactataggtaagatattaaacacattctcgaacaaggcaatgactatccattgccagtgttctgggtgttctccgtctgggaagtatacgaaatcaattttcaaacggatctcgaacttctcaacttgtagtaatctgacccctgtgcttccctggattgtcatggcggtgctgatatacgatatcaagccttacaagtcatgaggttaaagtatttgagccaatcagtattcttgg

SEQ ID NO: 23274 - DNA, 571 bp, Gossypium hirsutum
  Clone ID: GOSHI-09MAY01-C116080_1
gttcgctggaaatgggattgccataacacaagaaaacaaataacatataataagcaaccttctggtctggtcttcagcagcaatcaatccttgtttttcacttctctttttctgttcttctccaaccaaacaattttttttttctcttacagggtgaagggggggggtgttagacatcaccaatcaccacacccatcaatggagaattcatcaaggttagtacaagacaacaagaacttgaacttcccatcatcctcatcttcatcatctcctttaaactccccacacagcaatggaaccaaccccatcaacaccaatgggggtgtccaaattcccaccccacctttaactccaatccccatctccagatctgagaccaacccttacccaacaacctttgtccaagctgacacaactactttcaaacaggttgtccaaatgctctctggttcatcccaaactgctaaacaagccttctctaagccttcaacacaacatcatcatcatcatcatcatcaacaagatccagcactcccatcaaaatcatcttttcctatacctccatgaaaac

SEQ ID NO: 23275 - DNA, 556 bp, Gossypium hirsutum
  Clone ID: GOSHI-09MAY01-C16398_1
caaggttaccctgcttgttgtcctctcatgtgtggtggctgcctcggggggacttatctttggttatgatcttggagtttcagggggagtaacctctatggaccctttcctcaaaaaattcttcccgaatgtgtatcgaaggatgaaagaaggtaccaagattagcaattactgcaaatttgatagccaactgttgaccttgtttacatcttcactctacctatctggccttgtttcttctttatttgcatctactgtgactcgagtctttggacgaaaggcgtcgatgcttgtagcaggggttgctgtccttattggttcagcccttggtggcgctgcttctaatctctacatgcttgtatttggtcgtctttttcttggaattggacttggatttggcaaccaggcgctcccacctactttgtcatatatatatatatattgaagtttttgctcacaaaataaaaaaaaaatacatctattaaaaaaattattacttttatacatccatcaactattgacattatatttaacatctccttctaattttcctccc

SEQ ID NO: 23276 - DNA, 678 bp, Gossypium hirsutum
  Clone ID: GOSHI-09MAY01-C16348_1
gttttttttttcaatcacttatcaaccagaactcgctctttccttcccttttttcccactgatcattacgtgtttgtgtttttgtctcaatgagtaacatgaaggaaaacagtgatgggttcgttagagcagatcaaattgatctcaaaagcttagatgaacagctcgagaagcatcttaacagggtttggagcagtgaaaacaagactaacaaagatgacggtggtggtgatggtgatggtgatggtgatggtgatggtgatggtgatcatcctcgtggtgatcctgatgatcacgctgatgggaagctcaacctcgctgattataccactaacatagctaccactttcacctacagggaaagactagaatgggagacccacccttcttagctcgtcatctccaccgtccgtcgctcgtggtacttttgggaccgcccatcgtggcatctttgacgatctccatcttgcggtcaacctgcttgattggggttaggaccgtcccccgacacatgcctagatcgcctccttaacggccgctttttcccccaacattcctttctgccttcaacccgatcacctccccccttcccatgtctgctacgggcaccattcggttcctccggtgttcccatcgccatctttaaagggtcctccggggttccttgatttgtcgtgg

SEQ ID NO: 23277 - DNA, 833 bp, Gossypium hirsutum
  Clone ID: GOSHI-09MAY01-C16378_1
cctacgcgtcgcttcaccgtcctttatttttttccaactaaggttaggctttaaactttaaaacattatgggtttagcagcagccctcctcttcctcctcctagcagctccggcggcttttgccgagcaatacaccgtaggagacagcagcggttggacctcgaccggagattaccaaagttgggttcaagggaaaacattcaccgtaggcgacacacttttgtttacctacggtggcagccactcggtggaggaagtatccaagagcgactacgataattgcaacaccggcaatgctattaaatcctacagcgatgggaacactgtcatcacactgtccaatccaggggcaatgtatttcatatgccccaccataggtcactgtgctggtggcatgaagctagccatcaatgttgtagcagctagtggcaactcaccctccaccccctctactccgtctggttccaccactccttccgggactccccccagtggggggacaacaacttctcccccgtcaacacctagcggagctccgagcaccgtgaattatggttttatggtagccttgttgggagccgttgttggaattatgtgctaggggagaggcagtgctattgtttattggcttatttgctttcgttttcgtcaatattctgtgtgattttattttatttttcctttatgaaccagagatggagagttatgtttttatgatcttcgaaataatttgccttaaattatgattaaaaaacaggtcttttatcctatgttcatcacaatatatatattgagcctacgaagtcaaagttataagagataaaaggaatctt

SEQ ID NO: 23278 - DNA, 443 bp, Gossypium hirsutum
  Clone ID: LIB3197-023-Q1-M1-H8
tccgaacttggtttcaaccaaagtcagaaaactctaaagggggggggcccggaaaaaaaggaaggaaggaggagaaaccgggtgggaaataaaaaaaaaaagttgaggccgaaaaaatgcttaggaaaatggtgggaaggtatcggggaatagaaaaaatgggtaaatccctcccgattcctttttaaagtccgatcaaatcccatcgggtttcccaatctccagctcttccatagtaaaaaacatcgtttcttcttacaaaggcttcattcaattcccttcaagtggatttgactgagggaagatatttgctatcgggtgcatctgatgcatcggctgctgtttttgatattcaaagaacaactaactattaaggagatggtctgattgccaaacacaaatgtttgttttcggtggataagcaacaccaaaagggacataaa

SEQ ID NO: 23279 - DNA, 366 bp, Gossypium hirsutum
  unsure (1)..(366): unsure at all n locations
  Clone ID: LIB3493-012-P1-M1-B5
agaaactcgaaggaggaaggaccagaataaaaaaaaaaagaaagaaagaaagaggaagaaacaggtagaaattaaaaaaaaaaaagttgaggccgaagagatgctaggaaaatgtggaaggatatcggagatagagaaatgggtaaaatccgcccgaattccttttcaagtcggatcaagtccaatcggatttccaatctccagctttccaataataaagacatcgtttctagtcacagaggctccatcaattcccttcatgtggatttgactgagggaagatatttgntatcgggtgcatctgatgcatcggctgctgtttttgatattcaaagagcaactaactatgaaggagatggtctgatt

SEQ ID NO: 23280 - DNA, 510 bp, Gossypium hirsutum
  Clone ID: GOSHI-09MAY01-C16328_1
tctggtgctactattgtgtttggaacagagatgtttatcaaccaagcatttatacaatttgagatgttcaccggtttgcctgcaccaaagcaactcattagggatgtattggcaagaactacataaaaagaaggaatatttgctaagtgaaagtctaattgcagctcaaccgaagtttgtcaagggattttcatgtgatcaagctcaaccccttattctttgacaatttttttttatttaataaatatatttggtcattaattttgagagaaaatgtaagcattttcttcttttgtctcagtttgtaattgtatcatgaaaattaacttccaaagatattacttatgcatttgtatttaatccatctattgaaccgattgaatgtctaattttaatcccgtgttagggaaaacaattagtaaatttcgagtttaaggctaaaaaaaaaaaaaaaaggacggcgctcgcgatctacccacgcgtccgcggacgcgtgggcggacgcgtggg

SEQ ID NO: 23281 - DNA, 867 bp, Gossypium hirsutum
  Clone ID: GOSHI-09MAY01-C16278_1
cccacgcgtccaacataacctatatcttactttccaacctctttcttccatctccatctccatctccatctcctttctgcaattattcccaactttccatggcttccttcacacccaatctagaacctgcccctgacacctctcttcagttcaagcccaagaaacccaggataacccttcaaaccccttcctcttgtcctcccaatcaacgcatccaaagaattaagcgatggcggacccaacgagaccaacacatctactcctccaagctcttccaggctctccgtcgttctcgtcgtacctccgcctccagggaagtccacgaaacggctgacagggttctcgccgtcttggccaagggcaccactcgttggggcagagccattctcaccgctcgcaaggtgaccaaacataagaaagccaagctccctactaataacaggttgaggaagcccgatatttacagagagaggaggaaaacgccggctgttgagcggaagttgaaggttttgggacgtctcgtcccggttgccggaaactatccttctccaaccttatagaagaaactagcgattacatagcggctctagagatgcaagttcgagccatgacggctattaccgagtttctctgcggcggaactggcggtggaccgcagccgccggctgatcgccttccctctaatgtcaactcttgaaaaggtgtttattattaataattattattatttttggaaactgtttatcggtgagatttttaagttgctgtattttattgtgtatacacgactttttctttctttttgagctccacttttgtttattttatttatttatttatttattttcggtttgttaaaaagtcgac

SEQ ID NO: 23282 - DNA, 756 bp, Gossypium hirsutum
  Clone ID: GOSHI-09MAY01-C16268_1
acgcggacgcgtgggtttttcacttctcaatccatttgcgcatttcccatagtttcggctgcgactctctcaattctctacagattttaacttaatttacaatctacattgttcttcgatatcccgatctgcagccgccgttgataaatggagaaagtgattttagaggaaaaggatgcagttcattggatctatagaggagaaggagctgctaatcttattctcgcttacactggatcgtctcccgcatttattgggaaagtgctgcgaatacaaaagtcgcaacggaacggcaacagtggcgtgaaagaaggcagagctttaacaacgcatgaacggcttctttggcgagaaaataaggagctaacggcgtcgtcaaacagagagattctagaacagctttacgtcaaacatgttatgatcccattgttaggccccaaacatgtccgatgttgggattcgtgttcttgttactaaggaattccttaagtccgttgataagaatgtgacttgtcaccggcctgcttggcgagttcactcatcccaggttgatgttaaattcggattctggggctatcttatctgatcattcatactttccgatggtaatcttaaaggggaaaccttgttaacttgttgggattagtctcaatgtggttatctcccatattaaaatcattactgagaaaagcttgttagagaatgtttccgtttaaattgtccatctttaaatggctataaattatatcaatttta

SEQ ID NO: 23283 - DNA, 297 bp, Gossypium hirsutum
  Clone ID: GOSHI-09MAY01-C116220_1
atcttatggcccgtagctgactctggctatccaaaaatgctgataaaggttggagctgaaagggaaatcaaacaaagtgatcctttacttctgaattacggatgtctaagacaatgacttttttctcctggattattggatttgttataccaccaaatccgtatgaccatatcgagctcaaatatgatggtgctcttatggatgctgccagtatggctgctggtgtttcttcacccaatttctcatcaccagctccatggcaacaagaaattctctttcagcttaatttagatggag

SEQ ID NO: 23284 - DNA, 623 bp, Gossypium hirsutum
  Clone ID: GOSHI-09MAY01-C17958_1
aatagattctcttccccatttttattttctcgatatctcttggatggtgtgagcaagcaattaagtggaagtcacccgtctaattttagttaaaaagctattaaccacttcggaaacccttttctaggtttgtctcttaaatcttattcttttcaaaggttgtattatcgaaggtttcgacatcttaggaagatttgtttatagatatgtggaagctaaggtcgtctggtctgaggtgtggagtttgtgcgaatttccgaataccctttccacgttgtttcatgaattcaataacaacatcctccattgatgtaaaacccaaggttccactctatctaaggccaccttccttctctgcctctctttcagagctgaccaaatggcataaatgggctaaaaatctggcttcctcagttggctcctcttttattaacttagacaatggccccgattccactctcctccgcagagagctcaactggcttctacaagacttgattgaactccaatacccgtcaataatattgtctcgattggaatcgggtaacaatgagaatccagatgtaagcgttgcgttaagagcgcctttggaggggatgtattggggttggaggcagaggatt

SEQ ID NO: 23285 - DNA, 868 bp, Gossypium hirsutum
  Clone ID: GOSHI-09MAY01-C17908_1
ggaagttcaacttaaggatggcagagttctggaagctgacattgttgtggttggtgttggtggaaggcctcgtacagcactatttaaagggcaggttgaagaggagacgggcggaataaagactgatgctttttttcaaaacaagtgttcccacagtatatgctgtgggtgatgtggccactttccctctgaagttatacaatgagttgagaagggttgaacatgttgaccatgcccggaaatctgccgaacaggctgtaaaggccatcaaggggcttgagaaggggcaatcagtcgacgaatatgactacttaccgtacttctattcccgttcctttgacctagcatggcaattctatggcgacaatgttggggatactgtgctttttggagacaacaacccacaatcaccgaagccaaagttcggatcttattggatcaaagatggcaaggtggtaggggcattcctagaaggtggtagtgccgaagaaaaccaggcaattgctaaagttgctaagcttcagcctaaagctgagaatttggatgcgctggcaaaagaaggtcttgcctttgcctgtaagatatgaagagtagtaacagctgccatgccttacaaaaagggaagaactctgttgcaagaggactgcgtatgggaagggttggatctgtgttttttctttgggttgttatttctctttgcatttagtacatagattctggagtttgctttgtttatcttgcttttcttttgaatgatgaataataacaaacaatattcaactgtatgttgtgcagtacgaaaaataaacccttaagcctatgatcttgctggtactgaaatcaaccaattataaaaaaaaacccccct

SEQ ID NO: 23286 - DNA, 722 bp, Gossypium hirsutum
  Clone ID: GOSHI-09MAY01-C17848_2
gaagaaagaaaaatcagaaacaattactactagtattattagcttgatatgatatatttacgtttccagcttttgaccatccgttctaacaatagcaaaagaatctccctcccatccacgcccggcgtccccgaagctcatagtttgctgtctctgcagttttcccattgaaatcgagggattacgcccccaggcccaaagccaaattctcccctttctttctctaatatagtttttttcctgtagaaaaacacaagccaatatctttgcaaaaggaagatagtaatacgggacatgaagagttgtgcgtgtttttaccgcccagtgattgtggccaaatccatcgaccagaaagacatgagctttgtatcgacaaatagagtggcgttcggtgctgggattttatctcaagctacaacaaccgcaaggtccaagggttcaaaggttttggctgtcagagcttctgctgttgattcctatgggagctcttccgattttgttgagcgtatggaaaaagcttggctcatctctcagcaaccgaggccagttgtttgttcttcatgcaactccaaggggcacgttgaatgccagtggtgtagaggtacaggcttctttatccttggggataatatgctctgcaagttccttctaggaataccacttgcgtgatttgtgctgggaagggatcaacgtgcttctctgactgcaaggaactggatttc

SEQ ID NO: 23287 - DNA, 787 bp, Gossypium hirsutum
  Clone ID: GOSHI-09MAY01-C17848_1
ccccgcgtccgcccagcgtccgccccgcgtccgcccacgcgtccgcccacgcgtccggtagtgcgtgtttttaccgcccagtgattgtggccaaatccatcgaccagaaagactgagctttgtgtcgacaaatagagtggcgttcggtgctggggttttatctcaagctacaacaaccgcaaggtccaagggttcaaaggttttggctgtcagagcttctgctgttgattcctatgggagctcttccgattttgttgagcgtatggaaaaagcttggctcatctctcaggatgggattgagtagttcaccatttttcttcattgattctttacatattcaagcacgtggttgtattccttggtccctgcaaccgaggccagttgtttgttcttcatgcaactccaaggggcacgttgaatgccagtggtgtagaggtacaggcttctttatccttggggataatatgctctgccaagttccttctaggaataccacttgcgtgatttgtgctgggaagggatcaacgtgctgctctgactgcaaaggaactggatttcgggctaagtggttgggtgaacctcctctttccaaatagtatataatttctctgttattgtctgttgccaaatgttgtaagttgtaaaaccaccataaaatttatttgttttgcccgttgaatagcgtaccttctttgtctccaaattgtaatcacaccatgtattcgtacaatcttatctccttataaatgagagaagaaacaacaattgttacttattgattgaaaaa

SEQ ID NO: 23288 - DNA, 1072 bp, Gossypium hirsutum
  Clone ID: GOSHI-09MAY01-C17588_2
cctcaacacattaaaaaaaagcaagtcaacagaatacaaaagggccaacgttgctccgggaaatgccggcggtcacttcggagattttccggcgtttcatacctacggcggtcaatttattcagtacagtatttttggaaacttatttgagatcacgtctaaatatcggccctccatcacgccaatcggtcgtggagcctacggcatcggctgctcggtgttgaattcggaaacaaatgaaatggtagcgggtaaagaaaatagccaacgctttcgataatcacatggacgctaagcgtacgcttcgtgaaattaagcttctccgacatttggatcacgagaatgttatcgcaattagagatgtcattcctccgcctttgcggagagaatttactgatgtctacattgcctcggagctcatggataccgatcttcaccaaatcattcgctccaatcagagtttatcggaggagcattgccagtatttcttgtatcaaattcttcgaggactgaagtacatacattctgccaatgtcattcatagagatttgaaacccagcaacctcttgctgaatgctaattgtgatcttaagatttgcgactttggtctcgctcggcctactgctgagaatgagtttatgactgaatatgttgtcacgaggtggtatcgggcaccggagatattgctaaactcttcagactacaccgctgccatagatgtctggtctgttggttgcatcttcatggagctcatgaataggaagcctctgtttccaggcaaagatcatgtacatcaaatgcgtttattaactgagctgctcggcacaccaactgaatccgatcttggatttctccggaacgaggatgcaaggagatatatcaggcagctcccagcacatccgcgccaatcactagcagaagttttcccacatgttcatccattggccattgatctcattgacagaatgttgacatttgatccgaccagaaggattactgttgaagaagcattggcacatccttacctcgaaagatacacgacatatctgatgaacggtctgccccgaccatt

SEQ ID NO: 23289 - DNA, 779 bp, Gossypium hirsutum
  Clone ID: GOSHI-09MAY01-C17588_1
cctcaacacatgaaaaaaggagtctcaagcaaagcagtatacagaaaaagtaccgaaatggccaacgttgctccgggaaatgccggcggtcacttcggagattttccggcgtttcatacctacggcggtcaatttattcagtacagtatttttggaaacttatttgagatcacgtctaaatatcggcctcccatcacgccaatcggtcgtggagcctacggcatcgtctgctcggtgttgaattcggagacgaatgaaatggtagcggtaaagaaaatagccaacgctttcgataatcacatggacgctaagcgtacgcttcgtgaaattaagcttctccgacatttggatcacgagaatgttatcgcaattagagatgtcattcctccgcctttgcggagagattttaatgatgtctacattgccttggagctcatggataccgatcttcaccaaataattcgctccaatcagagtttatctgaggagcattgtcagtatttcttatatcagcttcttcgaggactcaagtacattcattctgcaaatgtgattcatagagatttgaaacccagcaacctcttgctgaatgctaattgtgatcttaagatttgtgactttggtctcgctcgacctgcctccgagaatgagtttatgacggaatatgttgtcacgaggtgcttgagcaccgagatattcgtaactctgagactactctgcggcctatctggtcggactgtgtgctctattgatcctggatggatactctgtcgcggcag

SEQ ID NO: 23290 - DNA, 618 bp, Gossypium hirsutum
  Clone ID: GOSHI-09MAY01-C17548_2
ccccgcgtccgcccacgcgtccgcaggtgagctctgtcaagttctctctcaaattcttcaacatttattttttctttctatacttgttttgtattttgttttgagttgatatggctggcaaaggcgaaggtccggcgattggtattgatctcggcaccacgtactcgtgcgttggtgtttggcaacatgatcgtgtggagatcatagctaacgatcagggaaacagaaccacgccgtcttacgtgggttttacagacactgagcgtttgatcggtgacgctgctaagaatcaggttgctatgaaccctaccaatactgttttcgatgctaagcgtttgatcggtagaagattcagcgactcttctgtccaaagcgacatgaaattgtggccatttaaggtcattcctgggcctggagacaagccaatgatcgtcgtcacatataaaggagaagagaagcaattcgctgctgaagaaatatcctctatggtcctcatgaagatgaaagagatcgccgaggcatatctcgggtccaccatcaaaaacgccgtcgtcactgtaccagcttacttcaatgattcccagcgtcaagccacgaaagacgctggtgttattgctg

SEQ ID NO: 23291 - DNA, 1491 bp, Gossypium hirsutum
  Clone ID: GOSHI-09MAY01-C17548_1
cgggcgaccacgcgtcgaagcgtttgatcggtagaagattcatcaactcttcttttcttaaaagcaacaagaaattgtcgaccaaggagagttctgggcctggagacaagccaatgatcgtcgtcacatataaaggagaagagaagcaattcgctgctgaagaaatatcctctatggtcctcatgaagatgaaagagatcgccgaggcatatctcgggtccaccatcaaaaacgccgtcgtcactgtaccagcttacttcaatgattcccagcgtcaagccacgaaagacgctggtgttattgctggcctcaatgtcatgcgtataatcaacgagccaactgctgctgccattgcctacggacttgacaaaaaggcaggaagttctggagaaaagaatgttcttatttttgaccttggaggtgggactttcgatgtctcattgttgacaattgaagaaggaatcttcgaagtgaaagctactgctggagatacccatttgggaggtgaagattttgataatagaatggtgaatcattttgtgcaggagtttaagaggaagaacaaaaaggatattagcgggaacccaagagctttgagaaggctgagaacagccggtcgcggggctaagaggacgttatcttcaactgcccagactacaattgagattgattctctgtacgaggggattgatttctacacgacaattactcgagctcgatttgaggagttgaatatggatctgtttaggaaatgtatggagccggtagagaaatgcttgagagatgctaagatggacaaaagcaatgttcatgatgtggttcttgttggtgggtctactaggatcccaaaagttcagcaattgttgcaagacttcttcaacggtaaagagctctgtaagagcattaaccccgatgaagctgttgcttatggagctgctgtgcaagctgcaattttgagcggcgagggcaatgagaaggttcaagatttgctgcttttggatgtcaccccactttcccttggtttggaaactgcgggtggtgtcatgactgtcttgattccaagaaataccacaatcccaaccaaaaaggaacaagttttctccacctactctgataaccaacctggagttttgattcaggtttatgagggtgagagaacaagaaccaaggacaacaatttgcttgggaagtttgagctttctggtattcctccagctcctcgtggtgttcctcaaatcaatgtctgctttgacattgatgccaatggtattttgaatgtctctgccgaggataagaccactggacagaagaataagatcaccattactaatgataagggtagattatccaaggaagagattgagaagatggtgcaagaagcggagaaatacaagtcagaggatgaggaacacaagaagaaagttgaggccaagaatgctcttgaaaattacgcttataacatgagggacacgattaaggatgagaagatca

SEQ ID NO: 23292 - DNA, 363 bp, Gossypium hirsutum
  Clone ID: LIB3165-045-Q1-K1-H6
cggaatggactggccggaccgacccacgcgatcgcactaccttgctctcccccacatttcatttgatttgttttctgttatcgagtagaaattggctggcaaaaggcaaaggtccggcgattggtattgatctcggcaccacgtactcgtgcgttggtgtttgcaacatgatcgtgggagatcatagctaacggatcaggaacaagaccacgccgtcttacgtgggtttacagacactgagcgtttgatcggtgacgctgctaagaatcaggttgctatgaaccctaccaatactgttttcgatgctaagcgtttgatcggtagaagattcagcgactcttctgtccaaagcgacatgaaatt

SEQ ID NO: 23293 - DNA, 1217 bp, Gossypium hirsutum
  Clone ID: GOSHI-09MAY01-C17458_3
gtgcttcaaggtcataggatcgagcacccacatggaaactggttgatgcctcccccaacatcatctaattacgagaatcctatccaatcaagagatttaatgccaaaagcttcattgggacaagatcatgagaacggaaaatctagagaaggaagttgcaagctctttggtattcctctcattagtaattctgttgcatcagagcccaccgtctctcctattaatgccacgaacaaggcagcaagtcatgtggaacctgcacctaaccaaggtcgtacatttacgtttgatcaaaagtccgagcagccaaaattctcaccgttggcagagaatctgtctatttttaatgagcaggagaaatcgtttcagctgggtcagccccatgcacgggaggttcaaagcaaaccgcctactgcttcaactaggagttgtactaaggtcctcatgcaggggactgctcttggtaggtccgtggaccttaccaagttcaacaactatgatgagttgatcgctgaattggatcaattatttgagtttggaggtgaattaatggcccctcaaaagaactggcttgttgtttatactgatgatgagggtgatatgatgcttgttggcgatgatccttggcaggaattttgtgccatggtccgcaagattggtatctacactagggaagaggtccagaagatgaagccagggtcgttgggttcaaagtttgaggacattccagttcccacagaaggtacagttgcaaaagaagtgaactgtccatcagcatctagtgcaaagaattgttcagggtaactctataggtttttgatggagacatgaggagtggcatagtaaaatttctgtcctgttggaaagaacatgaactactcaagttaaaaactggtttgcgatgctattagcatcaagtttgcctcacaaatcagaatccagatataagcacgaatggtctgatccgattttggataatgttgtggcatcaatagcgtatggtgtttttcatttttatttttatatatacatataaatatgtatacccgaatctgaatttcatgcatggctccaccggccttgcttttgcaacccccccccccttcctatgtacatataagatgtttcaacccctttttcttcaagctgtgaatgtaagtagggttaatacagccacctaatgtgttttcaattaaaagtaatattttttttaagtc

SEQ ID NO: 23294 - DNA, 1337 bp, Gossypium hirsutum
  Clone ID: GOSHI-09MAY01-C17458_2
gcgttcggttgatgtagctcatggtgaaggagatgtggggggggggaatgaatgcctcccccaaccacttcttgttatgataattcaatccagtcaagagatttaatgccgaaacatcattggctcaagagcataagaatggaaaatctagtagaaggaaactgcaagctctttggtattcctgtgagaggtgcttctagcgcatcagagcctgcagtctctcatattagtgctttcgccaagcctgtaggacatatgcaagctgcattgcaccaggttcatgcacttgaatctgataaaaggtctgaaaattcaaacgcctccccgttggcagaggatctgtctgcttttaatgagcaggagaaatcggtgcagctgggtcagccccatgcacgggaggttcaaagcaaaccgcctactgcttcaactaggagttgtactaaggtcctcatgcaggggactgctcttggtaggtccgtggaccttaccaagttcaacaactacgatgagctgatcgctgaattggatcaattatttgagtttggtggtgaattaatggcccctcaaaagaactggcttgtcgtttatactgatgatgagggtgatatgatgcttgttggagatgatccctggcaggaattttgcaccatggttcgcaagatcggtatctacactagggaagaggttcagaagatgaagccggggtcattgaattcaaagggtgaggacaatctggtttctgcggaaggcctagatgcaaaagacgtgaaatgtacatcagcatctagtacagagaattgttaaagctcggctctaatatttccgggtaatataatgggcgtgtataattgcatataagtatcgaaccttgttttaaataggaagaagaaaactaatcagattgaacatatatcggccgcgtgcgtgagaacatccaccgtttttttatcgtttcagctttttggtgggaggtatatggagtgccgtagtaacattagacgattggttggttagaacttgatttagttccgagttgaaagtgactggtccacaagtttttctcagaaaccagaatccaatatagatggcagaaatggtattaatccaattttggacatgatgtggtggtagtagacgactagtagtatatggtatccatttaaatatatacataaatatgtatacctgcatttagattttcaagcatggccttttcatttgcaacctcaccccttttgtacaaagatgttttacttttaccccatcccctttcttgactttggaatgtaagtaaatacgccatctattatcttctatctcaagtaagcatttcattt

SEQ ID NO: 23295 - DNA, 1740 bp, Gossypium hirsutum
  Clone ID: GOSHI-09MAY01-C17458_1
cccacgcgtccgggagaattgcgtgttggtgtacgacgggcaatgaggcagcagggcaatgttccttcatcagtaatatcaagtcacagcatgcatcttggtgtgcttgcaacagcatggcatgccttcacgacaaaaaccattttcacggtgtactacaaacctaggacaagtccggctgagtttattgttccatttgatcagtacatggagtcggtgaagaacaattactcaatagggatgaggttcaaaatgagatttgaaggtgaagaagctcctgaacagaggtttactggaacaatagttggaatcgaagatgctgatcccaaaaggtggcaggattccaaatggagatgcctcaaggtgcgatgggatgagacgtctaccatacctcgtccagagagagtttctccttggaaaattgaacctgctttggctcctcctgccctaaatccccttccaatgcccaggccaaaaaggcctcgatctaatgcagtaccttcatcccctgattcctctgtacttactagggaaggttcatccaaagttactgtagacccttcgccggccagttcattttcaagggtcttgcaaggtcaagaattctcgaccttgagaggcacctttgctgagagtaatgagtctgacactgctgataggtcagtgatgtggccaccttcagtagatgatgagaagattgatgtggctcatgctgcaagaaaatttgggtcagagaattggatgccctctaggaggcatgaaccaacttacacagatttgctctcaggttttgggtcgaatgctgatacatcgcgcggatattatccttcctttgttgatcaaacttcagtagctggtaattcggggaaaaaacaattactaggtcaagaagggaagcttggctcttggtccctcctgccatctggtctctcactcaagttgtctgacagtagtaccaaccctcctttgcaaggttctgatgtgccttgtcaggcgcggggaaatggtagatttagtggttttggtgactaccctatacttgaaggtcgtaggattgaatgctcacgtggtaattggttgatgcctcccccaaccacttcttgttacgagaatcctatccagtcaagagatttaatgcccgaaagcttcattggctcaagagcatgagaacggaaaatctacgagaaggaaactgcaagctctttggtattcctctcataagtgcttctagcgcatcagagcctgcagtctctcatattagtgctttcgccaagcctgtaggacatatgcaagctgcattgcaccaggttcatgcacttgaatctgataaaaggtctgaaaattcaaacgcctcccagatggcagaggatgtttctgcttttaatgagcaggagaaaatagtgaagctgggtcagccccatgcacgggagtttcaaagcaaactgtctactgcttcaactaggagttgtactaaggttctcatgcaggggactgctcttggaaggtctgtggaccttaccaagttcaacaactatgatgagttgatcgctgaattggatcaattatttgagtttggaggggaattaatggcccctcaaaagaactggcctgttgtttatactgatgatgagggtgatatgatgctagatgtcgaagatcctctgtaagacactcatgttacttatcctttgttacccagatctataattgattctggttgtaaacttatttacatttgca

SEQ ID NO: 23296 - DNA, 411 bp, Gossypium hirsutum
  unsure (1)..(411): unsure at all n locations
  Clone ID: LIB3583-042-Q6-K7-E3
gtccgctcaagttgcgttgacagtaatggctaagccttctgtgcaaggttctgaggttccttatcaagctcgaggaaatggtagatttagtggttttggtgagtatcctgtgcttcaaggtcataggatcgagcaccctctttttttttggttgatgcctnccccacgtggtggggggggggggatcctattctttttngtagatttttgtttgtgggggggggggggctgttttttgntnaatggtgttttttgtgttggtgggtggtggttggttgttttttggtgtttttttggtttttttgttgttttttttgtttgtttgttgtgtttttttttgtttttggggtgtttttgttgttgggtgtttttttttttgggggggggtgttgtgtgggtgttttttttttt

SEQ ID NO: 23297 - DNA, 394 bp, Gossypium hirsutum
  unsure (1)..(394): unsure at all n locations
  Clone ID: uC-gsronu33B038a09b1
tttttttttttttttaaatgaaatgcttacttgagatagaagataatagatggcgtatttacttacattccaaagtcaagaaaggggatggggtaaaagtaaaacatctttgtacaaaaggggtgaggttgcaaatgaaaaggccatgcttgaaaatctaaatgcaaaaatgagttttaaaagtcaaaagtctgtttgccaaattcaatagtattccaatttattgattcagaactggacgctgataaactcagaaattggagcacatttgagttcggtgctatgttgtcttttattcagatgtaaactcaaaagaaaataataaatatatctcggccgtaacagaattaatcgattgccttgttacgaaaaatattacaagaacttggcttnt

SEQ ID NO: 23298 - DNA, 530 bp, Gossypium hirsutum
  Clone ID: GOSHI-09MAY01-C17608_1
cggacgcgtgggcgaaccaaaacagagccttcccctaaacgggcatagagagaaaccagagaaataccacccaaaacctgttcaaacaaagctaaaaaaccatcaaccatagtagaagaggcaaaagcttgagagaaacaagaccgtggagagtcagagtgaaccttttccattctcaagcttctgaaaaaaaaaaaaccttaatactatcgaatattgtcaaatccagttgttccagtccacaattgtcatcttctcaactggatctagggctttttcaacccaaaaacatggtgctcgataccgatgtcccttcttagccaacatatgggcagccttatttacttctcttgaaatgaagtgaaatcttaaggaaacccatttcagctgcaaagagtaagactctctcgcaagccctagcttctgccacaaaagcatcttggactccatcataagggtaagtacaggaccccataatctgacctttgttatttcgagccagaactgctgcaactgaagtgtatgtatct

SEQ ID NO: 23299 - DNA, 484 bp, Gossypium hirsutum
  Clone ID: GOSHI-09MAY01-C17638_2
aacaaacttacaaaatcgcgtgggcgtgtttgcgtttttggttttggcttacaagacggtagaagggagaaatggagtcgacggaatcatcttacgtgtcatcaccggaggcggcgagaaatagatctccgccgccgcctaaatcgccgacttctggaaatgtggagaagcctatgtatataagggttcttgtctccaatgctgcggctggttctgtaattggatagggtgggtcaacaattactgaatttcagtcaaaatcaggagctcgaattcagttgtcacgcaatcatgaaacattcccaggaacatcagacaggatcattatggtctctggagcgattgatgacatactcaaagctatggagcttatccttgcaaaattattcgatgagcctaatgttgaagataatgggaatggtggaccaagagcaaaagtcaggcttattgttcctaatagctcttgggggagtataattggaaa

SEQ ID NO: 23300 - DNA, 612 bp, Gossypium hirsutum
  Clone ID: GOSHI-09MAY01-C17638_1
cacttatgggcctccgcctagtgtcatgatctataacttgaggcccatccgcgagggaaattatgctgcgaactgaaagaaaaaaaaaactaaattggaggccccctttggtaaaaaaaaaagaggagaggagaagagaaaaatggagtcgacggagtcgtcttatgtgtcatcaccggaggctgcgaggaagagatctccgccgccgcctaaatcgccgacttctgagaatgcagagatgcctacatatgtcaggtttcttgtctccaatgctgcggctggttcagtaattggaaagggtggttcaacaattaccgaatttcagtccaaatcaggagctcgaatccagttgtcacgcagtcatgtttttttccctggaacatcagacaggatcattatggtctctggagcaattgatgatatactcaaagctgtggagcttatccttgcaaaattattggatgagcttaatatccgagataatgatgatgcggaacctacaacacaactgaggctgtttgtttccaatagctcttgtggcagccttcttgggaccggaggggcgaccttgccgtcctctgttggccgcgctccaactggcattaaaatatc

SEQ ID NO: 23301 - DNA, 426 bp, Gossypium hirsutum
  Clone ID: LIB3197-039-Q1-M1-D11
gttaaaggctgtcatgatgtatacgcttcttttgacaagtatgtagaggttgagcgccttgaaggtgataataaatatcatgccgaacaatatggcttgcaggatgctaagaagggtgtcttgtttattgacttccctccggtccttcagcttcagcttaagcgatttgaatatgattttatgcgggacactatggtcaagattaatgatcgctatgagttccctttgcaacttgaccttgaccgagatggtggaaaatacttatcaccagatgctgataggagagtcccgaaatctttatacgcttcacagtttggttacagtgtcctcgttcacagtggtggggtgcatggtggacattattatgcatttatcaggccgactctttctgatcaatggtataaatttgatgatgaaagagtaacg

SEQ ID NO: 23302 - DNA, 434 bp, Gossypium hirsutum
  unsure (1)..(434): unsure at all n locations
  Clone ID: LIB3149-020-Q1-K1-F10
cggaattacccgggctcagacccacagccgtccggcttatgtatgttccctttagcatacttggaccttgtatccgagatgggtggaataataccttatcaccgagatagctgatagagagaagtccagcaatctttataccgcttcacagtagtcctcagttcacagtaggtggggtgcatggtaggacanttattatgcatttatcagagccgacttctttctgatcaatggtataaatttgatgatgaaagagtaacgaaagaagatatgaaaagggcattggaggagcagtatggtggtgaagaagagttaccacagacaaatccaggattcaataatactccttttaaatttaccaaatactcaaatgcatacatgctggtgtatatacgtgaaagtgacaaagacaagataatatgtaatgtggatga

SEQ ID NO: 23303 - DNA, 674 bp, Gossypium hirsutum
  Clone ID: GOSHI-09MAY01-C117140_1
acagttgcacatgatccctcggccccccccccccgtggtttctcttccacatgatctgtcttgttaaataaataccgctttatctcctccccccctctcaaccctccatttctcgcttgcagtgccgcagcaacaatggctatgagaaaggcccccaaactgccacgggcggctgttctgaagcaaattctgaagagatgttcaagcttaggcaagaaacatgggtacggcgaagatggactccctcttgacgttcccaaaggtcatttcgccgtttatgttggcgaaaaccgaagcagatacattgtccctatcaccttcttgactcaccctgaattccaatgcttgcttcaacgagctgaagaagagtttggttttaaccacgatatgggccttaccatcccttgtgaagaagtcgtttttcgctctctcacttctatgcttcgataaacattgattaatgtcgtcaaacgatggggcttggcttggagaatgatggccaaaaagaagctttctagcttctctttttttaccgtccttctcttcacccctcttattaggcttactattttgaacccattaacttgggtttttttttttgtgcgtgtttaagtagttagtagtgaatctaacttagcccaagaattataaactttttctgggtttagatgaat

SEQ ID NO: 23304 - DNA, 629 bp, Gossypium hirsutum
  Clone ID: GOSHI-09MAY01-C17098_1
tttcaataatttggctctgtatttaacttctcactcccgcaggtttgtctttggtgttcaaatattccttcctctccgttctttgcgtttgcatcaaattttggaacttgggggagggggtttctttcttatgaacttgttttggctgagattcctgaaatgggtttttattttttttgatgaataatagattgaatctttatgcaataatttggctctgtctccatggagagtgataatcgtgatggcaagtccaaaatggactatgaagttatagaacagattggaagaggagctttcggagctgcttatcttgttcttcataaacttgagaaaaagaagtatgtgttgaagaagattcgcctggccaaacaaacagagaagttcaaacgtacagctcaccaagagatggaattgattgcaaaactaaataatccgtatattgttgagtacaaagatgcttgggttgataagggaaacagcatttgcattgtaaccagctactgtgaaggaggggacatggctgagcttattaagaaggcccgaggtatgcacttccccgaggagaaaatctgcaaatggatgactcaattactcttagccgtggactacctacactcgaaccgctc

SEQ ID NO: 23305 - DNA, 279 bp, Gossypium hirsutum
  Clone ID: LIB3083-060-Q1-L1-H5
tatgggcttccctttgtatcaaaaatcaaccttatggcttcaacaatgagatccaaccggtgcaatcgacgagaccttgctgatcttattaagaatgcccgaggtatgcactaccccgaggagaaaatctgcaaatggatgactcaattactcttacccgtggactacctacactcgaaccgcgttcttcatagggatctgaaatgttcaaatatattccttacaaaggacaatgacatccggcttggtgactttggacttgcgaaaatacttaacacg

SEQ ID NO: 23306 - DNA, 462 bp, Gossypium hirsutum
  Clone ID: uC-gsflmaxxa094h06b1
cttctactcaagaggagcagcagcttcactttgtggtgttttccttcatgtctcaaggccatatggcccctatgattgacattgctagattgctggcacagcgaggcgtgatcgtaaccatcattacaacgcctcaaaaggcagctaggttcaaggcaaccctcgatcgtgccatggaatcggggctcttcatccgtctacttgaggtacagtttccatgtgctgaatttggattgccagaagggtgcgagagcttcgacatgctgccttcctttagcttagcctggaatttctaccaagctaccgacgcgcttgaaacgccagttaaaaaactgttacctgagctaacgccaagccccaactgtatcctttctgatgtgttgtttgcgttcacactcgacattgccaaccagtttcagattccgaggatcgtgttccatggagtttgttgctttcgtcttg

SEQ ID NO: 23307 - DNA, 433 bp, Gossypium hirsutum
  Clone ID: uC-gsflmaxxa095h06b1
ccaagacagacctagagagctgacacatccaggcgagaccgtccccatcatgacaacgcctcaaaaggcatgtaggcacaaggcaaccctctaccgccccatagccaccgaggctaggacacccgactacgggaggcacaacaccatgcgccatacaccgcattgccagaacggagcgagagctacgacaagctgcctaccttgagctgacccaggcaagtctaccaaactacccacgcgcttgaaacgccagttaaaaaactgccacctgagctaacgccaagccccaactgaatcccctctgatgagtcgattgcgttcacactcgacattgccaaccagtttcagattccgaggatcgtgttccatggagctcgacgctcccgcctgattgactccataaattacgcatctccaacgtccttgaccacgt

SEQ ID NO: 23308 - DNA, 371 bp, Gossypium hirsutum
  Clone ID: GOSHI-09MAY01-C17348_1
gcgtctatttttgagagagacagagagagatatggggaaagacgaggaggagatgcgtggcgagatcgaggagcgactcatcaacgaagagtacaaaatttggaaaaagaacactcctttcctctacgatctcgtcattacccatgccctcgaatggccttctctcaccgtcgaatggctccccgaccgtgacgaacctgccggcaaagattactccgtccaaaagatgatcttgggtactcacacctctgaaaacgaacccaattacctcatgcttgctcaagtccagctccctctccaagattccgagaacgacgctcggcaatatgaccacgataggtctcacctcggtgggtttgggtgtgctagcg

SEQ ID NO: 23309 - DNA, 418 bp, Gossypium hirsutum
  Clone ID: GOSHI-09MAY01-C17368_1
cttttgaggtacatatcaagctgtctcaacctgtctgagaaaacaaagctgccattttacctcacacaggaagaaaataaaaacttaagcaaccaagcaagaaagaaagagcgatgaggcagggagcagcagcaaccaattaagatgatgaataggaacctaagggaatcgctggtgagcggcggcgggaggaataacagtaataacattccgccggcctcccttcatcaccgccgtggcaaaatttttaacgctggattgttccccagggattcagacgagaatttggatcttttctcaaagagtcgccgcagcctctccgtcgcctcctccgatgtgtcagtaaaacagggaagaacatcacatggatcagatgatctactttcttcgacagatggaggaaagcatgattatgact

SEQ ID NO: 23310 - DNA, 792 bp, Gossypium hirsutum
  Clone ID: GOSHI-09MAY01-C17328_1
cccacgcgtccggcctctcaaaacaaaccataaaaatcctatgatgctcttcttctctggtaaactttcagaattcaaagtaaaatattctcaatttcattactgaattatatatacatacatatatatatttgaaggtgtcgcaatggagagcaccgactcgtcgaccggctcacagcagccgaacctcccaccgggattccggttccaccccactgatgaggaactagtggtacactacctcaagaaaaaagctagctccgctcctttgccggttgcaattattgctgaggttgatttgtacaagtttgatccatgggaattgccagcgaaggcaacgtttggtgaacaagaatggtacttttttagtccgagagacaggaagtacccgaatggagcgagaccgaacagggcggctacctcgggttactggaaggcaaccgggacggataagccggtgttgacttcgggagggactcaaaaggttggtgtgaagaaggcactggttttctatggagggaagccccctaaagggatcaaaaccaattggatcatgcatgaatataggcttgctgataataagactaacaacaaaccccctggatgtgacttgggcaacaagaaaaactcactaaggcttgatgattgggtgttatgtcgaatctacaagaaaaacaacgcgaatagacctctggaacatgataaagatgactccatggatgacatgcttggtactgtaccaccttcgatatcaatcggtagccaacataatccagaattccacttcttaac

SEQ ID NO: 23311 - DNA, 456 bp, Gossypium hirsutum
  Clone ID: GOSHI-09MAY01-C17238_1
attggtttgagctggccagaacctccactaaatttgctatctcagcatgttttggacagaccagcttctttcaaatcagtcaaatcttttagagcaaccaagtcttttcgaacatatagttccttcaggtccataaatgacatggcatcaggaatagctttgcttgcagaacttgaccttgaatccctcatgaagcggaaaagaagatcttcatatgtaagaatagttagcaagcaaatggtaggaattttcctcactatttgggtccgtaggagtttgcgcaagcatattcagaatttgaaggtgtctactgttggtgttggtgtaatgggctacattggtaacaagggatctatatcagtcagcatgtccatatatcaaacacttttttgttttatatgcacccacctgacatcaggtgaaaaagatggagacgaactgaaaagaaatctgatg

SEQ ID NO: 23312 - DNA, 986 bp, Gossypium hirsutum
  Clone ID: GOSHI-09MAY01-C10908_1
ccctcgcccgccctttctttcataccttctctactttgccttttggttctctgtttatttacggctataccattcagctaatgatagcttactgtgatcggaaactcgagagccgtcgctctgtccccgctctcggtttccctcggtttaggtttttccgccaccggcgattgcggtaacccttgtctcactctccaacctaaaaaagcagcgaagagaagttttatttatttatttatttatttaagatttgaatcactgtataatataccacggtcgatcatttcaatccgatgaggaattcaaaaaataaccgtaaggaaccggagaagagccggagggtaaggttatctgaaagggcgtcgtcgtttcacgggagaatccagacgatggaaccggtggagctgaggcggccgaagacgcttcccgacctgcttccagagaggtctacttcactctcatccgatgcgaggccgccgaagttgacgaagctgctattgaacgtgacgattcaagggagcctcggagccgtgcaagtggtgatgtcaccggaaaaaactgtcggtgacgtaataacggtatccgtcaggcagtactcgaaggaaggtaggcgaccgatgctgccgccaacggacgccgcgctattcgatctccattattctcaattcagcttagaaagtttgggaagggaagagaagctgatcgcgttgggatcaagaaatttcttcttgtgcacaaaaacggcggcatcgaaggacggccagaataaaacggcgtcgtgctcaaatgaagcggaaagtgttacaaaaagctcgaaaccttggttcaaattcatggatttcttgttttagaagcattttttatgggtattgtattttgtaaaaaaaattaataatttttttaaaaaaattagattatggaacatgcaaatttatgaaaaattgcatgtagggtattttagaatggttagggaaggaaagagagag

SEQ ID NO: 23313 - DNA, 358 bp, Gossypium hirsutum
  Clone ID: LIB3166-032-P1-K1-E2
cccacgcgtccgcccacgcgtccgccctcgcgtccgcccacgcgtccgggatggcaacacgaaaatcaattacatgaacatgttcgacgctcaagtggacgctgttcgtgcagcattggatgccatggggtttaagaacgtcgaaatcgtggttgccgagacaggttggccgtacaaaggagacagcgatgaagtaggagcaagcattgagaacgccaaggcttacaatggaaacttgattgcgcaccttcgggcaatggtggggactccattgatgccggagaattaggccttcacatatttatttgcttctttcgattagtacttgtaatccgtgccatttttcgaaagttttttt

SEQ ID NO: 23314 - DNA, 169 bp, Gossypium hirsutum
  Clone ID: LIB3493-041-P1-M1-B8
cttcgcttaccggagcgatccaaggcctgaaacgctggcgtgctgcttggtccaacccaattcggggcgtttggatggcaacacgaaaatcaattacatgaacatgttcgacgctcaggtggacgctgttcgttctgcattggatgccatggggtttaagatcgtttaa

SEQ ID NO: 23315 - DNA, 834 bp, Gossypium hirsutum
  Clone ID: GOSHI-09MAY01-C10898_1
gtttttcgtccgcagccaaataggcacataaagggagggagtgatagagagaggggtttttatgggacacctcacacgatctgtggaggagaaaaaagagaaggggggaatcatcatcaaatatgccatcaggttctaagaagagaaaagcggctaagaaaaagagggaacaagcaaccaacaacaccaattcatcaactaacaacaacccacatggaaatggggatcaaagaagccaagatgaaagagaaagtgacggtggcgatgttggttcccccgcatctcagggcgaccccaatcaccagcatccattcaatgagaaggaagaagaaggaaaaagaggggcttcacctgttcaatcgcatgtaactgaggacaagtctgtggaagaagccaatagagatgcagaaagctctgagatatcgagatcagatgatgttttctctgttaaagttgaaaatgagtcgggacctaaggaggatcttgagagcacgcttgtcgccattcggcacattaagcatgagaagagctctagtagcagcagtagcaggagcagttcagatgatgaatctcaagcctctcagaagaattctaaggaagaagcctataattttgtttctgaagcgactgcatatggcaatgaggataagctggctactgttaaatctgaagaagtcctgaagttggttgagaatgaagcagtcggaaatgttgatagtaattctgcagttgaaactgctaacgttgacaatttggtaaaaagtgggttatatgtgccagaggaactggatcatgctgcagaagtttctgcaaacaaatcagtgtctgttgtag

SEQ ID NO: 23316 - DNA, 347 bp, Gossypium hirsutum
  unsure (1)..(347): unsure at all n locations
  Clone ID: LIB3584-011-P1-K1-E11
cccggttcgacccagctncctcntgtatcaatattgtgggtgcagcgggaacgggcagggggttttagtttttttttcaaatgttacatcatttaatcatgcatactttttttgtgttttgagagatttcaagagcatatcccacccccatagtgaagcatgccttttatgatctttgtgacagattagatctctataatgggggggggggggtttttttttttctttccattgtcatactggtctttaattgtagtttgtttttttcatttatgttttgttttggtttaacatgttaatgatttgtatatatacctagttttgatatggatatattcaattttttt

SEQ ID NO: 23317 - DNA, 217 bp, Gossypium hirsutum
  Clone ID: LIB3166-031-P1-K1-B1
caagagcgtatcccacccccatagtgaagcatgccttttatgatctttgtgacgggttttttctctataatatcatatagtaatatatatatatatagctctctccattgacatactggtcttcaattgtagttagttttttttcatttatgtttcggattgacaagttaatgattttgtatatatacctagttaccatatggaaatatgcaatttt

SEQ ID NO: 23318 - DNA, 1531 bp, Gossypium hirsutum
  Clone ID: GOSHI-09MAY01-C10868_1
caaatgataaaataggatttgatttcacttctttctagtttcgtgtaccttatgttttggttttgagtcttcttcttccccccggccgtgtggttcgccttggcattgctcccttttcttttctggtctccggtttaaggtttctctttcaaagatttggttttttttttcctttcctcctttaaataccaacttgcattttgcttacatttcgtggttgtttcttcaagcttgttacagatgcttatggagggaggagactaagaggagacacccatgttgctaaggtgatcttgaggttccaatatgagagaagtgcctaaacagacagtgatggctataaagtcttaccaaaaccaggctcagttgttggttaagaactacttatttgcagatcccttcattccatacacttccatccttggtggcattcttgcttgcaaagtggcatatgatcttacccagttaatcagcaatttttacagcaagacttaccctggtcttactaaaattcaacgagtagagtggaacaatcgtggtatctctactgttcatgccattttcatttctgctttgtcgttgtacttggttttctggtcgaatctcttttctgatgaacttgctggtcttcttgtcttccgaagctcaccactttctacttttggattaggggtttctgttggatacttcgtttcggatcttgcaatgattttatggctatatccctctttaggtggaatagaatatgttattcatcacagtctttcaggaattgcagtggcgtattcaatgtttactggcgaagcacagctttatacatacatggttcttatatctgaggtgacaactccggagattaacataagatggtatcttgatacagctggtatgaagaggtccacagcatatctcatcaatggaattgtcatctttttggcttggctggttgcaagagttctgctattcggctacatgttctaccatgtgtacttgcattatacacaggtgatcaagatgcatatctttggctatatcttggttttcggtgtgccggcagcattagccaccatgaacttgatgtggtttgggaagattattaaaggtgtgctgaagactttagcaaagaggcagtgatgaaatatcgccagtgaatgcctaataaatcttcaggtatcattctgcccgagacttgtacatttttctactactgctgccatgtaaaaaatcatagagaaaaaaaagtcaaaatccaagtactaaagaaaaagaaaatcgagtctgatccggtttttccagttgatggagatagaatcgtcgttgtaaattgttccgatctaatatatatttttggtaatcatttctgttgtactgatatgtatacctacaccatatctttcatttacttctttcatgagcacattttactctcaaaatttgaattaaagattgttatatttgaacatttcttgattatttgaacaaaaaaaaaaaaaaaaaaaaaaaaaaaaaaataaaataatttaaaaaataa

SEQ ID NO: 23319 - DNA, 416 bp, Gossypium hirsutum
  unsure (1)..(416): unsure at all n locations
  Clone ID: LIB3048-026-Q1-L1-G7
attatcttcctctcaatcttgcaaggataagattgcaatgggctaaactccacactctccactctgtaaagtgccccaaaccaaccaaataagctgaacaccccaaacgtctctcattagccaatctcattacatgacccatcaccattcacccccaacacctatattctccaatccacattccacactccacactactgcgtctttccttcttctgctgctgcttcttttgcttgacttttttaatacctttcaattattttggttattattgagttggtgaagattccaaaatactcttcccactctgattaaaccttacggaaggaagagactaagaggagacacccatgttgctaaagtgatctngagattccaatatgagagaagtgcctaacagacagtgatggctataa

SEQ ID NO: 23320 - DNA, 525 bp, Gossypium hirsutum
  Clone ID: GOSHI-09MAY01-C110830_1
atgggtgacaagaatcaatcttttgtggttaagtttttgcagagtaatgatagccagctacgcacagcaactgtctggacaatagtgaatcttacttgtccatcgagtcctggtgcaccttgcaggcttgaaaagctgcgcaatgctgggatagtttctcaaataaagaatatggttaatgatccttgtgttgatgttaagctccgtgtgagaactgtgctagggcaatctatggctttcggggacaattaagcatgtctgtgttcattcattactcggaatacaaaaggcaagagattttgaagcagttagtttttcagtcttctttaccgcttttcttctgtaagatattttcaaggctttctccagtggcttgtaaaaaaatggtgagttttggttgatttttaattgctttgattgaaaatggtcattgaagtgggcctacaatttcgccatcataaaacattaccctatcaaactgacaaagtcctcatttggaggacatcattcaattatggctaaacc

SEQ ID NO: 23321 - DNA, 451 bp, Gossypium hirsutum
  unsure (1)..(451): unsure at all n locations
  Clone ID: uC-gsronu33B036d09b1
gctacgcacagcaactgtctggacaatagtgaatcttacttgtccatcgagtcctggtgcaccttgcaggcttgaaaagctgcgcaatgctgggatagtttctcaaataaagaatatggttaatgatccttgtgttgatgttaagctccgtgtgagaactgtgctagggcaatctatggctttcggggacaattaagcatgtctgtgttcattcattactcggaatacaaaaggcaagagattttgaagcagttagtttttcagtcttctttaccgcttttcttctgtaagatattttcaaggctttctccagtggcttgtaaaaaaatggtgagttttggttgatttttaattgctttgattgaaaatggtcaaannaaaaaaaaatatttaaaataatataaaattaaaacaaaaaaaaaattccttaaaaaaaaaaaaggggcggccg

SEQ ID NO: 23322 - DNA, 1039 bp, Gossypium hirsutum
  Clone ID: GOSHI-09MAY01-C110800_1
cgtggaataatgggttccgggcgccgttttcagactacggtatcatgagctgataccgaattcgcacgaggggattttcttttgcattgtgttagaagatggtagttgttgattgaaaaggaaaagacaaataacaaataaagtttttaaattctgaataacgtttcaaattgccactgatctgatggatgtcatttcgaggtgatgtattgcacattgttgtgaatcttagaatatgaataggagtcattattgttttcccttgagagggagtactaaacagtaccccgtgaggcctctagtactgcactaggattgtaaatgtcagcttatttgaatttcttttcccttatggttttcaatatgcaaggaaatacattagctgatgaatatattttgataattatgttctaaataagtgttcctttttttgacaataagttttttagcgtacaacttttgctactggtattctggttctttgtttgattgcctgccatctatttgttctttcagaatattactttcaaattcattatcgtcacacgaaattttacgtcattttcgttcatgagcatggtttcttcgctcgcggcgggaaaatggcagcaaagtatataattgcttctgttgcgggatcatttgccattgcttatgtatctgatctgcttgtttctgatactaagatttttggagggaccacgccttccactgtttcaaacaagggatggtgggaagaaactgacaaaaaatttcaggcttggccccgcacagctggtcctccagtcgtgatgaatcccatcagccgccagaatttcatcgtgaagtctggttctgaatcttgaagacctaagtcttgcatttggttttgtcaatgatttcagttttaattgctactccctgtgaataaattctggtgccagactttgtttagtctggctttgcatttggaggcattctttgttctttttacaatttttgactcaatctgtctagaggacgatattgttcatgcttgatctaataaatttctctgaag

SEQ ID NO: 23323 - DNA, 652 bp, Gossypium hirsutum
  Clone ID: GOSHI-09MAY01-C110810_1
ctgttgttggtgactttgggttggctaaacttatggactacaaggatacccatgtaactactgctgtacgtggcacaattggacatattgctcctgagtatctctctactggaaaatcttcagagaaaactgatgtttttgggtatggtatcatgcttttggagcttataactggacagcgggcctttgatcttgctcgtcttgcaaatgatgatgatgtcatgttgcttgattgggtcaaaggacttctgaaggagaagaagctggaattgctagttgatcctgatctgcaaaccaattatgtagaaactgaggtagagcagttaatccaggttgctctgctatgcacacaaggttccccaatggaccggccaaagatgtcggaagtggttagaatgctggaaggtgatgggttggccgagagatgggatgagtggcagaaagttgaagttctacggcaggaggttgaacttgcccctcatcctaattctgattggatcgtggactcaactgacaatctgcatgctgttgagttatccggtccaaggtgactacggcataattacagtaaaggaaagtttttactagttattttttaagattaactttttttttttttgttaatttgatgaccatatcctgatttatgtct

SEQ ID NO: 23324 - DNA, 523 bp, Gossypium hirsutum
  Clone ID: uC-gsronu33B017f01b1
ggcctgttccaaggtaatcctgaaattgaaagtgcatgtactaaagatccactcaattccattcaatgctttaaagcacacagccctcctgaatttgcctttcaatctttaggggggttgaatgtatcagccacattctcaatgcccgaagcccttctggctacagaatgtcaagagccctttgggggtatgctagtagagggtgccggaagttctaaagacttgagaaacttatgcccttcagcagcggaagccgccgtagatgagacaccacctccatattctgatctggctctcaagcaggccacaactacttatactcgatcaacacccaatttaacagctaggcaggaaaaaacaagtgtgacggtttaggctacatacagagaagatataattagatttcggatctccttaacttctgtatggtagaactgaaagaggaaagtgccaaaaagcttgaagctgatgtgggtacttttgaaacaagtttttgatgaggataatgatggggtttgatagc

SEQ ID NO: 23325 - DNA, 398 bp, Gossypium hirsutum
  Clone ID: uC-gsronu33B018a02b1
gcttttctcgccagtagtccgctcccagttactggtggttcggtatcatggccaagcagtttgaaaggttccaatcaacagaactcaccaaaatccaaacccttggagcctcaaggtgaaaaagatgatagtacacagggaagcaatggacaagctttggtggaagattggttgctgggagggaggacatcgagccaagaacttttccctcagctgaatgggctttcaccaaacatggatgaaagggaagaagtaatgagatgccaaagagaagagagtgctgacatgcctacttttcgtggcctgtgccaaggggggttgaatgtatcagccacattctcaatgcccgaagcccttctggctacagaatgtcaagagccctttgggggtatgctagt

SEQ ID NO: 23326 - DNA, 528 bp, Gossypium hirsutum
  Clone ID: GOSHI-09MAY01-C10488_1
cccacgcgtccgcccacgcgtccggcaaattatcatctctttccttaaacacatcgtctttgttaagctcttcttcatcttctccaaaaacaagggtcaccatggctatgattccagtacgtttcaaattgccttataaagatcaaaattgtgactgcaaatgcattggttggcaatcgcgtcaagctgagattgggaataaaaatggaggttttaatggacatcaatggcgtctttggacattcactagtgttcatccaagacccttctccatgaaagcattgcccaaagaaaattcacacctgatctctttggattcttattttcgaaagcttcaagaagattcaaataagggttcttccatggtgttggttgatagaagtggagaaagtagcataaaggaggggcttgctggaatctctggaagcctatcttggtaaacttgatgaagattcaaattctaaaatccaagagaaaaccccggaagacaaccaaaccgtacttcattttctgtcggcgaagatgcga

SEQ ID NO: 23327 - DNA, 475 bp, Gossypium hirsutum
  Clone ID: GOSHI-09MAY01-C10438_1
cttttctgtgtaattataaggaaatctacatgaacttcagtcattgttaggcaagttgagcgagatgcgatacgtgttgctctgcaggcaacaatgaaggcaaggtccgatggaaaagaggttatggtggacatccaatattttaaaactaacaatccactgctgttaatcagcttctatgagcaacatcttaagtataaccctccatcttgatcacctaggcgtatttagtgtattgatgaagctgaaggccgccatactgattttgtttgtgtatgcattgttgtaactctattacattaatcgcagaagattgtgcaggataagcaagagctctcattttcaagtgccaagctgactgatataacgatagctctctcttataactaccattagtgtgccttaattggacatttagcatggttatgattaccattagtgttgcttaattggacatttaacgttgttataacta

SEQ ID NO: 23328 - DNA, 380 bp, Gossypium hirsutum
  Clone ID: LIB3166-026-P1-K1-A12
ttctttttggcttttggaatatatttttaccttcaaataactttttttttcactccctagaattttatttaggagaaattgataatgctatcacttgtagcccctaacatagctagtaattttaagacatgaaccgctagaatgctcaagtttttagcttgctgatcttagatgtgagtctgttgttggagtctttgagaatcctcaaattaatgttgcactttcttgaagttcatattgtcaatgataaatttagttcatcacattttgacagctccgatggaaaagaggttatggtggacatccaatattttaaaactaacaatccactgctgttaatcagcttctatgagcaacatcttaagtataaccctccatct

SEQ ID NO: 23329 - DNA, 712 bp, Gossypium hirsutum
  Clone ID: GOSHI-09MAY01-C10428_2
cccacgcgtccgcacagtcatctctcatcgccaaacaagcctcgtctttctcttccttctattttcccccctccccgctcccctccctcctatgccctccaagtttccgacagagcaggaaatcaaataaggatcaacatttgaagcttgtttcaaagcaacactgatgagacgacagggacaatatgcagactctggtggcaatgcatatgtacctgctcagatgcagcatatgcctgcacaaaggatggagatcaagtctggtcaatttcaaggacaactagaagcatttactcccgaaagggatcaaccatatcgaactccaaaatcagatggccagtggaggtgggaaagagatggatcaaaagtgtcaaaccaaatgacacccaaaatgttcaatgaaggccctggggcggatggtgctcttttagagcctgtggcaggccaagtcatgttgccttttagagtgtcaggccaagggactgatggatcaagaacttatttccagggccagaggccagatcccaacctatctttagaaaaacaaaatgctgatctcagatctcgaccccatgatgaaaatatggaagttggctatgagcacaatcttttgccaccaactttggaaggtcttgagaagaaattccatgatgacataatgaagcttgctaaagaacagaacgatgctgaagatgccaaaatagtagacata

SEQ ID NO: 23330 - DNA, 1007 bp, Gossypium hirsutum
  Clone ID: GOSHI-09MAY01-C10428_1
gctttcgcccacgcgtccgttcctattgcggtgggaggtgtccgacagagcaggaaaatcaaataaggatcaacatttgaagcttgtttcaaagcaacactgatgagacgacagggacaatatgcagactctggtggcaatgcatatgtatctgctcagatgcagcatatgcctgcacaaaggatggggagtgaagtctggtcaatttcaaggacaactagaagcatttactcccgaaagggatcaaccatatcgaactccaaaatcagatggccagtggaggtgggaaagagatggatcaaaagtgtcaaaccaaatgacacccaaaatgttcaatgaagaacctgatgtgaaatttgttcttttagagcctgtggcaggccaagtcatgttgccttttagagtgtcaggccaagggactgatggatcaagaacttatttccagggccagaggccagatcccaacctatctttagaaaaacaaaatgctgatctcagatctcgaccccatgatgaaaatatggaagttggctatgagcacaatcttttgccaccaactttggaaggtcttgagaggaggggccgtgatgacataatgaagcttgctaaagaacagaacgatgctgaagatgccaaaaatagtagacatagagagaaaataaatgcaatcaatgggcagtatcaggaacagctaacagcacttcgagcacggcatgccaatcgcagagatgagttcctacgtaaggaatctcttgtacgccaacaacaataccagcaggcaatgatggactattatcctcatagcaacatggctccagctgatagcttgccaaccggtaataatcctcatggttacggtagcggtgcgggttccggtgttgttggagatggacatcgaaggtataattttgataactttgacttctacagagagaggtctcgatatctttggggctgctagagatcaagggtttgaacctaaaggttcatacccggggggggcggtg

SEQ ID NO: 23331 - DNA, 415 bp, Gossypium hirsutum
  Clone ID: LIB3166-025-P1-K1-H12
cggaacggaagggccgggccgaacccaccggtcttgggtcgcatatgtccaagattccgtacagagcaggaaatcaaataaggatgaacatttgaagcttgtttcaaagcaacagtgatgagacgacagggacaatatgcagactctggtggcaatgcatatgtacctgctcagatgcagcatatgcctgcacaaaggatggagatcaagtctggtcaatttcaaggacaactagaagcatttactcctgaaagggatcaaccatatcgaactccaaaatcagatggccagtggaggtgggaaagagatggatcaaaagtgtcaaaccaaataacacccaaaatgttcaatgaaggcaagattgtctttcggacactcttcctctctctacatgccaagggactgatggatcaag

SEQ ID NO: 23332 - DNA, 480 bp, Gossypium hirsutum
  Clone ID: GOSHI-09MAY01-C10778_5
ccaatatccatcattttttcttgctgggtatatctcatatctctcttagtaatttgcggtggagggccaggctgcagcaatggagctgttctacttcgtcgtgttcggggcattggcagcggtggtggccgcattagagctaagcaagaccagcaaggaccgaaccaacacgtccccggctttcaattccttcaagaacaattaccttcttgtctactctctcatgatggctggagactggctgcagggtccatatgtttactatctgtacagtacatatggctttggaaaaggggacatcggacagctttttattgctggttttggctcctccatgttgtttgggacaattgttggatctctagctgacaaacagggccggaggagggcatgcgttacttactgcataacttacatacttagctgcatcaccaagcattctcctgaatacaaagttttgatgataggtcgtgttttgga

SEQ ID NO: 23333 - DNA, 628 bp, Gossypium hirsutum
  Clone ID: GOSHI-09MAY01-C10778_2
ctcgcagaagcccacgcggccgagaaaatttgaccgtgagtagtagtattaggcagaagaaacaatggaactgttctatttcatggtgttcggtgcattgggagcagtggttgcagcattagagctaagcaagaacagcaaagatcgaatcaacacttcccctgctttcaattcctttaagaacaattacctcgttgtttactctctcatgatggctggagactggctgcagggtccatatgtttactatctttacagtacatatggctttggaaaaggggagattggacagctttttattgctggttttggatcttccatgttgtttggcacaattgttggatctctagctgacaaacagggccgaaggagggcatgtgttacttactgcataacttacatacttagttgcatcaccaagcactctcctcaatacaaaattttgatgataggtcgtgttttgggaggtatcgccacctcccttctgttttcagcatttgagtcttggcttgttgctgaacataataagaagggctttgagcaacaatggttgtcactaacattttctaaggcaatatttcttggcaatggtcttgttgccattttgtctggggtgttcgggaaccta

SEQ ID NO: 23334 - DNA, 1789 bp, Gossypium hirsutum
  Clone ID: GOSHI-09MAY01-C10778_1
ctctcccgagaagtaaacagaaaagggaagaattttggtgaccggtgattcgtgagtattgtaaacagcagcagcagcaatggagctgttctacttcgtggtgttcggggcattgggagcggtggtggcagcattagagctaagcaagaacagcaaagatcgaatcaacacatcctctgctttcaattccttcaagaacaattatcttgtcgtttattctctcatgatggctggagactggctgcagggtccgtatgtttactatctttacagtacatatgggttcggaaaaggtgaaattggacaactttttattgccggttttgggtcctctatgttgttcgggacaattgtcggatctttagcagacaaacagggccgaaggagggcgtgtgttacttactgcataacttacatacttagttgcataacgaaacattctcctcaatacaaaattttgatggtaggtcgggttctgggaggtatcgccacttctcttctcttttcggcattcgagtcatggcttgttgcagaacctgataaaaggggcttcgagcaacaatggttatctttaacattttcgaaggcaatatttcttggtaatggtcttgttgccattttggctgggttgtttggaaacgtgcttgttgattcattatcccttggacctgtggctccttttgatgctgctgcgatctttcttgccattgggatggccattattttatcatcatggaccgaaaatttcggagatccttcagaaaataaggacttgctgacccagttcaggggcgctgctgtagcaatagcttcggatgaaaaaattgctttgctgggtgccatacagtctctgttcgaaggttcaatgtacacatttgtgttcctttggacacctgctttgagccccaacgacgaagagatccctcacgggttcatattcgccactttcatgttggcttcgatgttgggaacctcccttgcatctcggttgatggctcgatcatcacctagggtagaaagctacatgcaaatcgtttttgtgatttcctcagcctctctcacgcttccgattataaccaatttcttggtagcaccttcgaaagtgaaaggcgaaagcatctcattcgcaggttgtcttcaacttcttggtttctgtacttttgaggcttgcgtagggatattctggccatcaattatgaaaatgagatcccaatacatcccggaggaggctcggagcaccatcatgaactttttccgcattcctctcaacatcttcgtctgcattgtgctatacaatgtcgacgcattccccatcaccgttatgttcggtatgtgctcgatttttctccttgttgcatccatcttgcaaagacggctgatggcaatttcagacaaaccaaagatggaaaattggacagcaatgaaggaaagggaccctgaagctgaagcattaaatgattgaaaaaggcaaccaaggattgaattgaaagcaacagcataattcattggggttatattttatgtttgattcttacagtagtgaaagtaaatgtgggttaaaacataggttactttgagtatttatgattcgtttatggggctgtctgttaatcagcaccaatagttaacccctttttttttcttcctctgttaaagtagggacactattatgaaatatcccaccttttctttttcctttttttatgagaattattattattctttcccaaaaactgggctataatttgtattagtttttcctccatataatatgtttctctttagtgaa

SEQ ID NO: 23335 - DNA, 653 bp, Gossypium hirsutum
  unsure (1)..(653): unsure at all n locations
  Clone ID: LIB3825-020-Q1-K6-G8
nncgtccgctcccgnanaagtaaacagnaaaagngaagaattttggtgaccggtgattcgtgagtattgtaaacagcagcagcagcaatggagctgttctacttcgtggtgttcggggcattgggagcggtggtggcagcattagagctaagcaagaacagcaaagatcgaatcaacacatcctctgctttcaattccttcaagaacaattatcttgtcgtttattctctcatgatggctggagactggctgcagggtccgtatgtttactatctttacagtacatatgggttcggaaaaggtgaaattggacaactttttattgccggttttgggtcctctatgttgttcgggacaattgtcggatctttagcagacaaacagggccgaaggagggcgtgtgttacttactgcataacttacatacttagttgcataacgaaacattctcctcaatacaaaattttgatggtaggtcgggttttgggaggtatcgccacttctcttctcttttcggcattcgagtcatggcttgttgcagaacataataaagtgagtcgtcactttcttgctctttactcttcgatgcatatcaagctagatttacggtttatgttattcttgacgagtctgtttttgctttgaatctttgc

SEQ ID NO: 23336 - DNA, 549 bp, Gossypium hirsutum
  Clone ID: LIB3582-032-P1-K1-A3
aatttacatcattgatgcttttgctactgggcccttcactctttatttgtagtattctagatgctatgtgctgcttcctgtctggttgtttcacaacttccatcctgccatagtttgaaaagaaaatgttaaaaaattctagtgtatatccatcatattgcacatgatgcaagggaaaatgccaactttgcttcctgaattttccatattttcccgaagatagttacgcatgaaccatctacatctgcttagccacattcttctaagagccttatctgttacagttgatgtttatatctattttaaatataatcttatgctggctatactgattcttcttctattcattgcagaggggctttgagcaacaatggttgtcactaacattttcaaaggcaatatttcttgggaacggactaattgccattttgtctgggctgtttgggaacctacttgatgattcattatcccttggacctgaggctccttttgatgctgatgcatgctttcttgctattgagatggccattatttattcatcatggactg

SEQ ID NO: 23337 - DNA, 354 bp, Gossypium hirsutum
  Clone ID: LIB3166-030-P1-K1-B9
gtttggaaacgtgctcgttgattcattatcccttggacctgtggctccgggggatgctgctgtagcaatagcttcggatgaaaaaattgctttgctgggtgcaatacagtctctgttcgaaggttcaatgtacacatttgtgttcctttggacacctgctttgagccccaacgaagaagagatccctcacggtttcattttcgccactttcatgttggcttcgatgatgggaagctcccttgcatctcgtttgatggctcgatcatcacctaaggtagaaagctacatgcaaatcgcttttgagatttcctcagcctctctcacgctttcgaatataaccaatttcttggtagc

SEQ ID NO: 23338 - DNA, 771 bp, Gossypium hirsutum
  Clone ID: GOSHI-09MAY01-C10718_1
aaagacccggggggaccaacgcgtccgcccacgcgtccgcccacgcgtccttcttctcgtccgcccacgcgtccgcggacgccgggatttccgatctccgcagagtgcttagcattcagctgctattagttgggtggctgcaaggaactgatctcaggcatggagaatgacaaggagctagaacaaatagatgtacaggagtctgaaaaatccatgccgtcatctgaagaggaggatgcagctataaggaaaaaatatggtgggattaagcctaagaaaccaccactcatttctaaggaccacgaacgtgcatacttggactctgctgattgggcacttggaaagcaaggtgttgagaagcccaaaggaccacttgaagccctccggcccaaattgcagcccacacaacaacaaacacgatacaggaagtctccttgtgccccatctgatggtgaagttggagggagtgctcaaccggaggatgaaaccaccaacgaatgagaaactgctgccaatcttctaaacttgtgaggactattgatagttattctaatacctcgacaggtaatgagtaattttcaattgttcccatgaataaagcttgttaaagatgctttgatcttagtcaagatttacaagttacaacattaatgcagtcgactatattatgggaactgaaatgtatgttgtgccaatgtttttcctgatgtggaacatacaagtaaatcacttataaaatgatttttcgctctactagattcccatttggct

SEQ ID NO: 23339 - DNA, 800 bp, Gossypium hirsutum
  Clone ID: GOSHI-09MAY01-C10728_1
ctttgccctattttccctcacccaaaccggttttatcctgatgtgttaaaccctgattctccccatccccactaatatctccttgatggctttgagggcggcggcgacgagagcgatgttcgctggggcggctccccagggattcaggcgcatgtgttcaacagctacggctaattcctttatgccgcctccaattacggcgatgggcaacggcgagggaacccctggtcgagagcaagcgcctccaagtaccaacctctttgtctctgggcttaacaagcgcactaattcggagaaacttcgagaagccttttctcagttcggacgtgtaattgatgccagagtagtgactgatcgtgtatcaggatattctaaagggtttggtttcgtaagatatgccactatagaggaagctgagaaaggaagagtgggaatggatggcaagttcctcgaaggttgggttatatttgcagagtatgcaagacctcggccagaacgaactccgcctccgagcaacatggctaattcaaatggctataattcctatggccgtgaataacttagatctgaaacatgatttgtcattttttattttaatcagaggcgggtttccaacaggtcgacctatcatctccttagcagaagaaagaaattaattatgaattttgtaatgtgagacttgaatgcaatacgaatgtgatgaactgaggtctattattcaagaattataggaaaaacaggagcagatgttgaattttttcagtggctgctaagaactcattgtatgattatttggtgtt

SEQ ID NO: 23340 - DNA, 263 bp, Gossypium hirsutum
  Clone ID: LIB3166-051-P1-K1-H5
attaaaccctgattctccccatccccactaatatctccttgatggctttaatgacgacgtgcacgttagcaatcttgcgctgccacaactccccagggattcatgcgcatgtgttcaacagctacggctaatacctttatgccgccgacaattactgcgatggtcaacggctagggaacccctggtagagagcaagcgccttcaagtaccaacctctttggctactggcttaacaagcgcactcagtcatgtgacactccaag

SEQ ID NO: 23341 - DNA, 946 bp, Gossypium hirsutum
  Clone ID: GOSHI-09MAY01-C10698_1
gggcaatatctccgacaagtctcattcatatcagtgtgagaccgtgcatatttatttgtggttcagagaagaaagaagaatggcagagagtaacggtttggtattgggcacctgggcaagcccgttcgtgctgagggtgaagattgcacttcacctcaaatctgtcaactacgagaaccatgaggaaaatttgccggaatccaaaagcgaccttcttctcaaatctaaccctgtttataagaaagtcccagtcctcatccatggtcataatcccatctgtgagtctctaatcatcgttgagtacatcgacgaggtttggaccacctctgcttcttccatcctcccttctgatgcctatgaacgcgcccagtcccgattttgggcggcctatgtcgaagataagttttccactgccttaagaagagtgttgtttggtgctacagaggaagataaaagggcagcaatggccgaagtctcagaagggatggtgctgttggaggaagtctttgtgaaattgagcaaagggaaagctttctttggtggggaaaatattgggttcgtggacatagtgttcggtagcttgttggcgtggattgaagtgatcgagaaattgagtgagatgaagctgatttccgaagccaaaacgcccgggttggtgcagtgggcggattgcccctcccccccgggggccgtgaaggatgtttcacccgacgtcgacaagcttgtggaatatgcgttgaagcttggggccagggtcttgaaagctacggcagcccccaattgaaatcgaagtttggagtatgtgttactttcttcttttgtcattgagtgaaacttgggtgagaattgttattatcatttagaaaataaaatatttttatttttataaagaaaacaattttatgcttctaagtccttttatgaataaaatggtgagtttttccag

SEQ ID NO: 23342 - DNA, 398 bp, Gossypium hirsutum
  unsure (1)..(398): unsure at all n locations
  Clone ID: LIB3147-007-Q1-K1-F3
cgcccggattccggtcgaccacgcgtcgccacgcgncgcccacgcgtncgtttgtggggaaaatatgggttcgggcatagtgttcggtagcttgttggcgtggattgaagtgatcgagaaattgagtgagatgaagctgatttccgaagccaaaacgcccgggttggtgcagtgggcggattgcttctccgcccatgaggcggtgaaggatgtttcacccgacgtcgacaagcttgtggaatatgcgttgaagcttggggccagggtcttgaaagctacggcagccaccaattgaaatcgaagtttggagtatgtgttactttcttcttttgtcattgagtgaaacttgggtgagaattgttattatcatttagaaaataaaatatttttatttttat

SEQ ID NO: 23343 - DNA, 377 bp, Gossypium hirsutum
  Clone ID: LIB3166-029-P1-K1-B12
cccacgcgtccgcccacgcgttcgtccacgcgtccggttttggtattgggggcggggggcaagcccgttcgtgctgagggtgaagattgcacttcacctcaaatctgtcaactacgagaaccatgaggaaaatttgccggaatccaaaagcgaccttcttctcaaatctaaccctgtttataagaaagtcccagtcctcatccatggtcataatcccatctgtgagtctctaatcatcgttgagtacatcgacgaggtttggaccacctctgcttcttccatgctcccttctgatgcctatgaacgcgcccagtcccgattttgggcggcctatgtcgaagataagttttccactgccttaagaagagtgttgtttg

SEQ ID NO: 23344 - DNA, 761 bp, Gossypium hirsutum
  Clone ID: GOSHI-09MAY01-C10688_1
acgcgtccgcctcacgcgtcctcccacgcatcctaccaaaaccgtttttattctctagagtcttcccttgtccctgttaaaatctgtcactgtgatcattaatggccaccgctgaacctgaagttccagtcactgagcagcagcccgcggcagcagaggagccaaagccggcggaaaagcctgtgaaggagaagagacccagagctccaaaggagaaaaagcctaagcaacccaaatccgcagcacatcctccttattttcagatgatcaaggaggcgcttttggctttgaaagagaagagtggatcaagtccgtacgctatagcgaaatacatggaagagaagcacaaggcggtgcttccagcgaatttcaggaaaatcttaggtcttcagcttaaaaactcagctgccagaggcaagctgataaagatcaaggcctcttacaagctctccgaagccggcaaaaaagagagagcccctgttacgaaagctaagatggagaagaaagctaagccagcttcgaagccgaagaaagctgaggcgacaaagaagccaacaaagagagtcggggccaagaagaaatcaactccagcaaagccgaagcagcctaaatctatcaagtcacctgcggctaaaaaggccaagaaggccgctgcttagaacaaatgtgtaggaggccactttaggttttatatgtaatcagtaacttatctttgtgaatacatggttgttagttcggtgcttgtgttggaaaaaaaaaaa

SEQ ID NO: 23345 - DNA, 359 bp, Gossypium hirsutum
  unsure (1)..(359): unsure at all n locations
  Clone ID: uC-gsflmaxxa091c12b1
gatatgtttctagacactgaccgcgaaacaganaaatgcgtggtttaaaaaaacattaacggtcaccgccccacctgaaancccagacactgagcagcagccggcggcagcagaggagccaaagcccgctggaaagcctgagaaggagaagagacccaaagctccaaaggagaaaaagcctaaacaacccaaatccacagcacgccctccttattatcagatgatcaaggaggcgacccaggctatgaaagagaagagtggttcaagacacgacgctcaagccaaatacatggaagagaagcacacggacggtgcctccagcgaatgccaggaaaaccttagggcatcagctgaaaaac

SEQ ID NO: 23346 - DNA, 1173 bp, Gossypium hirsutum
  Clone ID: GOSHI-09MAY01-C10638_1
cggacgcgtgggtttccatatagctgtgaaaccaattttggtctgcctatagcaagagtgaaaaaaaaattatcaacgaaaagaaaggtcaaaagaaaaaaaaaagtctggtttccatggaagaagaggctgaatcacgcgaggaagtcaagccaaacgtcgtcgttaaagagacaaatggagatattgtcggcgataacgatgcaggaaaattgggtaccattgaaacccctgattttctttcccagaaaatattccataactgttccctaccaattctggcatctggagtaattaccacaagccctgctcaatcccaactcaccatcttctatggcggaaaagtttctgtatttgatgcaatttccgctgaaaagatacaagaaattatgcttattgctgctactgtggctgctgctgatgttggctctgttgacatgaagaatgctgcaaccgattatgccaccatttcacctgctcttacaaggtgtccttcacttcaaagtactgcaactgcctcggcttcgccacaggcacagttgtatcctctccccaggacatcttttagcaaactgcaagctgaactaccaattgcaaggagacactcacttcagcgttttcttgagaagcggcgggacaggctggtgaacaagaacccatatcctggtccatcaacaccaaaaatggctgatggcgccaaagctgacgtgagtgccacaacttcaccagagtctggctgcttcaaggcatcacccattcgtcaagaagatatccaaccaaaagctccagctcatgttgcgtaaagctaagcatataggattccttatatatatatatatttgataaaaactgaatctagctctgttattgtaagttacaaagtgcagaggaatacatctgatctgccactggagttaggtgtggatagcaagtgtacaattaaacaggtctcatggtaggatctgtccacttgtttccctattgccttcttgggcagcagttttgatgtttcctaaacctggacaccctctctctgatctgcctgacaaataacatttgccatgtatgtatgattctctctgttctatgggtatgcaaagactgctaatttgtgtgtaacgtgttccaactttgtacattacatttcttttccttgggatgcttggtggtttt

SEQ ID NO: 23347 - DNA, 479 bp, Gossypium hirsutum
  Clone ID: uC-gsronu33B109c03b1
agctctgttattgtaagtgacaaagtgcagaggaatacatctgatctgccactggagttaggtgtggatagcaagtgtacaattaaacaggtctcatggtaggatccgtccacttgtttccctattgccttcttgggctgcagttttgatgtttcctaaacctggaccccctctctctgatctgcctgacaaataacatttgctatgcatgtatgattctctctgttctatgggtatgcaaagattgctaatttgtgtgtaaaaaaaaaaaaaaaaaaaaaaaaaaaaaaaaaaaaaaaaaaaaaaaaaaaaaaaaaaaaaaaaaaaaaaaaaaaaaaaaaaaaaaaaaaaaaaaaaacaaaaaaaaaaaaaaaataaaaaaaaaaaaaaaggggcgccctttttaggggtccaaattttcctcccccggtattgaaagcaaatattttttttttggggcccctaaatttaatttaatg

SEQ ID NO: 23348 - DNA, 391 bp, Gossypium hirsutum
  unsure (1)..(391): unsure at all n locations
  Clone ID: LIB3166-037-P1-K1-H10
ccgggtcggacccacgtcgtccgcccacgcgtnccggtgtaggtttttattgtaagaagaagcntgaatcacgccgaggagaggcaagtcctatacgtcgtcgttacaagagactatatggagatanttgtcggcgataaccgttgcaggtaaaattgggtacccattgaaacccctgattttctttcccagaaaatatcccataactgttccctaccgattctggcatctggagtaaataccacaagccttgctcaatcccaactcaccatcttctatggcggaaaagtttctgtatttgatgcaatttccgctgaaaagattcaagaaattatgcttattgctgctgctgtggctgctgctgatgttggctctgttgacatgaagaatg

SEQ ID NO: 23349 - DNA, 994 bp, Gossypium hirsutum
  Clone ID: GOSHI-09MAY01-C10628_1
ctctgcgtactccgatcaagcattggctgcggcagtttactctcccacccataagtctgctgttttaaatcaattccagcagcagcaaagcatgttatcacctataaacacaaatttttctcctaaaaatattgaacatcctttgttgcagggcttctctatctggtaggatgtctccacgaaacgtagaacctatctcgccaatgagctctcgggtttcaatgttagttcaacgtgagaagcagcaacagttccgcagcctaagctctagggagcttggttctggctcctctgccaccgttggttccccagtaaattcttggtggggatcctccaatgggaaaccggactgggcagtcgatgcagatggctcaggcaagcttcgcaggtcatcttcatttgagcttggcaatggagacgagcccgatttatcatgggttcaatcccttgtaaaagaatctcccactgaggtcaaagagaaaacaggtgtgcctgtttcaggtgtaacacttaatgcttctacaggtctaggttcaagcatgaactctcgaattgatccggtcgatactgcagtgttgggagcatggattgagcaaatgaagcttgatgagctcgtggctcagcaaaactgaaaaccagtttcactgaaccctgaggtagagataacataaaaaggttttggtatataacatttgtattcttttttttgggattttgttggtgatgaatgtagaagggaagctaaacagtaacagcaagtggtgaaggaaaggggggaaaacattcatttttcaccatttattattacaaagaaacagttaaagaaaaaacaaagaagggttgaggataacctttggctatatgttgaaagaaatgatgcccaaacttggggtgtttttacatgcaatatttctgagaattctgatcctttgataatgacggtgatgatgattatgtaacaattaactatagtttattgcttaaatttctattg

SEQ ID NO: 23350 - DNA, 273 bp, Gossypium hirsutum
  Clone ID: GOSHI-09MAY01-C110180_1
cccacgcgtccgccttattttagattattgaactggtgttttctatatatataagtcttgggtgctgtggtatttccatggatgggaataaagatcagtcaagaaacattaatattactagcagaagtactgcatgttagtgtttctcttctcttactatgaatagaaagcgaatacaaagtggtctctcattctttaaaaaaaaaaaaccaaaaaaaaaaaaaaaaaaaaaacaacaacacaaaaaaaaaaaaaaaaaaaaaaaaattaaac

SEQ ID NO: 23351 - DNA, 488 bp, Gossypium hirsutum
  Clone ID: GOSHI-09MAY01-C110190_1
ttcactcgtccgctttcattttctctacttgggcaggaaaacagcaatggcaagaatgaaacttatggcacttgctttagtaattttgatgacggggaattgctgcttggcaacaaatagaaaagttataaaagtagaagttgatgggctcaagcatgaacaaatcagtgtccatggccgtcagctgcttgatgatagtgggagtgacagagccagctatccatcgagcagtacaaacaaccatcattttaggcctaggcaggatttccccggtggtggtactggagatggaagcggttcaaataattagatcagtattgctacgcctatatggtcatgttatatggaataattatcgacaatgatactacgacgctgttacatgcttaattaggttttctctatatatgtgtgtgtgatctaattagcttctctttgtagctttgtactattgttctcttttgctattatacacgagatgttatagt

SEQ ID NO: 23352 - DNA, 744 bp, Gossypium hirsutum
  Clone ID: GOSHI-09MAY01-C10168_1
cgaaattctctcaaggctcccaatcaaaaccttctctgttagggtttccaaaatttcccgggtccgaaatgaaatccttttttacaatttaaacaatcccaagctttcttctttacaaagtattttccaaaaaactcatttcaagtttgaagcaaaagaagccaagaaaagggttcttaaacggcgtcaagaaaatgaatggcagaaaagagcagccgttaaagcttcgaccagcatcgtccatgtcccaaatcaagaggcactggttcttccttgcaggatccttcaactcccgcgtcgtacaatctacgaaattctctcaaggctcccaatcaaaaccctcttccaatgcaggtccgtttgcaagagatttctttgttttatctccgatcctgaatttgctaagcttcaactctcgaaatcgcaagtttgcatcttaatcaagacgctgccgctccaaaacgcttcgaaacgactccagttagctcatgttgaagccaatggttcaacttttgaggtctcgaaactcaactttactcccaaatcaaatctccccactattgatatctctcatatgaatgcttgcaatggtttactctgtttagttggatctgagaaaagatttaacatttatgtttgtaatccgattttgggtgaattcatcacaattcaaccgccttataaggacagacaaaggggtagcttttgggggcttggttattcagctatgatgaatcaatacaa

SEQ ID NO: 23353 - DNA, 648 bp, Gossypium hirsutum
  Clone ID: GOSHI-09MAY01-C10128_1
tttgctttcaataacctctctacttctactgcttatctgtcttcttttggcttccaaggtttactaaagatgcgcagaattacaagctccaccaccgccaaaggcgttgctgccattgtgggcgtcggcccgcaacttggactatctattgcccgaaagtttgctcatgaaggatacacagtcgccatcctcgcccgggacttaggaaggttgtcaagatttgcagatgagatagcgagggaagagaaagcgcaagtgtttgcaatcagaatagactgctcggattatagaagcgttagggaagcgtttgaaggggttctttccttaggatttgtcgaagttttggtgtacaatgcatattaccagccggtttcttcgcaccccactaccttctccgacattaaaattgattcctttgagaaatctcttgctgtttcctcccttggtgctttcctttgcgctcaacaggtgctccccgggatggtggaaaggggaaaaggaaccgttctcttcactggccgctcagcttcactcaatggcatccctggtttctctgaactatgctgtggaaagttcgccctgagagctttatcccaatgcctgtcaagagagttccagtctgttggtgtccatgtcgcccatattatt

SEQ ID NO: 23354 - DNA, 182 bp, Gossypium hirsutum
  Clone ID: LIB3120-001-Q1-K1-G3
tgctattccattttgctttcaactaacctttctacattctactgcttatctgtcttctttgggcttctttggtccccataagatgcgtagcatggtaagctctacctctgccaaaggcatcgccgccattgtaggcgtcggaccgaagcttgtgcgatccattgcccgcaagtttgctcatg

SEQ ID NO: 23355 - DNA, 662 bp, Gossypium hirsutum
  Clone ID: GOSHI-09MAY01-C10098_1
gaagatgcagttaccttttcctgctccacatatctaaatctacatttatttatataaatgccttacaccaagctgcaatcatctttatatatatatcctttagttctaggttttcctcaccttcatcgttgaattatctctttttagctgttaccatccacaaccccctttgctctaaacccagaaagaaaaaatggggagaggaagagtggagctgaagaggatagaaaacaagatcaacagacaagtgaccttctctaagagaagaaatggtttgctcaagaaagcttatgagctttctgttctttgtgatgctgaggttgctcttatcatcttctctagtcgtggcaagctctacgagtttggcagttcaggtatgagcaagacccttgagcgataccagcgttgctgctttactcctcaagacaacagccttgaacgcgaaacacagaattggtaccaagaggtaaccaagttaaaggcaaaatatgaagcactgcaacgcactcaaaggcatttgcttggagaagatcttggaccattgaatgttaaggagctgcaaaaccttgagaaacagcttgaaggagctcttgcactggctagacaaaggaagacacagatcatgatagaacaaatggaagacctcgcaaaaaggagcgtga

SEQ ID NO: 23356 - DNA, 387 bp, Gossypium hirsutum
  Clone ID: LIB3166-022-P1-K1-A5
cccacgcgtccgcccacgcgtccgtccactcgtccgcgacccccattgctgaaaacccagaaagaaaaatatggggagaggaagagtggagctgaagaggatagaaaacaagattaacagacaagtgaccttctctaagagaagaaatggcttactcaagaaagcttatgagctttctgtgctttgtgatgctgagattgctcttatcatcttctccaatcgtggcaagctctatgagtttagcagctcagggtatattaatacaaaactacgttaaacaatctactcatagtcctttttcatttctttctctatccttaactttagatattctcaagttttctagtcatttacatctactttggttatggattgtgcataatggtt

SEQ ID NO: 23357 - DNA, 405 bp, Gossypium hirsutum
  Clone ID: GOSHI-09MAY01-C10058_1
gcttatacgagtgtgtaaactctttggttttgtctgggtacataacataatcaacgaacatgtttaagaacaggatgaagaacatgaacgaggaggccttcctggatcacaagacaaaggtatgtttcaaatctttaacttaccaatctaacaaaaaattcacaaacaaaatattttgttatcatgcagaaaacctgggaagatgcaaagactggtaaaaaatgcttcatgttgtacgcaaggtcactctacgtgacatggggtggccgtgagtactggatctggaacagttttaaagacacaaggttggattttatttttttctctcttcttcttttcatggattttttttttggtgtctgggttccgtggtcccttgatacatgatttgcagcggtgaaaaca

SEQ ID NO: 23358 - DNA, 728 bp, Gossypium hirsutum
  unsure (1)..(728): unsure at all n locations
  Clone ID: AI725583.1
gttaactggtgcaaaattgttgctttagatgtttatgttgcaacttttatttctgtaaaattgaaatcagcaaaatctatctttgtttttctatttctcttatctgtctttcatcggagtcgatctcatcatcttccgagctttcaatttcaaataagattcaatggcgacaagcgatgaatgttgttcagttcaacttagtgatggagatggttcattcaatgatactggaatcgaaagttttatcaaggaagtgaaacttcatgaatgcggtctgtcatatgccgtggtttccatcatgggaccgcaaagcagcgtggctactccaaagcagattagggaactaatgcaagtagatggcttaaccaatgatgaagttaagagtcatttgcagaaataccagctacacacacgaagaattccagctaccacaacaacaacaacccctgcaaatcaatcaggccttgttttgggtggtggttgttacaggccattttgcccgaggcccaattcaacacaaaacaagaacccaattaacccaaacccatttctaccagcccaaaataaacnaaaaataaagaaagaaagaatacctaatcggtcctgactactgccgccgttcctctgaacaccgacgcacgggctcacctgctccaccaaatcctctgattccctgcgagatgataccaagtccgcgtagctgataccagagttgattgagaactcgg

SEQ ID NO: 23359 - DNA, 463 bp, Gossypium hirsutum
  Clone ID: uC-gsronu33B002h03b1
acgcctggcgcctgggggccccggtcccgagttccgcccacgccccacggcctccggttttgactcgctcagccggcaaaactgggggtttggcaatctatctcgcaaactgaggtttctgaagaccagcacacagcccatgatagctgaggttttgtatccctcttatctgtgtttcatgaggatcagtctcatcattttccgagctttcaatttcacctatgactcaatggcgacaagcgatgaatgttggtcagcacaactacttgatggagatggctcattcaatgctactgctatcgaaaggtttatcaaggaagtgaaacttcatgaatgcaggttgccatatgccgcggtttccatcatgggaccgcaaaggagcgaaataccgggttcacacactaagacttccgggtaccacaacaacaacaacccctgcaaatcaatcaagctttgttttggg

SEQ ID NO: 23360 - DNA, 803 bp, Gossypium hirsutum
  Clone ID: GOSHI-09MAY01-C10078_1
ttaaaactctgcaaaaccacaacgaaagaaacccattttcaatttttttttctattgcaaaattttctgctttttgttttgtctgaaactgaagccatgggagggatatcggggttgcttatgaagtttccctcattgatccactttttgttgtctctcctggagaaaatccctgcgagattgcctatgccaattgagaaattggtttctcgtgtttcatatcctcgcaccggcaggcacttgcagcgctataataacagaggcttccgcttagttgttgggtgcattccctacaggtacagggaaagcgaagatgccaagtcaattgaggaagcgattgaagttcttgtaataaatgcacaaaatgggaaagggatattattccccaaagggggttgggaggaaggtggaggccagggaagaagctgtcattagagagacggttgtggaagccggtgtagttggcgtcatcgaatgtaaattaggtaaatggtgttataagagcaaaaggcaatagtatataccatgaaggccacatgtttggtctgcttgtgaagcaagagttagatggatggcctgagaaaaacatccgaaaacgggaatgggtgacagttgtcgaaagctagagaagaatgcccgcatttgtggatgatagaagccttagaagagttggtttggcgacaaacgcaggcaggtgcggcccaaggaggaagtaaatgaagtagcaactatggagttttgttgtttgaatttgtagggttaggaaaatagatcattgtaattaagaagacatcaaaacgtta

SEQ ID NO: 23361 - DNA, 500 bp, Gossypium hirsutum
  Clone ID: LIB3585-037-P1-K1-B9
gctaggttgaatagaaggattctaattatcaatatttggtttgagcaggtgcattccctacaggtacagggaaagcgaacatggcacgtcaattgaggaagcgattgaagttcttgtaataaatgcacaaaatgggaaagggatattattccccaaagggggttgggagaaagatgaatccatggaagaagcagccattagagagacggttgaggaagccggtgtagttggcgtcatcagaagttagtaatctaccataggctttttcatttcaaactcttgattacatttcttactgattttaactggatggatgtatatgtatgtttgcagtgtaaattaggtaaatggtgttataagagcaaaaggcaaagtatataccatgaaggccacatgtttggtctgcttgtgaagcaagagttagatggatggcctgagaaaaacatccgaaaacggaaatgggtatgtatttggctgccatatatatgtatgtaaatggt

SEQ ID NO: 23362 - DNA, 404 bp, Gossypium hirsutum
  Clone ID: GOSHI-09MAY01-C10068_1
gggagtttttgtttctgagtgtaatcccggccggttcttgtttatgttgggagtttttggttcttcgcctttgcgcaaaactacagttaccccttccatgatctagtgttgctccattttttgtttccttttgtagttgtaaaacctcaaaccaggtaaaactatcaccgttgggagttgagagccgcctatagtttaccacatatttgggtacatttgttttaatggagcaagaggctcctttgaatgagctgaaagaggggagggaggtgacgaatctgcttatgaagcatcttcatcttccttcgtctcaccaaacacgcctagtcttgattgagaaaatactcggttcctatgagaacgcactttcaattctgaactgcaatggtcttgtggttgaaact

SEQ ID NO: 23363 - DNA, 1217 bp, Gossypium hirsutum
  Clone ID: GOSHI-09MAY01-C10348_1
gggtaagactctttttaattaattgtagatacgttggaagtttttgtcttcagggattttatgggcaaatccacctttcattaaaaaatgatgaactgtcatcatcaaaaatatttcccattgaaaaaatgagttctcatgaaagtgggagagaggccgaacgcaatggaaagaatagaattagatgaagcaatgctacaagggcaagcagagatatggcgttacatgtacagcttcgcagattccatggcgcttaagtctgccgtggagctccgcatagctgacataatacactctaatggtggccccctcactttgtcgcaaatagcttcatgcattaatggtggccttacttcacctgacatcaccacccttgctcgcataatgagattgctcgttcgcagaaagattttcaccgtccaccatccttcagacggtggagatctcttgtacgacctaactcactcatcgagatggcttctacatgattcggagcaaaccctggcgcccatggtattaatggagaaccatccatggcaaatggctccttggcactacttcagccagtgcgtgaaagaaggtggcattgccttcaagaaagctcatgggcgtgagatatgggatttagcatcaagggatcctgatttgaacaagctttttaataatgggcttgcttgttcatccaaggtcatcactagtgtaatcctgtcgagttacaaacaagggttgagctccattggatcattggttgatgttggaggtgggattggaggcttaatatcagagatcgtcaaagcatatccacacatcaaaggtgttaattttgatttgccgcatgtcgtctcgacagcaccaacatacaatgcagtctcccatattggtggtgacatgtttcatgacgccattccaaatgctgacgcagtcattatgaagtggatattgcatgattggactgacgaagaatgcataaaaatattaaggaattgtaagaaagcaataccaagagagaatggaaaagtgatacttggtgaaataattttgaaagaagatgggagtggagtgttcgatgacatggggttcatattcgaccttctaatgattgcacactccagctgtggtaaggagagaaccgccgtggaatgtatgaaaatgtttgaagacggagggttttgtcgttgcagaattattgacattactgcattgccttccatcatcga

SEQ ID NO: 23364 - DNA, 297 bp, Gossypium hirsutum
  unsure (1)..(297): unsure at all n locations
  Clone ID: LIB3083-059-Q1-L1-G10
ccaaaggtgttaacttcaattaacccaatgttggctgggcgggactatcatacaatgggatctttcatgttggcggtgacatgttccatgccattccaaatgctaatgcggtgattatgaagtgggtattgcatgattggngtgatgaagattgcataaaaatattaaggaactgcaggaaagcaattccaagagaaaatgggaaagtgataattgttgaagttgttgtgaaagcaaaagggagtggagtgttcgatgacatgggattcatattcgacctcctaatgattgcacact

SEQ ID NO: 23365 - DNA, 419 bp, Gossypium hirsutum
  Clone ID: GOSHI-09MAY01-C10378_2
cccacgcgtccgattgattttactcaattttgaaataaaattaaaatttgacttcggctgcttgtgaaatttatgaaattgaaaagaatgaaagagaaaataggatggatacttcttttaatcatttctctttagactaatttgaaaaacaactaagtgaaaattggtgggttttgtttgctttagtcactacttggggtacaggggacaagttatcgtaacaaaaattattgagttagaatttgttgtgttctacagcaattgagacgacactgtggtcgatcgagtggggcattgcggagctggtgaaccaccctggaatccaaaagaagctgcggcttgaacttgacactgttctatgacctggtaaccagatcactgaacctgacacccacaaacttccctaccttcaagctgtg

SEQ ID NO: 23366 - DNA, 1963 bp, Gossypium hirsutum
  Clone ID: GOSHI-09MAY01-C10378_1
cggacgcgtgggccgaagtaaccccgcaagaaataacctcaaagccaaatggatctcctcttcttggagaaggccctcctgggccttttcgtggcggtggtactagccatcaccatctctaagcttcgtggcaagcggttcaagctccctcctggaccattacccgtgccggtgttcggcaactggctccaagtgggtgatgacttgaaccaccgcaacttgacagatttggccaagaaatacggtgacatatttttacttcgaatgggacagcgtaatctagtggtggtgtcttcacctgagctagccaaagaggtgctccactcgcagggagtggagttcggctcaagaactaggaacgtagtgtttgatatattcacgggtaagggtcaagacatggttttcacggtgtacggagagcattggaggaaaatgaggcggatcatgacggtaccattttttaccaacaaggttgtgcaacagtacaggtttggatgggaggacgaggctgctcgtgtagtggaggacgtgaggaaaaatcccgaggcagccaccaacggaatcgttttgaggaggagattgcagctgatgatgtacaacaacatgtacagaatcatgttcgacacaagattcgagagtgaggatgatcctttgtttgttaggctcaaggctttgaacggggagaggagccggttggctcagagttttgaatacaattacggggattttattcccatcttaaggcccttcctcagaggatacttgaagatctgtaaggaggttaaggacaggaggttgcagctcttcaaggaccatttcgtcgaagagaggaagaaacttggaagcacaaaaagcatgaacaacgatggattgaaatgtgccatagatcatattttggatgctcaacagaagggggaaatcaatgaggacaacgttctctacattgtcgagaatatcaatgttgccgcaattgagacgacactgtggtcgatcgagtggggcattgcggagctggtgaaccaccctgaaatccaaaagaagctgcggcatgaacttgacactgttctaggacctggtaaccagatcactgaacctgacacccacaaacttccctaccttcaggctgtgatcaaggagactttgaggttacgaatggcaattcctctactcgtgccccacatgaacctgcatgatgcgaaattgggtggctatgatatccctgctgagagcaaaatcttggtaaatgcatggtggcttgccaacaaccctgctaactggaaaaatcccgaagaatttaggcctgaaaggttctttgaagaggaagccaaggttgaggccaacggcaatgatttccgctacctcccctttggcgtggggagaagaagttgcccaggaattattcttgcattgcccatccttggtattactttgggtcgtttggtacagaattttgagctcttgcctccccctgggcaatctcaaattgataccacggagaaaggtggacagttcagtcttcatattttgaagcattccaccattgttgctaagccaaggcaattttaacttgttctcttctatccattttagtgaactcttgaaagacagtatgaaacattattcagttgaaaatatttgtgaggtgtgacaatgtaaatccatgaatcaatcaagatttgcaataagattaatattttcccttccaaaaaaaaaaaaaaaaaaaaaaaaaaaaaaaaaaaaaaaaaaaaaaaaaaaaaaaaaaaaaaaaaaaaaaaaaaaaaaaaaaaaaaaaaaaaaaaaaaaaaaataaaaaaaaaaaaaaaaaaaaaaaaaaaaataaaagggggggggcctttttaaagaaccaaattttctttcccgttttttgcaaataaaaactttttttttggggcccccaaattaaattttttgggcggtgtttaaaaaacgggggattggaaaa

SEQ ID NO: 23367 - DNA, 410 bp, Gossypium hirsutum
  Clone ID: LIB3120-016-Q1-K1-F9
aacattggtgggttttggttgttttagtcactacttggggtacaggggacaagttaccgcggcgggaattatttagaatttgttgtattctacagcaattgagacgacactatggtcgatcgagtggggcattgcggagctggtgaaccaccctgaaatccagaagaagctgcggcatgaacttgacactgttctaggacctggtaaccagatcactgaacctgacacccacaaacttccctaccttcaggctgtgatcaaggagactttgaggttacgaatggcaattcctctactcgtgccccacatgaacctgcatgatgcgaaattgggtggctatgatatccctgctgagagcaaaatcttgggtaatgcatgggggcttgccaacaaccctgcttactggaaaa

SEQ ID NO: 23368 - DNA, 556 bp, Gossypium hirsutum
  Clone ID: GOSHI-09MAY01-C10338_1
aagaaaagagcttagggttttaggagctgaaaactgaggaagagacagcgatgatggctacatcaagactgtttggaaggtgcggcggattgttagaagcggcgaaggctttctctgcttccttcgcttattcgtcttcttcttcttccagtggaaatggaagggggcttatgcgggtgatacctgtctctccacagctggccaagttccttggagcctccgaagcttctcgcaccgacgccattaaaaggatttgggactacatcaagctccacaatctccagaaccctgcaaacaagaaggagattatttgtgatgagaagttgaagacgatattcgccgggaaggagtctgtcggaatgttagagatcagcaaatatctctccccacattttctgaaatccaaataatctttgcctttgcctttgcctttgccttagcgttagccttttgttggaactttaagacttaagttgcattgtgatgaatctgaaaaaatgcttttgtcattagtctttttcagtacaaatgcttaaaccccttttttcccctcgat

SEQ ID NO: 23369 - DNA, 663 bp, Gossypium hirsutum
  Clone ID: GOSHI-09MAY01-C10328_1
tgtcaatatagctgtgaagcaagctttccatattctgcatgaacagggaatcgccatggctcctctctgggattctttcaagggccagtttgttggagttcttagtgcactggactttattcttatcctaagagagttggggaatcatggttcgaatttgacagaggaagaattagagacacacacaatatcagcttggaaagagggaaaggtgcatctcagcagacaaattgatggcaatgcaagttcataccctagatgtcttgttcatgctgggccttatgattcgttgaaggatgttgtgctgaagattttaagaagtacggtggctaccgttcccatcattcattctgcttcacaggatggttcatttccacaactgctaaatcttgccaccttgtcggaagtactaaaatgtatattgagacattttaaacattcatctagatccttgcccattcttcaacaaccaatttgttcaattcccttgggtacttgggtaccggaaattggtgaattaaatggtcagccgttggcaatgctgcgaccaaatgcctctcttggtgctgcctcatcactgttagttcaagccgatgtaagttccataccaatagtggatgaaaatgactcatggcttgacgtatattcacggagtgatataac

SEQ ID NO: 23370 - DNA, 442 bp, Gossypium hirsutum
  Clone ID: GOSHI-09MAY01-C110240_1
ctttaatgagggtggtgcagttggtgaaagaccaggcatccaagttggaaactaatctaaggtccctcaaagattcttcttcttcttcttcttcttcatctaagcaagcgaggcgtttctctaacacggtggattccgggactgtgaaggcggctgccgccacaaatgacaggttgaagcaagcggaggagtcattgaggaccgtcatgttcttgagttgttggggtcctaactcatgaaccccccctcccttattttatgttaaaagtacaagggaattgtataaattacttggatgtacatacacatcttttttttttaatcttatatatgaattatatagataatagatatgcaattgtttcaggattttgcatgaggttctttttatgtctatatttcctctaataataacaagtaatgctttagattatgtttttat

SEQ ID NO: 23371 - DNA, 661 bp, Gossypium hirsutum
  Clone ID: GOSHI-09MAY01-C10238_2
gcttcgatgccagtactaacatcatctcaatggcttactactcaatccataagaacccaaatcccttcagcttctctcaatcttttgacaggttcaagaagaagaatttccatctcttccaatgcagcgatcaaccccaaagcttgctcttccctgcttcactgctcctttatctcttcttcctcacccgcccgctcttggcatgcttcattttcagggttagcattggggatggattttagttcaaataatggggtgaggaatgagaaaaggcgaggcctggtgggttgggctgggaaggctgcactttgtcaaacaaagaggaataggtcccggaaatctttggctcgaactcatgggttccgtcgaagaatgagaaccactagtggaagagctgtattgaaacgtcgccgtgctaagggtcggaaggtcctttgcaccaaatctaatccaaacagtgggaagcgctaaactatttcttttgtttccgtttgcagaattctgttaatctgatcctttcttctatgatgtctaaaggataatttaggcaaaacttaaccaatccagcttttgttggttcaattcggcattatttgtttaagtgtttttgtatttgatgaacctctttgcaaaattatatgctttgggccgtttttcttgc

SEQ ID NO: 23372 - DNA, 630 bp, Gossypium hirsutum
  Clone ID: GOSHI-09MAY01-C10238_1
gccgaggcgaaaacaatggcttcaattccagtaataacatcacctcaatgccttcctacaaaacccataagaacccactcccttcagcttccctcactctcttaacaggttcaaggagaagaatttccgtctcttccaatggcggcaaacaagtcttcccttcttcactgctcctttctcccttcttcatcatcttctctctctttcccttcttccttttcagggttatctttggggactgattttggttcaaataatggggtgaagaatgagagaagggagatgcctggtggttagggcaggaaaggctgcactttgtcaaacaaagaggaataggtctcggaaatcattggctcgaactcatgggttccgtagaagaatgagaaccactagtgggagagctgtattgaaacgtagacgtgctaagggccggaaggtcctctgcaccaaatcaaatccaaacagtgggaaacgctaaactttctcttttttgtttcagtgattttatgatgtttaaaggataatttaggcaaacacttagccatgcctgctttgttggttcagttgtgcaatattcatcgattgaaaccctcattttaatgattattattcgattaattgctgttgtct

SEQ ID NO: 23373 - DNA, 624 bp, Gossypium hirsutum
  Clone ID: GOSHI-09MAY01-C11998_1
cttaacccttcgtcctcccaacttccacacccatacgaaaatgacaacccgcttcaagaagaaccgcaagaagcgcggccacgtcagcgctggtcacggacgtattggtaagcataggaagcatcctggaggtcgcggaaacgccggaggcatgcaccaccacaggatcctctttgacaaatatcaccctgggtatttcggtaaagtcggtatgaggtacttccacaagctccgcaacaagttttactgccccattgtcaacatcgacaagctctggtctctcgtcccacaagacgtgaaggcaaaagccaacaaggacgctgcgccgatgatcgacgtgacccagttcgggtactttaaggtccttggaaagggtgttttgcccgaggaccaaccgatcgtggttaaggctaagttggtgtccaagacagctgaaaagaagattaaggaggctggtggtgctgttgtgctcaccgcctaggttagcttttctgtttttgtggtttttggatttgaatgacatttctgttatattattatcttatgttgtttggagttgatcttgaaatgagattttcaatttattttggtcaattctctatcaaactcccgacgatttgggtt

SEQ ID NO: 23374 - DNA, 551 bp, Gossypium hirsutum
  unsure (1)..(551): unsure at all n locations
  Clone ID: uC-gsronu33B007b07b1
tctgtttcaagaagaacagtaagaagcgcggccacgtgagcgccggtcatggccgtatgggcaagcaccgcaagcatccggggggtcgaggaaacgccggaggtatacactaccaccggatcctcttcgaaaagtaccaccctgggtatttcaggaaagtgggtatgaggtacttccacaaactccgcaacaagttttactgccccatcgtcaacatcgacaagctctggtctctcgtcccacaagacgtgaaggcaaaggccaacaaggattcggcgccgatgatcgacgtggcccagtttgggtactttaaggtcttgggaaaaggtgtgctgccccagaatcaaccaatggtggttaaggctaagttagtgtctaagactgctgagaagaagattaaggaggctgatgggacggttgttctcactgcctaggttagggtttttgctttttgttctcttatattatcatctaggacttaatttttgaaatgagattttacaataacattcttaattntgcttcaacaatatatgggatggtgtttattt

SEQ ID NO: 23375 - DNA, 318 bp, Gossypium hirsutum
  Clone ID: LIB3148-018-Q1-K1-C10
cggacgcgtgggcggacgcgtgggcggactcgttgtcggacgcgtgggcggacgcttgggcggacgcggtttttggtaagcacaggaggcatcctggaggtcgtggaaacgccggaggcatgcaccaccacaggatcctctttgacaaatatcaccctgggtatttcggtaaagtctttatgaggtacttccacaagctccgcaacaagttttactgccccattgtcaacatcgacaagctctggtctctcgttccacaagacgtgaaggcaaaagccaacaaggacgcctcgccgatgatcgacgtgacctatttcg

SEQ ID NO: 23376 - DNA, 450 bp, Gossypium hirsutum
  Clone ID: GOSHI-09MAY01-C11988_1
cccacgcgtgcggtttcttccatagccgcccctgaaattatataaaagagagagagaatgaaggttgttgctgcatatttgttggctgttttgggaggcaacacttccccttcagctgatgatcttaaggccattcttggctctgtcggagctgaagctgaagatgaaaggattcaacttcttttatctgcggtcaagggcaaagatataacagagcttattgcatccgggagggaaaagcttgcctccgttccatctggtggtggtggtgttgctgttgcagctgctgctcctggtgccggtgccgctgctgctccagctgcagccgaggctaaaaaagaagagaaagttgaggagaaagaagaatccgatgatgatatgggattcagtctctttgattaaagagttggttttttgcagaaattctcttctttttttttcaaatttaag

SEQ ID NO: 23377 - DNA, 335 bp, Gossypium hirsutum
  Clone ID: uC-gsronu33B027g06b1
tccattcgtctcggaagatgaaaggattcaacttcttttatctgaggtcaagggcaaagatataacagagcttattgcatccgggagggaaaagcttgcctccgttccatctggtggtggctttttccgtttctttatttctttgttttatcctcttttctcttgtatctctctttttttcattttcttttctacctttcctctttttttttctttttctctttctttttcattttttattcactctcttatatccactttttctgtctttatttttttattctccattttcctctttttattttcattcattcctctttttattcctttttttt

SEQ ID NO: 23378 - DNA, 682 bp, Gossypium hirsutum
  Clone ID: GOSHI-09MAY01-C11958_1
aaataaccggaagctgggagttaacttcaaaatttgaagggagaaaaatggctatgtacatccgtgtgaagcgtagcaagacaacatactttatccagtgtgatccaactgaaactaccctagacattaagcaaaagttgcataccctcattgatcaacctgttaatgatcagcgtttgatccttatgagtaatggggatatattagaggattcaaaaactttggcagaccagaaggttgaaaatgatgctgttgtggcactgaccttgagaaaagatgacaacgagttcgaggatgtcaacatagtaaaaccaaacgatttctaccaatctcgtgacacagatagtggaaattggtaagaccacaatcggattctagaagaggttaaagctgataagcaccgagaaggagtctcagcgacgcagatgtatggtaagcctgatattttcgacgttcccatgatcttttgtgccatggaactgttttaacaaacggtaatttcatgtattaactcttaaaatcaactgtgaagataggaagttttatggtaaataatgttgaattggctttcttgttggtgtgatctcattttttatatctatttataatctttattttaaaaaaaacaacacaatcaaaaaaaaagataacttgaacttacccctgaacactacattctaaa

SEQ ID NO: 23379 - DNA, 476 bp, Gossypium hirsutum
  Clone ID: GOSHI-09MAY01-C11948_1
cccacgcgtccgcccacgcgtccgattttccgatttttccagcgttctgcctggtctacactcttgttctccctctcctctctacactgatctggtttcgttctcccgttcgttctcccttctccctttcgttctcccttgatttggtttcgggctccttttcccccttgatttcttcttctttttataaattgatttggggattttctgcttgtttttgtctgagatcttgcttgggttttctgctagtttggcttgtcttgggctgactttcttcacagacttgctttagaaggccatttcatatctttcaagcctttccctcccaaagcatgcccaggtgaggatctttgactggttgtgaaaagtgaaagaaaagctggtaaatgattcttgatatgctttaagtctagcattacgtaagcagggtttgtggttcatgttttaaagtttctgcttacctttggttttcaaaa

SEQ ID NO: 23380 - DNA, 843 bp, Gossypium hirsutum
  Clone ID: GOSHI-09MAY01-C11908_1
ttcacggtcgaccacgcattcacgggctaccatagctcgagactcaacgggcgcacctactacgccattaaaaaccactggagctcggcgttaaagcgaaaatgcttgtcgatgaccgaatgttttaacgacgattcccctcagccgcttaaacgatccgccagtgtcggaaccggcaatccaagtagtccgtcgggatccgatttgagtgactcgagtttaccagctccctcaccggttttcaaaactggttctgtagtcccttcgagtcaacatgttgaaacagcttcatcggcaaccgacccacctactttactcagcctctcgttacccggttctgacttttccgaacctgtttctccacccggattcaacccgacccaagtgaccacacaggctccggcaccggtcccagctccggtggagaagcagtttttcagtgccgagttttttgcagtaatgaaagagatgataagaaaagaagtgaggagttacatggcggggattgagcaaaatgagctttgtttacaaacggaagctattagaaacgctgttgttaagcgtattggaattagcaaaatcgagtaggggaagaagagaaaaaaaatgcctttttctttttctttctttttttaaattggtgttgagttatgggggggatagaaataatcattttggtagtggacagggggaataaaggaggtaaaaaaaaaggggaaataaatataaaatggaaatgagaatgaaaaaggttgaagaaagaaaggctcaaattttccatgaactgatattgcaagtattcatttttttttctgaagtaatggtaaaggagggtttaattag

SEQ ID NO: 23381 - DNA, 521 bp, Gossypium hirsutum
  unsure (1)..(521): unsure at all n locations
  Clone ID: uC-gsronu33B019c08b1
gtttaaacagaggaagagaaagcacaggcccaaggtaattactgagggcaaacctagaaggcccagaaagccagcgactccaaagcctgatggttctcaagaaaccccaactggtaagaggaaatatgtacgaaagagtacagtgaaaaacgacacatcaatcctcccaggagtagcgaatgcagagaaatcaacaggtaagaggaagtatgtgcgaagaaagggactcaacaaagactcaacaattcccacacaagaaggtggaaagggggccactcatccagaaacactcgagcataataagaaaccatgcaggagggcattagattttgacacagtaggacaagaaagagaagcttggtgcgcattgggaagttattgctcctatcaaatattgattcatagacaaggagtgttgaaacaatctggttaagttcaatgcattttgatgtgtctttnttgagtggctcataatcttattgtcctttgatcttttggagtagatgatngtatgcttatat

SEQ ID NO: 23382 - DNA, 375 bp, Gossypium hirsutum
  Clone ID: LIB3166-045-P1-K1-A10
gaagaaagggactcaacaaagactcaacaattcccacacaagaagaaggtggaaagggggccactcatccagaaacactcgagcataataagaaaccatgcaggagggcattagattttgacacagaaggacaagaaagagaagaaagctctgcatgcaagccagcctgcaatttaaattctagtccagggacagaaaacctggggaaagaaggaagtcaatcgaagtctatggttcagctttgtggcataattgaagtggacgcagaaaagacacagacagggattgcctttgaactaaaacaatctgtaaaggaaaagctgaaagatgatttatctctgcctgaagatcaagctccaggcacaccagttccaa

SEQ ID NO: 23383 - DNA, 513 bp, Gossypium hirsutum
  Clone ID: LIB3585-041-P1-K1-A1
ggagggagtgtgccagctcaaaaagctactcctgaaacttggattgagatggtgaatacgatacaaaaggcatctttatccacgccgtcttggaattccaatgatatacgggattgatgcagttcatggtcacaacaatgtgtacaaagccaccatttttcctcataatattggtcttggagtgactagggatcctaaccttgtcaagaggattggtgaagcaactgcgctcgaagttagagctacaggaatcccatatgcttttgctccatgcatcgcggtttgcagggacccaaggtggggtcgatgctatgaaagctacagtgaggatcataagattgttcaaatgatgggctgagattataaactggtttacaaggaggcctccctgtccattctaaaaagggtgttccctttgttgctggaaagaacaaggtggctgcctgtgctaagcattatgtggcatatggaggttcaaccaaaggcattaacgagaacaatactgttattagc

SEQ ID NO: 23384 - DNA, 383 bp, Gossypium hirsutum
  Clone ID: LIB3166-044-P1-K1-C10
ggtggagggagtgtgccagctcaataagctactcctgaaacttggaattccgatgatatacgggattgatgcagttcatggtcacaacaatgtgtacaaagccaccatttttcctcataatattggtcttggagtgaccagggatcctaaccttgtcaagaggattggtgaagcaactgcactcgaagttagagctacaggaatcccatatgtttttgctccatgcatcgcggtttgcagggatccaaggtggggtcgatgctatgaaagctacagtgaggatcataagattgttcaaatgatgactgagattataactggtttacaaggaggcctccctgtccattctaaaaagggtgttccctttgttgctggaaagaaca

SEQ ID NO: 23385 - DNA, 636 bp, Gossypium hirsutum
  Clone ID: GOSHI-09MAY01-C11838_1
gggttttacaaacccctacgccggggggtgggaaccaccaaacctgagactccccacgttctaatattttaaaactattcctcaccagtgcctgtcgtcgcccttatccaatcggtcttttcccttataaatacttccctcatcaatatctgcttctccatagcttcaactttcaaggggggggcaaagttctcataacaatttttcattttccagggtttaaattaaatagaagagtttagagatggcagatattgctatgcttgttgctgaggagtatgaaaggagggtaagggtttcgagaagcaaattagttgggtcgcagcttcaaaagcgacatgagattgacttggtttcttttgtagcaaatttgggtcacaaggcgacgactaaacttgggcatccaagggttgagactgtcaagttggctgtagagccaaaaagccagattggtgttgcagctttcaacggagccttctctgcttgataacttgtcactttctttccttaaaatcattgctccaaaacaagctgtaaattaaaaattcatttcattctgtcttttgatttgtaaattctggtcttttttggttgagaagcaaactttctgctaatggtgatatgatcgtgggtttt

SEQ ID NO: 23386 - DNA, 387 bp, Gossypium hirsutum
  Clone ID: GOSHI-09MAY01-C11558_1
cacattcccgctacagaaacccccccccccccttatttaaaaacatggcaaacacccttttaggagctttcaacgtacgagttgtcggctccggcgacagaatccttgtcttggctcacggtttcggtacggaccaatcggtttggcaacggattctcccatttttcacacctaattatcgtataatcctatacgacctcgtttgtgccggcagcgtcaaccccgattacttcgattccactaggtacgacactctcgatgctttcgtcgacgatttgcttaatattcttaaagctctcggcgtttcaccgttgcgcttacgtcggccactccgtctccgccatgatcggtatcttggctttcattcgctgccctcaactctttttc

SEQ ID NO: 23387 - DNA, 388 bp, Gossypium hirsutum
  Clone ID: LIB3585-065-P1-K2-C4
gtaatttagattttatatagaaaatgttaggaggcaacaacagtaattctgtgcttcccattttcctggatgagaatcatcttcaatatcagaatcagactaatggatcaaaccaactgcaattatttggaagctgtaagttttttttatttttcatttattttgcaattaatcttttttttttatttctctcaatgccctatttcgacaggcaaacccacaaatgcatcccctttttcctgaaattttcagtggtaactaatccttattgtttaacacttcactgccagctgggtgcaatgttgatcctgtgaattattttggaaattaacatcttgctcccatgattctacccaataaatgaagctttatatcataacacattcat

SEQ ID NO: 23388 - DNA, 378 bp, Gossypium hirsutum
  Clone ID: LIB3166-040-P1-K1-F2
ataaatcacagtaatttagattttttattgaaaatgttaggaggcaacaacagtaatgctgtgcttcccattttcctggatgagaatcatcttcaatatcagaatcagactaatggatcaaaccaactgcaattatttggaagcttgccagctgggtgcaatgttgatcctgtgaattattttggaaatgaacatcttgctcccatgattcgacccaataaaagaggcagagaaacagaagacattcaaaggcagcaaaagctacaaatttccttgaattacaacatctgtaaagaggaagctgactgttcagctggcattccaaatcctaatgctgtgtcaactggcttacggctatcgtatgatgatgatgagcgg

SEQ ID NO: 23389 - DNA, 429 bp, Gossypium hirsutum
  Clone ID: GOSHI-09MAY01-C11568_1
agaaaaccaaacaatccttatccttttttaaccggtgctgctaccacagtacaggatggagctaaggatggaaaatctgaaacaccgatatcttcttcacgttgcaagcaagtgttggacttggagaaagaaccacttccagagagacctaatggagatgaaaaggctacggatctgtaagaaaatcaagacgagagttgctctggggtttttacccttctccacgaagcaaattgctcctctgcttcttccatgaataagaattttataccagcgtcagcagcactcaaaagctcttgcacatttagggagtttgtaccttctccaaacgagaaaattcatgataatggtacaagttcggcctcaaacctggagtattcttgcacttcatatgattaaccagctcaagtccagaaaaaagatgatttg

SEQ ID NO: 23390 - DNA, 416 bp, Gossypium hirsutum
  Clone ID: GOSHI-09MAY01-C111460_1
ctcctcgcgtccgaaaccctaaaaggtgttctttggtattcttgaaaagaaaaatatcaattttttacagagtttgttcatcaaggaacgaatttgcacgatttgtcgttttaagagatgattgccagttcaaatatgggagccgaagccgagatcatatttcgccaccaagttgttgatgtaatgtcgatttccacccaagtttctcgcttcgattcggttgcagcttgtgctgagaccattggagatgctgctattgagtcatctgttgtcaaatttgtgccaagaattcgttctggtagctgtgcgaacattggtccacggagaactatggaggatgaacaccataaggattgatgatctcttttcccatgtgggctctatctttcatacttcgtattccaagtgctttttta

SEQ ID NO: 23391 - DNA, 687 bp, Gossypium hirsutum
  Clone ID: GOSHI-09MAY01-C11458_1
ctctctctctcttcatattcaagtcttcccctttcttctacctctagaattttgggtgcttcaaattttggagtgtacttttgttttttttcttttggagtttgttcttagatgaatgccatgcccctatcctttgaggaatttcaagggaagggggctttagattttgcttcttcaacttcatcttattccaattcatcactgttattacaacaccagcaacagaaaaagtggcaaaacaacaaggaaagttgttgctatgtgggatttgatcccacatctacaagaagcccgagtccaccaacgtcttcatcaacactgtcttcctcattcgacggaggcagcggtggtgcctccacggacagtagtggcgtggcggaaacagcaactgtctccaaaggtaaaagtcagtcttttgatacagggacgggaaaatgtggtttaagtatggaggattgggagaatgaccaatccattttgagactaattatgggtgatgttgatgacccttctttggggttaaacaaaattcttcaaccaccaattggcactgcggtggtggtgggtcgtcaaaaatatggagtttaatgctggttttggtatggtcgatcatattcgggttcgactccattactattattgttagcttgatgaacaatgatatggtttcgtgtttgaatcctgtat

SEQ ID NO: 23392 - DNA, 355 bp, Gossypium hirsutum
  unsure (1)..(355): unsure at all n locations
  Clone ID: LIB3166-039-P1-K1-C10
tttttcttctacctnnnaaaaagaagggacggtttaatttaaatagttgaacttcccaccaatttaactttggagtttgttcttagattcatttctatttcatgcaaggccgaaaataacccatctcacttctcttatcattttgcttcttcaacttcatcttattccaattcatcactgttattacaacaccagcaacagaaaaagtggcaaaacaacaaggaaagttgttgctatgtgggatttgatcccacatctacaagaagcccgagtccaccaacatatttatcaacacttgccattctcatctacttaatccaaccaatttttgtaccagcaccttttgcaacctttc

SEQ ID NO: 23393 - DNA, 516 bp, Gossypium hirsutum
  Clone ID: GOSHI-09MAY01-C11448_1
gaaaacagtacgaaaacttccaagaattcaacatttatatgccccagttgactggtaacctgggaaaggaagatgatgagtttgagatcttgtcttctctccacccaactccagcggtttgtggacttccaaaagaagctgcacgcctcttcatttcagaaactgaaatgtttgaccgagggatgtatgctggaccagttggttggtttggaggaggagaaagtgagtttgcagttggtataaggtcagcattagtggaaaaggattctggagcattgatatatgccggagctgggatagtagaacgcagcaatccctcgtcagaatgggatgaactagaactcaagacatctcagtgcaccaagttgcttcaactggaggttccccggcattcaaacgttgagaatttggaaatcatttattaacaaggttagtgatttagggtagaaatatatgattcagcacgtctggagatttggtttctttttgtttatcaattaacaagtttttaaaatt

SEQ ID NO: 23394 - DNA, 700 bp, Gossypium hirsutum
  Clone ID: GOSHI-09MAY01-C11468_1
caagaactcttaacaaaataaagaaagagaggcaaagagaggaatttgagttagcagaaaacaatggcagtggctaaagaaatgatgggttgttcttcatttgtgtcttcatcgaaagtgtttctaaattcaacttatggtttccaacagaaacagaaccggttcctctttgttaaacctgtctgggttccaatggaacaaaagagaagggtgcatttgaggaaagctgctaaggtccctgtggtggctgctattagtgaagatttgataaaagccaaggccaaagccgtgcctgctcaaaaggaaaaagctgttgagtttaaggtgactgctactataactatcaggaacaagaacaaggaagattttaaagagactttagttaagcatttcgatgcttttaccgacatgatcggaaggaatgtcgttttggaactcattagtactgaagaagatcctaaaaccatggctccaaagagaagcaaagaagcagtgttgaaggattggtccaagaaagcaaacgttaaagccgagaaagtttattacacggcggaattcacggtggactcgaatttcggagtgccgggtgctatcacggtgaccaacaagcaccaaaaggaattttcctggaaagcatcccattgaagatttgcttatggcctctgcattttcctgcaattcttgggtacaatccaacaaa

SEQ ID NO: 23395 - DNA, 851 bp, Gossypium hirsutum
  Clone ID: GOSHI-09MAY01-C11748_1
ccgggtcgatctcgcgtccgcggacgcttggggcgggcactagggggcggacccattttgcaaggcccaaatggatgaacgttctgtctaaactaagttccagagcattgcaacgcaaggataggggtcttttattgcggggcaccggttttggctaaagagctcagcaaactctgctacgagttattccaaaaaggttccgctaaatttgaattccacaaagagcatttctaattctgagaggagtatacaaggggaggaaatagcattcttaccatccagggccctaactcctttctttacctagagaaataagaattttgcaatagtaggcccagaagacaggagccaccgtacagccttagaatagaaaaaggagatatgaaaggaaaaaaggcatttaggtctctatccctaccgttgaatacccacaaaagtgaccgaagaggccatcatggtttttgggaaattaaattcaatggtccggcgagcaagagaaatgagagttgagaggtagggcaggcctagcccattcatgggtaggtggactagaaagaagaccaactttgaaaagcataaacttgatgggttttttgcctctcttttttccctatatttccaaattttcatgtaaagaaaccttctagcatctcgatgctgctgaatgcggattgaagatttgaagctgctgttctttattattattcattacctttgctttcaataataatcagagattgtgtgtaaattatgttcacaacgaactgttttgtaagttaattaacttgctgctagttttatgatgttcatctttatcttaaataatatagtcaaagagaggattttatatt

SEQ ID NO: 23396 - DNA, 420 bp, Gossypium hirsutum
  Clone ID: LIB3148-030-Q1-K1-B7
cccacgcgtccgactaaatttgaattccacaaagagcatttctaattctgaggagtatacaaggggaggaaatagcattcttaccatccagggccctaactcctttctttacctagagaaataagaattttgcaataataggcccagaagacaggagccaccgtacagccttagaatagaaaaaggagatatgaaaggaaaaaaggcatttaggtctctatccctatcgttgaatacccacaaaagtgacggaagaggccatcatggtttttgggaaattaaaatcaatggtccggcgagcaagagaaatgagagttgagaggtagggcaggcctagcccattcaagaccaactttgaaaagcacaaactggatgggtttttttgcctctctcttttttccctatatttccaaattttca

SEQ ID NO: 23397 - DNA, 396 bp, Gossypium hirsutum
  Clone ID: GOSHI-09MAY01-C11158_1
gttaggccctgaagcctggaaagatagctagtcttgcaaaatctgttcgtgtacttgctgggatggaagagcctattggtcaagtgttaaagagaacagagcttgcagatggactcatcttggaaaaaacgtcttgccctctaggtgtcctgctgattgtatttgagtctcgacctgatgccctagttcagatagcttcactggccattcgaagtgcgaatggccttctgctgaaaggtggcaaagaagctaagcggtcaaatgcaatcttgcacaaggtcattacttcggccattccaaaatgcattggaaacacactaattggacttggggcttcaagagaggatattcctgatttacttaaggcttggtgatgggatagatctttggatcccc

SEQ ID NO: 23398 - DNA, 982 bp, Gossypium hirsutum
  Clone ID: GOSHI-09MAY01-C11168_1
attcatagtcagcggatggttgctagtagctgttacattcattctttatggctgtgttgtaatcatgaacaatgctatttctgacacttgtttggctatggaagaatgggtggaaaatccccacgcggagacttgctcttagtaacatccttccttgtgttgatccgagaacaacaaaccatacactcactcaaagcaaacaagtcatcactagtatagtagatgttgtcaatacatatatctactccattgcaaatatagatctttccccagacgacaatcgttactaccatcagtctgggcctactatgcctgctttatgttacccatttgactctcagctccaagatcggcagtgcgggtcttatgaggtgtctatggcaaatgcttcactggtttggcagaactacacgtgcatggtatcagaatctgggctatgcaacaccactggaaggataacgccagacagattcacacagctggtggcagcgattaacgagagttatgctcttgagcactataccccacccttactgtgccttcaaaattgcgattttgtccgggatacatttcaaaatatcacctcgaattactgccatccattggagcgttaccttaaaatggtcaatgcaggattggggttaatctcagtaggagttttgctgtgtctgtttctgtggatattctatgcaaaccgccccgaagggaggaagtgtttgtgaagatactgttgccgatgaaactaatgagctgcaaaaacattttcaacacaaacaacaagacaacatagtcaagcgcaaatagtgtctaaaattatagaaagaaattaggttcaagtctatataacatcctttttcgttgtatccgagaccgggaaagaaaccaagatggggcaaagctccatttttgagttggaagggtaatctatcgtttctgtgttgtcttatatatgcatctacacatacataatatatataggctt

SEQ ID NO: 23399 - DNA, 494 bp, Gossypium hirsutum
  Clone ID: GOSHI-09MAY01-C11138_1
ttctttatctcctttctcgctttgaacaccaagtttccaaaattcccagcactttcttcttcatctatatataaactcggtttcggttacccatttctgcaaatccaactcagctcccaattatttcatctttagctcgttaaagttgcgtgtctttttcttgtctttttttttttaatttcttcgtgaaaatatgatcaaaaacgaacaatacgaacgtgttcttagttacttcgatagagacggcgatgggaaggtttcagcatcggagttgagccatagattgcgcttaatgggcggggaactgaagttaaacgaagcccaagtggcaatcgaagcgttggactcaaacggcgacgggttgttagatttggaggatttcattgggttattggaagaaggaggtgaagcagagaagactaaggattttgaagaagcttttcagatgtacgatactggtggaaacgggttcattacgcctaaagacttgaagg

SEQ ID NO: 23400 - DNA, 468 bp, Gossypium hirsutum
  Clone ID: uC-gsronu33B080b05b1
gcacattattgttttgatgcaaacttcacagaacagatcagcgagaacatttatggattactcttccgtaactcaagccatggatggtatatgtggactatatgaaaggaaacttaaggagctaaatccagcaacaagaaacatcacatatgacattgctgatctttacaattttattgatggccttgcagatatgagtgcccttgtctatgatcacagtattcaagcatatttgccttatgacaggcaatggattaaacagaaagtgtttcaacaccttaaaaagttggcacattaaacctttttcagtaaaagagaatttgattagggaaaaaacatgtaccaagtgcagaagacctcatgtgataattgtgctgttggttccctcactttttagaaccattgcagctttctccagggtttccataaatagaatgttgtaatataagcaaaaatacaaattatgga

SEQ ID NO: 23401 - DNA, 358 bp, Gossypium hirsutum
  Clone ID: LIB3166-034-P1-K1-A12
ctccaacaaccagacatgggatatgtggactatatgaaaggaaacttaaggagctaaatccagctacaggaaacatcacttacgatattgctgatctttacaattttattgatggccttgcagatatgagcgcccttgtctatgatcacaggattcaagcttttttgcctaacgacaggcaatggattaaacagaaactatttcaacacctgaagaagttggcacattaaataaatcctgttcactgaaagtaatagaaaaaaaaaatgtgcatcaaagtgcaaaagacctcatatcatatctgataattgtgcttttattatacctcctaacttttgcacacatttttgagtaccca

SEQ ID NO: 23402 - DNA, 572 bp, Gossypium hirsutum
  Clone ID: AI728670.1
gagggacaatttttggagtagttggaatgctaaagcttgttgcaggatcatatttaattgttataacggagcgcgaatgtgttggatcttacttggggcatcctatattcaaagtcatgtccttgagaattcttccatgtgatcattctcttaaaacctcttctccagaacagaaaaaggtggagagtgaatttgctgggctgctcaaagttgcagagaagacatgtggtctctttttctcttatgacaccaatttaacgctgagtgctcagcgattaaatgatctgggagatgaatctaaattgcttcctctttggagacaggcagaacccaaatttctttggaacaattatatgttggaagtacttatagacaacaagcttgatccgtatttgcttccggttgtccaagggagttttcataacttccaaccagccatcggaaaagaaattgttgatattacattgattgctaggagatgtacccggagaaatggaacccgaatgtggagaagaagaactgatcctgatggatatgttgcccattttgtggaaacagagcaaattgtgccc

SEQ ID NO: 23403 - DNA, 389 bp, Gossypium hirsutum
  Clone ID: uC-gsronu33B040f08b1
tctccggataaggtggagagtgaatttgctgggctgctcaaagttgcagagaagacttgtggtctctttttctcttatgacaccaatttaacgctgagtgctcagcgattaaatgatctgggagatgaatctaaattgcttcctctttggagacaggcagaacccagatttctttggaacaattatatgttggaagtacttatagacaacaagcttgatccatatttgcttccagttgtccaagggagttttcattacttccaagcagccattggaaaagaaattgtatatattacattgattgctaggaggtgtcccctgggatatgtatcccttattgtttattttatgttctttttctttcgattatttttttctttttttttttc

SEQ ID NO: 23404 - DNA, 445 bp, Gossypium hirsutum
  Clone ID: GOSHI-09MAY01-C11398_1
ctcgtgccgattaaattaaaacgagaccataattctaaggtctaaattattttactttttatgctagacgaagtgatcttgaacttcactttatctgtgaaaaaccttcattgacccacgcgggttctaaatccaaacaacaaagttgcttgaattaagttgtctgggaaaaaaaaaaacccattctttctttgatctctgctccaaaagttgtcaccctttaatctctcttcggctcctcttcttagattgaagaatcaaggttagattttaaggcacaatgcggttggttccatcaaattcgagtgtgaaaaagaggcagagtaatgggggaagcaatggtgccttgttgtatctcaatgtctatgatctcacacctatgaataactatcttttctggttcgggcttgggattttccactccggtatcgaagtttatggtttg

SEQ ID NO: 23405 - DNA, 415 bp, Gossypium hirsutum
  Clone ID: GOSHI-09MAY01-C111370_1
tttcttccacgcgtccggagaaatggagggaagcaaaatgagcatgattttgattgcctacatcacacttgttgcgagcggagcgatgggtttgagggaggaccaaggagcggttgcaccctcaccaatggaaagtggcggagtggctctgggtgttccggccgcacttgctgctgccttagcttctatgcttgcatttggctgcttcttttgattttaattcctttggtgaatactgttttccagtttccatttcctttcatttgccaactagtttctttctctgtaaatttcattggtatttttaagaaattgaataaaatcttgatttatttcaaagtgctaacccaacaattaacagacaaaggaaatgatttactggtcctaacaccaaatataacaaaaaggtgacctg

SEQ ID NO: 23406 - DNA, 657 bp, Gossypium hirsutum
  Clone ID: GOSHI-09MAY01-C11308_1
ccccgcgtccgccccgcgtccgcccttaggtctttctccttcatcatcgtctatttctcttcttctttttctttgtgtgttcttcttctttttggggggtaaaacagccattgaattgaagctcagtggactctttttatccatacccttcttataaacttaggaatttgttggattttcggctctttctttagagatcaatagtgttgcagtcagagcagatccatggcctttgagcaatattatgctcacgaatggaagacgatccccagtgattcaacatccgagaacttcaatggtagcttcgactgcaatatctgtttggactttgcgcatgaaccgatcgtcactctctgcgggcacctctactgctggccctgcatctataagtggctgcacgtccagagtgcctcacttgccccagatgagcacccacagtgcccagtttgcaaagctgatatatcccacaccaccatggttcccctttacggtcgaggccaatccgaatctgagctccaaggcaagcagacactttatagaggcatggtgattccccctagacctccagcttgtggcaacaaagctcttttatcaactgcatcccccaacagtcagcaacttccttatcgaaatccttaccagaacgaaagctacaac

SEQ ID NO: 23407 - DNA, 406 bp, Gossypium hirsutum
  Clone ID: LIB3048-021-Q1-L1-A8
gctagattttttgctcatttaattgatatctgattggggagccagtttcaattttgtcatgacagagatcaatagtgttgcagtcagagcagatccatggcctttgagcaatattatgctcacgaatggaatacgatccccagtgattcaacatccgagaacttcaatggtagcttcgactgcaatatctgtttggactttgcgcatgaaccgatcgtcactctctgcaggcacctctactgctggccctgcatctataagtggctgcacgtccagagtgcctcacttgccccagatgagcacccacagtgcccattttgcaaagctgatatatcccacaccaccatggttcccctttactgtcgaagccaatccgaatctatcttcaaagcaagcagacacttta

SEQ ID NO: 23408 - DNA, 621 bp, Gossypium hirsutum
  Clone ID: GOSHI-09MAY01-C11268_1
cccacgcgtccgcccacgcgtccgcccacgcgtccggtcaagagttattcgatggttatagatggatattgcaaatctggaaatttaactgaggcatttcagttactggataaaatgccctcaaagggtgttccacctgatagttttacttattgtgcccttattgacggatgctgtaaaggaggagaattggacaaggcgctctctttgttttctgaaatgttgcagaagggttttgatcccacctcttctttcaatgcattgatcaatgggttatgcaagacggggaaaccaaatgaagctatgaggctgttagaagacatggccagtaactgtattacaccaaaccatagaacctatacaatcctaattgattatcacagcaaggcaggaaggatggaagaagccgaaattctctttttggagatgcaaaggaggaatctggttccgaatgttgtaacttactgctcgcttttacatggttactacagattagggaggaaagcagagatgtttgatcttttcgagtccatggctgcaaaaggggttgaacctgatgaaattatttatcgtcttattgctaatgcttacttggaagaaaatagtttgattggaatgttg

SEQ ID NO: 23409 - DNA, 687 bp, Gossypium hirsutum
  Clone ID: GOSHI-09MAY01-C111220_1
taatttgtgagagaggctgttatgaaaatcctgaaacctgatcctaaacttgctgatttcattgaggccgagtgcagcaaagattcatggcaagggatcatcacacggttatggcctatccgaaaatatgtggatgtgattgtgactgggacaatgtcacagtacattcccacacttgattactacagcaatggcctccctctcgtctgcaccatgtatgcatccagtgaatgctattttggtgtcaaccttaaccctctttgcaagccaagtgaagtttcctacactctcgttcccacaatggcctactttgaattcttgcgggttcaaaggaacaatggcgtcactagttctatttctgtgcccaaaactctcaatgagaaagaacaacaagaattggttgaccttgttgatgttaaacttggccaagagtatgagcttgttgtcaccacttattcaggactttatcgttatagagttggtgatgtgctaagggtagcagggtttaaaaacaacgcaccgcaattcaatttcatatgcaggaaaaatgtagttttgtgcatcgattcagataagactgatgaggttgaacttcaaaatgctgtgaagaatgcagtgaaccatatgctgccctttggtgcaacattggctgagtacactagttatgcagataccacaacaattcca

SEQ ID NO: 23410 - DNA, 393 bp, Gossypium hirsutum
  Clone ID: GOSHI-09MAY01-C12958_1
cccacgcgtccgggctgctcagggctctccacaactcctctttatttatttcactaattgttagaatagtgctaatcaacagaatgcaggcatccatgtcggttacctcgacgaactccacattaccaatgccagtgcaaagcagccttggattctctcaccgcttccttccttcatctcatcggttttctcaacttccgatcacccgcttttctcccgctcctacttcactcaaatgcaggggctctctttcaagctttccacttgttaatgatgaaaagaagtttgtggaggcggccaaaaaagcaaatttagtccccctttatcgttgcattttctctgatcaactgactccagtgcttgcataccggtgtttggttaaagaagatgata

SEQ ID NO: 23411 - DNA, 1020 bp, Gossypium hirsutum
  Clone ID: GOSHI-09MAY01-C12928_1
gggacctaacattttattagatgatacactccctactgaggttgacaagggattgttgggatctgtcaggggtgctattgtccaaggatttcagtggggtgctcgagaaggacctctctgtgatgaacctattagaaatgtgaagttcaaaatagttgatgcaaggattgcatctgaaccattgcatcgaggatctggacagatcatccccacagctcgacgtgtggcctattcagctttccttatggcgaccccacggcttatggaacctgtatattatgtggagatacaaacaccaatcgactgtgtctctgctatctacacggtgttgtcccgtaggcgtggtcatgttacagctgatgtgccgcagccaggaaccccggcctatcttgtcaaggcatttttacctgtgatagagtcattcggattcgagactgacctgaggtaccacacgcaagggcaagccttttgtctctcagtattcgaccactgggccatagttcctggagaccctttggacaagaccattgttttgcggcctcttgaacccgcaccaatacagcaccttgctcgggagttcatggtgaagacaaggcgtagaaagggaatgagtgaagatgtgagcatcaacaagttctttgacgaggctatggtggtggagctagctcagcaggctgccgatcttcatcagcagatgatataaaccgaaacacggtatatacaagtttgtcatgtttcgaggacttcaacgtacttcctgatatacttggtttgtagtttttaggagagttcaatgttttactgccatccttcctcacccctttcattgggctcaaacttggacaaggtaacagtgttgatgttaatttctagtgaccatagagttaagaatttggtttaggattgtatttgttccatttttgttcatgtcataggtgttgttgtaagttgtgaagagaactgagctgagttattaatatatttgaagttaaatcaaaataatcattcaaatgattatta

SEQ ID NO: 23412 - DNA, 459 bp, Gossypium hirsutum
  Clone ID: GOSHI-09MAY01-C12858_1
ctcacgcgtccgcccacgcgtccgcatcactaaggagaggtttaatcttgtttctggtgcggctccatttgctaaggatccaggactgttagtgggacttagagaggggggcttcgctacttgaagtggttaaaaaggtcaaacctgatgtgcttcttggtttgtctggagttggcggtgtgttcagtgaagaggtgctcaaggctttgcgtgaatctggttcaactagacctgctatttttgcaatgtcaaatcccaccatgaatgctgaatgcactgcagcagatgcttttaagcatgctggagaaaacatagtgttcgccagtggaagccctttcgaaaatatcaatcttggtaatggaaaagtgggctatgtaaatcaagcatataacatgtacctgttcccagggattggttgggaaagtttgtctcaagtgctcgctttataactgatggaat

SEQ ID NO: 23413 - DNA, 652 bp, Gossypium hirsutum
  Clone ID: GOSHI-09MAY01-C12848_1
cccacacgtgctgaaacctcaacggcagctattctctgtctacatatttatgagttggcagccgacgttgtttatcacggtaaacctctcttattcatgtgattcattattcctctttatcttcttcggtttgcggtccgttctgcttgcacaatcggaagattctctctccacgcgtcgagatccgccaccactgacgtcattcctggcggataggttttacagttaattaatcgtattgttcttgaggttaccacagatttttttttatatatctgatctgcgtccgcgaaaaacacgatcgaattagtgctttcaggtagttgatgcttttggttttaggcgctggtcacaaaagtgaaatcataggacgcgtgttagaatggctggagggtcggcttttgatgctcttgctgatgatgatgatcggatggaagtgaatgatgagaatgatgaggatgtggtcgctaaagctttgaaaggcaaaaagtaagaagtctaaagggggaaagaagggtggaaataggtttgcagcggctgcactcgatgaattcgatgaggagttcagtgtgaaagtcgatgagatgaaagccaaggaagaagatgttccttcaatttctttctcggataagaaaaagaaatccaaatcgac

SEQ ID NO: 23414 - DNA, 946 bp, Gossypium hirsutum
  Clone ID: GOSHI-09MAY01-C12878_2
ttcgattatctgcatgcacggtggcatagggagaggagctgggggtgtgcggtcgaacagatagagaaactcgagcgaccgataacaatggatgcaggatccattattttaatggacctgttatggtctgatccaacagaaaatgatagcatagaaggtttgagacctaatgctcgaggtcccggggttgggacttttgggccggatcgtgtgacggacttctgtaagaaaaacaagctacaacttattataagggcacacgaatgtgtaatggacgggttcgaacgattcgctcagggtcaattaattactcttttttctgcaacaaactattgtggtactgcaaacaatgctggagccatattagtcgttggtagaggactggttatcgtcccgaagttaatacatcccttaccacctcccattcagtctccagaaacatcgccggagcgtgttggagacgacacatggatgcaagaactaaacatccaaagaccaccaacaccaactcgtggtcgccctcaacccgaccacgaccggagctcacttgcatatatatgaacacggcattacaaattcaaggacttacaaccttttttctaattgacaaatctctgtgtacgtattattgctcgtgtagtttctcgaagatggaagccattgtttattgtatgcatagctatggagtttgaagatcagtatttaaccagtgaaattcaatatatgcatatagttttgttagttatttaaagagggattttataggataatttatagtgatttgggtcaaattaatttttttgttttcttttttcatcagtttgtgcattgtggcattaatggtgatacatttaggttttatatgaagaaatatttttttttttttaaaaaaaaaaaaaaaaaaaaaaaaaaaaaaaaaaaaaaaaaaaaaaaaaaaattctataa

SEQ ID NO: 23415 - DNA, 1112 bp, Gossypium hirsutum
  Clone ID: GOSHI-09MAY01-C12878_1
cccacgcgtccggtttgctagacatatgtctccgcaaggccgcccgcgtacggtcatttctacattgcttaggccccgtaactggaaagctccggtaaataggaggtttttcttggattcttatgaagtgggggagctctgctatgctgccgaacagctatttatgcaagaacccaccgtccttcagttgaaagctccggtcaaagtatttggtgatcttcatggacagtttggtgatttaatgcggctatttgacgagtatggatttccttcaaccgcaggagatattacgtacatcgattatctgtttctaggagattatgtcgatcgaggacagcacagcttggagacaattacattgctccttgctcttaagattgagtatcctgaaaacgttcacttgattcgtggaaatcatgaggctgctgacataaatgcactcttcggttttcgtattgaatgcatcgagcgaatgggggagaacgatggtatatgggcatggacacggttcaatcaattattcaattatcttccacttgctgctcttatcgaaaagaaaattatctgcatgcacggtggcataggaagatctatacattcggtcgaacaaatagagaaactcgagcgaccgataacaatggatgcaggatctattattttaatggacctgttatggtccgatccaacagaaaacgatagcatagaaggtttgagacctaatgctcgaggtcccggtcttgtcacttttgggccggatcgtgtgacggacttctgtaagaataacaagctacagcttattataagggcacacgaatgtgtaatggcggttcgaacgattcgctcagggtcattgattacttcttttcttgcacatactattgtgtactgaaactatgcttgagctctatagtcgttgtagaggactggtattcgtccgaagtatacatccgtacacactccatcagttcagaacatgtccgacgtagatagaccttgatgcggatctacttcaagacccaacccaattggacgctaaaccgctctatcggtcctttatattaacaggttacattgggataaatatttattagcaataagtgtcgtgttggttg

SEQ ID NO: 23416 - DNA, 553 bp, Gossypium hirsutum
  Clone ID: GOSHI-09MAY01-C12828_1
cccacgcgtccgcccacgcgtccggttggtagaagctattactcatgcttcacgcccatcatcgggagtatcctgctaccagcgtttggagtttgttggtgatgcagtcttggatcatcttatcacaagacatttgttttttacatacaccaatttgcctccaggtcgcttgactgatttgcgtgctgctgccgtaaacaatgaaaactttgcacgtgttgctgtaaagcatcagttgcacgtgcatcttcggcatggatcaagtgcccttgagaaacagattcgggacttcgtgaaggaagttcaggatgagttattaaagccaggtttcaactcttttggattgggagattgcaaagcaccgaaagttcttggagatattgttgaatccattgctggtgccatttttcttgacagtggacgtgacactgcagttgtctggagggtttttcaacctctgttgcatcccatggtgactccagagacattgccgatgcatcctgtccgggaactacaagaacgatgccagcaacaagctgaaggcttggaatac

SEQ ID NO: 23417 - DNA, 438 bp, Gossypium hirsutum
  Clone ID: uC-gsronu33B062e12b1
ttcacgcgtccgggctgaggttgagtcaagccgtggtcaacttaagaagagcatgagttattctagttcgaggaggattgaggtagaggagcttttgccgtatgcgcatggatacaccgagctaaattttttctaaaggaggttacgacctgcattcaatgagcttaaatatcatttggcaagaatttcaatgtgcttctacctctcagcaatatttttttttttctgaatcaatcaggtaaaattcactttgaggagatccattcttgagggtgatagagacgttcctttgctcactaaccaaaaaaaggtgtaaacttaactaactcgaattccaactcaatcataacatgatgtcagcttacaacattccaatctcaatgcaactgattaacaaaaaagtccacttctaatccatctcgaaacaagcttcgatag

SEQ ID NO: 23418 - DNA, 349 bp, Gossypium hirsutum
  Clone ID: LIB3166-054-P1-K1-B9
cggatactgtggtacggagaaggtattcatcaattatcttatgtccgtggggaagctaagttctcagatcacagaccggtttatggtatattttgggctgaggttgagtcaagccgtggtcaacttaagaagagcatgagttattctagttcgaggaggattgaggtagaggagcttttgccgtatgcgcatggatacaccgagctaaattttttctaaaggaggttacgacctgcattcaatgtatcctctctttctgtacacacacacacacacacacacacacgtgaatgcctatttatatttgcaaatatttgttatttttaaccattacttaagtgatttctat

SEQ ID NO: 23419 - DNA, 763 bp, Gossypium hirsutum
  Clone ID: GOSHI-09MAY01-C12518_1
cccacccttccgcccacccgtcctaaaggttgttggccaaggtgcttttgcaaagggttatcaagtaagaaggaatggtacctcagacatatatgcaatgaaagtcatgcgcaaggataagattatggagcaaaatcatgctgaatacatgaaatctgagagggctatattaggaaaagtggaccacccgttcattgtgcagctcagatactcattccaaaccaaatataggctgtatcttgttcttgactttgttaacggggggcatcttttcttccagctttatcgccagggcttattcagggaagatttggctcgcatatatactgcagagatagtatcagctgtttctcatctccattctaatggcataatgcacagggatctcaaacctgagaatattcttctagacgcagagggacatgttatgctgactgatttcggcctggcaaaggaatttaacgaaaatacaagatccaattccatgtgtggaactctggaatatatgtccccagaaattgttcttggcaaaggccatgacaaggcagctgattggtggagtgtgggaattctattgtatgaaatgcttactgggaagccaccctttagtggtggaaacagacagaagatacaggataagataataaaggaaaagataaagctgccggcatttttgtctagtgaagcacactcaatcctcaaggggctgctgcagaaagatgcaagcaagcggcttcgcaagggacaaggtggtagtgaggag

SEQ ID NO: 23420 - DNA, 456 bp, Gossypium hirsutum
  Clone ID: GOSHI-09MAY01-C12798_1
ggggtgaggtaaccgaaagatccttcaactacagacattgtgtgagaacgggcgtgcctagttagcatcttagcaagtccaaaatctgcaatttttgccttgaattcggagtctaataagatattgctcgacttcacatcacgatgaatgatgggtgttgggcactcatggtgcatgtagcatagcccctgagcagctccaacagcaatttgcaaccttgttggccaatccaaaactgaacccatccttgacattggtgatctcttattcccatgaagccatttatcaaggctctgattttccatgtactcgtataccagaagctttgaatcttcactggaaatgcaacacaacaacttcactatgttggaatggcgaatgctgcccagtatttcaacttcagctaaaaactctttctcaagcttgtaatctagtttcttactattccagattttc

SEQ ID NO: 23421 - DNA, 536 bp, Gossypium hirsutum
  Clone ID: GOSHI-09MAY01-C12788_1
cccacgcgtccggtctaacccctgggtttgttgcgcatgatggagtaatctcttcgtttaatcatgaggtcacatggactttctctgggattgattgattcccgttgtggattgctgcgcagctaactaccgaccccgaaatttcatatagaaagaaaaatctcgtatatgatcgatcgcgagttcgagttcggtcatcctggtattcgtgtacttaaccgaccttctccagcaagcgtatcaaaaagcaagcaagtaagttaagtggagagtaaaatgccaacgttagacttgaaatagtacttacagcggatctgtggtcacttattggctcagctcagtcaagtacgtaccggctcgtatttgataagtaggtttttgattgattcgtggggggtcgtggaagaattgggttcgaatcccatagcccgcgaaaaatactttttcaacgaaggcacagatttcattgaaaaggtacggtgacgtatcaagagcagtgcagaaggaccaacgacgatgaaggttacgaaggagaa

SEQ ID NO: 23422 - DNA, 421 bp, Gossypium hirsutum
  Clone ID: GOSHI-09MAY01-C12758_4
acgaacataccacacaccagccttttgattagcctctttctatttgtcaaaaatggcaacgtcagcagtttctgcaacttctcttctgcttttcgtcttcggtttttgcttgcgaggcgcctttggtgattatgggggaggatggcaaggtggccatgctacattctatggcggcggtgatgcatctgccacaatgggaggcgctcgtggatatggtaacttatatagccaaggttatgggaccaacactgcagcacttagcactgctttgttcaacaatggcctctgctgcgggtcttgctatgaaatgaggtgtgacaccgacccccaatggtgcctgcctggatccattaccgccactgcacccacctcctgcccccctaccttggccttgtccaatgataatggtggctggtgcaat

SEQ ID NO: 23423 - DNA, 588 bp, Gossypium hirsutum
  Clone ID: GOSHI-09MAY01-C12758_3
cactaacataccacacaacagccttttgattagcctctttctatttgtcaaaaatggcaacatcagcagtttctgcaacttctcttctgcttttcatcttcggtttttgcttgcgaggcgcctttggtgattatgggggaggatggcaaggtggccatgctacattctatgggggcggcgatgcatctggcacaatgggaggcgcttgtggatatggtaacttatatagctcaagcttatgggaccaacactgcagcacttatcactgctttgttcaactatggaccttaactgtggttacttgttatgatatgaggtgtgttagcgacctcctatggtgcccgcctgggtccttttatttaatataggactctacttatgataccataataatattacttgtctaatatatatgatgcctagctctatattccttatacatattttttacgtttctatttatcctttctgttgattactatatatttgcatgtattatatactatcatactaaaatactctttttaacatagagtattttcttattattaattaatttttattatattggattattctaagtatcag

SEQ ID NO: 23424 - DNA, 593 bp, Gossypium hirsutum
  Clone ID: GOSHI-09MAY01-C12758_2
ccaaccttttaattaccccttttttctctttgtttcctttcttcctctcttcctcacagctcacttcaacgaatactatggtgatagcaccattaactgcaacttctcttctgctgtttgtcttcagttttttcctgcaaggcacctttggtgactatgggggaggatggcaaggtggccatgccacattctatggtggtggtgatgcatctggcacaatgggaggtgcttgtggatatggtaacctgtatagccaaggctatgggactaacactgcagcacttagcattgccttgttcaacaatggtttgagctgcggttcttgttatgaaatgaggtgtgacaatgaccccaaatggtgcctgcccgggtccattaccatcactgccaccaacttctgcccccctaacttagcattgtccaacgacaatggtggttggtgcaatccccctctccagcatttcgatttggctgagcctgctttcttgcagattgctcaataccgtgctggaatcgttcccatttcattcagaagagtaccctgcatgaagaaaggaggaatcaggtttactatcaatggtcactcttacttc

SEQ ID NO: 23425 - DNA, 1005 bp, Gossypium hirsutum
  Clone ID: GOSHI-09MAY01-C12758_1
tttaacaatggcgccaaaatcaccattttctactacttctcttatactcttcatcctcaacttttacctgagaaccaccattggtgactatggtggaggatggcaaggtggtcacgccaccttctacggcggtggtgatgcatccggcacaatgggaggtgcttgtgcccacgcgtccgtatatagccatgggtttgggaccaacacagcagcacttagcactgcattgttcaacaatgggttgagctgtggttcttgttatgaaatgaggtgtgatggtgacccaaaatggtgcttgcctgctaccattatggtcactgccaccaatttttgtccccctaattttgctttgtccaatgataatgtgggggtggtgcaaccctccattgcaacactttgatttggccgagcctgctttcttgcaaatagctcaataccgtgctgggattgtacccgtttcattcaggagagtcccatgtataaagaaaggaggagtccgattcacaatcaacggccactcatacttcaactcggtcctaatcactaacgttggcggcgccggagatgtccactcggtgtcgatcaagggctcgaaaactgggtggcaagcaatgtcaaggaattggggccagaactggcagagcaacacctacctcaacggccaaaccctgtctttccaagtcaccacaagcgatggcaagacccgaaccagctacaacgtcgtgccggcgaactggcagttcggacaaacatacgaaggtggtcagttttagaggttcagccattgttagagttaaaagagaagcttagtattgttgctgaggtggcttattggcacccgcttaaggccttcatgtattttttttacattattgaaggattgtgtgagatataagtaaagaggggaaagtccattgtttttgggttttgtttaattttgtagccattaaagactatgaattaatgattgctttacttaattccaaagttactttatagtttaat

SEQ ID NO: 23426 - DNA, 613 bp, Gossypium hirsutum
  Clone ID: GOSHI-09MAY01-C12768_1
ctctcacattttatcttctctttttcccattttctgttgactacccccatttgcctttcattaacccagcttttcaattttcttctctgttttttttctcatcatggaagaggcaaaggtgttggaagctaaagaaggaaccatttccgttgcctctgcttttcctggtcatcaagaagctgtacaggatagagatcacaaattcttaacacaagcaattggagaagcgtataaaggggttgaatgtaaagatggagggccgtttggtgcagttgtcgttcgcaatgacgaagtcgttgtgagttgtcacaacatggttttgagaaacactgaccctactgcacatgcagaggttactgctattagagaggcatgcaagaagctgaatcaaattgagctctcggactgtgaaatatatgcttcatgcgagccttgcccaatgtgcttcggtgctatccatctgtcgagaatcaagaggctggtttatggagcgaaagcagaggcagccatagcaataggatttgatgatttcattgcggatgctgtgagtgctactgggttttaccagaaggctaatctggagatcaagcaagccgatggaacaggtgctgtc

SEQ ID NO: 23427 - DNA, 236 bp, Gossypium hirsutum
  unsure (1)..(236): unsure at all n locations
  Clone ID: LIB3146-052-Q1-K1-E7
cccacgcgtccgggaagaggcaaaggtgttggaagctaaagaaggaaccatttccgttgcctctgcttttcctggtcatcaagaagctgtacaggatagaaatcacaattcttacacancaattggaaacatataaggggtgatgtaaggatgaggcgttgggcattgcgtcgaatgacaatcgtgtggtgtacaacatggttgaaaaactgccctctgacatgcgaggtactgta

SEQ ID NO: 23428 - DNA, 1267 bp, Gossypium hirsutum
  Clone ID: GOSHI-09MAY01-C12688_1
agaaggccttgagaaagcagcaccattcctgaaggcccttattgaaataccgtttattaaatcggttatccaaggttttctacctggtattgttttgaagctctttctcatttttctgccaactattttgatgatcatgtccaagtttgaagggttcacatcaatatcatctttggaaaggagatcagcaactagatactatctctttaatttagtgaacgtattcctcggcagcgtaattgcaggcagtgcactggaccagctaaacacgtttcttaagcaatcagcaaatgagattcctaaaacaattggtgtagctgtaccaatgagagcaactttctttattacttatatcatggttgatggatgggctggaatagcagcagagattttgatgctgaaaccgcttataatttaccacttgaagaatactttcttggtgaaaacagaaaaggacagggaagaggcaatgaatccaggaagtttgagcttcaacgttggagaacctcgtatacaactctattttctacttggcatggtttatgctaccgtgacacctgttctacttccattcattgtagttttcttcgggctagcttatgttgtcttccgtcatcagatcatcaatgtttacaatcaagagtatgaaagtgcggcggcattctggcctgatgttcacggacgcattataattgctttgcttgtctcacatgtcgcgctcattggattgttaagtacaaagcatttggctcaggcagcaccacttctcattactctggctgtcctcacaatctggttttacagattctgcaaagcgcgatatgaacctgcttttgtcagatatcctttgcaggaagcagtaatgaaagacactttggaacgcgcacgggattcaaacttcaatttgaaaccctatcttcaaaatgcatatatccatccagttttcaaagaggaggatgatgacgaggaggaggaggttgtcaagttagaaaatgagagtgtgttagtacccacgaaacgccaatctcgaaggaacacaccagtacctagcaaaatgagcggtgcatcctcacaatccttaccgggggctgttcctgaacattcggtgccctaaactaggtaacaactgtgaaccgatgttgtcaccatactgctatatttgacactgagcaaaactatgcagcacactgtaaattaaacgaacaaataatgtaaattaaatggtcaaactctatatctgttccatgcttttttttggttgcaagga

SEQ ID NO: 23429 - DNA, 501 bp, Gossypium hirsutum
  unsure (1)..(501): unsure at all n locations
  Clone ID: LIB3584-010-P1-K1-D7
tcgttcaatgtttacaatcaagnatatgaaagtgcggcggcattctggcctgatgttcacggacgcattataattgctttgcttgtctcacatgtcgcgctcattggattgttaagtacaaagcatttggctcaggcagcaccacttctcattactcttgctgtcctcacaatctggttttacagattctgcaaagcgcgatatgaacctgcttttgtcagatatcctttgcaggtttgttggtgtttacatatttagttgatggtttcatccgtgttttcagtgattcattcatgattaaagctttcacaatcttatttaatgaatttagttaaatgactaccactagagtgatgaatgaactgcatgttcaatcatcataatcattactttctctgttgtttgtttcaagaagcagtaatgaaagacactttggaacgcgcacgggattcaaacttcaatttgaaaccctatctttaaaattcatatatccatccactt

SEQ ID NO: 23430 - DNA, 405 bp, Gossypium hirsutum
  Clone ID: GOSHI-09MAY01-C12108_1
cccacacgttcggctttttttccccttggatttgatcttccatggcttccaatggcgcttctactgaacagggagttagggatgtgacggagaacagtttggaaaagatcaaacggcagctggcctctggctctggtaggaacttgctacaaggtccacttctcaagcgatctgaaaccttgaggaaatggaatgaacgttgggtgatattagaccccacaacagggaaaatggaatacaagactaggaggaatgagccaactgttaagggaatcatgaccgttcaatgaatacagcaccattgccatatcttctggtaactttcatggccttccaaagttcgaaggctgctgtttctatattgggactccccagataaattgactactttctttgtgcggagac

SEQ ID NO: 23431 - DNA, 970 bp, Gossypium hirsutum
  Clone ID: GOSHI-09MAY01-C112060_1
caaaagttgatggatgagataagtagtctgtcctctccatcttgctggagtaaggaatacagtaggcttggcgatatgcagcctactaatcttgctgatgcatttggatcactcgatccttccttgctatctccattgcatggactgtccgtaaaatctgcaacaccaacccagatgcaatctccaactgctcttcaaatacgccaaaaccaactccgcgcaacctacccaccaaaccattcatcctcccttgtaaggaacccctcggcatatggtttcgactcctctgctgcagtggcagcagcactaatgaactcaaggtcttccgcatttgcaacccgcgcccccgccctcgcggccccgggcgcgggcgccagtcgtgccggactcaccgcacctgctaattccgcaaccatgatgtcctcaaacatatccgattggagctcccctgatgggaaacttgattggggcattcaaggagatgagttaaacaagcttaggaagtcagcttccttcgggttccgtaacaccccaaccccaaccccaaccccaaccccatccatcatcgacgagccagatgtctcgtgggtccattccctcgttaaagatgttacacccgcctccagcggctcgatgcagcaacagcagcaacaatacaacatcggtaaaggtgttcgagaaaggcttccaccatgggtggaacaaatgtacatagaacaagagcagatggtagcataaaagagaccctttttgctcattgctttaaatctaacttccatccagttggtaatagtaattccgatagtagcgttagtccacggtagaatactccgatcggtcggtccacgaagtaaaaagaaaaattacatgggcaggaaaggtttaagttactgctcatgctttagaggttttaggagaaagatgaaaactaagcaaaaacaaaataaatttattgattagttcatattct

SEQ ID NO: 23432 - DNA, 417 bp, Gossypium hirsutum
  Clone ID: GOSHI-09MAY01-C12038_4
cgagcccgagagtgagttggtaacctgggagtcaaaatcttcccaaatcgtgctgggccctctccaatgcgagaccgctctcttctcttagaaaccccaccgtcgagccatgtgctctaatcacccgaaccaccgccaatcgcgcctccctcaacctcctctccctacagcgtgcgcctcgctattcacacacaccgtcccttctctctcctcttctgccaccccaaccacatacgctcgcccttctccgccgtccacctccggcactccctccagtctgtctaagcctgctgagtacgtgatctccaaggtcgatgacctcttgaactgggcccgtcgtgggtccttacggcccacgccttctcttcctctcccatagccccccttcttaccatacacttttttcctttttttctc

SEQ ID NO: 23433 - DNA, 1032 bp, Gossypium hirsutum
  Clone ID: GOSHI-09MAY01-C12038_1
gtgagttggtaactgagtcaaaatcttccaaatctctgggcctctccaaagcgaaccctctcttctctagaaaccaccgtcgagccatggctctaatcacccgaaccaccgccaatcgcctccctcacctcctctccctacagcgtgccctcgctattcacaccaccgtcccttctctctcctcttctgccaccccaaccacatacgctcgcccttctccgccgtccacctccggcactccctccagtctgtctaagcctgctgagtacgtgatctccaaggtcgatgacctcttgaactgggcccgtcgtgggtccatatggcccatgactttcggcctcgcttgctgcgccgtcgaaatgatgcacgccggtgcttctcgctacgacttcgatcgctttggtgtcatttttaggcctagccctcgccaatccgattgcatgattgttgctggcactctcaccaacaaaatggcccctgctcttcgcaaggtttacgaccaaatgccagagcctaggtgggtgatttcaatgggaagttgtgcaaatggtggtgggtactaccactactcatactcagttgtaagaggttgcgatagaatcgtccctgttgacatctatgttcctggttgtccacccactgcggaggcgttattgtacggagttcttcaattgcagaaaaagatcaacaggcgcaaggatttcctccattggtggtccaagtaagaaaatttgcaagttatttcagggctatttgcactgcattttgcagtgttgagtaacaaataaataaaatcaaactttctggtgaaatgccatgtagatggagattgttcagaaaagcttttgattataaaagttcatggggtttctattactttgcatggtgactgtacttcctgtttcatttggaacttacagtttttgtttcggatttaaatgggtctgaattatgaataatttcattgtttggtggggggcggggggaaaaaaaaaaaaatcatgtttttttttttcttttgggggtgaaaaa

SEQ ID NO: 23434 - DNA, 407 bp, Gossypium hirsutum
  Clone ID: LIB3146-059-Q1-K1-B2
ctctttcccaagcaacaaacagaggcacttttttgattaaatcactggacaaacactaccggagccggtagattcgtaacttaacggacttcttcaattgcaaaaaaagatcaacaggctcaaggatttcctccattggtggtccaagtaagaaaatttgcaagttatttcagggctatttgcactgcattttgcagtgttgagtaacaaataaataaaatcaaactttcttgtgaaatgccatgtagatggagattgttaagaaaagcttttgattataaaaattcatggggtttctattactttgcatggtgacttgactttctgtatcatttggaacttacagtttttgtttcggatttaaatgggtattaaatatgaataattttattggttggtgtggtatt

SEQ ID NO: 23435 - DNA, 420 bp, Gossypium hirsutum
  unsure (1)..(420): unsure at all n locations
  Clone ID: LIB3135-041-Q1-K1-F12
ctctccaaagcgaaccctctcttctctagaaaccaccgtcgagccatggctctaagcacccgggccaccgccaatcgcctccctcacctcctctctctcctcttctgccaccccaaccacatacgctcgcccttctccgccgtccacctccggcactccctccagtctgtctaagcctgctgagtacgtgatctccaaggtcgatgacctcttgaactgggcccgtcgtgggtccatatggcccatgactttcggcctcgcttgctgcgccgtcgaaatgatgcacgccggtgcttctcgctacgacttccatcgctttggtgtcatttttaggcctagccctcgccaatccgattgcatgattgtcgctggcactctcaccaacanaatggcccctgctcttcgcaaggtttacgacca

SEQ ID NO: 23436 - DNA, 357 bp, Gossypium hirsutum
  Clone ID: uC-gsronu33B089c07b1
cctccgaactgagcaatacttccgctctatttaaaaaaacaaaggggttcctaaattatctagaaaccaccgcccagccctgcctctaatcacccgaaccactgcccaatcgcccacccatacctcctttccctacaacgagccctcgcttttcacaccaccgccccttctctctcctactctgccaccccaaccacatacgcccggccttctccgccgtccacctccggcactccatccagtctctctaagcctgctgagtacttgatctccaaggtcgatgacctcttgcactgggccccccgagtctccatctgacccatgactttcggcctcgcttgctgcgccgtcaaaatg

SEQ ID NO: 23437 - DNA, 264 bp, Gossypium hirsutum
  Clone ID: GOSHI-09MAY01-C12388_1
cggacgcgtgggcggacgcgtgggcggacgcgtgggttttttttttgttcttgggggtgtttgatagttaaagaaactgtgaaaatgccggtccaggccgtttatggtggtatcgggtgactggtaaatgaaaaaaattgtcaataaattggaaattatatgatgttgaatgcatagtttctagtttgcctgtaaagatgtaactgttgttatatgtaatacattataccgtcaatgaaagttcttgtttattttttcttctca

SEQ ID NO: 23438 - DNA, 528 bp, Gossypium hirsutum
  Clone ID: uC-gsflnu33B037b07b1
tgtcgcgtggggtgattgcccaaaccgacggggctcgcatgtcgatagcttctttttacaaccccggcagcgacgccgttatctacccggcgccagccctggtggagaaagaagaagaagaagagaagaaaggattgtacccaaaatttgtgttcgaagaatacatgaagctttacggtgtgcttaaattccaggccaaggagccgaggtttgaagccatgaaagccagggaagcaacagcttaaagagaattcaatacctgacgtagctttgagtttgatcaagaaatgggttctgttaatggtgtattaaagaaaaaagaagtcaatgtttagtatagtctattgaataatctattttattctaaacagtgaggatcctgtcaatttctactataaaagatttgatagaataaaattacttacaaagggaatggtgggttgccacaaaggaacatgaagatatgcaataatctattttaagtgtgtgagaaaaaaatattaaagaaaaaagaagtcaatgtttacc

SEQ ID NO: 23439 - DNA, 352 bp, Gossypium hirsutum
  Clone ID: uC-gsronu33B104f09b1
cccacgcgtccgcaaaatttgtgttcgaagattacatgaagctttacgcagtgcttaaattccaggccaaggagcccaggtttgaagccatgaaagccagggaagcaactgctcccattgtaacagcttaaaagagaattcaataccttacgtagctttgtgtttgatcaagaaaggggtactgttaatctattttaagctttttaatggtgtattaaagaaaaaagaagtcagtgtttactgtaggtgagtgttttgattgaatattctaaacagtgacgaccctgtcaatttctactatactatacaatgtaacattgaagtagaaaagatttatgctgtgatatgtttt

SEQ ID NO: 23440 - DNA, 378 bp, Gossypium hirsutum
  Clone ID: LIB3166-051-P1-K1-E3
gtttttgagaattttcaaagtttataaattttaccaaaaggaggtctgtatccttgggggctccttttaaattgtgccgagacttttacccttaaccataccacgaagttttaaacttcatccatcataaacacataaacaaaggcctcacgtcaacttaaaagaccatcatcttcatcaacaagtgatcgactaacaaaatccaggttcaggacacagccgtatacactgacgagggaatggcagcaacaataaaagcaataaaagctattttggtccaaaagttgaaagaaagccaactaattgagaatcaaatcaaaggactagaggaagcgctgaaagatcttggaggatcagcagtagacctaccaagcccag

SEQ ID NO: 23441 - DNA, 346 bp, Gossypium hirsutum
  Clone ID: LIB3272-045-P1-K1-B3
agtttataaaagagaccaaaaggaggtctgtatccttggaagctccggcttcattggaccaagacgtttacccttaaccatacctcgaagttttaaacttcatccatcataaacacaaaaacaaaggcctcacgtcaacttaaaagaccatcatcttcatcaacaagtgatcgacgaacaaaatccaggttcaggatttctcaattataactcaaggggaaccgtaatcaaggcaagcttatcaggtggcaacttaaaataaggagctccatgttaaaggcctttttattttaggccacagccggttcacttaccagggattggcaccaccattaaaggcattaaa

SEQ ID NO: 23442 - DNA, 579 bp, Gossypium hirsutum
  Clone ID: GOSHI-09MAY01-C112350_1
ttgtaagggtacccaaaaagactgaagactatttcatcatttattcacattcttcaatcttcagctatagacgaagaaaaaaagaaaagatgaatcaaaacatgagctctttgttgatcggaatagttggagcagcagtgactttatcagcatattcgcagactttcatctccccgactcagtgtgtcactgttggtctcctcgttctcatgtttggtttgctcgtcagggaaggcctcatctctctctaatcttctttttttcttccatggaattgagaatcccagatttgcagtttgacttgtttcaatcttatattatgatgttcttctttagcaagactgagatttatatatatatatacgtatatatatgttgtaattctgtatttcctgcttaattactccgtgatctacttatgctgtttatttatacatattataagatgaaacatgcttgaattcatggtagtttttcatttagtaaatgaaaaacatatcttggtaaaattaccatgaaggaccttgtactacaaattagtcctcgtatgttagattaaagaacgatttgatccttttt

SEQ ID NO: 23443 - DNA, 838 bp, Gossypium hirsutum
  Clone ID: GOSHI-09MAY01-C12368_1
tcccccctgttttccagatttgtcatcacttgagaatgcaaacactttgggatcattacgactggggaagtatacagagtggtttaatgatgtgcattcaactgatatctcggatgtctgtgaagatgttcttaagcttttgtcaaaaagccatggatgcgaaacaatagagatagtaataccagaactacatgagatgcgcactgctcatgttgtttcaattggatcggaaacacaatgctcgttaaatccggattgtgaagacgggaaaggtgtgaaattgacgtatgatactcgcataagtatggcactttttcgatcattcactgcatcggattatgtagctgcccaatgtcttagacgaaggataatgcaccatcacatggagatcttcaagaaggttgatgtcatagtgaccccaacaactggcatgacagcaccaaaaataccatctagtgctttgaaagatggagagacagatatgcaggttacagcttatctcatgaggttcattattgccggtaatcttcttggtcttcctgccattaccgtccctgttggttatgacaaacaaggccttccgataggcttgcagctcataggccgtccgtggggtgaagcgacaattttacgtttggcttctgcagttgaggaactttgtgctaaatccaggaagaagcctgcttccttccatgacctcttaaagaccaagtaaaaagccttttacagctccaagatgcatggactacgttttattgcagatacctatgtttatatcacctatgatgatgtatcatgtaaacattgtttgcttatttgatatctgctatctttcgac

SEQ ID NO: 23444 - DNA, 557 bp, Gossypium hirsutum
  Clone ID: LIB3829-029-Q6-N6-E9
gtcgaaatgatagcagatatcaaataagcaaacaatgttacatgatgcatcatcataggtgatataaacatagggatctgcaataaaacgtagtccatgaatgcttttacttggtctttaagatgtcatggaatgaagcaggcttcctcctggattcagcacaaagttcctcaattgcagaagccaaacgtagaattgtagcttcaccccatggacggcctattagttgtaaacctattggaagtccttgtttgtcatgaccaacagggacagtaatggcaggaagaccaagaagattagcagcaagaatgaaccgcatgagataacctgaaacctgcatgttcgattctccattttccagagcactaggtggtatttttggtgctgtcatgccagttgttggggtcactatgacatcaaccttcttgaagatctccaggtgatggtgcattatccttcgcctaagacactgggcagcaacatagtctgatgcagtgaatgttcgaaaaagtgccatacaagtgcgagtatcataattcaatttcacacctttccca

SEQ ID NO: 23445 - DNA, 509 bp, Gossypium hirsutum
  unsure (1)..(509): unsure at all n locations
  Clone ID: LIB3829-022-Q6-K6-F1
aaaaatgtaagacaatgggaatagtaataccagggcgggagggagagcgtatagctcatcttgtttcaattggatctgaatcactatgctcgctatattttttttttttnnannnnaaannnnnnaatttgggggggggggggggnactnnnntnncnctttttnnnncnttcnctgcctgagagtatattgctgccncgtgtcttttgcctttgttttattgccgtgttgttgtgatctcccttccggttgctcgttgtggtgtttctttttcctttctgctcgttgccctgttcctttctgcttctcttcgttctttctttttccccttcccgttcccttcccgtttcgccttcctggttttttttttcctcttctccttgcgttctcttctcctctctcttccctttcctctcctttcccgtccctttcttgtttccctcttctccctcttcttcttctccttcctttcccttccctttccctctccctttcccttctcctttcct

SEQ ID NO: 23446 - DNA, 384 bp, Gossypium hirsutum
  Clone ID: LIB3189-027-P1-K1-G11
tccacgcgcctgccattaccgtccctgttggttatgacaaacaaggccttccgataggcttgcagctcataggccgtccgtggggtgaagcgacaattttacatttggcttctgcagttgaggaactttgtgctaaatccaggaagaaacctgcatccttctatgacattttaaatatcaaataaaaagccttttacagcttcaagatgcatggactacattttacagaagaccctcaacaaccctcaaccggctgctcaagaatgtagtatgatctaatcctgaaatgatgtttcttaatacatgtatgaataagctttgctctctgaactgatgttccaatcgattttactatagctttttccctatatttttttttatttt

SEQ ID NO: 23447 - DNA, 485 bp, Gossypium hirsutum
  Clone ID: GOSHI-09MAY01-C112330_1
cccacgcgttcggaagaactgttgaaaacattttggagctagctgggttcaagaatgtcaaatctaaggttattggctcaaggaaccctcacaacaccgtcaaggctgtttttaaagccctcaatgcagttgaaacaccaaaagacattcaggagaagtttgggagaacggttgttgagaaacacttgctgcaatagccccccccccccccaattcataccctgtattttggatcagataaattgaaaagaaaaaccccttcaaagttttgtcattgtttgatgctttgccatgtatttggtttcatagcccagcacccatttcaaccatttttttttcttttgaaataattcggggctctggttttgtgcctaaatattttagataatttttttttctttttctgaacttggttttctcctcttttttttgttcttttcttttaagtccaattagtgctttggaaaaggtcttttagccttaat

SEQ ID NO: 23448 - DNA, 480 bp, Gossypium hirsutum
  Clone ID: GOSHI-09MAY01-C12298_1
cccacgcgtccgcccacgcgtccggaaagatcgaaagtcaccattctcgcctaaaacaatggatttcagagtcatgggtttcgattcaccactgttccataccctccaccacatgatggacctcaacgaagacggcgataacaagaacaaccccaacgccgcgtcaaggacctacgtacgagacgccaaagccatggcggtgacaccggcggacatcaaagaggactcgaagtcgtacatgttcgttgtcgacatgccagggctaaaaccgggggacataaaggtgcaagtggaggaagagaatgtgctgttgataagcggagaacggaagcgagaggaagagaaagaaggggcgaagtatattcggatggaaaggagggtggggaagttgatgaggaagtttgtgttgacggacaatgcgaatagggattgtgtaaccgccgagtgtaaagatggggttatgactgtgacggtggagaa

SEQ ID NO: 23449 - DNA, 469 bp, Gossypium hirsutum
  Clone ID: GOSHI-09MAY01-C12288_1
cccacgcgtccggctctttccctttgacttggtacatgacctccaaaacctagagaacctcatagttcgtggctttggacaaatagaggaaataataggaccaaaagatgaggaagacaatcacaagggaaatggaacgcaagctccaacaaagttcagccttcccaaattaaaggagttagaattgacgtgcttaccagagctgaagagcatatgcagttcaaatagggaaatggtatgcaactctcttaggaaaattaaagtacggaactgtacgaagctaaaaaggatgcctctgtatcttcctctttttcaagacacacaccaatcagctccttctgctcatcctttcgaaagaatccgcatatgtccaaaggagtggtgggaatcagtagagtgggactatccgaatgctaaggaggttctgcgaccttggttgaacttgtattagcgctgctggaagcctttg

SEQ ID NO: 23450 - DNA, 581 bp, Gossypium hirsutum
  Clone ID: GOSHI-09MAY01-C12258_1
cggccgcgtggggtctgattgccggaagcagatttcagaagcattggctgctgataaatttgagcagagggggatgaagaaggagtatgagtattcaatgaatgttctatctttccagatacaaacatcggatattattccagcatttccttatgtagcaccattttcatctactgtgcctgattgttgtcggattgtgagatcttttattgaagattctgttagttttatgtcttatggtgagcagttggatttctacaatgttaagaagtatttagaccggcttctgagcgaggttttagatggggctcttttgaagcttattagttcatctgtccatggggtttctcaagcaatgcaggttgcagcaaatatggctgtttttgagcgtgcttgtgatttcttctttcgtcatgctgcacagctttcaggcattcctttgagaatggtagaaaaaggtaagaggcagtttcctcttaacaaatcccgcgatgctgcagaagaaatgctttccgggatgcttaagacaaaggttgatggtttcatgacattgattgagaatgtgaactggatgaccgatg

SEQ ID NO: 23451 - DNA, 730 bp, Gossypium hirsutum
  Clone ID: GOSHI-09MAY01-C12218_1
caaaatgttaaacccaatggcgatcccaactcagttagtcctctcctttctcctcctttctttttcccccgtcgttttttcagaccgtgaagattgcgtttactcggtctacataaggacgggatccatcatcaaaggcggaaccgactccatcatcggcctacggctctacgatgccaatgcctactcagtggagatcagcaacatcgaagcgtggggtgggttaatggggccaggatacaactatttcgagaggggtaatttggacattttctcaagtaggggacgttgcttggatgcccctctttgtgccatgaacttgacctccgatggttcgggtgagcaccatggatggtactgtaactatgtggaagttaccatgactggcgtccataaaccttgtagccagcagcagttcacggtggagcagtggttggcgctcgatgccccaccttatgatctcaccgccattagaaactattgtccctcggaggttcccgatgatcgtcgtcataggaagtctagctctagcatttgatgcgttttagttagaataataataattatcatggtgataatgaggatgattaataagaggggtaggtggggatgattatggactcatggtttgcaccggccctttggtcattagtgttcgtctctttttgttcgatgacgtttgtcgtgtaatgtgacaattatggattaaatatattatgttttcactacc

SEQ ID NO: 23452 - DNA, 658 bp, Gossypium hirsutum
  Clone ID: GOSHI-09MAY01-C112230_1
gaaaaagagagaactagtctcgagttttatttgggcttcgtgctttctgtttccgaggagaaagaagagagatcactgcgaaacagaaaaaggaaaacttattgtggccgtacgattactcctcatcaacggctttgatttgcttgttctcttagatccctccttccttcatcgttcatctcacctcctttggtctaggtctctttaattgagcaatattacaatgggaaaactacgccaatggtagaatagctcggttgcgtctacttggctatcaaaacctcatataacttgcctcaactgatagatcatctgcttttgctttcacaaggccgtcgagatattgaaatgcagtcacctcctgaaaaagcttttgttatgttgaaaagggaagcaactgacttggctgggtcaagttttacaagtcacgtggatagtactttccaagatgctgtaaatgctgctgcttcttctgcttcatcatcctcttcagatgatgactctcaggtgacacaaaatgaagacgaccctttatatggggaatacttctaaacaggtggtgcttttggtcctgctgtagtatactgtggttgtcgcctcctaacccatcaatggcgactctgtggtccaagatttctcatcaaactttgcatcgtgg

SEQ ID NO: 23453 - DNA, 384 bp, Gossypium hirsutum
  Clone ID: LIB3189-023-P1-K1-E1
ggcacaccgcctttcaagtcctctctaccgccgccgcctctcttcttcatttagcaccgccaccaaagacaaagttcctcttctttacaaaagcccagagatcaacgaagacaacggaaatgaagccgtgacactccaagtcctttcatggggcaggggagcatcaggccaactaggtggtggcattgaagaaatcagaatatacccatctccagtagccaatctcctcttaccgcgtgctttcttttccctctccccaaccccaggcaaaacccaaaaccaaaatcaaaaggatcaaactttgcactcggttgggatatcatgcgggttgttccattcgggtttgggtgtcggcggcaagttgtggatgtggggcaaaggtga

SEQ ID NO: 23454 - DNA, 347 bp, Gossypium hirsutum
  Clone ID: LIB3272-011-P1-K1-C10
tggcacaccgcctttcaagtcctctctaccgccgccgcctctcttcttcatttagcaccgccaccaaagacaaagttcctcttctttacaaaagcccagagatcaacgaagacaacggaaatgaagccgtgacactccaagtcctttcatggggcaggggagcatcaggccaactaggtggtggctttgaagaaatcagtaattacccttcttttgtagccattctttctttaccgcgggctttctttttccttttcttaactcttgtgcttaatccttaaccaaaattaaaaggttcaatactttttcttggttgggttattttgctgggttgtctattttgtttt

SEQ ID NO: 23455 - DNA, 753 bp, Gossypium hirsutum
  Clone ID: GOSHI-09MAY01-C13978_1
cccagcgtccgcccagcgtccgcaattagccttaacccattttctgtgtacataaaatgcgtaaaacccttgtttctccaattccctaacaaaccgggaagtggaaacccttgaactccaaattttaaagcatttgaagaatttcactaacgagatggaaattgattccgagtcggaaaaaccaagtgttaaaatcccagaagaaggcggttcaatgcaaatgaattcctcggaaaaaaagggaggcgatgatgaaaaagagcagcttgctggtattatggacaagttaaatatcgagtcatcttcttccggcttcaagaaaaaaccagtaattatcattgttgttggaatggcagggagtgggaaaacgacgttgcttcataggcttgtttgccatactcaagcttcgaatattaggggttatgtgatgaatcttgaccccgctgtaatgacccttccatttggtgctaatattgatataagagatactgttaaatacaaggaagttatgaagcaattcaatcttggacctaatggtggaatccttacatcactcaatttatttgctaccaaattcgatgaggttatatcggtaattgagaggcgagcagatcaactcgactatgttcttgtggatactcccgggcagattgagatatttacttggtctgcttcaggagctatcattacagaagcattcgcttcaacgtttcctactgttgtcacttacgtagttgatacacctcgttcatc

SEQ ID NO: 23456 - DNA, 598 bp, Gossypium hirsutum
  Clone ID: GOSHI-09MAY01-C13968_1
gacccacgcgtccgcccacgcgtccgcccacgcgtccgaaaaaacaaaagaaatccaatcaaactatcagtgcttcacactacacttcaatctccaaagaccaaatcaaagcgaagctcaaaaatgaggtatggcatttcaaggaggaagcgagctttgctacgttgcttattcattctcttcgcagcttttactttcattacccggctcatgctcactctaagatccctcgatgccccgcccaccaccactaccaccacttccaacggagccgtgctggatttgcctgcccagctcgagctcctggacctcaaaagggtcgcctttttgtcttcggccgagacgcccattcaagctgggcccaagaccaagaactgtgcaaccgtggacgaaatgggcaaggtttttagggggaggattttgaaggacagtcttagagttcgaaagcttattcaaactcacttttctatcaacggtaatcgtatttctcttttgagtcccttttcaaagaattactggtaattttttcctattttaggcgctccaagaatccgtgaactgccttcgagcagttttgcagacatgggtttgtgatagg

SEQ ID NO: 23457 - DNA, 694 bp, Gossypium hirsutum
  Clone ID: GOSHI-09MAY01-C113870_1
cccacgcgttcgtgcaagaaactaaggcggctttagagaagatagttaatgtgagattgagcgctgcacagcctaagaatgttccgaaacagtcttcggattcaaagtatattaagtataagccttcacagcaatcggctgcgtttaattcaggtgctaaggagaggataattagaatggtagagatgcctgttgatcctcttgagcctcccaagtttaagcataagagggtacctaaggcttcggggtctccacctgtgccagtgatgcattcccctccacgtcctgttactgtgaaggatcagcaggactggaaaattccaccttgtatttcaaactggaagaatccaaaagggtatactattccgctggataagcgtcttgctgctgatggaagaggtttacaggaggttcagattaacgataactttgcaaagctgtctgaggctttgtatgttgcagagcagaaggctagagaagctgtggcaatgagatcaaaggtgcagaaagagatgatgatgaaggagatggataggaaggagcaggagttgcgagctttagctgctaaagcccgttctgagagaactgggacggtggcaccatctactgctgttccaatgtcatctgatagaagtgcgatggatactgatacgagagtggattatgagcctgcgagggacagagaaagggatat

SEQ ID NO: 23458 - DNA, 627 bp, Gossypium hirsutum
  Clone ID: GOSHI-09MAY01-C13868_1
cattctcaaccgccggcagttggcggctcttcctctgccattagaaaccgcccacgtacgctggcggaactaaccgtaccgcttcctcaacgaaccgtatccctccccgtccctcttccacttcctccggcttccaacgctgctcggtcaacctgctccaacggtaacgctaactctaaacaagtcaacttatcggaaatcgatcgggtcaaccgaataggaagcggcgcgggaggcaccgtgtataaagtcatccaccgtccttcgtctcgcctttatgcacttaaggtcatctacgggaaccatgaagagaccgtccgtcgtcagatccgtagagagatcgaaatcccccgtgatgttaatcatcctaacgttgtcaaatgccatgaaatgtacgatcaaaatggcgaaattcaggtcctattggaattcatggatgttggatctttagaagggactcatatatcacacgaatctaacttatcggttctagctcgacaaatcctcaatggtttaaactaccttcaccggagacacatcgttcatcgcgatataaaaccctcgaatctgttgatcaattcgaagaagaaggttaaaatagctgattttggtgtgagtcggatcttg

SEQ ID NO: 23459 - DNA, 900 bp, Gossypium hirsutum
  Clone ID: GOSHI-09MAY01-C13588_1
cccacgcgtccgcccagagaagagaagaaaatggcctccgatcagaccctttttcactgctgcctcctcactctttacataatcgccttaccaacatggatcagcctttacttcctccaagccccttacggcaagcacaaccgccctggttggggtcctaccatctctccacctttggcttggttcctcatggaaagtcccaccctctggctcactttctttctctttccctccggccaacatttctacaaccctaaatcattccttcttatctccccctttctctttcactacttcaaccgcaccgtcctttaccctcttcgcctctccaggaacaccacccaaaccagggcttttccggtgagtgtagcttttatggcgtttgggtttaatcttttgaacggttatttgcaagccaggtgggtgtcgcactataaggacgactatgaaaatgaagagctgttttggtggaggtttcttggtggattgttaatttttgtatttggtatgtgggtgaatgtttgggctgataaagtgttggtgggactgaagaaacaaggtgatggtggatataagatcccaagaggagggctgtttgagttggtgagttgccccaactattttggggagattatggagtggtttgggtgggcgttaatgacatggtcttgggtgggttttggcttctttctctacccttgtgccaacctgatgcctagagctcgtgccacccggctttggtatttggagaagtttaaggacgattatcccaaagacagaaaagctgtgatcccattcatatattgaagatttgatatttgtgtttatccacatatgattgattcggtgatcaagttgtagtttttaatggtttgattaataaaaaatcgatttcttttc

SEQ ID NO: 23460 - DNA, 810 bp, Gossypium hirsutum
  Clone ID: GOSHI-09MAY01-C113570_1
ctttctggttctcttccaaggcacttgaatccggatctgacccatgttgatgtatctgataacaagctcaaaggaaaggtaccaacttctcttacgcttcttgaaaatcttaaattcttgaatctttcttcaaacgggctagatggggagattcccactgagcttggtaacatgatatccttaaagaatctgtcattggcttccaattcgttctctgggtcgatcccaagttccttttcagctattccaggcttggttcatgtcgatctgagcaacaaccagctaaacggaagtgttccaaagtttttgtcagagctgaaagggttgaaagtgttgaatctggagaacaatcagctcaatggggttttacctttcaatgctagcttcataaagcggttggctgttttcaaggggggtgggaatagcattttgtgttacaatcgccctgttttgtcatcaaaactgaagcttggggttgctcgttgcgataagaatggatttccgattgtagcgccgcctccgaaggagtcctctgcagatagtgagagtgattatggtgatgatgatgcagttgattcaggtaataagaaggagaagcatcacgggccatgtaaggttgtacttggttttgcaattggtatttcttcaatcgttttcctcattattttcttggttctgatcgcaaaatgctgtcgttgaagtgggggaaaagacttttggctatgagttggatctatagatggggaaattggttattccgttgccatttatttattattcatatttaatacacttgatttgggaaaattt

SEQ ID NO: 23461 - DNA, 534 bp, Gossypium hirsutum
  Clone ID: GOSHI-09MAY01-C13568_2
tagagactcttagagctggatatgcaatctttgcttcaggaattattgttgggtttgcaaaccttgtttgcggattgtgtgttggaataattggaagtagctgtgcgctgtctgatgcacaaaactcctcactgtttgtgaagattcttgtgattgagatttttggcagtgcacttggactgttcggggtgatcgtaggtataatcatgtcagctcaagcaacatggcctgcaaagtcggtctaatttcacgatcttagtagaaaatagctattgggttaagaatgcaaacctgtttgtttcatgtgccggttatcagaaatgaaattcacattttttcttttgttttgttattggtagtatgtattatttagaaacttgcttggaagtgtctcctctttttcgttcttataacacatttgtcgagtgagaaataaaactttctatgaaaaccatgatttatggttaagaggatgagttgtggcactgggattttttttgggctatagtaattaattttatcgtcaaaaaaaaa

SEQ ID NO: 23462 - DNA, 951 bp, Gossypium hirsutum
  Clone ID: GOSHI-09MAY01-C13568_1
ctagtctcgagtttttttttcatttcctttttttgtttgttggttttttatcgcgggctgttcaattattcttttttgcgcacaagatctctctctcactctttctctctcctctcttccctgatctcattagatccattcaaagggcaacaaatcatcagaggaagaagtaaagcaaattaagaaaaatggcagcaacattaggagactcaagctcctggtccactgctcttgtcaagatttcaccttatactttctccgccgtcggtatcgccattgccatcggcgtttccgtcctcggcgccgcctggggaatttacataactgggagtagtttgatcggtgccgctattaaagctcctcgaatcacttccaagaatcttattagtgtgatcttctgcgaagctgttgctatctatggtgttattgtggcaattattttacaaacaaagttagagagtgttccatcatcacagatatatgcgcctgagtctcttagagcaggatatgcaatctttgcttcgggaattattgttggctttgcaaaccttgtttgcggattgtgcgttggaataattggaagcagctgtgcactgtctgatgcacagaactcgtcactttttgtgaagattcttgtgattgagatttttggcagtgcacttggattatttggagtgattgtaggtataatcatgtcagctcaagcaacatggcctgcaaagtcggtgtaattttccgctcttagttacaacttagctctgtgagactgcaatctgttgaatgcattagtgactgaaaatggcgcctacatatgtttccttggtttgtgatacgtgcccgggcatgctgaaacatgcttggaaatgctctcttttgttccggtaatgatttgttgaattaggaataaaatttcttataaaaaaccatgatttatgggtttaagtgtctaat

SEQ ID NO: 23463 - DNA, 313 bp, Gossypium hirsutum
  unsure (1)..(313): unsure at all n locations
  Clone ID: LIB3825-026-Q6-K6-B10
gngatttttggcagtgcacttggattatttggagtgattgtaggtataatcatgtcagctcaagcaacatggcctgcaaagtcagtgtaattttccgctcttagttacaacttagctctgtgagactgcaatctgttgaatgtattagttactgaaaatggcgcctacatatgtaaccatgtatttagaaacatgcttggacatgctgtcttttgttccggtaatgatttgttgaattaggaataaaatttcttattaaaaaaaaaaaaaaaaaaaaaaaaaaaaaaaaaaaaaaaaaaaaaaaaaaaataaa

SEQ ID NO: 23464 - DNA, 1925 bp, Gossypium hirsutum
  Clone ID: GOSHI-09MAY01-C13538_1
catgatttttttatcgaagtcaatagtgatttttttttttttgagtcattttggaaaaagcagaggcctacactgtgtccatctactcaagaatttgatgctatataatttcagggcctctccctctttcttcagtcactgtctctaaacaaagcgttcttcatatggttttcctgtttgtttccatggaaaacctgtaccattaccttgtaatcatcttattcattcttctcaccatcaagcttttgattcataaaaccaaaaatttgcctcccagtcccttttctctgccaattattggccaccttcacctcatcaaaaacccactttaccaatcactgaccacgttattatccaaatatggccctgttttatatctcaaattcggttgcagacatgtccttgttctttcttctccttctgctgttgaagaatgcttgaacaagaatgatataatatttgcaaaccggcctcgtactatggccggggatcttatgacgtacaactacactactttcgtttgggctccttacggatcactttggcggaaccatcgccgtctcagcgctgttgagatcttctgttctaacagcgttgaaaagttttcttccatacgtgaagaagaagttgcggactttgttcgtcgcttgtttgaggtctcatcaggcaacggcacccaaaaggtggacttgaagtacttgttttgtctcttgacggcgaatgtcatgtggaggacggtggccggaaaacgtggggtcgaggatcctaaggacgtggaggcagaaaagatgttcttcacggaatttaagagcttgttttttccgagcctagggaccaacatatgtgatttcttcccagttttgaggtggattggtttcctagggattgaaaagaaattgaaagaaatacataggagaagagatgaatatcttcagaatttagtagatgggataagattaaatataagtaagaagaatttttcgctgattgaaaggcttctgtctcttcaacaagacgaccctggcttctgtcccgatcaagtcatcaagaccatggttttgatgatgttcattgcaggaactgaatctacggctattacaatggagtggacaatggcactcctgctgagtcatccagaggctttgcagaaggcaagagacgagatcattcgccatgttggacatgagcgcctgctaaatgaatcagatcttcccaaacttccataccttcgttgtgttgtaaacgagacactaaggttatatcccgcagcaccgcttttattgcctcattgcccatctgaagattgtgtggtggatggatatgagatacctaaaggcacaatactcttggtccatgcttgggccatccaaagggatcctagcatatgggaggagccaaccaagttcaagcctgaaagattttatgagggaactttggaagacaaggaaggattcaaatatcttccaaaatatcttccatttggacttggaaggagagcttgtcctggcagaaacatgggcttacggtccgttttgttggcaattggtgtttttatacaatgctttgaatgggaaaacgtagggtcagacaaggtggatatgacaccaaatactattggattgtctatcctcaaggctaggcctttggaggctttgtgtcgcccacggcctgatgtgattaaacttctctcccaactttagagcgttcatcgtttagtatctacccaattccagattagccatttgatcttttaaatggcatatattatgcacttgagcatttaaactgttttgttttgatatttagattgatgcttgttagaacattttcaaatatttatagtattttaataactataaatgaatgggtgtaattaatcaaaagataaatcttttgatcattggtcaaaagttataaaaaaaaaa

SEQ ID NO: 23465 - DNA, 718 bp, Gossypium hirsutum
  Clone ID: GOSHI-09MAY01-C113470_1
cccactcgtccgcccacgcgtccgcccacgcgtccggttgcaaagaggctctcagcctttggctgcaccattgcctacaccgcaagaaacaagaagcaatctgttccaattccattctatgctaatgtccgggaccttgctgcaaacagtgatgttcttgttctttgttgtgcactgacaaaggaaacttaccacttggtcaataaggatgtcatggtagcattagggaaggaaggagtgataatcaacgtcgggcgtggctcgttgatcaacgagaaggaattagtgcagtgtttagtgggaggagaaattggtggtgctggtcttgatgtgtatgaaaatgagcctaatgtccccaaggagctatttggacttgataatgtcgtgttgtctccacacagtgctcccgcaacaccagaatcctttgaagctgtgctacagctgactggtggcaacttaaaagccttctttttcgaataaacctttggtatcagtagtctcaaatgaatgaaccctttaattcttttgctttaatttaaggcattgacaaatgctcaatgaaggaaggataaaaatttgggttaataattgaatgccatactcttgttgctggagacaaatgtgggtattcttggttaaattgaatttcttttgttagttttgttgaaaaagttttcagcttttaaaaaaaaaaaaaaaaaattcttccggcgccaaa

SEQ ID NO: 23466 - DNA, 1579 bp, Gossypium hirsutum
  Clone ID: GOSHI-09MAY01-C13448_1
aaagaaccccgcctactgctgtaggcatcattcaataaacttcctccaacgtcctttactgtttcttcttgtattccagtttctccattgccaaactctccctcaaagctcaatcacttttttctttttcgttcaaacgacagaaatgaagagtttgagtccttcaaataatttatatttcttcctcctccatttttttattatcacagtttatttcgcctcattgtctttcggtctcaagatcggggaaacatgttcttcttctggtagtagtagttcatgcgactccggcttaacatgtcaaacttgcgccgcaaatggaaatacccgacccagatgcactcggattcaaccactcagccctacatcaaaggtaaaaggtttgccatttaacaaatattcttggctcacaactcacaactcttttgcactcaaaggggtaaagtctgaaactggatcctctattattgcacccactaaccaggaagacaccatcaccaatcaacttaagaatggggttcgtggacttatgctggatatgtatgacttcaacggtgatatatggttatgtcactcctttggtggccaatgcttcaatgccacagcatttcaacctgccattaatgtgctcaaagagatacaggcgtttctagaggcaaatccatctgagattatcaccatatttattgaggactatgtggtatccccacaaggcttaacaaaggtttccaatgcatctggtttgaggcagtactggttccctgtttcaaagatgcctaagaatggtgaagattggcccacagtggacgaaatggtcaagcagaaccaacgacttgtagttttcacttccaaatcagctaaagaggcttctgaggggattgcttatgaatggagatatgttgtagaaaaccaatatggagatgatgggatgaaggctggttcctgcccaaaccgtgctgagtcattctcctatgaatacaaaatcaagatcattgattcttcaaaactattttcctactaatccgaacgagacagcagcttgcgcagaaaattcagctccactggtaaagatgctggacacttgtcataaagcagctggagatcgctggccaaacttcattgctgttgatttttaccagaggagtgatggtggaggagcctcggaagctttagatgtcgccaatggtcatctcacttgtggctgtgacaatatggcctattgcaaggccaatgctacatccggcacctgtgaagtccctccaatgtcacctcctccaccggctgccgccactcaaaccaccacagaaaatcctgcagcgtctaactccaacattgctaacacggatgccagacctctccaattgcggtggttattggccacaattttgaccaaactcctattgttacagttatggtaaatcaccagtttgcctgtctaaaatttatttttagtttgtaagattcgagtcacacggctgttgtttcacagagctactcctgagcgtcttctttaggttcttgttgttaatgcacctctgcttctcatttgttatataaaataatattaatatattgctcc

SEQ ID NO: 23467 - DNA, 514 bp, Gossypium hirsutum
  Clone ID: GOSHI-09MAY01-C13408_2
cggcgataaatccaagacctccttatcaccgtcgtcgaagccatccatccccgactccaagctcgccttcgaccacttctgcgtccacgccgcaggcaagacggtgctagacgagctgcaaaagaactgggaactcagcgaaaacaacatggaagcatcgaggatgaccttacaccgattcggcaacacatcgagcagcagcatatggtacgaattggcttatttggaagctaaagaaagggttaaaagaggggataggatctggcaaatagcattcggttctgggtttaaatgcaacagtgtggtttggcgatccatgcgtcgtgtgaggaagccttcaagggataacccatggcttgattgcattgatagataccctgtgagagcttagatttacttgaatggccgctggttgataataattatgatccttttggggttatcattctctaggtgggttatattttcagaagaaaggggggcgggagaacgattggaaaaatggtctatcttt

SEQ ID NO: 23468 - DNA, 1188 bp, Gossypium hirsutum
  Clone ID: GOSHI-09MAY01-C13408_1
gcgttcggtccctctcggcgatgatcatcaggggtggtgggggggggggtaatattttgagctacaacctcggcgggatggggtgcagtgcggggattattgcggtggatttagctcgagaatgttgcaagctaacccgaataactatgcggtggtggtgagcactgagatggtgggttatagggggtaccctggacgggacaggtccatgcttgtcccgaattgttttttcaggatgggatgctccgctgtgcttttgtctaaccgccgtcgtgactaccgccgtgctaagtatcggcttgaacaccttgtacggacgcataaaggtgccgatgaccggagtttcaggtcaatctaccaggaagaagatgaacaaggtttcaaaggtcttaaagtcagcaaagacctaatggaaatcggcggcgacgccctcaaaaccaacatcacaacattgggtccgctcgtcctcccattctccgaacaactcttcttcttcgccaccctaatttggcgccatttctttggcggcgataaatccaaaacctccctatcaccgtcgtcgaagccatacatccccgactacaagctcgccttcgaacacttctgcgtccacgccgcaagcaagacggtgctagacgagctgcaaaagaacttggaactcagcgaaaacaacatggaagcatcgaggatgaccttacaccggttcggcaacacatcgagcagcagcatatggtacgaattggcttatttggaagctaaagaaagggttaaaagaggggataggatctggcaaatagcattcggttctgggtttaaatgcaacaagtgtggtttggcgatccatgcgtcgtgtgaggaagccttcaagggataacccatgggttgattgcattgatagataccctgtgagagcttaaatttacttcaatggccgctggttgataataattatgatctttttgtgtttacattttcagaagaaaaggggggtgggggggggaagaatgattggaaaattggcatatgtttgtttcatggtttctggaaaactttcctcgatgaattaattgtatgaaaaaagtgttgaaattatgtagtctaatgtttttatattttaaaagaaagaaatgaagaaaacattgtattgtaatttttttttattaaaaaaagaaaaaaaaaaaaaacacg

SEQ ID NO: 23469 - DNA, 490 bp, Gossypium hirsutum
  unsure (1)..(490): unsure at all n locations
  Clone ID: LIB3493-004-P1-M1-H4
atcaccgtcgtcgaagccatacatccccgactacaagctcgccttcgaacacttctgcgtccacgccgcaagcaagacggtgctagacgagctgcaaaagaacttggaactcagcgaaaacaacatggaagcatcgaggatgaccttacaccggttcggcaacacatcgagcagcagcatatggtacgaattggcttatttggaagctaaagaaagggttaaaagaggggataggatctggcaaatagcattcggttctgggtttaaatgcaacagtgtggtttggcgatccatgcgtcgtgtgaggaagccttcaaggggataacccatgggttgattgcattgatagataccctgtgagaagcttaaattacttcaatggccggtggttgtaataatttatgaccttntggtttacatttcagaaaaananaggggnnnnnnnnnnggggggggaggtngaaatgcatntgttgttcatggtctggaa

SEQ ID NO: 23470 - DNA, 1306 bp, Gossypium hirsutum
  Clone ID: GOSHI-09MAY01-C13428_1
ccggaacggaagttccgacccgaccccaatggaggaagccatagttatttacccagcatctatgcttactcacctggcacccatggtagagttcgccaagctcctcctcactcaacacccttccctttctatccacatcctcatcgccacccttccttcacaaccttcctccaccgttccctcccccgttcctccttccatcaccttccactacctccccacattcgacctccttccaacctcaaccgacttagatccgcttttcttcgacgtcatccgcctcagaaaccccgatgtccgtcgcacccttctcaccatctccaataactacacactcaacgccattatcgtcgacttcttctgcaccagcgcagcattcgaagtggcctccgatctcaaccttcctgcttactctttcctccctaccgccctcggtgccgctgcttgcttactttatttgcccaccctctgtaacaaattcactcaaagcttccaacatctcaacgttctccttgatatccctggtgcgccaccgattccatctgcagatatgccgccgacaacgttcaaaggcaacaagctgtatgacgttttcttagacatcgccaccaacttgcgccgttcaactgggattattgtggacacttttgaatatctcgagccaaagagcttcaaagagattaatgatggactctgcttgccggactaccccacgcctcccctttactgcatcggacctctcattgttaacaccaccgtggacggtgatggtgttcctcagtgcatcaaatggttagactctcaacctagtaaaagcgtagtgtttctttgttttggtagcttgggatcgttttcagtgcaacaattaaaggaaatagctgttggattagagaggagtgggcagagatttttatggattgtgaggaacccaccattagagaaccaaagcttgaacattgacacaaaagtcgacccagatttgaaatcattgcttcctccagggttcttggagaggaccaaagagaagggactggtagtcaaatcatgggcaccccaattagccgtgttgaatcaccactcgggtgggtgggtttgtgactcactgccgctggaaactcattgctaaaattcggtaatgtgcaggggtcccaatgttagcgttggcccctttatgctgaaacaaaggttcaacagggtgttgaatggtacaacaaaatgaccaatggcgttgccgatgggggagtcggaaaaccgggttcctgagttccacctgaggtggagaaccgagtccaagaattgaaggggg

SEQ ID NO: 23471 - DNA, 764 bp, Gossypium hirsutum
  Clone ID: GOSHI-09MAY01-C13788_1
cttttcgttttctctttattttgggatttgttagatttagaaggaaaattcagtattgcaggagagttattgaaatcaagagatgttagaacagttgctgatatttactaggggaggattaatcctctggacatgtaaagaacttgggaatgctcttaaaggatcaccaattgacaccttaatccggtcttgtcttttggaggaacgctctggtgcagcatcatataactatgatgccccaggtgcttcttataccctcaagtggaccttccataatgagcttggccttgtatttgttgctgtttatcagcgtattctccatcttctgtatgtggatgatcttcttgcactggtcaggcgtgagttctctgagatttatgatccgaaaatgactgtttataatgatttcgacgaaacttttaggcagcttaggatggaagcagaagctagggctgaggagcttaagaaatcaaaacagatggttaagcctgtcaataacaggtagaagccagggcaggctcagaaagctggttttgataaaggaaataagaagagggagggtagctcggctgctggtggtggggatgataatgataaacgcaaaggttgtaaagtggatcatctagacggcaaccgtaatacccatgagattgattaatctagaaaggcactctgggtgtactggccaaacagttctggttaccaaattatgatgattgaagcatgtatctataagcttaggtcttaaccaagttggtacggct

SEQ ID NO: 23472 - DNA, 481 bp, Gossypium hirsutum
  Clone ID: uC-gsflmaxxa076d03b1
atttaacctcttgtattcttttatctttctttttctttttgtaggattttaaagatttccaagaaacaggagatttattgagattaaagtatgttagagcagttgctgatatttaccagaggagggttaatcctctggacttgtaaagagcttggaaatgctcttaaagggtcaccaattgacaccttgatccggtcctgtcttttggaggaacggtctggtgcagcatcatatagctatgatgccccaggagcttcttataccctcaagtggacattccataatgagcttggccttgtattcgttgctgtgtatcaacgtattctccatcttttgtatgtggatgagcttcttgcaatggtcagacgtgagttttcagagatttatgatccaaaaaggatggtctataatgacttcaatgaaacttttaggcagcttaggagggaggcagaagctggggctgaggaggtaaaggaatcaa

SEQ ID NO: 23473 - DNA, 408 bp, Gossypium hirsutum
  Clone ID: LIB3197-060-Q1-M1-E8
tgccgaatgtctttgcttgggatttgttaaaatgcactagcgggtgctcgctaggtattgatatccccagatgttacaacagctgctgatatttactaggggaggattaatcctctggacatgtaaagaacttgggaatgctcttaaaggatcaccaattgacaccttgatccggtcttgtcttttggaggaacgctctggtgcagcatcatataactatgatgccccaggtgcttcttataccctcaagtggaccttccataatgagcttggccttgtatttgttgctgtttatcagcgtattctccatcttttgtatgtggatgatcttcttgcactggtcaggcgtgagttctctgagatttatgatccgaaaggactgtttataatgattttgacgaaactttt

SEQ ID NO: 23474 - DNA, 466 bp, Gossypium hirsutum
  Clone ID: LIB3585-014-P1-K1-B11
cacagcacctccgtcaaaatgaaggtgatagccgctttcttgcttgccgttttgggagggaacacaaacccttctgccgatgatttgaaggctattctcggatcagttggagctgaggctgatgatgataagatagagatgcttttatccgaagtcaaaggaaaagatataaccgagctaattgcaagtggaagggagaagctggcttcagttccgtctggtggtggtggtggtgttgctgttgcagctcctacaaccggtggtggtgctggtgatgcacctgctgccgagaccaagaaagaggagaaagttgacgagaaggaagagtccgatgatgatataggtttcagcctgttcgactaagcaagtattgcaaatatcaaagacttcttatatgcagttagtagaggttatgtagatggacatgggtttagatattcttggaatatagtaaaaaatagtgacg

SEQ ID NO: 23475 - DNA, 349 bp, Gossypium hirsutum
  Clone ID: LIB3189-013-P1-K1-C2
caaaaaccctacaagatttccacactcatcaaataatcaaccaccttgttcatccacagcgccttgtcaaaatgaaggtgatagccgctgtcttgcttgccgttttgggtgggaacactaacccttctgccggtgatttgaaggctattctcggatcagttgcagctgaggctgataatgataagatagagatgcttttatccgaagtcaaaggaaaagatatcaccgagctaattgcaagtggaagggagaagctggcttcagttccgtctggtggtggtggtgttttcactgcctctttttttttttgggggggggggtggggttttattttttttatatttttttt

SEQ ID NO: 23476 - DNA, 1146 bp, Gossypium hirsutum
  Clone ID: GOSHI-09MAY01-C13118_1
cgatgaacaaaggagagatcagtttggccatggaagatattcttccaaaaggcattgttaagaaaacactttgggcacgaagagtggacatgctaagctactctgttaattctttaaggttcacgaacttgaggttcaaagatgccaaatctcctagatctactcaagtagtgaggttgcttatcaaccctgatgacactcagaagatcttgactggttgcaaggcaagagggattaagttatgtggagcattaggagctgccgggctgatttctgcacacagttctaaaagccgttcagatcatcaaaagaagaaatatggcgttgtaacactcacagattgccgctcaattcttgaacctccgctctccaatcaccatttcggtttttaccactcagctattctgaacacgcacgccatcaaaggaggagagaagctttgggagctagcagagaaagtgtacaccgtatttacacactacaagagctgcaacaagcacttgtcagacatggcagacctgaatttcttaatgtgcagggccatggagaaccctggcttgactccatctgcctcattgaggacatgtttgatatcggtcttcgaggatacggtgatagatgagtctagtaaccagcaaaatcaagtcggcgtagaggactatatgggatgcgcttccgctcatggcatcgcgccgtccatcgcgatattcgacaccatacgagatgggcgactggattgcatttgcgtttatccttcgccgttgcattcaagggaacaaatgcaggagctggttgataatatgaagtgcatacttgtggatgcagggaagaatgttgctgatgaaactgagagttaaggagccagtctggtctttgtctgttggctcttcggcttacaagtagtggtggtgtggcccaattctcctccctagcttcattttaagtcgagagctgccattgaccctctaggaaataagcagtttggtttcttaattggtgctatggttgtcttggcctcatttgcgcatgccatgttccccaaactaagggtgtgttttttttttatgccaaaaaaattatcaattacatttacaaaaaaaaaaaaaaaaaaaaaaaaaaaaaaaaaaaaaaaaaaaaaaaaaaaat

SEQ ID NO: 23477 - DNA, 708 bp, Gossypium hirsutum
  Clone ID: GOSHI-09MAY01-C13138_1
cttatcttattctcctaattttctttcgtttaaaccctaaccctaatttccgccttcatgtagtaacatagaattcctcacgaaaaataaagaaaaatgattccttttgttcctgccatatttcttcacgtcattttcatcttcttcgcgcttgtcaacggcgagcaggagactatttacgatatcctaaaggcccatgggctacccacggggctgcttccgaaggggataacccgatttgagttcgacgaaaccggccgcttcgaggttcagttggatcaagcttgtaatgctatgtttgaatgccagtttcgttatgataggaacgtttctgggactttgaagtacgggcagatcggggccttgtctgggatttcttctcaagagctgtttctttggttccaggtcaaagggatttgggttgatgttcctagctcgggcctcatttatttcgacgtcggtgtcgtttctaagcagttttcgttgtcttggttcgaaacgccgagggattgtatggcgattcaggatgattctgaatctggtgattcgattggagatggcaagttattagctgaagcagtcgcgaagagtccacgtgcgagacatcgatttgaacttgatcatggaggtttggggaggaacgacatctacatagtcagaagaccagagacgagagaagttgttcaatagctcaatcaggtgagcctt

SEQ ID NO: 23478 - DNA, 862 bp, Gossypium hirsutum
  Clone ID: GOSHI-09MAY01-C13058_3
gtcctgtatgagtttgactgatcgagttcttactgagatccctaaccttggaccctttaaacatgcatatgcctctgctgcaaatggtgagggaacattgttgtgaataaccttctttagtgccagtagatctccccttagatctgatccccccaggcctgtcgctgatttgaagtttctactgtcgaacgctgcgtcaaagtggatcgttgattatggtatgtcctcctggattctgtagcttctgttcattttatcatgaatcttcattacttctattccttcatagattgccatgagcctttgaatattttgtgctaaaacctttcctgttatatttttcccctcatgtatgaattgatttctggaaaaccatatcaaccatagagcataacagaagagtcggcattgagcgccgttacttctcttgaaaacccagacatgaagactttcctctgcccaggggcaaccacagagacatctatcatttgaagtgactttcctgtacttgagattagcaagattagggatataatcccaggaaattggccaaatagtgattgcaattttttagggtagttggaggctccataatttcctgtaaaactctttagtttcggtctataataaataattagtaggatccagaatagcatattgtaactgcgtattgaatactcgccggataattctcctttccaaacttgagtatcctcgtgatcagtctctgcaagagggatctgtagaattttttgagcaatttctgcttgaaaggtactattaatcaaatccgacctccattttctgtttgtattatcaataagatccgagactaactgtaattccctattgtttgatctaa

SEQ ID NO: 23479 - DNA, 972 bp, Gossypium hirsutum
  Clone ID: GOSHI-09MAY01-C13058_1
attttttagccatcttctctgcaaagcgaaaatatggtgctttagctcttctcccatcaggtaaaaggtttctcctctatcaagagcgtcttttgctagtctatatgcatgcgagttccctaatctgtgaatatgctgaaagataatctcttgaaaacaaggtttcttattctgaatgtctttgataatagcttcaatcactgatttatttgttaaagtcgtttggtattttttgattattattttggagtccctataagtttaaccgattgaagtcccagtgagatccctaactttgtgccttctaaacatgcatacgcttttgctgcaaatggggaggaaatattattgtgaatgatcgtctttaagaccagtagttcccccttcagatcctaacccaccagacctgctgctgatttgaagtttctactatcaaacgctgcatcgaaatggatcgttcttctcggacattcacggaagatatgaaggctatcttctgcccaggagcagcaacggggacatctgtcgtttgaaatgacttttctgtacctgagattagcaagattaggaataaaatcccaggaaattcgccaaatagtgattgcgatttttgaaggtagctgtaggctccataatttcctgtaaaattctttagtttcggtctgtaataaataattactaggattcggaatagcatattgtaatagtttacaggccctgcgtactgaatactcgccagacaattctcctttccaaatttgagtatcctcgtgctcagtcactgcaagacggatctatagaattttttgagcagtttcctcttgaaagatagaaatattgtctcctctgcccactctccaacacatccttttttgaaagaagtctatttgctgcccagataccttttcaggcaagtgaagccgccaaaagaaattctttttaaaactgttttgggatttccttcgttcatac

SEQ ID NO: 23480 - DNA, 459 bp, Gossypium hirsutum
  Clone ID: LIB3189-003-P1-K1-E12
caaaatccaatccattctgacgatagcagtttccgaggataagactttactttctatcttcttttgaaatcatttccctcaaacgctccatcagtctggatttattggccatcttctcttcgaagcgaaaatatggcgattcaactcttctcccatcaagtaaaaggtttctcctctatcaagagcgtcttttgctagtctatgtgcttgcaagttccctgatgtgtgaatatgctgaaagataatatctcgaaaacaaggtttcttattctgaatgtctctgataatagctccaatcactaatttatttgttaaagtcatttggcatttttattatttttgagtccctcataagtgagatccctaactttgtgccttctaaatatgcatacgcttctgctgcaaatggggaggaaatattgttgtgaatgatcatctttaaaaccaagtgttcccccc

SEQ ID NO: 23481 - DNA, 419 bp, Gossypium hirsutum
  unsure (1)..(419): unsure at all n locations
  Clone ID: LIB3825-011-Q1-K6-D11
cccacgcgtccgcgacactgcatcaaaatggatcattgttctcgatatgtcctcctttgatttttggagaactatatctgccataaagcataacagaagagtcgacattggtcgttgctgtttctattaaaaaccaaggcattctcggaagacatgaaggctttcttctgcccagaagcagcaacgagggcatctatcatttgaagtgactttcctgtacctgagattagcaagattagggatataatcccagaaaatctgccaaatagtaattgcaatttttgagggcagctgtaggctccataatttcttgtaaaattcttttattttggtctgtaataagtaattaataggattcaaattaaaaaaaaaaaaaaaaaaaaaaaaaaaaaaaaaaaaaaaaagnnaaaaattttggg

SEQ ID NO: 23482 - DNA, 318 bp, Gossypium hirsutum
  Clone ID: uC-gsronu33B148g01b1
cccacgctttctttcacgcgtccgaatcccaggaaattggccaaatagtgtttgcaattttttagggtagttgtaggctccataatttcctgtaaaattatttagttttggtttgtaataaataatattaggattcaaaatagcttattgtaatagtttataagcactgcgcattgaaaatgcaccggataatactactttccaaacttgagtatcctcgtgcttagtctctgcaagagggatctgtagaattttttgagcaatttctgcttgaaaggtactattaatcaaatccgacctccatttcttgtttgtatt

SEQ ID NO: 23483 - DNA, 503 bp, Gossypium hirsutum
  Clone ID: GOSHI-09MAY01-C13018_2
gtatactatccggccatcatttcagctcttttcggagtttcagagaagacacatgaaagattctgaagggaactttactgctcaacctcctccatatgaacccatagttgctgaagatggatctgtgcacaacttaaacgagtacatggagatccgtgctgctgatgtactaacagatctaccaccggaactgacaagtgcagtttttggtcagaagcacggagttgtaattggtgaagcacatcttgaggaattattttctcaaattccttgaatatggtgggtacttttaaccaaaatcttagaacttgcatgtttgatgcatggtcttgagcacttaaaactgctactgtacaaatatgtttccaatactgttatatatgtcgtgtgccacaagcctgcaaaaatgaaggaaaacaacatacttacagcaatattgttgatgtgtgtgtatatatatatattatctttgattgtaataaaattctttgtttgccattgtt

SEQ ID NO: 23484 - DNA, 581 bp, Gossypium hirsutum
  Clone ID: GOSHI-09MAY01-C13018_1
gacgacttcggaattgcggttgcagccaaacaacttggacgcttctctcttcagtcatactcccttttactgcgaggagaacgtctattttctttgcaagaaactttgttcatccgagatagcagatgctcaaggatctgatcttttcgtcgttttcatttccaatgacaataaacagattccactgtggcatcaaaaagctagccatagagcagatggtgtaattctctgggattaccatgtaatttgtgttcagaggaagaaagatggtggtactcatttagtatgggacttggattcaagtcttccatttccttgtcctttagctacctatgtgtcagaaactatccggccatcatttcagctcttttcggagtttcagaggtttttccgggtagtgcatgctcctttatttcttcgtcattttgcatctgatagaagacacatgaaagattctgaagggaactttactgctcaacctcctccatatgaacccatagttgctgaagatggaatctgtgcacaacttaaacgagtacatggagaaccgggctggtgatgtactaacagatctaccaccg

SEQ ID NO: 23485 - DNA, 1202 bp, Gossypium hirsutum
  Clone ID: GOSHI-09MAY01-C13008_1
gcgctctcgctctcttgctcttcatccaccgtccgaaagcgcttgagttaattttaagtgtaggtcagccttaacaaaaaaatgtctcggagatatgatagccgcacaacaatcttttcccctgaaggccgtctctaccaagtagagtatgcaatggaagccattgggaatgctggctctgcgattggaatactatcgaaggatggtgttgtcttggttggtgaaaagaaagttacttccaagcttcttcaaacctccacatctacggaaaagatgtacaagattgatgatcatgttgcttgtgccgtggcgggaataatgtctgatgcaaatatcctaatcaacactgctagggtgcaagctcaacgatacacatatgcttaccaagagccaatgcccgttgaacagttggttcaatctctctgtgatacaaagcagggttatacccagtttggtggtctccgcccattcggtgtttcatttctttttgcaggatgggacaagaactatggattccaactttacatgagtgatcctagtggtaactacagtggatggaaagctgcagctattggtgcaaataatcaagcagctcagtcaatgttgaaacaagattacaaggacgatatcacgagggaagaagccgttcaactcgcgctgaaggtgctgagtaaaaccatggacagcaccagccttacttcggagaaacttgaactggctgaggtttttcttacaccttctgggaatgtgaagtaccaggtttgctcacctgattctctgagcaagttgttggtgaagtttggagtgacccaacctgccactgaggcttcttgagttagctttctttattttccattcatcgctttcccgaaactagtttatcgtcttgtttttagctattgttatattctctggaaaatggaattgagaactctgtcggatcgatatgttgcttgccttgaactagacttggactatattttatgatcttttgttgtgctgaggaaaatggtgttttcattttatatggataactgttctttgggtacaagtttgattggtatgtgacatgttttgaagaatatacatccagtatcatggtcctagaaaataatcgtgtactattgtcggattgggtatgtaatgctatatgtaattttgaacacttgtgttttagaatgacaggtgactttttattatat

SEQ ID NO: 23486 - DNA, 580 bp, Gossypium hirsutum
  unsure (1)..(580): unsure at all n locations
  Clone ID: LIB3828-034-Q6-K6-H10
gcgttcgctcatcaagttgaaacaggttgggggggggggggggcgaggaaaaaagccgtacaactcgcgctgaagtgctgagtaaaaccatggacagcaccagccttacttcgcganaaacttgaactggctgaggttttccttacaccttctgggaatgtgaagtaccaggtttgctgggggtgggggtctgagtaagttgttggtgaagtttggagtgacccaacctgccactgaggcttcttgagttagctttctttattttccattcatcgctttcccgaaactagtttatcgtcttgtttttagctattgttatattctctggaaaatggaattgagaactctgtcggatcgatatgttgcttgccttgaactagacttggactatattttatgatcttttgttgtgctgaggaaaatggtgttttcattttatatggataactgttctttgggtacaagtttgattggtatgtgacatgttttgaagaatatacatccagtatcatggtcctagaaaataatcgtgtactattgtcggattgggtatgtaatgctatatgtaattttgaacact

SEQ ID NO: 23487 - DNA, 783 bp, Gossypium hirsutum
  Clone ID: GOSHI-09MAY01-C13028_1
caacgctttccacatcatttctttgtcacagtgattcgatttgtcacccttgttcgaagagaagaagagagaagaagaggagcttaggttcgccacgactcggccggcgagcagcgtgatatcgaggctggaagaggtagccaagtcggtgaagttcaacgtgaagaaaagtgagtcaaaggtgaggttacagggtcaagaatgtggaaggaaaggaaaattagctattgctgctgacatatttgcagtgacgccattgtttttggtcgtggaagttaaaaaagacaacggcgataccttcgaatacaaccagttttgcagtaaacagctccggccggcgcttcacgacatcgtctggacttcaccagccgagaagccgacggttgcttgacgggaagtttcaagattattaattatctacatgaaaattgaaaaagaaaaaaaaatgagaaagagaggatgctatgttgttatcactcttattttatcaattttcatcctgtgttaaggtgagtttggataagtttggatagacggtgtgtttatctacaggtagtgtaaaaatagggcggtgagattagatattataatataagataaaaagtaagttaaacgctccgcatcgtacctgattgcctattcaaactcactcttaatagatttgtgttatgagctgtaggatttgtgtacgaaaaaaaaataaatttattaattaaataatatttattgtgttttttgtggtttaaatttttttattttttttgattgagtaaattgtttttt

SEQ ID NO: 23488 - DNA, 376 bp, Gossypium hirsutum
  Clone ID: LIB3493-054-P1-M1-D2
attgaactattctttatttacagagaggctctccctttttatatattatttatcaaacaagggccataagaaggtgattcaagtgaaagaaaaagaaaaaaacaaaaaacaaaatcaaagatcttaaaagaagaaataaaaccaattctacttagctgaaatgaagccaagtcggtgaagttcaacgtgaagaaaagtgagtcaaaggtgaggttacagggtcaagaatgtggaaggaaaggaaaattagctattgctgctgacatatttgcagtgacgccatcgtttttggttgtcgaagttaaaaaagacaacggcgataccttcgaatacaaccacgtttgcagtaaacagctcccgccggcgcttcaagaca

SEQ ID NO: 23489 - DNA, 404 bp, Gossypium hirsutum
  Clone ID: GOSHI-09MAY01-C13358_1
ccgaatcgcagtttcgacccacgcgtacgcgtacgcgaggctttcttatacttctttttttttagaatttaattaattgcattaaccggcttggttggaacggaagcatatgctataggatttaacgacttcctccctatgcttatgtctatcaacattacttcccccccatgcatatgcatcgtgtaatgaagctaaatgtggcaagctattccacctatgaatgagcttgagaaacttcacctttctctccaacttgggtctctgcttccaaaatccgggcagttccttccatcttcaatccctccatgtttatttcagggataatcggaggcttcattcttcctgtagtcatcttcagcccctgcgttgtgtggatagttgctccagtagtcatttcaact

SEQ ID NO: 23490 - DNA, 472 bp, Gossypium hirsutum
  Clone ID: GOSHI-09MAY01-C113350_1
caattttcttttgatttaaagcttaaaaagaaaattttcaagtttttcagtaaccaatcaacaatggcttcctcaatgaattttctgatgcttctttccctagttgtttttgctctaatggcttccgccatggctgccgaggctccagctccaagtcctacgtcgggatccggctcgttctctccttcattcgtctctgttttcgccgtcgtggctctgctcttcggctccgctctccggttctgaaggtggtgcaccttgttatggcttctacggttgctgtagagaggctcctggatttatatatacatatattcggctttgaatttcaataataatagtagatctaagggatgattctatatataatatgagagagatgtaattttgtgcatcaaagattatttgattgttgatgtttggacttcaattattttgttagcattatgagtggtattttcactttttatat

SEQ ID NO: 23491 - DNA, 748 bp, Gossypium hirsutum
  Clone ID: GOSHI-09MAY01-C13308_1
atcagatcaagagcctctctcatggaccttcattcgaccaatggttgaaaatctttaaatgataacatcgtccttttgcccaccactatcaaatttccagattttccaggaaaaagaaaatcaaaacccccaggtgaagaaggtgaaaaccagcagcggcaaaggcaataaaaggtgaagccaaagagagagagatatatacataataaaaaagacttttcaaaagaacacaactatggctcctcatagagaaggatcagatgcttcagtggaagccatggttgctcaagtcgaaaaacacccaatttcatcgatccttatcatcattgctatgcaaacagaagctttgccggtggtgaataagttccagttgattgaaaaccctcattcttcgtttccaaaaggggtcccttggatccattatcatggtgcatacaaggacatcataatcaatctagtttggcctggaaaagatttaacctttggggttgatagtgttggcacgatttctgcctctcttgtgacctatgcatctatccgagcattgcagccagacctaatcataaatgctggcactgccggcggctttaaggaaaaaggagctgcgatcggtgatgtttttctcgtatctcatgttgcattccatgatagaagaataccaatcccggtttttgatctatacggtgttggtttgcggcagacctactcaacaccaattctcttgagggctcttagtgtgaagaccggg

SEQ ID NO: 23492 - DNA, 380 bp, Gossypium hirsutum
  Clone ID: LIB3197-044-Q1-M1-G3
gcgagaaatttttggggcctcttgggcacatgtgggggggaaaatatatgctggaatcggtctttttatcaccaactataaaatttcggtattttcagggataaaaaaatcaaaacccccaggtgaagaaagtgaaaaccagcagcggcaaaggcaataaaatgtgaagccaaagagagagagatatatacataataaaaaagacttttcaaaaaaacacaactatggctcctcatacagaaggatcagatgcttcagtggaagccatggttgctcaagtcgaaaaacacccaatttcatcgaaccttatcatcattgctatgcaaacagaacctttgcccgtggtgaataaattccaattgatttaaaaccctcattct

SEQ ID NO: 23493 - DNA, 779 bp, Gossypium hirsutum
  Clone ID: GOSHI-09MAY01-C13338_1
tcatgccttaatacagcaagtagctgtcggcagattgcctgaacttaatgtatttggtcatgattatccaactaaggacggcagtgcggttcgagattacatccatgttatggacttagctgatggtcatattgctgcagttaggaagcttttttcctctgagaatataggctgtattgcctataacctcggaaccggcagtggtacatctgtgcttgaaatggttgccgcttttgagaaagcttctggaaagaaaatccccattaaactatgccccagaaggccaggagatgctacagctgtttatgcttccactgaaaaagctcagaaagaacttggttggaaagcaaaatatggtatagcagagatgtgcaaagatcaatggaagtgggcaagcaacaatccatggggataccagtcaaagccttaggcttcaactaaatactaattttcttccccggtcttttaaaaatgtctcatagggagaattaagtgtacaaatacttgtttaatttaaacaaaactgatccttgatgatcaaaagttaggatttatcaaatgttcaaagatcttataaaattcctttgtgttacatttataagtctttgtaagagtgatgtttttatcatttctggagtttaaaaaacgaatggctttaaatttaccgtaaggagttgacctaaacaagatccctttcagctttgatcttcaatcttatctattgatttgtttaccaaccatgctcagctcactgataggaggacttcaaagcttattcg

SEQ ID NO: 23494 - DNA, 421 bp, Gossypium hirsutum
  Clone ID: LIB3149-047-Q1-K1-F7
cccacgcgtccgtatgatctgtgtggttacaaaagggaatttaagctaactttcatctgagcaggttgctatgcctgatggggtccctttagctccttttgtcaattttcttcttgttctaagctgcattgcctataacctcggaaccagcagtggtacatctgtgcttgaaatagttgttgcttttgagaaagcttctggaaagaaaatccccattaaactatgccctagaaggctaggagatgctacagctgtttatgcttccactgaaaaagctgaaaaagaacttggttgcaaagcaaaatatggtatagcagagatgtgcagagatcagtggaagtgggcaagcaacaatcatggggataccagtcaaagacttaggctttaactaaatactaattttcttccccagtcttttaaa

SEQ ID NO: 23495 - DNA, 405 bp, Gossypium hirsutum
  Clone ID: LIB3148-043-Q1-K1-D10
attcaacatctatttgtcaattcccattcaacattctctttcggccgcgctctcatttatgttaatataaaactgttgctgttgaaaatatagctgaaaatccccattaaactatgtcccagaaggccaggagatgctacagctgtttatgtttccactgaaaaagctcaaaaagaacttggttggaaagcaaaatatggtatagcagagatgtgcagagatcagtggaagtgggcaagcaacaatccatggggataccagtcaaagccttaggctgcaactaaatactaattttcttccctagtcttttaaaaatgtctcatagggagaattaagtgtacaaatacttgtttaatttaaacaaaactgatctttgatgaccaaaagtttggatttatcaaatgt

SEQ ID NO: 23496 - DNA, 734 bp, Gossypium hirsutum
  Clone ID: GOSHI-09MAY01-C13288_1
ttcctttcgtccgcccacgcgtccccttgttctctggtttcgtttcagatttcagatctgatcaaagaacaaccaaacaaacaggttgcttagaagtcccaagttagagaacatgggtcgtggagtcagcagtggtgggggacagagttctttgggttaccttttcgggagcggagaagctccacctccaaaaccaaccaacgtcacgagtactggcaccaccagtaatgaagttcctcagaagcagattgaggttgtgaaggaaactgtgcaaaaaccgaccactgcttcaccatcatcgggtgatgccaaggagatccctgcaggtgttccagggagcaaaacgaacaactatttccgagctgatggccagaattgtggcaactttcttacggagcgcaggacaactaaggttcacgcagcgcctggcggtgggtcttccttggattacctgtttggtggcagcgagaagtgatatgtgagatattaaatgttggaaccactgcttatggttgtcctaaaaggtttgggacagaaaatatttaagtataaacaatatgttggtttcccttccatcctggactttctggaaacttcaaattaagctttttcctatctaagcaactgcttaccattagttaaccatgcttatccaatcctttcatcaagtgttataagtatcttttatcatatattaaagtaatattttcaagaaaaaatggaaacttgcttaa

SEQ ID NO: 23497 - DNA, 464 bp, Gossypium hirsutum
  Clone ID: GOSHI-09MAY01-C13208_1
gattcacatactcagccaaaagggctctgctttggagttctttctttcttcctttcttctggcgtactttgggttcccactctaatcatggtatccaagcacaatccatcgggcaacaaaaaacggagcccactatctatatttgctgttattggtttgtgttgtttcttctacattctgggagcatggcagcgaagtggttttggcaaaggagatagcatagcattggaagtaacaaagcaggcagactgcagtatcttaacaaatttgaactttgaaacacatcacaacgatgtagagattgttgagccttccaaaccaaaagctcacgtgtttaagccgtgtgatgtaaaatacactgattacaccccttgccaagagcaagaccgagccatgtagtttcccagggattacatggtttaaccgggaaagacactgtccccccgaggaagaataactacact

SEQ ID NO: 23498 - DNA, 412 bp, Gossypium hirsutum
  Clone ID: LIB3272-026-P1-K1-C6
atcgcgagcggcgcccttttttttttttttttttttttttaggaaagggatatctggttatctttatactgaattctggcacttctcaataccactagaaccagctttagaagtaaaataaacccagtgagaggatgataagatttttccaggataatcacctccatggttcaagctaaagttcagtaacttaaaatatttttgtttacaagaacaatatacattacaaaataaaaaagttgcactgccttacctggatatgtaggtaactccagtttgtccgattttatgtacggttttaagagtcacatttccggatgcctctgtctcaaatttcccattgattatgcacaccatctctttaagcatagacacatcaacatctccatttggaagaggtataaccatatta

SEQ ID NO: 23499 - DNA, 385 bp, Gossypium hirsutum
  Clone ID: LIB3149-001-P1-K1-H9
ggaaatgttactcttaaaaccgtacataaaatcggacaaactggagttacctacatatccaggggtgcactcacgcattctgtgacagcacttgatatatcactcaaaattgatacgggattggcacttgaagttggaaggcgaacgaaacgggcatagtcggttcatctttacgcccttattgaataaggaaaactcttctccaccccccccaaaaggaattatttacggattacatcattagtttttctcttcccatgctctaataatggtttaaagaattgatagatgataaaccgctttatgaaagatatagggagtataaatgtatgcatgatgctaatgttatttggactcttcttaatgtacttacatggtgtcttgt

SEQ ID NO: 23500 - DNA, 718 bp, Gossypium hirsutum
  Clone ID: GOSHI-09MAY01-C109580_1
gggaaaacccagagtctatcatcgccgttcagcctactcaagagcctgcgcagtccaacccccactgcaatcagtggagaacgacgcgtacaaccttagtctaaaaccccggttcaacaattgccagtttcagcccctgaaatcctatcccacgcttcgatttcgacgaagtgaataaggatttcggtaacccattcacaaaggtgagctcctcttttcgttttatctttagatgttaaaaaaatgaaaaagaaaatcaaagagaacagatctagagagaagaaagcgttataaacccccggagattcacaacggaaaatcaccttatttttttactttctattgcttcggtatgcgtaaatgtccgtgtgtgggtatggctggggtaaaaaaaatacaatcggtgccttcttggctttatagccgaaactaaaatagaataatacgatatttccttgcttcgctgctgttgtgtttgtcttgttcacacgtactgagcacatgacatgcgctggcccttggcgtgaggcatactgggctgtgctggcgcgggtatgggggctgttctggagggtacacacgtaactggcgttggggctaaggttcctgttgcggcgcaagcaggatccactagggtttctgctttggttcttggtttggggattgggcttgttgggccatcccggtattaggttatggttttaagtttggttttttt

SEQ ID NO: 23501 - DNA, 529 bp, Gossypium hirsutum
  Clone ID: GOSHI-09MAY01-C109750_1
tttgaaatcagacatggaaaaggtgaaggaactcctgcatctagacaaagaagcagaggagacagtgtcacgactcactattcacccccaccgagtcggttacgagcgtagcttctacaacgatttcggcttacgcggcatccgtgtcgacaaggtcgagcctggcttcgtttcctgcactttcaaagttcctcctcgcctcaccgataaaaatggaaatttagcaacgggagcaattgcgaatattgtggatgaagtcggcgggtcagcggtctttgtcattggtgttcctatgaaagtttcagtggatatgtccatttcgtttctgggagctgctaagctcggtgatgagctagagattacctcaaaggcattaggagaaagaggaggatatgcaggaacacttgttcatatcagaaacaaagcaacaggggagttaattgccgaaggtcgtcattccttggatggtaatgaatctagcaaactcctgtttggtaatcaatctagcaactctagtccactgctggat

SEQ ID NO: 23502 - DNA, 507 bp, Gossypium hirsutum
  Clone ID: GOSHI-09MAY01-C109690_1
gaatagaaacaaggccttggtttttttagtaggcaaagattatgtttctgcagtgagggaatacgaggagtgtatggaaagggatcccgcagatgttgtggctgttaataataaggcgctttgtttgatgtatttgagagatttgtcagattcaattaaggtattggagaattcactcgaaagagtacctaccgtggcattgaatgagactttggtggtcaatttgtgtagtatgtatgagttggcatatgttaatcactcagagattaagaggactttgagtaattggatggctcgagtctctcctgatgattttgacgcatcctgtaccacggtgtgagtctttgtgccacaaacacaacaccatttgatgccctttatggtctgatgaatctgaatttgagcagattttgacgagtaaagatgcagagagttggttcaaaacagggctcgcgaggttcaacttatggtgccggccgaacctatagattcattctcaagttacta

SEQ ID NO: 23503 - DNA, 1061 bp, Gossypium hirsutum
  Clone ID: GOSHI-09MAY01-C109080_1
aaaaaagtcttttcttttcttccctctctgttcccaacaatggaacagtcatcctacctcaagccctcccactccttgtttcaagttctcactccaactcaaccccttcaatttcatatttaagcactgtcaattcaaaatggataacctttcaattgcttcagtttcgtttctacttattgttttaagctggaaaagttgattttctttgctgtcaaacgaagttttttttttccttagagaatatatataagcaaaagaggagaaaaatgatatcaggagggctaaatttggtgatgactgttataggtttcacagtgagtattatgttcatagtgtttatttgtacacgtttgatttgtgctcgtgttcagctacatgcttctcggagacccttcgcaatctcttcaagatctgatcttaatatgctcgaacggggtttacacggtattgagcctgttgttgttgcaaatttcccaacaaagactttctgtgatgagtgcttctcagctaacaaagatgctcagtgcacggtttgcctttccgaataccgctgcgaagatgtgttgcgaatcctcccttattgtgggcactccttccatgtaacatgcatagacctatggctgcaacagcattccacctgccctgtttgccgaatatcgctgcgtgaattgcccgagaaaaaacggttgatgcaaccgttgttcagtccagccggtcgttctcattttggcacagaatcttttaatatgcatacgtacaactgtttgttgagagggcacggatttccctcaagaacccgtgagaaccccgtgatggacccaaaccaagagaattcatttgcaactggaaatctgggatcgggggaaaacatgtcccgtacaatcgaagatgatgaagacaacattaaagaaccaagaaagaagcttgtggaaagcccatcaaacccttgaattatgtttgtttgtgagttgatgcaaagatcttctggttgtgaaagtggattattttcccttggttcttctttggtggattatttgtaaatatgtcaaaaagtggat

SEQ ID NO: 23504 - DNA, 544 bp, Gossypium hirsutum
  Clone ID: GOSHI-09MAY01-C104500_1
atttctttcaattcccaacacccgggcatggagcgaggtcatctctttattcatacttgaacctgtatttgtcactgtaagctactcagccaacaccctgtttgaacccacttgcaaaaggattccatatctcgatctctgtgtctcgactttgaaaccctatcccttgagttcgaccccgggcgtaaaggggctcgctcgcatctggttgatattgtcaatgccaaagccgatggcacattgaatcggattttaacattgctcaaaagtgtcaaagcccccagcttgagaaaggctgctttgattcatataaaccctttctccagggtcattgaagcaatcgaaaaagggaatccgaaattcgctgtagaagggaacctgaaattcgctatcaagagtgcaatagatgctggaagcaaggatggatccaagggggtgggagcggtcacccctttgaaatttttaaattttttaaatttatatataaattattatgtattttaaatttgatgttcacattatataacattcgcttctcttggcc

SEQ ID NO: 23505 - DNA, 537 bp, Gossypium hirsutum
  Clone ID: GOSHI-09MAY01-C104120_1
gactcaaatataattgaattttatttacttcagatgaaatcatttattttgcatttactagattctccctcaacactcaataaggaaaaaaaaagatccaaagggggctatggacaaaaattaaaaatgctaaactatcctaaaagttcaataaagtgatagcctccttcaactttggagtggtgtcagaacatacatcttgcaagcatgaggagctacggatgccgtcaatctatcgcgcttattcatggaaacatatttgtgcttccacaagtctctaacaatggctggtgtgttgggagagagtccaaaatccctccacgcagcagttataagagccctcaattcgcttcggttccataacactaccacaaccctgttgtctgataatggccctgcccatacttctaggccatctttggatcgtagtttcctcccttgaactcctagtgagtcttgatttacttcaatcacttctttgttcccaaggatccttagggtcctgttgcttgcagatcgaaggtcgcatccaatgag

SEQ ID NO: 23506 - DNA, 573 bp, Gossypium hirsutum
  Clone ID: GOSHI-09MAY01-C105650_1
ttttttttttttttttttaaatgaaaaatctaaagccccgaggctctcaacctcagctcaggctttattttagcaccattttcaatcaaagagagatttaacatcatacaaaaaattacaaactaaaggaataatctctagccttcggttctattattccttgggcaacttccaaggtatccagccccattggtgctggtgccttttgtaaattaaatgtgaataataataataataataataaaggtacaaacattgttcactatgaggctgacatattggaatagaggagagtgaagaagaacccaccttctggaacactttgtatgatttggataaactggtttttgcttggttcctcaaccaaagtcggacatatctgtgcaattcgaggcaaaagtctagctagaggcatcccatttgttagattgcctcctccagattgaaaacccttctcctccaccagtgctttcgccactgcttttaatgataattcaacaacattactgaattcagcactcgaaagtacttctcgtgtctcaaccataagttgatcaaattttgtaaattcag

SEQ ID NO: 23507 - DNA, 944 bp, Gossypium hirsutum
  Clone ID: GOSHI-09MAY01-C105340_1
tcgcctttatccctcgcgcccgaatccctcaataatcataatctttagcaatttaaagtaaaatttcaagcaatgggtgagcaaaaaggagctaagcctgaagccgagaagaagcccgccgccgattccggcgctaagcaagacgacggcaaggttaccgccatttacaagattgatatgcattgtgaaggttgtgccaagaagattaaacggtcgattaaacattatgaaggtgtggaagatgtgaaaacggattgtggagccaacaagctaacggtgactggcaaagtggacccggccaaagtcagagataggttggccgagaaaactaagaagaaagtcgacctgatttcccctcagcctaagaaagatgcggccccagccgctgctgctgctgctgctggaggtagtgataagaaaccagacgctgggaagaaacccgaggagaagaaagaagaaaagaaggaagagaaaaagccacccaaagagagtacggtggttttgaagattagaacacattgcgacggttgcattcaaaaaatgcgaaaaataatcaagaaaaccgatggtaagttattaattatgatttatttgagtaatactattttgccggtgggagagtcatctgtgtaaataatccaatgagtaggggataataaagccatttatagactagaatctaaaatcccgccgtaccctaagtctttaataataatgaaattgaatctttttagaaatttgcctataaataattagtattatggttaataataaaagtgttctgatatattcaggtcatatgcatgttgactaaattttacgaagcctggttataattcttttatgaggacgaaaatcggttataaacgggggaatggaaaatcctttttataaaaaaagggcgctgtttataaaatatatagggggccttcttttgtttttaa

SEQ ID NO: 23508 - DNA, 569 bp, Gossypium hirsutum
  Clone ID: LIB3543-056-Q1-K6-F5
ccccgcgtccgcccacgcgtccgcggtcgcgtgggcggacgcgtgggccgtcgcaagatgtcgagactgatctcactgcaaacgcggctcgatgtcaactccgccctcgcttttctccagtaaggcttcagcagtataaattggctgagatgaaacttcttgctcagcaacgggatgcggaggcgaaaattcctgatatcgagaaatgcttggatgtggttgccactctagaagctaagaagggtaccggtgaggctcttattgctgatttcgaaccctctgaaggcatatactcacgagctcgcattgaggataacgatccagtctggttatggctgggagcaaatgtcatgttggaatattcatgtgaagaggccgcttcgctgctgaaaaagaacttggaacacgcagaagcaagtttagaagttcttatccctgatttgcagttcttgagggatcaagtgactgtcacccacgtgaccaccgctcgtgtgtataattgggatgctcaccagcgaagaatgcgtgcaatcgccgtttctctctcatctataggttcatgaacctag

SEQ ID NO: 23509 - DNA, 531 bp, Gossypium hirsutum
  unsure (1)..(531): unsure at all n locations
  Clone ID: AI730233.1
gcagtcaagagcgacgaaccggaaaaagccccttcgaagctcgccgtgcggatcgtccggcgaaacaccttcctccgatctcatttctcgtttcgtgaaacaatcaaatatggcagctgcatcttcgtcttcgacggaatcgcccaaaacgacgacggagaggagaggaataccgggagctcaattcgtagaagatgtcgagacttatctcactcaaaccgggttcgatgtcaactccgccctcgcttttctccaagaaaggcttcagcagtataaattggttgagatgaaacttcttgctcagcaacgggatcttcaggcaaaaattcctgatatcgagaaatgcttggatgtggttgccactctagaagctaanaaaggtaccggtgaggctcttattgctgatttcgaagtctctgaaggcatatactcacgagcttgcattgaggataacgattcagtttgtttatggctgggagcaaatgtcatgttggaatattcatgtgaagaggccactttgctactgaaaaa

SEQ ID NO: 23510 - DNA, 613 bp, Gossypium hirsutum
  unsure (1)..(613): unsure at all n locations
  Clone ID: LIB3543-029-Q1-K6-E6
ccgggttcgacccacgctttttcggncgcgtgggccgcaaagctcggggggtgcttgttcgctactaaatccgcgcctcagtttttcgctaaaacctctcttccttttctctcaatcatctttcgcacctcggaaatttcaaatccccaggcaatttgtctccgctaaacgtaaaaccttctctgccttagcttcggggcaggcatccgcaaccgacaatggtggcaggagcggcggaggaggaaggtccggcgctctatctccgtctccagtggtggaggaggttcagaggatcgacgtgaatccacctaaagggactcgagacttcccccctgaagatatgcgactccgtacttggttatttaaccatttcagagaggtttcgcggttgtttggattcgaagaggttgattatcctgtgctagaatcagaggttctgtttattagaaaggcaggggaggagattagagatcagttgtattgttttgaagatcggggaaatcgccgtgttgcattgaggcctgagctcacaccttctctagcaaggctggtgatacagaaaggaaaatctttatccctcccattgaagtggtttgccattggtcagtgttgg

SEQ ID NO: 23511 - DNA, 585 bp, Gossypium hirsutum
  Clone ID: LIB3543-029-Q1-K6-F5
cggtccggccatccgggtcgacccagcgtttgtggtcgcgtgggccgaaaagactggggggggggggtggctactaaacccgcgcctgaatttacgctaaaacctgactgactgttgtctgagtcattatttcacacctcgtggagtcacaaatccccaggcactttgtctccgctaaacgtaaaaccttctctgccttagcttcggagcagggatgggcaaccgacaatgggggcacgagcggcggacgaggaagggccagcgctctatcttcgtctacagtggcggaggaggatcagaggatcgacgtgaatccacctaaagggactggagacttcccccctgaagatatgcgactccgtacttggatatttaaccatttcaaagaggtttagcggctgataggattcgaagaggttgattatcctgtgctagaatcagaggttctgtttattagaaaggcccgggaggagattaaagatcagctgtattggtgtgaagatcggggaaatcgacgcgttgcattgagggctgagctcacaccttctctagcaaggctggtgatacataaaggaaaatctttat

SEQ ID NO: 23512 - DNA, 584 bp, Gossypium hirsutum
  unsure (1)..(584): unsure at all n locations
  Clone ID: AI055375.1
ataacatctactcatattatgaaagtaagaaatctgtaattgctactgccactctagatgatgataatggtaaattaggaaccaaaacagactacaccaatgatgactttggatttattgatgacttgtctcatcttgaattcagtgattctgatactttgtcagaacagatccttagaaagattgatcttcttcaatcgcaagctcataaactaaagaccagagttgacagacggtgaatgaaagtctcgaaagttctcttcataatagtntgagttcactgcataaccggttctagaaataaccttctcactcggatggagatgaccctggttangactcacatacttattcagcttcatttaagagtactttagatttcttttagctnaantgcagtctcaactgagnnagtgacacctttctgatatgatgagcntccgcanatctgggggattctatgaaatcgaggagatatttgatcatatcagctgcagaaaatgcaaattcaagggnttactcacagcnaggatccgattcatgaaagctagaagtgactgtttgtctgaatacccctaaaacct

SEQ ID NO: 23513 - DNA, 546 bp, Gossypium hirsutum
  Clone ID: LIB3543-030-Q1-K6-H8
aaaagaatataaaaagaagtaatgaagaggaggaaaagaaacggattgaaaatactactgatttagtatcttacatgtcatgtcataacatctactcgtattatgaaagtaagaaatctatcattgctactgcgagggggggggattttcttttttaattaggaaccaaaacagactacaccaatgatgactatggatttattgacgacttgtctcatcttgaattcagtgacactgatactctgtcggaacagatccttagaaagattgatcttcttcaatcgcaagctcgtaaactaaagaccagagttgacaagacggtgactgaaagtcctcgaaagttctcttccattaatatgttgagttcacctgcattaaccggttctagaaatcaaccttctccaactcggagtggagatagagccctggttagatcgcaacatacttcatcccagcatcgatctgaatgtcactttagagttctttttaggcctggaagtgcagtctcaagccatggagaggtgacaccctttcctgatatgattg

SEQ ID NO: 23514 - DNA, 238 bp, Gossypium hirsutum
  Clone ID: GOSHI-09MAY01-C100920_1
ttttggttccattgaaaatgattcatcgctcaaaattggtacaaaagcagaaactttttctctcggttttccatatgcaaaggaaactttggctgcatgctgtgggaggaatcttgctgttgccccgagctgcattgcctttttagttgctcctgcattgtgaaacctgggaggactactagtgaggtagatttctcttaagttctttctccttatgaattcgttttttgctgttctg

SEQ ID NO: 23515 - DNA, 728 bp, Gossypium hirsutum
  Clone ID: GOSHI-09MAY01-C100580_1
cggacgcgtgggttggaagttaatccgcatgaatcagctgttgaatgatggtcatatactggttgagggaattaaattaacaatggaggagcagtcagtccaattagaagccaaacatacgacaaaattagcaggggaattattattcccttcttgccaagcggtggccgactccaatctaattaaagaagccaaatcagctttgaagagttaaattaaaactctactaagctgaagctattttcatgcaacgagtttagctaggaaacgggggataaagattgaatttaatttttgaattgtggaaggatattattccataaatagagaagattagcaactggaagggagtggagaaaaacaaagaaaaaaatacagcaacgtagcggcaagcagaatttttttaaaaaaattggaccagcaacccgatcaaggagctggagtagcagctagtaaattcggctagttgggagaagggaaaatcggtcgacttgaagaacttcatcttccaagagccagtttgtaattcatattcttcccaatggattcgtgttctgctttgctagctatgagaggctagtttagttaagcttagttcgacacttctgaaaccgggcacaagtactttgaaaaatttattttgttatcaaatcaaattcggcactcttgagttgtttgattttattttccaaggatttttctaactcaattggagtgatcacctaatt

SEQ ID NO: 23516 - DNA, 674 bp, Gossypium hirsutum
  Clone ID: GOSHI-09MAY01-C100570_1
cccacttgttcgcccacgcgtccgtttcatttcacatgggacatgttctaatctctgccctgggcttcccaggtagagttcagggtttttatttttcttgtttttgcccatctgggtattcataaattttctatcttggcttggtttttaagcacctattggtcttatattgaattttcaattgtagacttccctattaaattgattggtcttagattaggttatctgaatttttttttttcagattgttaatcgatggttttagaagtagattattgacttttgctcacccagtttttcaatttccccttaacttgttcctttctgcagattcatgaataatcattcttttctcttacatctagatgctttcaaggctttttgaagttctgggtttttgaaggttttgctaatttatatattgctctgtgaatctgtcatcggaattcttgtgtataaacagacattgttaggtggttaaattgatgcactagaagctaaaactcatttccctgctaccaatttttgatcttttttaattacatcttaattggtattgagagttgcatgtgttcttgcaaactttttggggatgaattggataattgttaaccatgaaagttttgaaatttgaaagtgggaggaggtcccagtttcctgtttcatcaagcttg

SEQ ID NO: 23517 - DNA, 672 bp, Gossypium hirsutum
  Clone ID: GOSHI-09MAY01-C100140_1
ccgtccggcaaaccacccactggatgaaacgcagacactgacccgttgcctattcctcctccattggatgaagacgacgaatcaatggattccaacaactcaaatgatggggaaccagttcctcatccaacatcggagatctcccgaaccctgttacccagtagtatatcctgcttacttcccaccattctatccattttcatttccatattggatgggttacaacacagaaccaaccaagaccgacacgcatgaagtggtgaagccaacagcagtacattcaaagagcccgatcaacgtggatgagctggtgggcatgtcgaaactgagcttgggagaatctatcggtgataatggcccatcctcactttcattgaaacttgatggttcatccagacagtctgcattccatgccaatccgtcgtcacgtaattcaagtgggagtccaatccatgcagtttaggcgcccacctttatgttcaactactaccttagggttagctcagggtctgtgagcagtacaggttattgttaatagaagaataatcatgtgcagtatgttctctttttttttttggtttagatatacatttgtagcattttgtcagaaatttatttgaatcttttaactgttttcgtaattttgctttatattttacgctgtaaagaaaa

SEQ ID NO: 23518 - DNA, 567 bp, Gossypium hirsutum
  Clone ID: GOSHI-09MAY01-C100110_1
ggccataaaaacacattaatcgatataataatagattattgtccaaaactcatcatggtttaaacgaaaaaacaaaattcaaagttgtgggcacatcagaaaaatggaacaaacaatccctccataaaaaacacatccctatgcggtcaagctttaagcttcccatagaacttggccttttcttgtgttgtctggaaacgaccatgaccgaacttagatgaagtatcaatgaacttgagcttgatctcttcaagtgcaacccttgatgtttgattcaacagtgattgccttaatgtcacaacacgtttcttcggtccaacacaaccccctttaatcatcaaataatcttctttcaccactccataatgggggaatccaccaattggtgtaatatccttctcagtcctgtcatagtcagtcatggcagcatgtgattcattgccagcccgcccgcgcgggcgcattttcttgttcatctcagtgcggtgatggtaaccattatgaccagctcgggcaacggtaaacgaaaccctagccggatgccatgcaccaatacaagcaacctta

SEQ ID NO: 23519 - DNA, 620 bp, Gossypium hirsutum
  Clone ID: GOSHI-09MAY01-C100290_1
cttgatgtcaattctgcttattatgtccccaaaactcgatctatgcgtgaagatcctcttcctgatgctgaccctaatgagaagttctatgaaggtgataatcaatatagaatgagtgggcaagctttggagttcaagcagctcaatatccatgcatgggaagcatttgataaaggtcaagatattcatatgcaggctgctccatctcaagctgaactcctcttcaggaattataaggtcatcaaagagaagttgaaatcaaagaccaaagataccattatggaaaaatatggcaatgcagcgactgaagaagagataccgatggagcttctcttggggcaaagtgagaggcaagtcgaatatgatcgtgctggcagagttataaagggaatggaaacatcgcttccaaaaagcaagtatgaagaagatgttttcatcaacaaccacacaagtgtttggggttcatggtggaaggatcgccaatggggctacaaatgttgtaagcaaacaattagaaatagctactgtactggtgcagccgggattgaggctgcagaagcagccacggacttgatgaaggctaacattgctcgtaaagcgtcctccgaagatgcccctgc

SEQ ID NO: 23520 - DNA, 422 bp, Gossypium hirsutum
  Clone ID: uC-gsronu33B148g05b1
tcattcgcccacccgtgcgtactcccacacgaacgcaaaactcgagctaggcgggattaactaaaactgttgctggccctaacgacaagttctatgaaggtgataatcaatacacaatgagtgggcaagctttggagttcaagcagctcaatatccatgcatgggaagcatttgataaaggtcaagatattcatatgcaggctgctccatctcaagctgaactcctcttcaggaattataaggtcatcaaagagaagttgaaatcaaagaccaaagataccattatggaaaaatatggcaatgcaaccactgaagaagagataccgacggagcttctcttggggcacagtgagaggcaagtcccaatatgaacgagcctgcagagctataaagggaatggaaacatcgttttctaaaagcaa

SEQ ID NO: 23521 - DNA, 751 bp, Gossypium hirsutum
  Clone ID: GOSHI-09MAY01-C100220_1
gcaacatggtagtagaaacttagttaggaatgatgaaagagaacgaagtgccagttatggcagatatatgggtgaagaaaggcatcgcaacatggagacacgtggtagagagaggagcagggaaagggagatggattgggaattaagaggggagaaggaccgcgacagaagcagagaaagggagatgggagttgaatggagcagggacagggagatttatggtgagaggagaagggagagggagcgagcaaggagtagagatagagacatgagtggtgaaaggagaagggagaaggagcgagagaggagtagggagagagaaatggagagggaaaggagaagggagaaggagcgagggaagagccgggacagggatctagatggtgaaaggagaagggagaaggtgcatgataggatctgggatacagaagcagatagagataggaagagggagaaggaaagagattggagcagggatcatagcagtgcttatgatagagatagagataggagaagggaaaaaactgaagaatggaaccaagagcgggagagggaaaggagaagggacaggagtagggatagagataggaatattgaaattgaaaatgatggctatggtgatcgagatagatataagaaacattctcactcgaaacgggatgaaacagaaatttatcgagacggaacaaggaagaatgaaacagtaaaggttcatggttctaacatcgattcattggaaagacatggtgat

SEQ ID NO: 23522 - DNA, 884 bp, Gossypium hirsutum
  Clone ID: GOSHI-09MAY01-C101980_1
ctgagtcttcaggttgtgagggtgtatgtcaaagggaatgtagcatacttgttcataacaaggagcatcaagaaatcaagtcaattactttacatgttgaaagcttctgattcatccacaccaaatgataaatgtcctttaagaaggctgagttgtttgagaaacaaatttgtgggggtttaaaattaagcattttccaatattccatggtgcttttctggcaaggtggccatgaagaggaaccgtggttttcaagatcattgtttgttatcggaggacatgtgcttgtgtgcgttgaagacatctttcagtttagttctctcctaaacaatgcatgttccagtccatattcctcccttgattcaagctgcaacatcgcaggcatatcagagatggtcatcgagcaaggagagacgtgttgtataacattggccattaagtccagcacatcgaaagccggttcatcgaccaaaacgcaaaaaagggccggtctgagtagtaagaagtggaaactgaagtggttctctcaagaaagtctatcccaatttgtggcattagtgaaggcaatccaatctagggatgacattatctccattgcttgtaagatataaatcatgagtgtctttttagtgttattttatttttatttttttcctttcatgttccatattcatttcattcttttaattgggtgctttcatttgtgtgagatttttgtttgtggttggtcatggtgtgtttgtgtgcgccaaagttcatgactttgtgttagtattctttgatttgtatctttttagaagtgaaaaaaatttcacatgtacaggtatagtacagtgtgtagatttagccaatcaaatttatggatgttgagattttttagtcgc

SEQ ID NO: 23523 - DNA, 657 bp, Gossypium hirsutum
  Clone ID: GOSHI-09MAY01-C101970_1
gcagaacactacatcagcggaaaatatattcgccatttggtctatctcttagaaaatgctgtcataaatctctccgaaggccaagagcaaatgtcatggttgatagacttcacaggattttccttgaacaccagtgttcccatcagaacagcccgggatatcatatacatccttcagagccactatccagagaggctggcaatcgctttcttgtataatccaccaaggttttttgaagccttctataaggctgtgaggtattttctggatccaaaaacagctcagaaggtgaaatttgtttaccctaaaaacaaagatagtgtggagatgatgcaattatattttgatattgagaatctccccaacgaatttgggggaaacgcaacattgaagtatgaccacgaagagttctcacgattgatggctcaagatgatgtaaaaactgctaaattctggggaattgatgagaaaccataccaaattggcaatggacattcagtagcaccggagccagcgcccatttcacaacaagcgggctgagacaacttgcctattttctataactggtatgtctctaaggttaagtgatgtgcctatgtaaatcaacatccacatcttctttacatgatgaataaaagtcatttccttttttacccc

SEQ ID NO: 23524 - DNA, 560 bp, Gossypium hirsutum
  Clone ID: GOSHI-09MAY01-C101860_1
gaaaaagtgtatatagtttacttggggctacacaacaatggggagaaagctttgcatgagaattgagaaaacccatatctcatacttactttcagtcaaagaatctgaagaagatgctaaatcttcccttctttacagctacaaacacagcatcaatggctttgctgcaaagcttacaccagatgaagcctccaagctctctggaatggatgggcttttgtcagtgtttccttcacatggaaagcactcagtgcagacaacaaggtcatgggaatttgttggcttagatgaaggagatagctattcatgggaaaagcttaagatgggaggagaagacttattgtcaaaagctaaacatggcaaaaatgtcattattggagtgatggatagcggtaaaaaagttttgcaattataatttaaaactatatatgaattccaatgccatctttttagattactcatgtgactgtctcaagcattattgcttttgttgtattaagacaactgagtagcaaataattcatttttctaaatgtattatgtaattattggattgtttt

SEQ ID NO: 23525 - DNA, 981 bp, Gossypium hirsutum
  Clone ID: GOSHI-09MAY01-C101430_1
gcgttcggcagccactacaagctctggaggaggagtaccacgtcgggaaaaaaacctagaggacgtccagcgggatccaagaacaagccgaaatcacccataatcgttgctcgcgacagtccgaactcgttgagatcccacgtgctcgaaatctcttccggttcagacatagttgactcggtgtggggctacgcacggcggcgcggccgtggcgtttgtgtactcagcgggaccggtgccgtcacgaatgtcacgttaaggcaaccggctgctccacctggaagtgtcgtaacactacacggtcggttcgagattttatctttaaccgggacttctctcccaccgccagcaccgcctggagctggtggattgacggtttatctcgccggcgttcaaggtcaagtagtcggaggaagcgtggtgggaccgttaatggcttcaggtccagtcgtattaatggctgcatcgttcgccaatgcagtttacgataggttacctctcgaagaagaagacccaccaaccgttcacgaacaacaaccagcagcttcacaatcatccggattaaccggcagtggcggcggaaacaacaacaactgtggaacaaccggaaccggcgtaggcggcggcggcggcggggttcctttctataatttgggaccaaacatgggaacttatccatttccaggattatgaacttgatgaacacaaatcaacgaatcatcacaaggtctcaaatttttggtccctccttttgatcgatatttcaagcaaaatcgatgacaaaatttgttgctgcaacttgaagactgaagaatgattcatcagtaagtcacagatttctttttttgtataaaacatagtattttccattttatgtctttttttccctgggattttctcactttccaaacctgcttaatttatatatcaacacactagagattttgttgaaactatatatatatatttggaaccaacaat

SEQ ID NO: 23526 - DNA, 513 bp, Gossypium hirsutum
  Clone ID: GOSHI-09MAY01-C101760_1
ccgggtcgacccagcgttcgcttttttaaaagaaaaactcccctatacttctgctagggtttctgctttggggagctgcataggagggtcatcggcgcctcaacgcctccacctccggccccgaaccacgaggtatattaggtgcgtggtgggtgtagactctgacgtggaggtggaatggcacacgactcggaggagacgcgcgacgtgcaaggaggcgctctgttggttacggcgcaagggcagtctacttagggtttggctgaaaattgtttgagcttttgggctatgggattgggcttggggtttgggttagtttgggtttcaattttgtattgggtttgggttttgtttatggttgggcccatataatgtttgaattggtaaacaaagtggacttgtttattctgatttctgtttatgggtcccgggctgaattgggccataacaaaagtctaatataaaattctatttttagaataatagtcttccaagcgtgcaaattcagtccca

SEQ ID NO: 23527 - DNA, 638 bp, Gossypium hirsutum
  Clone ID: GOSHI-09MAY01-C101770_1
caaaagttaaaaaatgagggaccttaaccagaaacttttgtgggatcgatcactataatgggttcttgattcgatacataaaggcttcaaaggcatatctaggccaatctgaggactccatagttgttgatttcaactattatcgagctgatgaagcttccaccccgaggttaaaccaagatgtaatggaagaagtggagcaaatggcgtttttcaagtatggggctcgcccacattgggctaaaaacaggaacttggcgtttttgaaagttcaaagtaagtacctaaactttaatatgtttattgcagtgaagaagcaattagacccagaaaatatgttgtcgagtgaatggtcggatgagatattatttgggaaaggtgttagaagtgatggatgtgctttagaagggctttgcatatgttcagaagatagacattgcagtccaagtaaagggtatttttgcaaaccagggcttgtttacagtgaagctagagtttgcagatattcaccatcatcctccaatctttgattttttagcggattggtcttcaggttttctccttttccttaaaaaaaaattcaaagaaacaacttagtatttttgctaagcgagacaataataataagcattgttttt

SEQ ID NO: 23528 - DNA, 841 bp, Gossypium hirsutum
  Clone ID: GOSHI-09MAY01-C101690_1
gaaaatctcacctggcgttagaacagtggtaatcaatccgggtaactcttgttaagaacaccgagcttcaaacgcactgctagttatgaataaggcaacaggtcgatcatttacccaaatccggggatacgaaatcgccgcggtcatagaatgcagacttgtcaaaccccgattcgcacaataagcccgagtaggcttctcaattcaattggctggacgatatctagaaccagctttcaacgtgctattagctttatcactgcactacgtgtgagtcgttgagagatgttaatgaccaccaatccatattctctgatgcacatggtgatggacaggatctcagggcctaatttaccatctccaccccatctcttactgaaagagagagaaacgagttgatattcaaaaaccactttctaaccatactattcccagttgaccggttttccgagatgggtccttcttcacgaacatatttcagcaataacggctttacgtgtctgcagattttggattatatctattccttttatcaggagaacatgtcgagtcatgaaatagaagctgctatccacacggactcgaggcatgctgaccggcttcgagcattgtactctagcaaagagacagttgaatgcggtggaaacatgattttcaaacgaatcgatttcttaggaagtcgtagaagcttcgaaatgttaaagcgtgttagtggggataattacatgtattgtatttgagctcctgattagagcctaaaatatcatcatatatagcattactggtaaaggattgaatcttcagtcacagcatcaatactcaggtcgaccgcggaataata

SEQ ID NO: 23529 - DNA, 546 bp, Gossypium hirsutum
  Clone ID: GOSHI-09MAY01-C101660_1
ctggtatcaagggtgggtcatttgaagggctatgcttcaagaatgttacactacttggacttgccccaactgcagcatggcattgtgagtttgtttcaggttgtaccaatgctgtgtttccattgccatgtccccagttgcagaacaatggctcctcagcatgttgcatataggctttaagtttgaaatatattgaagtttcaagtgaatcatttcactaacttaataagtccgaacttcagttggtcatgcgattcttcctctattctccatgtgagggagatatgaagttgggttttgaaaagcctgctgactagaagggctactggctgagttagcctcctgcaatattgtcaaaatatatgattcgtggagcagttagacttgcttgggcagtggacaggatagtctgatgttaactggattgatggcatgctctgggttcattcaaccaatgacaaccaaatatcacatgtaaaaagaacacagaattcattttattttataaaggaatattattattaatattattgctgttgtcactca

SEQ ID NO: 23530 - DNA, 939 bp, Gossypium hirsutum
  Clone ID: GOSHI-09MAY01-C101240_2
gaaaagtcagctgagaatcagcttgtatttgatcagctaactgacgatgccattaagttaatggagaatggcgactacaatgtgtaccatgagaagcaagaggttttccagcgcgaggcagagggatatgagaagttagctctggccagggacaaaagcttatctgctaatgctgggctggacaattcttatcccatcttgggaaatgacgtactcacagatgcaaataatcatggagcaacgtcctctgtacttactgacttggctgtgggtacttcaaattcagatctaacttctgcagaagcttcaaacaatgctgccgaaagttacgatatgtttgcagatgatgaagatgacgaaaaaccatcatctgagcctaattccactgcccccgcgcccgcatcatcagaagctgtaaacacttcctccgagactggagatgtccaaaatgattatgtctatgacgagtcttcagggtactactacagtagcactttgggatattattatgacccatctactggattattttgctcagcagcaacagggcaatggtattcttttaatgagacaactggaacatatgatgaagttaaggaagttgcatcttagtataaatttgatcctgagttgctcttgcggtggaagatgtcgtacaggctatcgagtaagtccaatgtgtgaaactctcatcttttaagtatgttccatacgttaggctccttaccttttattgccttttgatgtctctaaccttaatagttacaatgctgttgtagttattatgagttcgaacttgaggcctagtctagctagttttcgaggtcattcttagaggttgcagcttctcgtgtacccgaaaacaatcatattttatcacttagggaactcctttgattagttttgagttcttagactcatgggaaatttatctgagtg

SEQ ID NO: 23531 - DNA, 636 bp, Gossypium hirsutum
  Clone ID: GOSHI-09MAY01-C101240_1
ccccgcgtccgcccacgcgtgcgggggggcgtgggcggacgcgtgggtgcggacgtagcagcaacagggcaatggtattcttttaatgagtcacctggaacatatgatgaagttaaggagttgcatcttagtataaatttgatcctgagttgctcttgcggtggaagatgttgtacaggcaatcgagtaagtccactgtgtgaaactctcatcttttaagtatgtttcatacaataggctccttaccttttattgccttttgatgtctcttaacgttaatagttacaatgctgttatagttattatgagttcgaacttgaggcctagtctagctagttttcgaggtcattcttagaggttgcagcttgtcgtgtacccgaaaacaatcatattttatcatttaggaactcctaagaattagtttttgagttcttagacttgtgggaaatttatctctgtgttttgacaattttccttttttctcttctagtcttctacgagtttgtaagttgtattctctaacgttcagccattcagaaagaagcttttgccattgccgatgcttatgtggttacactgtcattctagacgtaattatgcttctagttcctgtcctttttgcgcacttggaaattt

SEQ ID NO: 23532 - DNA, 774 bp, Gossypium hirsutum
  Clone ID: GOSHI-09MAY01-C102940_1
cggccgcgtgggttctactccttcattctgctctctgcacataacgaggaagaacttcgcaagcacgccctccaggtatggttcttcctgttcttttctatttgtttcgtgtggaagaaagaaagaagagaagacaaaaaacagaaagtggtaagatgcaacgaaaaaacaaaacaaagaaaagttaatcaccttccccaaaaatcccccttcgatcctttgctttttatttcttttcaatcgttttctagatataaaaaaatgtcacctttttacaaaaaaacaattggctttatatagccgaaaaaatagaaaaaagccattctctaaaaactgtcctccctttttacattttcattgtatttttctactattgttcgtggccgaggtttgttgtctgctgcaggaagaacgtgctggagcgcgggacaacgtgtgtgacgtgcaagggcgacgtgcgggagcagctgcggcgatctgctgcttagggtttctgtgacttcaggccaattgggccttgtaattgggttgggattggcccaagttttattgggtttgattgtatttaatttgggctgtgtaaatgattttgggccccgggcaataattttgtattacaattaaaaatgaatttttattttttatttgtattttcaaaaactaaattaagattaagttttgtcaaagaattacgtaggtttttataggaaactatttgagtttttgtagaaaaaaactttgagttttaaaataaaacttgcatttcttatttat

SEQ ID NO: 23533 - DNA, 358 bp, Gossypium hirsutum
  Clone ID: GOSHI-09MAY01-C102190_1
ctcgctcatctgccaaccctaccttaccggccatagcagagatatttgcttgcactgttgggcaaaaaccaagtatggcaaaatattatgttgatgacatagttgaagtcattggactgcttcgagggattccggaagcaacagtacagccaaactgacttagagaaaattagtgatgaaaaaatcgaaacaaaaggaacaatgtttacaaaaggatttatttagggctaatggtatataggaaaccttaccttgtgcagacaatactttttaacagatttcattacttagaaatgctaccccgctggttcatgttcttttattatacctatatccatatcaaaacttcttgtctaag

SEQ ID NO: 23534 - DNA, 701 bp, Gossypium hirsutum
  unsure (1)..(701): unsure at all n locations
  Clone ID: AI055614.1
gtggtggagcagcttgttatgcttttggaaccaagtttagtgagcctatgaaaatcaacttgtttcctttattatctctagatgatcatgacagttctcgaaagctcggtgaaaatgaagttaataaggaagaggaaggtatgatggaaaatgggaatgttcttttacaagctccacatgttggaactggttcacctcaacatcctgaaatgcaaagcttaaatgttgagaaccagacaggacagatagatgcttcgagttgggttgtaaaacttgaaaaaaaaaatgcaaaattaggaaaggacatattggagaagtttggatggttagatctagagagaaaagtttatgcacaaaaggaggtnttgttcatctctttccctgtgccgnagagtttttgtgctatcttctcagaagacaattntgaagtttgagtgatcatcatccatctaaaccatttagagctggaaggtcactctttaatgacatgtnctcctcagtagctctggacattcttaaggatatggtgctactaagcttncagatgagcttgttcaaaaagaaagcttgtaatctccttaaaataatgactagactgtgcctcttgataggccaaagggtatcagatagcttctggacagctaccaacagtgggaccgattgtgaattgtgnctacgatcatcttcgggacaaatggatn

SEQ ID NO: 23535 - DNA, 604 bp, Gossypium hirsutum
  Clone ID: LIB3829-017-Q6-K6-A12
aaaaagcaaaattaggaaaggacatattgaagaagtttggatggttagatctagagagaaaagtttatgcacaagaggatggtttgttcatctctttccctgtgaccgagaagttttgtgctatcttctcagaagacagatttgaagttttgagtgatcatcatccatctaaactatttagagctgaaggttcactcttaaatgacatgtcctcctcagtagctctggacattcttaaggaatatggtgctactaagcttccagatgagcttgttcaaaaaagaaaagcttgtaaatctcccttaaaaataatgactgaagctgttgcctctttgattaggcaaaaggggttatcagataagcttctggagcagctaccaaacaggtgggaacggattggtgatattgttgtgctaccgatttcatccttcggggacccaatatggaattcaattggagaggagctttggcccattattgccaaatcccttaatacttgtcgccttgcacggcagggccgggtcactgcaaatggtacaagggacagtactttggagattcttgtaggagataatggctgggttgatcatcgtgaaaatgggat

SEQ ID NO: 23536 - DNA, 235 bp, Gossypium hirsutum
  Clone ID: GOSHI-09MAY01-C102020_1
gcttgaagtatagtcggatatggatgcggagatgtgaacctatccttcatccaccgactccaaatgcatcaaaaacatatgacccttcatccaagggctccaaattccctatagtctttaaccaattgaatatacccccatcccccaatgtggggcccttcttgaatgtccctcatatgggacccttgtatgttccccccccggttaattgaattcccaagtattgagttttttt

SEQ ID NO: 23537 - DNA, 593 bp, Gossypium hirsutum
  unsure (1)..(593): unsure at all n locations
  Clone ID: AI054500.1
taggatgcaaatgataacctgcacaatgttgtgtagttgacatggaaattagcatttaggtttcagattacctaaaaagttggaagcaatagtttgaggatcatgccaagtatctttcatacggaatggtatttggttataagcataaggatacattcatttcccgtgaagtagctttctggaaatgttttatgaaaagtgaacttatttactagactaagngccgttctaagcaggttttgggggccttgcccccctttagctcctccaaattctagggttttaggtgtttttttggttgttgaatgaatctttgtaaaaatttatttagatttttatttgtggaaaatttgcattatacaaacgatttattctaccctatttctgctttgattagctatatcttaggatatgtactcaactcatggtgatgtagaacgggtatgatcacatgagatggtaaattctaggtttccatgtattgaagatcctgaggtatatccctatcggtgtgaatgtggatcagtttcatgaaatganatccaacactgtttaggatgtctttcttttctataggatgtccataaaggatt

SEQ ID NO: 23538 - DNA, 468 bp, Gossypium hirsutum
  Clone ID: LIB3828-030-Q6-K6-H2
ttagcattttaggtttcagatacctaaaatttggaagcaatagtttgaggatcatgccaagtatctttcgtacggaatggtatttagttataagcataaggatacattcatttcccgtgaagtagctttctagaaagttttatgaaaagtgaacttatttactagactaggggccgttctaagagcaggttggggccttgcccccctttagctcctccaaaatctctaggtttttaacgtgatattttttgttgtttgaatgattctttgtaaaatatttacttcagattttttatttgttggaaaattttgcattaatacaaaaacgatctattcctacacctattttctgctttgatttggcttatatctttagggatatgttacttggactcaattgcgagtgtaggatacgggtatgtagccaacatgagtatgggtaacttttctaggttttccatgtatttg

SEQ ID NO: 23539 - DNA, 533 bp, Gossypium hirsutum
  Clone ID: GOSHI-09MAY01-C103860_1
tttttgcacatcaacaggaataaacactttccttttaaactatacaatgttgaagtatgtatacatatcaaagggctttgcccccattgagtgtgagaattaaaatggcaaagtaactaaatttgtatagtttttgggaagcaaaaacaggcaccttgtgtactattccctatatcccactgccaccattaacagagccttaaacggatgtttctatgatccaattcggttcatatactatgcctttccccttccgatcaacgacccactattcattttaacttgacaatttgatttcgttcaaatctggattatgtgactcttgatctttggaactaccctcatctttgttctgcccgctgtttccggccattgacaactcctgagaagttgacaagtccagtgacagtaatgggaactggcaatatgctgtacgtaacagcttatatatctcctctgcccgacccctgggctcatcttgtttatccatctctataagaacctgtgcaggactcctcttgaaaacgggggaa

SEQ ID NO: 23540 - DNA, 648 bp, Gossypium hirsutum
  Clone ID: GOSHI-09MAY01-C103580_2
agccctccacccaccattgtatcccacaatggaattatttggggtgaatcattttgcttgacgagaatatcgagagtgtaaaaaaaaaatttcaaacctggtaagcagtcattcttcttcataacttgcaagtctttaacaccaccttaaatatccatcaatatatcaagcaagaattcaaagttgttgcgaaaacacacaatgtccctaaaacatgaatttgaaccaccgcctgcctgcctgccttaatttgattcactgcgtctggcagacgcatgattatcatcatcatcatctgtaaacagggctcctgtcattcctagggggtggactaaggctgcggctgtggccattttccttcctagagctccgataagccccatcctcagcatcggggcttctgctccttcccctaggacttgcactataatccgaaccattcgcatgcctgcggtcctttggggaaggaccacccccctcttgggcccttccccacgcgtccgcccacgcgtccgccctcccttgagatggtgatggagaacccttgtggcgcttagggctccttgatattctatcctcgcgctcgtaacttcggtctctcttcacaggtgatcttgatctactgtcgctgcgtcccctgctgtaact

SEQ ID NO: 23541 - DNA, 542 bp, Gossypium hirsutum
  unsure (1)..(542): unsure at all n locations
  Clone ID: uC-gsronu33B134d03b1
cttcgtttggctctgtcttcagcagctattgtattgcgcataggtttagtgaggctaccatgagttttgatgtcatggatagatacggtgtagaacaagatgttgttgcagtcaattcacttcttagtgcaatttgccacgaggacaatcagatgtcggttgcaatagagttttttgataagatcaagatgaagatcccacctgatggggatacttttgccattttgctcgaagggtgggagaaagaaggcaatttggctaaggccaagaacacgttcggcgagatggtagtcagagtaggatggagtccgaagcacatttctgcttacgatgcctttttgaccacgcttgttcgtggctctcaagtcgatgaagctctcaaatttttgcaagttatgaagaagaatgactgcttaccaggtttgaaatttttctctaacactctcgatattctcgtcaagcaaaatgattcagcccaaataattncattgtgggatacaatggtgngtggtgggctgggtgccaatttgattatgtacaat

SEQ ID NO: 23542 - DNA, 471 bp, Gossypium hirsutum
  Clone ID: GOSHI-09MAY01-C103120_1
tgtgactctctgcccgacaaatgctcttgcgaagttcctcaggagccttcagaattggcagatgagtttggcgtgcccgttgtaattacgaaccaagtagttgctcaagtggatggttcagcaatctttgccggtcctcaaattaagcctattggcggtaacatcatggctcatgcttccacaacaagactggctgttcggaagggaagaggagaggaacgtatttgtaaaataataagctcaccttgcttggccgaggctgaagctcgatttcagatttctccaggaggtgtagctgatgttaaagactgagctgtttcagctcaatgttttccaaacaagtagccgcaaagcttcctttaattgatcaatcaatttgttattttgtagccacctgcttcagctaatgagcaaatcacaaaactctgctattttctttctttgcaatgaagcttgccaaaaattggaagc

SEQ ID NO: 23543 - DNA, 801 bp, Gossypium hirsutum
  Clone ID: GOSHI-09MAY01-C103050_1
cggtccgaattcccggtcgccccgcgtccgcagtttcttcctctttaagccaggtcaaagaatgatggatcttgagtcagtgcatatgtcatatctaactgattcactacatatatgttttctatctgatgaaacaaaaccaatagccagtaccatagagaatattttgcagtgtgccctagacttccggtcttgtcttactggggatatatggaatgtgggacttgctgaaggtgatttacaggataaactttctaagatcaacatatctcaggttcttggcataaaagaaacgttcgacaaaaatcttaaagaactgcatctactctacctcaaatcacctaaacatggagaatctgggctttcgtgtttctggggatatctcaactataatgactattactttaatgaaaatgaaatgagctattatgctttctcaatctgaagtcctttccatgaagatcgaaagtaggtagcgatatgcattcttgtgtgccactaagttcatcgaaacaagctcaaagtagaagtcctaaactgcatcgtggtttggactcaatactcttagcagcagccaacctgcaccatatcatctttgcactcctgcagtcgattttcatgcaaggtaaggcatcaatcctttatttagctggctatggtgaagaagtaacatgctaattgagatttgttgtgtttgttgtctcttaatttagggtatagtctttaacattttccccccttcttaatgattttgtttccaaagggtaaagtttgaatgtgcttttgagttccacttttttc

SEQ ID NO: 23544 - DNA, 1176 bp, Gossypium hirsutum
  Clone ID: GOSHI-09MAY01-C103010_1
gtcgatgcttattcagctgcatcattgaaggccggacatatgcttatcctggaatgagacctacaagttttactgggagtcagatcatcatgccactcggccagacggccgaacacgaagagctgctcgaagttataagactcgaaggccagtctcttacgcaagaagatgcctttctatcaagggacattcatctattacagatatgtagtggaattgatgacaatgcggttggggcctgttcggagcttgtgtttgcaccaatagatgagatgtttccggatgatgctgccttactaccttcgggattccgcattatcccgttggagtcaaaaccagattcgtcggctacaaatcggactttggatcttacttcgagtctcgaagtggggcctgcaacaagccaagctgccggggattctccgtgtcagaacgcacgatcggtgttgacaattgccttccagtttcccttcgataccaatcttcaggataatgttctgaccatggcacgccagtatgtccgtagcgtcatttcttctgtccagaggattgctatggccatatctccatgtggatcgagcccaactataggaccaaagccatctccaggttctcccgaagcgcttacgttggctcattggatctgccagagctacagtttccatttgggggaagagttgttgaaatccgaatcacttggtggcgactcagtattgaagaatctttggcaacatcaggatgcaatattgtgttgttcgttgaagtctgtaccggttttcatcttcgcaaatcaggccggtctagacatgcttgagacaactctagtggatctaccagacatcacactggacaaaatattcgatgagtcgggacggaaggcattgtgctctgatttcaccaagttgatgcagcagggattcactcacttgctggccggagtttgcatgtcgacaatgggccgccacgtctcgtatgaacaagctgttgcttggaaagtacttgcagctgatgcaaacactgtccattgcttggcattctcttttataaactggtcttttgtgtgaacaaaaaagaaaattataatttaaaatttccgaatatccagtttttttcctctctagccaaacatgaatggggagaaaaatgaaatgaaaaagaacagagaaagttcagctc

SEQ ID NO: 23545 - DNA, 389 bp, Gossypium hirsutum
  Clone ID: GOSHI-09MAY01-C38988_1
ttcacgcgtccgcattaacaaccttaaaaacatcaacaaccttattaaccccaacaatgtccctttcctaacaggtctaacaggtgcacaaaccagtgccatcgtccaaaactcccacaacagcgacagcgttatcaattccgacagcaaccctttcgtcacagcaggccaactcccacccggctctctccaacgtctcatgttcggtaccataaccgtcatcgacgatcagctaaccgaagcccacgagttagattcagctatcctaggcaaagcacaagggttctatttggctagctcattagatggttctagccaaaccatttcgttgacagttttattacatggaggtgaacatggtcacgaaatcgaagacaccattagttttt

SEQ ID NO: 23546 - DNA, 945 bp, Gossypium hirsutum
  Clone ID: GOSHI-09MAY01-C38588_1
gttctggtgaagtcagactttgggggccggggtcaattcagttagtttagtgagtgcagatcttgttatcaatcgagcaactttcgagtggtggtccttccatattatcaattcatctgatatggttcactgtggaggtttcttttttccatggccgttgtagtatccgagggggggggggggcagggtattcttggagacacactaagcaaattcagcatttggggtctctacataacttttgtactagctgttggccggtttatcaggcttcaatgctccgacctaagaatgagaatacagtatgaaaacctgccttcctgtgacaggttgatagccatttgtgaggatatatatgctgcgagagcagagggtgagcttggagtcgaagaggtcctttactggaccctagtgaagatttacagatcaccgcacatgctacttgagtacactaaacctgactagtcaccatcactgatgcactttcggttgcaagagttttcacaggtattcacgaaacaagctgagtaaaacatacggacataccggaatcaatcgaaaattggtttgtgcttcttcttcggtggccaagaagctttatggcggtcatagtctcttcgattaccatgttggagaaaatgctaaatgctacactgctctaaacatgaacaaaacagccatgaaatggaacttcaattcaggttcttgctatatttgaactttgtccttcacggttggtctaaaagaaaagcaccattgcttaatattaaagagtagaaaaggtttcttgggagggattgtgtacataatttgtaccatatcagtttaaaaacagcaaaaggaaaatatatgttgaaagggagtatattcttttgtaacatctgcctatttttaatacaaggatgatatatacatttccactgaagaaaaaaaaaaaaaaacccc

SEQ ID NO: 23547 - DNA, 406 bp, Gossypium hirsutum
  Clone ID: LIB3145-054-Q1-K1-F3
tttttccatttttctcaagtatatgatgagattacaaaatttatatacgaccattggtgaaactatgatttaatcttggttggagcagtgaccgaatacattctctattttctaaatttgtctacaatatgaagatttactaacaagttgttatcctcttctgcagtccaagaaaaaaaaaaagaatagtagcaacgctgattggtaagatgcaaagttggaacatttttgtgttttgcttcttagccatatagcctgacttggattgacattgtttgctgtttctgtaaaagttactccattctagttttctccatgagccgtatgtgaaagccatctggaaactgtaaacctggagatcgaaatatatttccacctttgattggttcccacctgaaagattcat

SEQ ID NO: 23548 - DNA, 291 bp, Gossypium hirsutum
  unsure (1)..(291): unsure at all n locations
  Clone ID: LIB3149-064-Q1-K1-G4
aaaacccgggccgacccacgccttcggccctttttttttttttttttttttttgtttttttcctttnnnnnnncctgggccggcaaaggaggataccacctggttagtaaatcttcttttggtaaacaaatttaaaaaatagagattgttttcggtcactgctccaaccaaaattaaatcatagtttcaccaagggtcgtatataaattttggaatctcatcatatacttgagaaaattggaaaaagaaaaaaagaaaagaattttgttttaacgggtcatattttttcac

SEQ ID NO: 23549 - DNA, 704 bp, Gossypium hirsutum
  Clone ID: GOSHI-09MAY01-C38658_1
tccgcggcgcgtgggtttgagtctcccacaacatccattttgttaaatcccacaaaaattcctaattttattgcttgtaatcttgcatgtgcctttgctgtgaacgggggtgctatctcggagtgaatgaccgcctttaatgctagaatctccccttcctcgtttcgtacaagtaggcccgtagccgatctagaagattgactgtcaaaggctgtatcaaaatgaactgcgacttttgatcttcgacaaatctggcgaatggttctatcaacctgaaagattgaccagagaccacaacagaaatgtcggatctgttcgttagtaactagacggaagacctaggacattattgaaagacatggctactatccttttcatgttgaagacagtggggcactgatcattcaacacaactctcttgtgtctgagattaacaaaggacggaataaagttccaagagattctccatactattattttaatttttgaggggatgtataaattccatagtttcttgtagaagtttttagtttcggcatgtataatataactactaggatccaagttagacttctataatagtttataggcgctcctgactgaaaaatccccgaacagttcccctcaccatacttgaaaatctttatgcgctgcctctgccaatggaatctgcatgatttttttcctgcgtcccccaaaaaata

SEQ ID NO: 23550 - DNA, 713 bp, Gossypium hirsutum
  Clone ID: GOSHI-09MAY01-C38678_1
ttgctttccatcttcagcatgcccttctcatgggtactgcatctggcattgccttcatccttggtgcctggcgaccactgcaactactattgtcttccaaaatgggattcttaccacttatgttgctactaactgtaggagctgcatttgtccatgtttcaagctcttctatgttgttgcttgtttgtaacaaaagaagttcttccaataaccttccgacagtgacaagatttccggtgagtgggctcactctccagtcatttttagcgtgtggagctgtggcttttcatgctctcgctgaagggcttgcactaggagtggctgcgccaaaagcttatggacttggccggcacatggtccttcctgtatcccttcacgggcttccacgtggtgcagctgtggccagctgcatctttggagctactggcagttggtatggctctcttgcagcagctgctctaatcggcgtcatatggcccgatatctgcaattggagcaatattggcaggaattgactacagtggtcttgaccatgtgatggttttggcctgtggaggattgatcccatgccttgttagaatagttcaaagagcagtaaggttagatatccgaaaaagcagctgcggtcttgctgttggagtcggttttgctactctttgtttagcatgcaccaagttggtttgcttgcatacaccttattgcaattctgctcc

SEQ ID NO: 23551 - DNA, 375 bp, Gossypium hirsutum
  Clone ID: GOSHI-09MAY01-C38608_2
caacagctgcggatccattgcttccctgtttcctgtaatcaaaaaagagagaaaatgaaggttgttgctgcagctgagactaagaaggaagagaaagttgaggagaaagaggaatccgatgatgatatgggcttcagtctcttcgactaaaagcaccgcgcaccgctttccgcgcaccgccagcaacctatgaatgaaatacggatggtttttggtttctacagaggatttcttttgaatttaaggctgccctaggtttttgaagttagttatccagtgccatttagttctttctttgtggattcatatatttgttttgctgaacccttttgttgcaatggaattttcttccgacttaattttaattatcttctc

SEQ ID NO: 23552 - DNA, 713 bp, Gossypium hirsutum
  Clone ID: GOSHI-09MAY01-C38608_1
cccacgcgtccgaaagctcctctttctgtgaaagtgaaagtaagaatcagatttttggtgataatgatggagccttcctatccacaacagctgcggatccattgcttccctgtttcctgtaagcaaaaaagagagaaaatgaaggttgttgctgcttatttgttggctgtacttggaggcaatgcctctccttcagctgatgatcttaagaacattcttgccagcgttggagctgacgctgaagaggaaaggctccagcttcttttatctgaagtgaagggaaaagatataaccgagcttattgcatctgggagggaaaagcttgcctctgttcccagcggtggtggtgttgctgtggcggcatctgcacccggagccgccgccgccgccgctcctgctgcagctgagactaagaaggaagagaaagttgaggagaaagaggaatccgatgatgatatgggcttcagtctcttcgactaaaactaccacgcaccgccagcaacctatcaatgaaatacggatggtttttggtttctacggaggatttcttttgaatttaaggctgccctaggtttttaaagttagttatccagtgccatgtaggtctttctttttggattcattatatttgttttgctgaacccttttgttgcaatggaattttcttcccacttaattttaatcatcttctcgtgtttctgtcccccgtatta

SEQ ID NO: 23553 - DNA, 242 bp, Gossypium hirsutum
  Clone ID: LIB3196-043-P1-M1-E11
ctgcaagctggagacctaaagaaaggaaagagaaaagttgagggagaaaggaaggaatcccggtggatgaaatggaaatacgggtgggttttggtttctacagaggatttcttttgaatttaaggctggcctaaggttttggagttagttatccagtgccatttagttctttctttgtggattcatatatttggtttgctgaacccttttggtgcaatggaattttcttccgacttaatttt

SEQ ID NO: 23554 - DNA, 404 bp, Gossypium hirsutum
  Clone ID: GOSHI-09MAY01-C38118_1
cccactccttagaaaatatccaaaccctcaaaacttgtcggtaccatcttccaaaaacaagcagccttccaaaatcaaaaccatttgatgctcattcctctctccaaagcctacctcttcctcttctgtcaatctggttccctcctcctcccccataatctatcattgatgaccatcggaacatttccaattaggcctagatggtttcccaaaagcaaggcctgaaagtaagcatatccttccgctataaatggcgaagcgatctccttgtgcagtgtctgttttgaagccaaaatctcacttggagagttacgaacaaccactccagatctagatctcaccaaattttgattacaagcggcatcaaaattaactttaacatcagaacctaatgggggacacca

SEQ ID NO: 23555 - DNA, 457 bp, Gossypium hirsutum
  Clone ID: uC-gsflmaxxa047a12b1
tttacgcgtccgatcggaacatttccaattaggtgagctctctcttccattctttaagcaatccgcggctaaactatgtgctaggatattagcagatctggatggtttcccaaaagcaaggcctgaaagtaagcatatccttccgctataaatggcgaagcgatctccttgtgcagtgtctgttttgaagccaaaatctcacttggagagttacgaacaaccactccagatctagatctcaccaaattttgattacaagcggcatcaaaattaactttaacatcagaacctaatgggggacaccattcctcattaacaatagatctggacaagatttctatttgtccagattcctcatatggcacaataaaataatttgtactggtcattggaactcattcgaaaaacccagggctttgctgctccaccacacttgtgacacaggacatctcttcta

SEQ ID NO: 23556 - DNA, 391 bp, Gossypium hirsutum
  Clone ID: LIB3145-050-Q1-K1-H8
cccacgcgttcgaccactcttccgtttattttgtcggtaccatcttccaaaaacaagccggcttccaaaatcaaaaccggtcgatgctcattcctctctccaaagcctacctcttcctcttctgtcaatctggttccctcctcctcccccataatctatcattgatgaccatctgaacatttccaattaggtaactctctcttccattctttaagcaatccgcggctaaactatgtgctaggatattagcagatctgggtatgtctttgagctggatactatgaaaactccttttcaattgttgtatgtcccaaataatagcccctattactgatttatctcgaatgtccgactgactttttttaataatggtttttgccatcttcttcta

SEQ ID NO: 23557 - DNA, 680 bp, Gossypium hirsutum
  Clone ID: AI725813.1
cagatagttttctgtttgagcctcacctagttcgtcttctttacccattgtatctccgcatggttcctgagctagttcgccatactacacgaccctctaagccacccacatggttacgagattatgtttgctgctcttactcgtcttcttcctctccacttgagatgagagatgggttgcagctaagcaacaagagattctggcattagaatcaaatttcacttgggatgtaggtcctttgccccttggtaaaacacctattggttgcaaatgggtcttgaaggtgaaatataattctgatggcatggttgaacgttcaaagctcatcttattggacaagggtttactcaacaggagggtgttgcctatcatgaaactttttctccggttgctaaactagttacggtacgaactgttattgctcttgctgctcaacaaggctgaccacagtttcagatggatgtttataatgtttttttacaaggtgatgtgtttgaagaagtttacatgatgcttccgattggtttttgcactcagggggagacttgggtttgtccactgcgaaaatctctttatggattgaaacaagcctcaagaacatggaatatgaaagctcacggaagctattctactccatggatattcataaagtaagtattctctgttcactaaaagagttt

SEQ ID NO: 23558 - DNA, 676 bp, Gossypium hirsutum
  unsure (1)..(676): unsure at all n locations
  Clone ID: AI725864.1
ctttactgcatgtgtcagatagttttctgtttgagcctcacctagttcgtcttctttacccattgtatctccgcatggttcctgagctagttcgccatactacacgaccctctaagccacccacatggttacgagattatgtttgctgctcttactcgtcttcttcctctccacttgagatgagagatgggttgcagctaagcaacaagagattctggcattagaatcaaatttcacttgggatgtaggtcctttgccccttggtaaaacacctattggttgcaaatgggtcttgaaggtgaaatataattctgatggcatggttgaacgttcaaagctcatcttattggacaagggtttactcaacaggagggtgttgcctatcatgaaactttttctccggttgctaaactatttacgggggagacttgggtttgtcnactgcgaaaatctctttatggattgaaacaaacctcaagacaatggaatatgaaagctcacggaagctattctactcaatggatattcataaagtaagtattctctgttcactaaaagagttatggattcaattgtcatgatgcgtatatatgtggaagaactgttaatgactggaaacgatgaccagcttatttctgagtttaaacaagtgctacatcaaagtttcaaaatgaag

SEQ ID NO: 23559 - DNA, 533 bp, Gossypium hirsutum
  Clone ID: GOSHI-09MAY01-C38098_2
gttgaatcaaatccctttcccctccggtttttcctcatttggccgaccaaaactcacccccgatcgccgcaccatcgctgtaatagatggctagcgatgagttgggcttgatttcgaagaggaagaatgcaactctgacgaccggattgattcaggtacggaggagaacgtggagcacgtacggaggctatgcgctggcgtacggaggtagctggcgattggggctgcggcgtaaaaggggaacaaaaccttagggtttctgttcctaaaatgtttcggaccgtttgggccaatgtaactttgggtatgagttaatttgggctcgtattgagttttgaatttgggctatgtgattggacttcgatttaatatttggatattttttattttagctttattatcgttgtttgtaacgggccgggcaaatttggcccactacatgaattataagagaatgaaatgtgattatatgcaagtgaattatgaacacgtgaactaaatgtaatttatgaaatgaaattgtgatttgtgtg

SEQ ID NO: 23560 - DNA, 887 bp, Gossypium hirsutum
  Clone ID: GOSHI-09MAY01-C38098_1
cggacgcgtgggttgaaattgaaaccctagcctcctattatttccttcagccgacccttagtgtcaactcttaagcgccgagtcgccaccatgaacggcgaccagcgtgcgcgaacctcgagattactttttcagccttaagattccctctatacctcgattttaacggagcagaaggaatcccatggaatttgtaaggtaagcttttcacttcccttctccctttcagcccatctgcgggcttcatcggcgctgaaagcgcctccacccaagacgcgattttaaacagatccctaaggatctaaaatcttggaccggagaagtgaacaatgaatagatcgacccccgaatcaggtaagtaaaccctttccccttttttatatatctttatgcaatagatttgaaatcaataaaaagaaaaaaaaacgatgaacaaaagagacacatttaagatgtttgcctccgattgtttcttcttctgtttttttttatttccagtgttcgtgtccaacgattacaaagaacataggacttttatatagtcgaaaataaaaatgaaaatacaataagttttccttttttctctttttttttcttactgttgtttttgctgtgctgttcttgtcctttgtttgtcttcttttacaggtacggaggagaacgtggagcacgtacggaggctatgcgctggcgtacggaggtagctggtggcgcaaggggaaccttagggttcctgaggattgcttgacctttgggccaatcgggctaatttttgggtctaggttaatgggccattgtatttggttttgggtctaaacaatgggtttgggctattgtaataattttagactaatggacttttattaatatatttggtttatttattt

SEQ ID NO: 23561 - DNA, 340 bp, Gossypium hirsutum
  unsure (1)..(340): unsure at all n locations
  Clone ID: LIB3145-050-Q1-K1-F12
cccacgcgtccgcccacgcgtccggtctttgctgtgctgttcttgtcctttgtttgtcttcttttgcaggtacggaggagaacgtggagcacgtacagaggctatgcgctggcgtacggaggtagctggcgatcgggggctgctggtggctcagctgctgcggcgcaaggcgaaccttagggttcctgaggattgcttgacctttgggccaatcgggctgtatttttgggtctaggttaatgggccattgtatttggttttgggcctaaacaatgggtttgggctattggattttaattgggtcttgggttatgctngctggtttgggggttgttaatat

SEQ ID NO: 23562 - DNA, 576 bp, Gossypium hirsutum
  Clone ID: GOSHI-09MAY01-C38068_1
cacttctccaactaccctattatgtcttattttcactcccctccatgaaagccatagctccaaaatagcttcaatccctcccccaaaaatggccattctcaaactgatcttcatcaccctcactctaccccttcttttccttcattcttatgttgctgtctcaattttagagctccaaaatgcactgaaaaccagtgaaattgatgccacggtgagaagggcttgttccaaaaagcttgaagattgtttggaaagtgaagatatggaatcagagacccaaaggaggttgcttttgatgcaaagaaggtacattagttatgaaacattgaggagggacatggttccttgtcaaaaaccaggttcttcttattatgattgtggtgctgctcaagctaatccttatagtagaggttgtgagattattacaagatgtgctagaggtatcaaaggtactaaaacctgaagaagaagaagaaaaaagaagacctaaatttgatgtcttttttttaactgttaacagcttgtttctgcaaatgctaatgtgtttgagctggtttttattgtatattagagaac

SEQ ID NO: 23563 - DNA, 768 bp, Gossypium hirsutum
  Clone ID: GOSHI-09MAY01-C38018_1
aatcagtcatctaaaataaaactaaaaaaacctaatcactcccctttctcttgcgccggttggtgcctttatcctccattcgactccgattgcgacggagtagaaggaagatcggccaccaggtaagctcgttctcctttcccttttctttttccttcacttttctcttcttcgtataaaaaaacaaaagaaaacagtaaagaaacgcagagaaaaaaaatggtgaacccttttcaaatctgatttcttttcctttttgattgattttttttttgtatttcaatatgcgtggaaaaaaagatcctcgaaacaatacagaaatggggttttataaccccaaaaatacatccatttttccttctatttttctcctattttcttttctgttgctattttgttattttccttttctctttctgtttgctgcttgtttgttgcgtctgttgcaggtacagctggagtggacgcacgtgcagagacatcgttgatgcgtgcagagaacccctggtttcagccacaatgcaaacagttccagaaaccgcctccaatattgggctagggttggctggtttgaattttagtgggttattttgggtattgagtttattcgggtttttctcggctgtttaggtatttcgggttttgtaatcgggtttgggtttacggtctgtttcgggtttgggtataattagattttggaccttaattgtttgggttaatttttggactggtattaagttagtgggttttgggttgaggcttaatgta

SEQ ID NO: 23564 - DNA, 1115 bp, Gossypium hirsutum
  Clone ID: GOSHI-09MAY01-C38028_1
cccacgcgtctcaatagccccatcaggcgccgccctcaagctctctctgactcgaaaccctaaaaccatggcgatcgacaaaaacgaacccagcaagctccgttggggagagcttgaggaagacgacgacctggactttttgttacccccaaaagaagtgatcggcccagacgaaaacgggataaaaaaggtgatagaatacaggtttaacgatgaaggtaacaaggtgaaaataacaacgacgacccgagttcgaaagctggcgaaagcccggttgagtaaacgggcattggaaagaaggaattgggacaagttcggggacgccgtgcgtgaagatgttgggagtcggctcactatggtttctactgaagagatccttcttgaacgacctagagcccctggtaccaaaccggaagaagcaaaggcttccggtgacggcttggctcagcttagcaaaggaggtgctgttctcatggtgtgccgaacatgcggtaagaaaggtgatcactggacctccaaatgtccttacaaggatcttgctgctccagtcgaatcctttgttgataaacccgcggcagccgagacctcggcagctgctcctggagctggaaagggagcctacgttccaccaagcatgagagccggtgcagagagaacaaccggatcggatatgagacgtaggaacgatgaaaactctgtgagggtaacaaacttatctgaggacactcgggaggctgacttgcatgaacttttccgaccatttggtgctgtgacgcgtgtgtatgtcgctatggatcagaagacaggcacaagtagagggttcggttttgtcaactttgtgaacagagaggatgctcaaagagctattaacaagctgaacggatatgggtacgacaatctcatcctgcgagtcgaatgggccacaccaagaacaaactagaacattatcatcttcgtggtgtttagcttttctcaaacattgttaacagttgcaattcactgtctgaagtgcagattttggccttttttccccctttttttctttcaattttaatttacgttcgtgcatgactgttatactcgagatcttattgatttaagttgaattcttggtt

SEQ ID NO: 23565 - DNA, 624 bp, Gossypium hirsutum
  Clone ID: GOSHI-09MAY01-C38318_1
catttccaagcttctctagttgtcaagtgtttttgcagagcagaaatgaaggtctttgaaatcaatggcaacactctctcgcttgccctcttcgctgatgtcaccaactccaaggaactcctagactctatgcaagccggaacgcttgatcctgaagttgcgtttcttaatgcatcacttattccggatgtttttccagttctagcagcagtgcataagacacttatttccaagtcacgtgagtcgttgactacacgaacactccattccgaacttgtttacaattactctgggtctaagcatatcaccgaatccctgaaacgatgtggtatttctgaaagttcaaggtatgtccttgccgctcgatttaacgcttctcccgatgagatgaaagctgtggagaagcttatcaatggaaaagagatcgatttagatgagtttgaaggaagagcagaccaagctcagatacaaaagcactacaaaatatccggccccgagctaggcatatccactctcgcagatgccataacatgtcgaattgctgctcgagatgctttatgagatcaatttcagaaggcattgcttcttagacaaaaatggagcagagagcaaagaaatgtaaat

SEQ ID NO: 23566 - DNA, 646 bp, Gossypium hirsutum
  Clone ID: GOSHI-09MAY01-C38298_1
ttagtgtatgacatggccttcctctgagaatatggatgatggtgacatgttgcccctgaaatgttccaatgatactgaggatatttacagatcagggagaaattattctggagaaagtaatgttgctaatggaaatcattctgtcaagcctcccacattccaaagaggagtgcttaggaccaattgtatagattgcttggatcgtacgaatgttgcacagtatgcatatggattggctgctcttggaagccagcttcatgctttagggattaaagattccccaaaaatagacctcgatgatcctttggcagatgaattaatgagtctctatgagagaatgggcgacacacttgcgcatcaatatggtggctctgcagctcacaataagatattttctcagagaaggggtcaatggagagcagcgacccagtcccaagaattttttaggactcttcaacgttattatagcaatgcatacatagatgcggagaaacaaaatgcaattaatatattcctcgggcatttccagcctcagcctggtaaacctgcactttgggagttgggttcctaccagcattataggggaagaaatggggaaacaataatggacgaagatggaaggtcacttttcaaaagatccttttct

SEQ ID NO: 23567 - DNA, 520 bp, Gossypium hirsutum
  Clone ID: GOSHI-09MAY01-C38288_1
cggacgcgtggggaaacaacttggtaaagaatgattgactcaaaaaattcaaaccttgatgtttcttagtgtatgccaaagtatgccaaatgcaagaactaaatctacttattgtttccatgttcctattcttgtttgcaccaaatatgccatagagatttgaaattagaaaataccctattagatggaagtcctgcacctcgtttgaaaatctgcgatttcggttactctaaggtttgggaataattaattatatatagtccatcttaagtgtcagttgctttatgattttccagtcattaagttgtttttttaacacttggtgtagtcatctctgttgcattcaagacccaaatcaacagttggaactccagcatatatagcaccggaagttctggcgcggtgagagtatgatggaaaggtattatttcaactgtataaaaaataaaagaagaagaagtcatatctgtgtgaagtccaaattactaattagtaattggccttcgtatgtgaaataact

SEQ ID NO: 23568 - DNA, 468 bp, Gossypium hirsutum
  Clone ID: uC-gsflmaxxa097b07b1
tttaaatgctgcgagatatgtgatgaggtggcgggctattaaaatccttcaagttagcctttcggatttcaggttcatctcttctttatcacttttattaatttttattattatttaagctattaaaatgcaattagtgtatgccaaatgcaagaactaaatctacttattgtttccatgttcctattcttgtttgcagcaaatatgccatagagatttgaaattagaaaatacctttttagatggaagccctgcacctcgtttgaaaatttgtgatttcggttattgcttgggaataattatatatagtccatcttaaatgtcagttgctttatgattttccaatcattaagttttttttttaacacttggtgtagtcatctctgttgcattcaagacccaaatcaacagttggaactccagcatatatagcactagaagtttctgcgcggctagagtatgatggaa

SEQ ID NO: 23569 - DNA, 408 bp, Gossypium hirsutum
  Clone ID: LIB3145-053-Q1-K1-B4
ctcgtttgaaaatctgcgatttcggttactctaagtcatctctgttgcattcaagacccaaatcaacagttggaactccagcatatatagcaccggaagttctggcgcggcgagagtatgatggaaagttggcagatgtatggtcctgtggagttaccctttatgttatgttggtgggagcttacccttttgaagaccaagctgaccctaggaattttcggaaaacaattcagagaataatggccgttcagtacaaaattccagactacgttcatatatctcaagattgcaagaacctactctctcggatatttgttgccaatccttccaggaggatcacacttaaggaaataaaaaatcatccttggtttctgaagaacttgcccagagagctaacagacacagcac

SEQ ID NO: 23570 - DNA, 556 bp, Gossypium hirsutum
  Clone ID: GOSHI-09MAY01-C38208_1
atgggttaacattgcttcctactatttagttggcattccaattgggttgttctcggatacgtattcaaaatggaagtcaagggtgtttggtttggcatgttgctgggaacacttcttcaaactgttacacttattattatcacctggaaaactgattgggataagcaggttctcttggctcattcacgagttaacaagtggtttgtaccagaatcccgggaaacaaacagcaaccaagaaaatggtgcttgaaggggtcaatcttgttatttttcctaatggacttatatttttttgttgctatatgtcatttcttgaaacgatcgacgcatctgcgttaggattttgatttcccatgattttaagaaaagttttggtgccattttgtcttgttttgttgggttggctcatttagttaactattaaaaggtaaatgcatttaacaaaattagcttagccaccttttattaaccggagtaaaaacaaaactataattatgtatacacggactgaatatttctatattatatagattttctgacatgtttatagattg

SEQ ID NO: 23571 - DNA, 761 bp, Gossypium hirsutum
  Clone ID: GOSHI-09MAY01-C39968_1
gattagagttgggggttttcgggtttattttttggttgaatcaatagtaagcaaaagaaagaaatggcaaccgttaatgggtaccaaggaaacactccagtggccactagcactggatcgaaacatcctgcctccactgctaaaactgctgatgctcaatctgttcttaaaaggttgcaatccgagttgatggctttgatgatgggtggagattctgggatatcagcattcccagaagaagacaacatattttgctgggaaggaacaataacaggaagcacagacacagtgtttgaaggaacagaatacaagctatctctttccttctccaatgattacccttttaagcctccaaaggttaagtttgagactgcctgtttccatccaaatgttgatgtctgtggcaacatttgcttggacattcttcaggataaatggtcatctgcttatgatgtaagaaccatactgctatccatccagagtctgcttggagaacccaacattagctcacctttgaacacccacgcagctcaactttggagcaaccaagaagaatataggaagatggttgaaaagttgtacaaacctcctaatgcataacttgagaaaccagaacaggagttttgttatgtttttttcttcttattattaatttttttttcttattgaagaaacgagaacatgaaatttgtcatttttctacagcatgtatgattttactttactattgaatgtgataatgataaaagctttttttttcg

SEQ ID NO: 23572 - DNA, 1286 bp, Gossypium hirsutum
  Clone ID: GOSHI-09MAY01-C39918_1
aacgtgtaagagggcaaggccttcataaagctgagatctgaaccagaaggaggtcgtaaagctaacggaagtgagactgagcttggagattgagacactcgtaatctcaaaatccatctttttcttgtttctcttcaacaatggcaacccccaaagccctaaagcttaaaccaagaataagatccccaattccggtcatgattttggggtgcattactgccattgctttgcttttcctgttttcctccttgaattccactaatcgattttggttcagctctgccaaaacctatttgaaaaagaaagcaagggaacactctctccatgacaagtatttgtactggggtgaccgaatcgattgccctggaaagcactgtgattcatgtgaaggtttgggtcatcaaaagtctacctcaggtgtgctcttgaagaaaccatcttcggacgcggggcttttgtgatgccttctagaatgtgtatcaatccaattcacaataacaagggaatccttcataaggttgacaacgtaactgcagaggaaaggtgggctgcatcctcttgtaccatggattctttatatgatattgacctgatatctgaaactgtgcctgtaatcttagacaattcagatgcatggcatctgatactatcgacaagtatgaagttgggagaataggggggttgcccatgtggaaggacttacacgagtggacctcaaagaggatagttgttactcaaatctcttactcattaaccgaactgcaagccctttgtcatggtttgcagagtgcaaggatcgaaagaaccgcagtgctattttattgccatactcatttcttccttcaatggcagcagaaaagttaagaactgcagctgaccagattaaaagagtccttggtgactatgatgctatccatgtccgccgaggtgataaaataaaaacaaggaaggataggtatggggttaaaaggagcctacatcctcatttggatagggacacccgtgcagaatttatccttcacagaattcagaagtgggtaccatctggacgaactctttttattgcttcaaatgagaggacacctggatttttttcgccgctttctgtcaggtacaaattggcttattcatcaaattatagtcatattttggatcctttgattcataacaattaccagttattcatgattgagaggcttatcttgatgggagccaaaacattcattaagactttcaaggaagatgatacagatctcagtctaaccgatgacccaaagaagaacact

SEQ ID NO: 23573 - DNA, 586 bp, Gossypium hirsutum
  Clone ID: GOSHI-09MAY01-C39888_1
ttacaagctgcagtccgtgagcagacagaaatcacccagtttagccagcaggagtttgaaagacttcaaaatgaaaagattctctgtagagtttgcttcgaagaacaaatcaacatagtcctcctcccatgtagacatcatgtcctctgcagtacatgctgtgagaagtgtaaaaggtgcccaatctgccgtgtttctattgaagagcgactgccggtgtatgatgtgtagtctgaaattacctgtagaaaaaattcatgtaaagttttcaagaattgcttgtgatttttggtgaggcaagcattgagacgcaggtcaatttggtttcttggaacatgatacagttgtgtaatcgcacccaagaattgtaaataacattcgcttgcatttatgaaatgaaatttagggattttgacatgataattgttaaatattgtcacctaatttgatttgactatccgtccatttacgtcgtcttctctatcagaaccctctcatttaccaactcaatcgtcttgttacacatgcatttttcgccatatatcttatttacctagacgtccattcactatcgtcttcctagcaa

SEQ ID NO: 23574 - DNA, 445 bp, Gossypium hirsutum
  Clone ID: GOSHI-09MAY01-C39818_1
tccacgcgtccgagggatttcggctaaagaagaatcctctccatggagttttaatgatggggacaagcatgaaggggcgccgtgcgctgatatggacgagaccatgtttgaagttattgatttggagtgggatgaatggccattttctgcttcacagtccggcgatgaagcctgttctgcaatagaatccgatacgagcatcgaggattcatcggaaaccgttaggaatgacatgacagaggtgggtgtgaccgacaataatgaatgtacaaacgacattgatacatgtagccaggtatttgaaaccttatgttattaccaagttttggttactatcatggattaataacatgttgaaccaacattaggcaaggatgaaatgtttgagaacggattttctgcaacaatcaatgaggtttttgaagtagactttacatttgaagtt

SEQ ID NO: 23575 - DNA, 335 bp, Gossypium hirsutum
  Clone ID: GOSHI-09MAY01-C39568_1
ggaagaagcggaaatgaacttctcatttgaagaacctgtggaattccttcatagattgtatttcaagttatattctatggttcgactatcaataaattcccttttgtatctctgaactttcccagtccctagtcctctgaactgaaaacactgaaataagtatctctgaactttgaagtagttaaactcatattatgcctgttaagaacatatgttagaaattctgagttttaccctgttgaggacatatgtttaggcaagggttaatataacatttggtctctgagttccatttcaatgttcaatttggtttttgaaaaaaaaaactcgaaaaa

SEQ ID NO: 23576 - DNA, 348 bp, Gossypium hirsutum
  unsure (1)..(348): unsure at all n locations
  Clone ID: LIB3829-029-Q6-N6-D3
acataacaangtgaaattatattaataaatttaactgttggatcggggttatgcacttgtaatgaattgaatgcgttgaatgtgtggataaataaatagcatctactattgtattcacaaacattagcaagggactcgctctgtagctgagtttgctacagagattaacatggtgttgacctgcaaatcaatttctggtgtgggttttggcattgtacatgggacgatctcgctttgtctctcaactcctggaagggtctcatagtttcgaagtggaatgcttcggaaaactgtgcataaaacaaaaatacgggttttttttttaattggattgtcaatccttgaaaa

SEQ ID NO: 23577 - DNA, 265 bp, Gossypium hirsutum
  Clone ID: LIB3147-009-Q1-K1-G4
aattaaaagctgaaataatatttactttactgatccttcgaaccaaaacccacaccagaaattgatttgcaggtcaacaccatgttaatctctgtagcaaactcagttactgagcgagtcccttgctaatgtatgtgaatacaatagttgatgctatttatttatccacacattcaatacattacaagtgcataaccccgaggtagtgtcaaggcagttctgtacataaatctggtgtgtatgccctacagcggatagttaaaag

SEQ ID NO: 23578 - DNA, 658 bp, Gossypium hirsutum
  Clone ID: GOSHI-09MAY01-C39438_1
cccacgcgtccgcttacttttagtcgtgttaaacttggggacgaagataaacatgggaagaagaagagaaaactttcaaagttaaaggagcttgaaaatgcaatgaaattagaagcagctaagaaagatcccgagaaaggtgaggttatcgcgaagaagcattcatggaaggcagcaatggatagagctgccgggattaaggttcacgatgatccaaaattgttgaaacaaagtatacagaaggagaaaaagaggcataagatgaatgctgagaagtggaacgagagagttgaaacaacccagaagttgaaagtggagaaacaacagaagagatcggagaatatagcggacaagattcaccagaagaagatgcgacgcatcgcgaagagggagaagaagctgttgcgacctgggtttgaaggtcgcaaagagggttttattaatgaagggtcaagtcaaggttcctggttttctttcaatcttctgcatagcctgtggctttaactgagctgctccttttctgatgggaagattacatcctaggaatgccgttcttagcaactgctttcccttctgttctctttttccacctagaagaaaatgggtgaatgttgttcacaaaactgatttgagttaatatactggaaatgtttgattc

SEQ ID NO: 23579 - DNA, 555 bp, Gossypium hirsutum
  Clone ID: GOSHI-09MAY01-C39768_1
tcgtagaaagccttctcattacatcccagcaattataatattgattttgttgattttggtgtttttcggaagatcagttgcaatattaggtacttgtattggatggtatgtagctcctacaatcaatggggaaggatcaaatttaagaacatcaatgaaaaagaaagattatgggagaagacagagtgggggtggattggttggtgggaaactatccttccaaaagagttaaaaagagttgggtttacctctgcatcacaggatctgatgtaatcatttcgtttctattttaatgtaaaatacagtttgttgtattatacgagttttgagagcaaatctgagttaagttgccttgtaattgtataatttctagtggaaatggtttagatattagagttaatgtagacacgaagattgcatggatagcataacctttttgctaaccactcactattcaagtttcggacaattcattgtttccaaatccaaataaacgttttattttaaaaaataaaaaatctatttaatttcaatcatttttatataaaaagggcg

SEQ ID NO: 23580 - DNA, 598 bp, Gossypium hirsutum
  Clone ID: GOSHI-09MAY01-C39708_1
gctgcccgtgctatggcattgcaggggtgcgtggatattagttattaccccttacggctatgtggggctctgaaccacaggatgaaggacttgattctcgtgagcattggcagcgagtgatgcaagggcatgctggtgcaaatgtggtacctctggtagcttctaaccgcattggaaaggaaataattgagacagagcatgggaagagtcagattacgttctacggcaattccttcatagcaggaccaactggggaaatcgttgcagctgctaatgacaaagatgaagcagttctcatagcacagtttgatcttgacaaaatcaaatccaaaagaagttgctggggtgtgtttcgtgatcgacgtcccgatttatacaaggtgcttctgacatcagatggaagcaaaacttcatcgtgattcagagctccccttttgtttatcatcactatgttgttgtggagataatcagtgagttcccttccatgccatgtatttgttttgactgcaaagaacgaaatgacatatatgtaggcaaacttccatgaatacaaaattaagaatatcaataagaagaaccgaaatttctaacctttatc

SEQ ID NO: 23581 - DNA, 940 bp, Gossypium hirsutum
  Clone ID: GOSHI-09MAY01-C39618_1
cccacgcgtccgcccacgcgtccggaaaaagaatcgaaaatggaaattacggagaaaagggaaggagagagcaatagcagcagcaaagatttgagcaacaatgataatattaacaacgatttgacagattctgatggcaataatacgagtaaagaagctgaagaacgccgagcccgtgacctcaaagccggtttgcatcctctcaagctcaagtttgtcttctggtatactcgtcggacacctggagttcgaacccaaacagcctacgaggacaatataaagaaaattgtggatttcagtactgttgaaggtttttgggtctgttattgccacttggcccgtccttctactttgccaagcccaacagatttgcatttattcaaggagggaatccgtccgctatgggaggactctgcaaactgcaatggtggcaagtggataattcggttcaaaaaggttgtttcaggtcgcttttgggaagatctggttcttgccttggttggtgatcaacttgattacggagataatgtttgtggtgtagtgctgagcattcgcttcaatgaggatatattgagcgtatggaatcgtaatgcgtcggatcatcaggctgttatggctctaagagattcaatcaaacggcacttaaagcttccccacagctatgtgatggagtacaagccccacgatgcttctttgcgtgacaactcatcatatcgaaacacgtggttgagaggttagaagttgagaaaacgagaacacttaaaaagactgtttaacgtctctgcatctttggatgttatgacatggaaaaccatagttgattataatcgttatgttggactatgagacaggtaggtgtcaccaatgttggttttatggaaatgttatgctcctccatccattggtatccatatattattaatatgaagttggtttcgct

SEQ ID NO: 23582 - DNA, 546 bp, Gossypium hirsutum
  Clone ID: GOSHI-09MAY01-C39008_1
tgaagctcccattttcgaaccagatttaattagagccattttcaagcacatttggataaggagagctcaagagcgtgaaaggaacggattcccaaacactgaggccggagattccgaggttggagctggaacatcaaagaagaatcgacccacttccgctaatacaaatgccttgaagctgagttgtgaacttcttcggatttttatcacagaggctattcagcgagctggtacaattgctgaagctgagggtagtaccatgattgaaccaactcatttagaaaggattcttcctcaattacttctggatttttaaggggttcagctcgctaactaattcgttggaactgatagacatcaatgcagtatctctacatcagcttgtaggtagtattatcgtattgattatcgattgtgtagtggacaagtagactgtattggcctagtggtaatctagtatcaagtatatcatccaagtgtattattgctatgaacttactacagtattaatggctgaatatgaccgatgtcgattttagttgaaaa

SEQ ID NO: 23583 - DNA, 767 bp, Gossypium hirsutum
  Clone ID: GOSHI-09MAY01-C39338_1
tcggaatcagaagcctcaattctactgggaattgagaatacaaagttgctgaaaaatcttatcgagtttcaaaaagtggagtatgactttcagtactataaagtggaaatggcaacggatgtccagttacttatcttctcggaggggaaatctaatattgttcctgctgatgttattgtaccttttcaaccttcttgtcttgaatccactgaaattccagttgctgaggcactagaagcttggagatggtacttggctactgttagatcgttaccacattccattggatcagaaatacagaaggtggtagaagatgatttggttgcagcaagacaaacggataggagcttgggaagtcgagattttagcagatggttgacaatggctcggctcatttcgtcaagttttggagaaaccagtttgtcaaaggaacattgggaaatggtaaaagaaatggagaggctaaggagggagagactgaagtagaatccaaaagtccacaagattttgaagctttggtatttggtaaatgattgttgccccaaagggtgaagaaaaaagcaaaaaaaccaaaatagcaaacatggggattgtgatgtatgaatgttgcccatcaccactcttaaatataatatatcattgaatgtcttatgtattctaattgctgccaaagttgaactcaagttcttgtggaaatacaatgcaatccgagtctgaatccagttcattttactggcaattgcagacaagtgattccttacctgcag

SEQ ID NO: 23584 - DNA, 379 bp, Gossypium hirsutum
  Clone ID: LIB3147-008-Q1-K1-A7
aatggatcggagcttgggaagtcgagattttagcaggtaagtaacaaagctttgatcatgctgtattagcagcagacattatacgttttgatgttgcattgaacttaaaaatgagttgaatatatttaatatatttatgatatgtagatggttgacgatggctcggctcatatcgtcgagtttcggagaaaccagtttgtcaaaggaacattgggaaatggccaaagaaatggagaggctaaggagggagagactgaaatagaatccgaaagtccacaagattttgaagctctggtatttggtaaatgattgttgtcccaaagggtgatgaaaaaagcaaaaaccagaatagcatacatggggattgtgatgtatgaat

SEQ ID NO: 23585 - DNA, 1088 bp, Gossypium hirsutum
  Clone ID: GOSHI-09MAY01-C39328_2
tctgggagaagcaggaaaggactcggcttgggcatgatactcttgtcgatggaatgttgaaagatggactatgggatgtttatggtgattgtggcatgggcagctgtgctgaattatgtgctgagaaacatgttattacaagggaggagcaggataactttgctgttcaaagctttgtgggcggcgttgctgctcaacagggtggagcctttgcatgggaaattgttccggttgaagttcctggggggaggggaaagccatccatcatagtcgacaaggatgaaggtctaggaaagtttgatgctgcaaaattgaggaagctgcgaccaagtttcaaggataatggaggcactgttacagctggcaatgcctccagtataagtgatggtgctgctgctttaatcctagtcagtggagaaaaggcacttgagctgggattgcaagtgattgcaaagattgcaggatatgcagatgctgcacaggcaccagagtttttcacaacagcgccagcccttgcaatacccaaagccatttcaaatgctggcttggatgcttctcaagttgattactacgaaatcaatgaagcctttgctgttgtggctcttgcaaatcagaaactgcttggccttaatccagagaaggttaatgtgaatggtggagctgtatccttgggacatcctttgggttgcagtggagctcgtatcttggtcacgcttttggggggtttgaagcagaaaaatgggaaatacggagttggtggtgtttgcaatggtggtggaggtgcatctgcactcgttgtagagcttctgtaagcggttttaaagtaggttcgatattgtacgatgttgcgaccatcttctttttcgggggataaattcatgctctgccaaaacacagtttgatgttgtgcaatttttattccgctctcaaataagtcatgtgacgaatggaatgtttaattaggtttgagaagaaatatatgtccaatgtagagtttgattttcctttaaaagctgtctctagcatatggcataaggaaatctttatcattggattctctgaaacttagttacgttgtgattaatttt

SEQ ID NO: 23586 - DNA, 715 bp, Gossypium hirsutum
  Clone ID: AI055208.1
gttgaaagatggactattgggatgtttatagtgattgtggcatgggcagctgtgctgaattatgtgctgagaaacatgctattacaagggaggagcaggataacttttctgttcaaagctttgagcgtggcattgctgctcaacagggtggagcctttgcatgggaaattgctccggttgaagttcctggggggaggataaagctatccatcattacagtcatggatgaatggctatgaacttttgatgttttaaatttatgaagctgctaccatattctattgttgagttcgctctgtactgctgttatgtatcagtattaggatgaatattcgctaaattttattctttaataaatgtacttaatctggttttcaagtctattttataattatagattgcattagtttgcttagtttgtattatataattcgttattttttgatactcatagcatttctattagttattctttcttttgatttatacattgtattatcatactctttttatgtgttattctaatatatactaatttactcatactataagtttaattctatgtgtatgtgaatattgttaactttacttaaagtgtatatttttgatataatatctatatatatatgtttgtatctattattgtcttacttcttatatatcttattatctgttttatttctgttttttatgatcttatagatatggttatggt

SEQ ID NO: 23587 - DNA, 435 bp, Gossypium hirsutum
  unsure (1)..(435): unsure at all n locations
  Clone ID: LIB3584-010-P1-K1-H11
tgggaattgcacgctggggggggggggggggggatatgcaaatgctgcgcaggcaccagagtttttcacaacagcgccagcccttgcaatacccaaagccatttcaaatgctggcttggatgcttctcaagttgattactactaaatcaatgaagcctttgctgttgggggggtgcgggggtttttttttgaccttaatccananaaggttaatgtgaatggtggagctgtatccttgggacatcctttgggttgcagtggagctcgtatcttggtcacacttttgggggttttgaagcagaaaaatgggaaatacggagttggtggtgtttgcaatggtggtggaggtgcatctgcactcgttgtngagcttctgtnagcggttttaaagtnggttcgtttttgtacgatgttgcgaccttttctttttcgggg

SEQ ID NO: 23588 - DNA, 653 bp, Gossypium hirsutum
  Clone ID: GOSHI-09MAY01-C39298_2
cccacgcgtccggagaatctgattttttgaaagaaaccttttagactttgaatatcactgatgattgctcctatttctgatctgtcacgattttcgctttggcatttagatgtaactgtttttgagtctcctaatatgtccacattaaggtaacccggttgaatccctaacattgttgcttgatatcttgcgcatgcttccgccgcgaaaggagatgccacattttcatgaagaattaactttgctgccacgattttaccctcctccttgacaacaaggcctgacgccgatctgttatgttgtgagtcgaaagccgcatcgaagaagatagccatattttctctttgttgtctctgactagactttgtattcgttactgagagtatccatagcccatagctgaatcctcgacactgttcagttgttcccttgctgaaaacccaggacactgttgaaagacgtggttactatcttctgtttcctgaccacacctcaagcatcgatcctcagttattactcttctcagttttaagctggagaaagttggaatgtagttccacgcgattttccatactgtaatcttaatttttgtaggcatatctagattccataatttcctgaagaaattatctgtttgggtctgtaaataatca

SEQ ID NO: 23589 - DNA, 689 bp, Gossypium hirsutum
  Clone ID: GOSHI-09MAY01-C39298_1
cttttctgtttgcttttactaaacggctcttcatctttagggcaaccgacacccacttcagaacaaatctcatctcctctccctttgctccgaatggtccagacgagttggttcctgctcctcccataactcacgtaaagtcccgccgcgaaaggagatgccacattttcatgaagaattaactttgctgccacgattttaccctcctgctccttgacaacaaggcctgacgccgatctgttatgttgtgagtcgaaagccgcatcgaagaagatagccatattttctctttgttgtctctgactagactttgtattcgttactgaggaatttatttctgcttgtccagagtatccatagcccatagctgaatcctcgacactgttcagttgttcccttgctgaaaacccaggacactgttgaaagacgtggttactatcttctgtttcctgaccacacctcaagcatcgatcctcagttattactcttctcagttttaagctggagaaagttggaatgtagttccacgcgattttccatactgtaatcttaatttttgtaggcatatctagattccataatttcctgaagaaattatttgtatgggtctgtaaataatcatttagctctgtagtagatccctgtaatagtttatacgcgcttctcactataaagactcccgtcgcctc

SEQ ID NO: 23590 - DNA, 577 bp, Gossypium hirsutum
  Clone ID: GOSHI-09MAY01-C39228_1
tgtgcaccttcagatcgattttctcctgagttttgctcgtttatttctgcatgtttaaagaaagacccaaacgagagaaagtcagcacaggaactgctggatttgcctttcttgaacatgtataatgactcagatgctgatctttcatcttacttcaatgatgctggatcaccgctcgcaacactttagaatttatgtgagttcagactgaataaataatcggtcacgctcaaagaagtcagtaaaagccaaagttttagaagcgtggatgatttctagttatcgttgcgacttcagtgtgagagttgagtagctattgtgatgaagaagcatggatgatttctagttatcgctgcgacttcagtgtgggagttgagtagctattgtgatgaagatgccggaagttaaccatcaaagatattcttggctgaggactctgagcgtgagttacagcttattgctgtgttttaatttttcataattgaaaaggtaatgctgtcatatattaagaaaaatattatatacttgctgaaatagataatggaaagtaaacaatattgatttgcctatttgagtt

SEQ ID NO: 23591 - DNA, 990 bp, Gossypium hirsutum
  Clone ID: GOSHI-09MAY01-C34988_1
gaagccgtgcgagagaacatccaatcccgcgttcacgttgttatcgttttgtttagaaggacatagcagtctccattgtcgcggaaagacagaaggaaaagaaaaagggtcaaccgaacttcaccacggcaacaattaaggcacgccaacatccaaataatcccaatcatcttccagtcctataacattgacaatgtctagcccgatgattcttaagaacccaaactccctccaacggcggcaaccgctgctgcacagccgttccaacagcgtcgatagctgcatcacctctcgcgggaacaccaatctcaggttcggggaggtttgcggcggtactaccgccgacgttgcggctgtctgttgctgttgcccatgtgggttagccaaccttatggttctagcaatatacaaggttcctgcagggctgtaccgccgtgctctccgccagaaacggctgcgcaagttgcacaaaaaagggttacttcaaccaaagaaccacggcgcccatttccgatgtaatgatcccgaattactctctctcgaggactatttccaagacgcaggggtttccgaagaaactgagaaagctgcagtggaactggaaaatgaaatgtggcaaaggttttacggtactggattttggagaagcccctctcaaaaagaaggtgagactcccaggtttcatcctctctaactacaattttccaacctttgctgctttagtgcccttcaccatatatatgtttaatgaaatgttgtaagacaaaaattatatgtaaatggaggtggtgggattttctgattccttgtcatcaacgaaaaaatcagaaaggaattaggtagggtgattgattgtatggaacgtatgtcatattttaagattttgattgttgttgccttcaaatcttcatgttcaaatccttgaacacatcaacacattttgtgagctttttgataataatatataataaagatcgatttggagttatt

SEQ ID NO: 23592 - DNA, 432 bp, Gossypium hirsutum
  unsure (1)..(432): unsure at all n locations
  Clone ID: LIB3145-008-Q1-K1-H11
ttccatctccnccataaccaatttttttccaaaaaaccttaaattcctggttagcgttttatcctacacctgtcgtcttcccctgttttgactgttgtgttcttctaaacaagatccctgaacaacgaatggggaataattgagtactttactactctcttcgttgttcaggatcgtttagaacaactccctatttacaacagcaaaaaaaaaaaaagtacaaagagacgaggttcatttcccatattcattattcgagaaggacagagcagtctccattgtcgcggaaatacagaaggaaaagaaaagggtcaaccaaacttcaccacggcaacaattaaggcacgccaacatccaaataatcccaatcatctttcagtcctgtaacattgacaatgtctatcccgatgatccttaaaaacccaaactccc

SEQ ID NO: 23593 - DNA, 329 bp, Gossypium hirsutum
  Clone ID: LIB3145-043-Q1-K1-B6
cagggttccatctccgccatcaacgaaagccagtgcgagagaacatcaaatccctggttcacgtacgagcctccacctctcttcttcccctgttttgactgttgtgttcttctaaacaagatccctgaacaacgaatggggaataattgagtactttactactctcttcgttgttcaggatcgtttagaagaactccctatttacaacagcaaaaaaaaaaaaagtacaaagagacgaggttcattttccatattcattattcgaggttgaaacgaaagaaattgcttttgtttcgttgtttttccgtaatttaaatcgaccccttttg

SEQ ID NO: 23594 - DNA, 620 bp, Gossypium hirsutum
  Clone ID: GOSHI-09MAY01-C34978_1
gaaaacccgggccgacgaggcgtacggtgtgaagataaattatcatgccgctattcctctttgcactccattccattggatcaaagctggatgattgtaaaggactgtctcatagctgcaactgcgaaggactgtagtctgatgattagttttagaccaaaggaagatggtagactcccttctcacaatactgtatatctaggatcaactaaccaagcttttgagtacaaggtgtatttcattgatctggatctgaaacccctgaagaaaatggaggcttattacgagttagataagaaaattgttagctgctattctcagatggtgaaaactgagcatgaaacagataaagctgttacaataaactccaatggaagtgtacgagatcaaagatacgcattagaagacggtttgtttactgaaggttgtactggtaagtgcaagtagttcttattatatgttccctgaactgttgctgtaaacgtaaaggttgcaaggagccaagatgattaactcgtcattaggctcgagttcttcctttcaccactttttggggcttttggatttcccttggagaaaataatctcttgttggtatcttttgcttaaagatttatttga

SEQ ID NO: 23595 - DNA, 887 bp, Gossypium hirsutum
  Clone ID: GOSHI-09MAY01-C34968_1
ggaaatcaagaagcgtgattacagcggctcctgctatctcgatttctacttcgtttacacgccccactccccttttcttctttccttttatggactcttcccataacattacattcccctttagcactcaaacccagaaaactgaaaaccttttctttctcccctaagagagctcaaaatgggagttgactactataacattctcaaagttagccgtaacgcgacggacgacgacctccggaagtcctacaagcgccttgccaggaagtggcaccccgacaagaaccttgtcaacaacaaagaagccgaggctaaatgcaagcaaatttttgaagcctacaacgtcctcagcgacccgctaaagcgtcagatctatgatcttcacggtgaacaaggcctcaactccgctgaatcatccagccccaacgggtttggcgccggcggcgtcggtggtatggccgacaagttcgaccagaggaatggccaagggtacaagaaggcgtcgccggttgaaacccagttgctttgtagtttggaggagctttataaaggtggtaggcgaagaatgcgaatttcgcgctctattcccggtgaatttggtaagctgaagacggtggaagaaatattgaaaatagatataaagcctgggtggaaaaagggcacaaaaataactttccccgagaaaggaaaccaaaacccggtttcactccatccgatcttatctttgtggtaaatgaaaaaccccatgctattttcaaacgggatgggaatgatctgattgccactctgaaaatctctctactcgaggccctcacagggaccatcctcagtttgacaaccttggatggaaggacccccccgatctcagtcccagatatcgtgaaacc

SEQ ID NO: 23596 - DNA, 575 bp, Gossypium hirsutum
  Clone ID: GOSHI-09MAY01-C34928_1
ccccgcgtccggtagttcttagaggaaggaaagattgaaaaagctgtttgatatttgttcaattgtgacagggttgataaactagttttcttatgttgttagattaggctctggcttttaaggtgggtctcttttgtattaatttgttatctattcctcgtacaaaatttagttttttgagtggtcatccattgtcttgtgtagtaatacggatagggatggaacttgtgagagtttgtcttgaagaaaagaatgatgatatttcatcagttccaccaggtttcgagcctcgtgcattgtttaccttaaagagtgaggcacaggatactaaaagacatgagcgtgataatttgatctgttgttcagcctctactagagccattctagttgaaaagggaactgggttggccaatgatgaaagttcaaagattacaaggtcaatgtctatgaggcgtcgaccttggataaactatggtcaatatgataacagttcacaagatgaacccgatcatggaaagcttaatcaagtaactgcaagatggcgtcagaagaggcatgttggccagatattgagg

SEQ ID NO: 23597 - DNA, 644 bp, Gossypium hirsutum
  Clone ID: GOSHI-09MAY01-C34888_1
ggtagacacttttttgccaagaacattgcgttcgatatactcggccgggtccatttgaaagcacaagcggtggcgttaaggttacagtcagattttggagtgttctacaactgctcgatagatggttaccaagacacactttacgtattcagcaaacgccaattcttccgtgaatgcaccatctctggaacaatcgatttcgtattcggcgattcggcggcggtcttccaaaaatgcaaattccttgtccggaagccacaatcaggacaacaaaacgttgttacggcacaaaaaagattggaccataatcagcccacagcttttgtgatcatggacagtgaaatcatcccagatgctgagcttgcaccagcgaagaacgaattcccagcattccttggtcgtccatggggtaagctatccagagctatcatcatgcaaacttacattgacgatatggtacaccccgaaggttggactagttgggatcccaaagaaccgacaaatctttgccaatacgccgagttcaataacactggccctggtgcttccacttcccttcgtgttaaatgggccggagttaggttgcttaacgaggcagaggccattaactacactccacccaagttcttcgacgtcggcgatgc

SEQ ID NO: 23598 - DNA, 438 bp, Gossypium hirsutum
  Clone ID: GOSHI-09MAY01-C34588_1
ggtatttttagcgtcgcagtaatgaaagaaaaaaaggaagggaaaaccctacgagttcgcccccttgctatccggccaccgtcattccaccattgaaatcgggttcggatggcccgtagaggaaccggcctacatccgggatgtaaaccccatatcgaaagccagactttagcctcgagggtccgatctcaaccttcggtttcgacgaagaagaaaccgtctccgatggctcggttgaaggtaccgggcgtgtgctggcactaggcgtgagggggggcgtacggggctgtcgaccgggtggcacgagccggggtggggctgaagcacttgcatttgacataagcactgtctggttgttgttgctgcgcgagccaaggctgctagggtttttggcctggtttttttttaactttaagccacttgggttaattgggtatt

SEQ ID NO: 23599 - DNA, 373 bp, Gossypium hirsutum
  Clone ID: GOSHI-09MAY01-C34578_1
tgccgtgtgtcgactgacccttcgaggttctgacggagacggacatcgcgaatctactggcacgggatcattcaccaaaattaacatggtgcatcctgttggtgcatcgataggaaatagctttctgcagggcatgtgctcgttttggtctcggcttgtatctgtatcatgaagaatagatgccagagagaggatggaggctggctaacctttcaaatcaaacgtgcctttagctcttgcatgaaaactggggtgtgtacttaaattttctgcctttccctgtttggcatgacatgatatataatcacatttcctaacgctcttgtagaatatatatcaaatctttgaactaatgccaatgggtgagaatttt

SEQ ID NO: 23600 - DNA, 307 bp, Gossypium hirsutum
  Clone ID: GOSHI-09MAY01-C34488_1
acccacgcgtgcggccacgcgttcggggtttcttggccaatagataagtgtcctcaaatgctctgctacaaagggaaacgggcttctggtacatagagatgaaattttcaatgcattttgggtgtgggggaaactttgagttactcacattatcattccttattaatctgccaagttatattaaaattttgagttcataggaagaatgcataaatttaatgtttgttgagatttactttattgtttaaaattattaatttttataataagtttatatctaagaagataattttagcccggggaaaaa

SEQ ID NO: 23601 - DNA, 614 bp, Gossypium hirsutum
  Clone ID: GOSHI-09MAY01-C34418_1
aaggcaaggatatttcttccttttttgttttaacactagtttaaaaagagaatagataaaatagaaagaacttaagaacaaaaaaacacctttgattttctttttctgttctcttttttgtatcttttttacactgaatccccccctcccattacatattcgataacggctttaaatagccgaaaatgaggaaaaaacgaacccaaatccaaagaaatctatcctgttttttcgttggcatattgttgttctgttcccttttctttgttgttctgttttgcgtttgttgctgcaggtaatgctggcgtacggaacggcgcacgatggggagggtcgtggtgcgtgattcgcggcggcgtgcaatggtgagaggcggcagcgttgaagcaaataggctcctagggtttctgctattttgtttttgtgtgggctaggtttagtgggttgggtctagtatttacgctgcttgttgggctttgtaaaaaaattggacttcatttatttatttggtttatgcatgcgggcccgggctaattgggcctgctacattggttacatacattgcattcctaatgagaaaatgtaaattcgaactttaaagacaaaaggttgat

SEQ ID NO: 23602 - DNA, 572 bp, Gossypium hirsutum
  Clone ID: GOSHI-09MAY01-C34408_1
gtcatcaccatgattcaaggaaaataattatcatatataatcaatctctttgttgtgctattgatttcaatatctgatatatattggcaagatatactcaaacaagtgagcagattgttctttctctgaaacttacaacttcaccatgaacaaaagcaagctccagctgcaactttgtgcagggatatttactttaagcatcctctccaatggtgcttatggtagtgacaaaatctttgacataactcacaaaatcacttctcagttgccaacttttggatcacagaagggtcttggtcaattcatttggcttctttccagcatcaaaaatgggtccacagtgaatgtgtcggagttcaaattgggaacccacactggcactcacgttgatgctcctagtcacttctttcagaagtactatgaacaaggatttgatgtttcaacccttagccttcaaactcttaatggtcctgttctagtagttgatgttcaaagaaataagaacattactgctgaagttatgaagtccttgaaaattcccagaggagtacatcgggtgcttttcaaaacac

SEQ ID NO: 23603 - DNA, 481 bp, Gossypium hirsutum
  Clone ID: GOSHI-09MAY01-C34748_6
atcatctccctctccctctcgaggggataaacagcttaataaatgatattgccggcgtggccggcaaaaaaaagggttcagagatggctcgattaacattagtatcggggctatttctctgggcaggatcaatgcttatggtccagggcggagatcccacccttttttttcgaatggaacgtcacctatggcaccattgctcccttgggagtgccacccaagggtgatccttattaacgggcaattcccgggaccaaatattaactctaccaccaacaacaatattgtggccaatgcgttcaataaccttgatgagccattccttgtgacatggaacggcgtgcagcctaggatgaactcttggcacgatggtgttctgggaaccaactgtcctatcccccctgggaagaactacacctataaattccaggtgcaggatcagattggcagctacatctactatccggtgacggacattcat

SEQ ID NO: 23604 - DNA, 629 bp, Gossypium hirsutum
  Clone ID: GOSHI-09MAY01-C34748_3
cggacgcgtgggcggacgcgtgggagaggggataaaccgccttaattcataaaatttcataaaattacataagagactttaaagccaacaaaatggctccattgacgataatagtggtgttttttctctgggtaggatcactacttatggttcaaggtggagatcccaccattagtttcgagtggaaggtcacttatggcaccatatctcctttgggtgttcccgtaaaaggtattctcattaacgggcaattccctgggccaaatatgaactctaccaccaacaacaatgttatagtcaatgtgtttaacaaccttgatgagccattccttttgacatggagtggcgtgcagcataggaagaatccttggcaagatggtgtgcttggaaccaactgtcctatcccccccgggacgaattacacctataaattccaggtgaaggaccaaattggcagcttcatctattatccagtgacggctatgcataaggcggttggtggtttcggtggccttcgtattaacagtcgtttactcattcctgtcccctatgctgatccagctgatgactatactatcatagcaggagattttttcaacaagggacacaccaccctcaagaaaattctt

SEQ ID NO: 23605 - DNA, 900 bp, Gossypium hirsutum
  Clone ID: GOSHI-09MAY01-C34748_2
cccggtcgacccggtccgggctcctcaaaaggtcataattaccgtactcggcttgccaaatgcacaaaagtagaggcaagctccgattgctcttaatggagtctcctatgtcgaaccaccactccataaaacttgcagaaactatggcgtagccgaaaaggttttcaagtatgataccattcccgatgagcctccaagtgacaacactaaggtaactttggcacctattgtcctcaacatgacacacagaaactttgtggaaatcatcttcgagaatcacgagaccgccattcagtcctaccacttgtctggctactcattctttgctgtgggcatggacgttgggaaatggagccccgagaagaggatgaactacaatcttcttgacgccgtgagcagacacaccatacaggtattccccaactcctggtcagcaatcctattgacattcgacaactgcgggatgtggaacctgaggtcggagacatgggacaggcattaccttgggcaacagctttatgctagtgttatttcccctaaccgatccctcaaggatgagtacaacttaccggaagggggattgacttgcggcatcgtgcaaggcatgccaaggcctccacctttcagcagttaatttaattaagcttataaatctgtatccaattatagaatatggggagagagagggtgagaaaagctgagttctgtataatatttaatgaaataaaagcttttggatcactttattattactaaaaaaaaaaaaaaaaaaaaaaaaaaaaaaaaaaaaaaaaaaaaaaaaaaaaaaaaaaaaaaaaaaaaaaaaaaaaaaaaaaaaaaaaaaaaaaaaaaaaaaaaaaggggggcccgttttgggggaccaagttttccttaccggtt

SEQ ID NO: 23606 - DNA, 1953 bp, Gossypium hirsutum
  Clone ID: GOSHI-09MAY01-C34748_1
cccacgcgtccgcggacgcgtgggcggacgcgtgggcatcttcctctttcctctagaaggggataattaataaatttactgtcgggcgaaaaaaagggtaagagatggctcgattaatgttaatatcgatgctatttctcttggcaggatcaatgcttatggtccagggcggagatcccaccctttttttcgaatggaacgtcacctatggcaccattgctcccttgggagtgccagtaaagggtattcttattaacgggcaattcccgggaccaaatcttaactctaccaccaacaacaatatcgtggtcaatgtgttcaataaccttgatgagccattccttgtaacatgggacggcgtgcagcataggaagaactcttggcaagatggtgttctgggaaccaactgtcctatcccccctgggaagaattacacctataaattccaggtgaaggatcagattggcagctacatgtactatccggtgacggctatgcacaaggcggttggtggtttcggtggcctccgtgttaacagccgtctactcatccctgttccctacgctgatccggctgatgactatactctcttagtgggagactttttcaacaagggacacaccagcctcaagaagattcttgatagcggtcgcaaccttgggagatgtgacggtgtccaccttaatgggaaagttgcgaaaggtgatgggaaggatgaacctctgtttacgatggaggcaggcaaaacgtacaagtacaggatttgcaatacgggtatcaagacatctctgaacgtcaggttccagggccacaccatgaaattggttgagatggagggttcccacacaatgcagaatgactatgactcccttgatgtgcatgttggacagtgcttcagtgtgcttgttactgccaaccaggaaccaagggattactatgtggtggcctctacccgttttaccagacgtgaggttacagcaactggcatcatccgttacaagaatggcaagggagctgcctcatccgagttgccaccaccacctgttggttgggcttggtcactcaatcaattccgtaccttccgttggaacttgacttctaacgctgctaggcctaaccctcagggctcctacaaatatggttccattaacattacccgcaccatcaagcttgccaacactgcacaaagagtagatggcaagctccgatatgctcttaatggagtctcctatgtcgaaccaaccactccactaaaacttgcagaatactacggcgtagccgacaaggttttcaagtatgataccattcccgatgagccaccaagtgacaacactaaggtaactttggcacctattgtcctcaacatgacacacagaaactttgtggaaatcatcttcgagaatcacgagaccgccattcagtcttaccacttgtctggctactcattctttgccgtgggcatggacattgggaaatggagccctgagaagaggatgaactacaatcttcttgacgccgtgagcagacacaccatacaggtattccccaactcctggtcagcaatcctattgacattcgacaactgcgggatgtggaacctgaggtcggagatatgggacaggcattaccttgggcaacagctttatgctagtgttatttcccctaaccgatccctcaaggatgagtacaacttgccggaaggtgtattgacttgcggcatcgtgcaaggcatgccaaggcctccacctttcagcagttaatttaaataagcttataaatctgtatccaattctggtatatggggagagagagggtgagaaaagcttgagttccaaatgtatttaatgaaataaaatgttttggaccatttgtttgtattcaagtcatccgcaagctttcaacaatttcattgctgccatgttttaattctaaaaaaaaaaaaaaaaggcggcc

SEQ ID NO: 23607 - DNA, 527 bp, Gossypium hirsutum
  Clone ID: LIB3828-019-Q1-N6-E9
caatctaaaccatctttcatgcgattataaagcaaattttacatccatgttcagttttaaccaacttgcaggcatgcagaaatacaccttttatttcattaaatacatttggaactcaagcttttctcaccctttttttccccatacaccaaaattggctacagatttataagcttatttaaattaactgctgaaaggtggaggccttggcatgccttgcacgatgccacaagtcaatacaccttccggcaagttgtactcatccttgagggatcggttaggggaaataacactagcataaagctgttgcccaaggtaatgcctgtcccatatctccgacctcaggttccacatcccgcagttgtcgaatgtcaataggattgctgaccaggagttggggaatacctgtatggtgtgtctgctcacggcgtcgagaagatgtagttcatcctcttctcagggctccatttcccaatgtccatgcccacggcaaaaaatgagtagccagataagtggtaagactgaat

SEQ ID NO: 23608 - DNA, 482 bp, Gossypium hirsutum
  unsure (1)..(482): unsure at all n locations
  Clone ID: LIB3828-023-Q6-K6-B9
ttctcgacgcccgtgagcagnacaccgaccatacaggtatnntccccaactgcctgggtgcagcantccttatnntgacattcgnacaactggcgggnatgggtggaacctgagggtcggnagatttgggtacatggcatnntaccttgggcancagctgttagggggagggtggtatttcccctaaccgatccctcaagggatgaagtacagctgtgcccggaaggtgtatntgacttgcggncntcgtgcaaggcatgnccnnaaggcctccacctttcagcagtgtaatttaaaataatgcttactaaatctgtnctccatattctggtgctctcggggagaagagaagggtgagtaaatagcttgagttccaaatgtctcttactggaaatacaaatattcttcggaccattttgtcttgtgctcataaacaaaaaagcggggcggtccgcttctagtaggatcccaatgcttacgtt

SEQ ID NO: 23609 - DNA, 413 bp, Gossypium hirsutum
  unsure (1)..(413): unsure at all n locations
  Clone ID: LIB3493-021-P1-M1-A2
cccacgcgtccgatcttcctcttcctctagaaggggataattaataaattactgtcgggcgaaaaaaaagggtaagagatggctcgattaatgttaatatcgatgctatttctcttggcaggatcaatgcttatggtccagggcggagatcccaccctttttttcgaatggaacgtcacctatggcaccattgctcccttgggagtgccagtaaagggtattcttattaacgggcaattcccgggaccaaatcttaactctaccaccaacaacaatatcgtggtcaatgtgttcaataaccttgatgagccattccttgtaacatggngangcgtgcagcataggaagaactcttggcaaagatgtgttctgggaaccaactgtcctatccccccttggaagaattacaccta

SEQ ID NO: 23610 - DNA, 361 bp, Gossypium hirsutum
  unsure (1)..(361): unsure at all n locations
  Clone ID: LIB3493-028-P1-M1-B3
ctgcctcatccgagttgccaccaccaccgcttcgttgggcttggtgcactcaatcaattccntaccttccgttggaacttgacttctaacgctgctaggcctaaccctcaaggctcctacaaatatggttccattaacattacccgcaccatcaagcttgccaacactgcacaaagagtagatggcaagctccgatatgctcttaatggagccttctatgtcgaatcaaccactccactaaaacttgcataatactacggtgtagccgacaaggtttttaagtattattccatttctcctattaactcaccaagttaacaacatcttttatgtaacttttttgctctctattttttccttt

SEQ ID NO: 23611 - DNA, 427 bp, Gossypium hirsutum
  Clone ID: GOSHI-09MAY01-C34768_1
tcgtccacacgtgcgctaaaatggtacaatctctggacatgctactcccaaatgactacgtttacggttgagcacgccaccatcatgcaccgcaaaattggctctgtcgtaatccccgcaggatctgtctccgcttttctcatcatcagcattctcctcttcacttccctaaatgaaaaacttttcgttcccttggctcgaaaaatcacccataatccccagggaatcactagcctccagaggattgggattggactagttttttcggtagctgctatggtaggggctgctattattgagaaagaaaggagggaaattgctgtagagaaagaagtcaaaataagtgctttttggctacttgttcagttcttccttgttggtgctggggaagcttttgcttatgttggacaacttgagttctttatta

SEQ ID NO: 23612 - DNA, 493 bp, Gossypium hirsutum
  Clone ID: GOSHI-09MAY01-C34648_1
tcggagaatttgttcttaggcttatcatgcttgcaattacatcagtgtgctggtatcaagttaatctggttctctttgtggcaatggttactgggaattatctcagtttacttaaaatttagagactgcatgcttgggaggtcattcagccaataaggtggtttttgaggctacatgactaaattttgagcttgaggtggggaaaagaagacataatgttgacaatcttagttggtggttctgttagttacatttggtattgaggttctcgagcttcctatattctcttctgtgttaatcatttcttcttcttatttcagggctatgtcgaggtccgttggacttgcatgtacattggatgactccatagaagactttggacctatgatatgaagggcaactttcagagatctgactttgtttctttctgctttcttagcatcgtttcgttgggaggcccttacattcctctcaaaactggaagaagaaacgg

SEQ ID NO: 23613 - DNA, 413 bp, Gossypium hirsutum
  Clone ID: LIB3145-002-P1-K1-D11
aaaaataaaaaaataggcataataatagaaagcaaaaacataaaagagaataggaataaagaaaagctgagatataaatgaggcaatggttacatgggaattatctcaatatacttaaaaatttagagactgcatgcttgggaggtcattcagtcaataaggtggtttttgaggctacatgactaaattttgagcttgaggtggggaaaagaagacataatgttgacaatcttagttggtggttctgttagttacattcggtattgatgatctagagcttcctatattctcttctgtgttaatcatttctttttcttatttcagtgatatgtataggtaagttgtacttgatgtgcattgcatgactgcatggaagactttggacctatgatatgaagggtaactttcagatt

SEQ ID NO: 23614 - DNA, 700 bp, Gossypium hirsutum
  Clone ID: GOSHI-09MAY01-C34618_3
tgtgcctttatgctagtgttactgtggttgagagcttgatgatggccatagccagtattgtccctaattctctgatgggtattatcataggcagcagggtattcagggcaatattcatgcttgtttctgggtacttcaggctcccgaatgatatcccaaaacctgtctggcgttacccaatgtcctacatcagcttccatttctgggctctacaggggcaataccaaaatgatctaaagggattgctattcaagaaccagtccccacagacttccccagatccctggtgaatacatactggaaaacgtgttccaaatcaatgtaagacggtccaagtggatcgatctgagtgttatattcagcatgatcataatatatcgaatcatattcttcttgatgataaagatcagtgaggatgttacaccatggatcagaggtttgatagccaggagaaggatgcaacagaagaatggaatacagaacacgacggtggcacctgatggtctcacccagtcaccttccttgagaacatacgtagctaccacaagggataaaagatagattttaggttcatgcttcgcatgctatcctcacatcattaactctcttccttaggctttactgttttttttttttttgttattatctattctatatataaaatggtgggttaaattaatgttacgaggtaattaatatt

SEQ ID NO: 23615 - DNA, 509 bp, Gossypium hirsutum
  Clone ID: GOSHI-09MAY01-C34618_2
ttgatccacttgagaaaataaccacagccgaagccatccgaaaacttactgatttctaccgaacatctcaacaatgttacgctgcaaaggaaagggttgatgagatatccaaagttaaaggaaccgtgttagattctggaggcagtcaagctagcttcttgatgcagtcatacactttaaccaaacgctcattcatcttcttgtccagagactttggctattattggctgagactactaatatatgttgtagtcactgtctgtattggaaccatttatctcaatattggaaccagctacaacgcggggctggcaaggggttcatgtgcatcttttgttttcggttttgtcacattcgtgtcggttggtgggttcccttcttttgtagaggacatgaaggtgagtactcgtatgatcgacggtaaaagtaccgtgaaggaactaaggatcgaattgcaatttgttccctctactcaaaatatgagtaaattagttcatgtacaatagatg

SEQ ID NO: 23616 - DNA, 1204 bp, Gossypium hirsutum
  Clone ID: GOSHI-09MAY01-C34618_1
gctagcttcttgatgcaggcatacactttaaccaaacgctcattcatcaacatgtccagagactttggctattattggctgagactactaatatatgttgtagtcactgtctgtattggaaccatttatctcaatattggaaccagctacaactcaattctggcaaggggtgcatgtgcttcttttgtgttcggttttgtcacattcatgtcaatcggtgggttcccttcctttgtggaggacatgaaggttttccaaagggagaggttaaacggccactatggtgtcaccgcatttgttattgggaatacactctcagctatgccattcctcattatgatcaccttcatctctggaactatttgttactttatggttcgtcttcacccaggctttgaacattatatgttcttcgtgttgtgcctttatgcgagtgttactgtggttgagagcttgatgatggccattgccagtatcgtccccaatttcctcatggggatcatcacaggagcagggattcagggaatattcatgcttgtttctggctacttcaggctcccaaacgacatcccaaaacctgtgtggcgttacccaatgtcctacatcagcttccatttctgggctttacagggacaataccaaaatgatctgaagggcctgttgtttgataatcaaccaccggagcttcccaagattcctggcgaatacatccttgaaaacgtgttccaaatcgacgtccgacggtcgaaatggatcgatctaagtgtgatattcagcatgatcataatttaccgcatcatcttcttcttgatgataaagatcagcgaggatgttaccccttggatcagaggtttggtagccaggagaaggatgcaacaaaagaatggaacacaaaatacgatggttgcgccctctctctcgcaatctccttcgctgaggaattatgtcgcaaatcgagctaatggaaggggtaaaaggtagacaacagggtatgcatgcattcatgcgatcgcctttgagtctcgagatacaaacaatcctacaacgacctcagtttcctaacatttaatccttatgccttacttcatctatatagaatttgctttaaaattatatgcaacaatctgtattgtgcgtttgaagttaatatatatacaagcaatgccattcatatattccccaaaaaaaaaaaaaaaaaaaaaaa

SEQ ID NO: 23617 - DNA, 823 bp, Gossypium hirsutum
  Clone ID: GOSHI-09MAY01-C34608_1
cccacgcgtccgacttacgacttacttcactctcatcttcaccttcttcttcttctttctctcaaccttcacccagaccccaatttttagccttctctgcatctcccatggacaattcccccaaaaagttcatggatttcccattcatcactgccccgagtgggaacttgatgatcgatctcatctccacgatggaccaccgcctacagactcaactcaaaccatgcactttaccttccaattaacaacattactacaatccaggtaaaacctcccatggctcactttatatgcgatcaggccatacctcttctcacgttgattacatgctatgaagttggttacactgtcagctgccatcagggggagcactggatataacaagcctttcagcttatctgaatgcttgcacagttgcaccgaatttccttttagagctcatacagaatagcccaacgtcacttgctctcattctggatgtaccacctcgaaaggacccagtcttatatcccgaataccttcaaactttttatgagaacacccggcttgaatcacttaggcaagcgcttgagaaactcccagaagttcaaccctactactcctcagcactttacattcgatgtctcacctctcccacatcgatcatgatccgaatcaacacagaggggactgagggagacggaccaggacgcatggaggagattataaaggatcacatagatcccgtggtgaaagaagcattgggatatggttggatcaatgtgcttgtggaaacagaaatgtggatgaagcggaaaaggcatatttggagaagagggatgga

SEQ ID NO: 23618 - DNA, 409 bp, Gossypium hirsutum
  Clone ID: LIB3145-001-P1-K1-B6
cagcaactaagggttgaagctcaagataaagttttttttatcaacgcgtttagcgaaagacgcgggggaggtctgcttgtattcttattggaagcctttgaagagctgggtcttgatgtcttccaagctagggttttctgttctgaaggttttctttttgaagctgttggagttaattatgaccaacgttcattagagtgcttaaatgaaccctactactcctcagcactttacatttgatgtcttacctctttcacattcatcatgattcgaatcaacacatatgggactgtcggagactgaccaggactcttgttggagattataaaggatcacatagatcccgtggtgaaagaagcattggggatatggttggatcaatgtgcttgtggaaacagaaatgtggatg

SEQ ID NO: 23619 - DNA, 503 bp, Gossypium hirsutum
  Clone ID: GOSHI-09MAY01-C34148_2
cgaaaacgatcctgaattcaaaggataccacgatgggaattcagaacctattggctttgggcacattggcttcaccgtggatgacatgtacaaggcatgcgagagatttgaaagtcttggagtagaatttgtcaaaaaaccaagcgatggttttgcattcatcaaggatcctgatggttattggatcgaaatctttgatttgaaaggaattagacaaatagttaacagtttagcttaagttaatgcttcaccaagttcaggaaattgatctgacaaactcaagtgaaatcttaattgaagcacatttcattctagttatgtttatgttttctttatgtttgatgtgtataacaagtaaggtgaaaataaagagttttgtaagagaaaattcaaccttgaaatttactaaattctatttatattacatataaatttgtatgccaatgtatcatgtacctgctttacaaagtcatgaatgaagtagaaaaataagtgatgaaaat

SEQ ID NO: 23620 - DNA, 880 bp, Gossypium hirsutum
  Clone ID: GOSHI-09MAY01-C34148_1
gccctcttttcactctttaaactctaaaccccaactctccagatttcatattgcaaacgatggcgtcattggattcaaaagaatcacctgccaataacccaggccttcattttccccctgacgaagccaccaaaggctacatcatgcagcaaaccatgtttcgtattaaggatccaaaacgtactcttgaattttatagtcgcgttttgggcatgacgttgcttaacaaagtggatgttccatatatgaaaatgacattgtatatgatgggatatgaggatgtttcatcagctccaagtgacccagttgagaaaactatttggacatttggaagaccagctactatggaactaacacacttttggggtaccgaaaacgatcctgagttcaaaggataccacgatgggaattcagaacctattggctttgggcacattggcattaccgtggatgacatgtacaaggcatgcgagagatttgaaagtcttggagtagaatttgtcaaaaaaccaagcgatggttttgcattcatcaaggatcctgatggttattggattgaaatctttgatttgaaaggaattagacaaatagttaacagtttagcttgagttaatgcttcaccaaattcaggaaacaatgatatggcatatgttgtagattccaatgtctactctcatacgttaattcctttgctttccgaaacttgtcgagggacaaactcaagcgaaatcttaaatgaagcacatttcattctagttgtgtttggggttttcttcatggttgatatgtagaacaaataagggtgaaaataaagaattttgtaagagaaaattcaacctttattaaattctatataaattacattaaaaatttgtatgcc

SEQ ID NO: 23621 - DNA, 451 bp, Gossypium hirsutum
  unsure (1)..(451): unsure at all n locations
  Clone ID: uC-gsflnu33B108e08b1
tccagctactatggaattaacacatttctggggtactgaaaacgaccctgagttcaaaggataccacgatgggaattcagaacctactggcttcgggcacattggcatcaccgtggatgacatgtataaggcatgtgagagatttgagagtcttggagtagagtttgtcaaaaaaccaggcgatggttatgcattcatcaaggatcccgatggttactggattgaaatctttgatttgaatggaattagagcaatagttaacaatttagcttaagctagtgcttcaccaagttcaggaaacaaggatatggcatatgtagtaggtttccgttcgttgtcatgattctagtgttataatgtctgctctcgtacattaattcctttgctttctagaacttatcgaaagancaaattcggtgaaatcttaattgaagcacatttcatttttaaa

SEQ ID NO: 23622 - DNA, 377 bp, Gossypium hirsutum
  Clone ID: uC-gsflnu33B074a02b1
tccgcccacgcgtccgcaaatagttaacagtttagcttaagttaatgctttaccaagttcaggaaattgatctgacaaactcaagtgaaatcttaattgaagcacatttcattctagttatgtttatgttttctttatgtttgatgtgtataacaagtaaggtgaaaataaagagtttttgtagagaaaattcaaccttgaaatttactaaaatgtatttatcttacatataaattcgcatgccccttcaagaagcaaagcttggtgggtatgacaattccttctaagagtatagaaccttgtgaattccatgcagggggggccccttctcggggaaccaggttaacccacccgagtttccgaccctaaagtttttt

SEQ ID NO: 23623 - DNA, 375 bp, Gossypium hirsutum
  unsure (1)..(375): unsure at all n locations
  Clone ID: uC-gsflnu33B056h05b1
tgttttgcattcatcaaggatcctgatggttattggatcgaaatctttgatttgaacggaattagacaaatagttaatactttagcttgagttagtacttcaccaagttcaggtagctttttattgcttatcatctttgtacatcattgcaaatcaatctaatacatatcaatgtcaatgtcaatgcaggaaacaatgatatggcatatgttgcagattccagagtctacttccgtacactaaatcatgttttttaaaacttatcgagggacaaatttaagtgaaatcttaattgaagcacatttantttcagttgtgtctatgttttctccatgtttaatatgtataataaacaaagtgaaaataaagtatttt

SEQ ID NO: 23624 - DNA, 349 bp, Gossypium hirsutum
  unsure (1)..(349): unsure at all n locations
  Clone ID: LIB3148-056-Q1-K1-B3
tgtacatcattgtaaattgatctgacacatttcgatattgatgcaggaaattgatctgacaaactcaagtgaaatcttaattgaagcacatttcattctagttatgtttatgttttctttatgtttgatgtgtataacaagtaaggtgaaaataaagagttttgtaagagaaaattcaaccttgnaaaaaaaaaaaaaaaaaaaaaaaaaaaaaaaaaaaaaaaaaaaaaaaaaaaaaaaaagaaaaaaaatataaagaaaaaaaattggcgaacgnttgaatggaaccaaggttcctttcttttgtgtgccccgtattaacttttttgtcgggcgacctaaatcaaat

SEQ ID NO: 23625 - DNA, 735 bp, Gossypium hirsutum
  Clone ID: GOSHI-09MAY01-C34108_1
cctgtgtagagaaagttgcaaaatctggatgggacgtttttgttcataatatcgagactgttgaagaacttcaaagggttgtacgtgatcaccgtgctaattttaagcaatctttggatgttctaatgatggccaaagagtatgttcctgctggaacacttaccaagacttcgattatgttaggatgtggagaaacgcctgatcaagttgtgaaaacaatggagaaggtcagagcagcaggtgttgatgtaatgacattcggtcagtacatgagaccatcaaagcgtcacatgcccgtatcagaatatattacacctgaagcttttggaaaatatcgagcccttggcatggaaatgggatttcgatatgtggcatctggtcccatggtcagatcatcctacaaggcaggagaattctacatcaaatctatgatagaatctgatcgttctgctgctgcttcatagttccttttctcttcattccctatgttattctttttctttggctatcattaacttgccttctgatactacacagtttggctaataaattggtttggaggctgacagccaatgattcggtactccaattgttgcagtatattggcaccaatttctaattgagatttgtattgtacttgttgatgttgtaattgtacgtaagctacacttttggtgctttatgaaatattatgatcaaggtttaggttttaattggtaaataaagacaattaac

SEQ ID NO: 23626 - DNA, 431 bp, Gossypium hirsutum
  Clone ID: GOSHI-09MAY01-C34018_1
caagaagtgatgaccttgcttgcatatgacggtagtgaaaatggatgggcagtctgcttcactggttcagatgaaatggtgagagccaatggagagaaagtgcttagcagcatgacgtgctttgccgactcgggaaaaacttgcgaagcaaatggggtttatcccggcacttcccaaacatttggtcgggattaccgctgcccatcactgcactcgccctttccctcccggaaacggtggcgggattccggagagggtgcagtgtgctgagtgtggacgtccgatggagatgtatttcatgtatcgctgctgtgttgagtgagctaaacaaagccacaaaaattactattggggggaccaagtaaatacaagaaataaaaatataacaatcatcataattgatgtttggttagaagtattaatgatgatca

SEQ ID NO: 23627 - DNA, 608 bp, Gossypium hirsutum
  Clone ID: GOSHI-09MAY01-C34398_1
aaaaaagaagcaaaaatggtgctgtgggagatcgcattgggaacggcttatttcttggggcttaaacgaagttacaagcttgctttgaagattcagcgacggattattagtcgtaaccagccacggcttcaacaatttgttcaaagaagaacgcgtgttgtattcgacatagcactcaaggttcacaggaacatacagcatagagacttagaagttggtcgaaaccttggtgattgtatcctccgctggccccataaaataaaaccttcagctcaaatccgaggtcctccgcctcatcaagaacccaaccacggtactggcaaagcaaacatgaacatgccaaagcaagtgacaaacacatcttcaccgaaaactccacgaagcaaccagtcacctcgaaaccatgatgctggtagacatctttttagttcattaacaagtacatggcctaagtccttccctactaccattgcaatgatgatgcaaccaccaactgctaccggaaacatgactcggtgccggcatttgagcattaacggacccgacgcatcgaggctgaactacacgagagaccagggagttgttagaaaggacataatgcaatggat

SEQ ID NO: 23628 - DNA, 683 bp, Gossypium hirsutum
  Clone ID: GOSHI-09MAY01-C34388_1
atgcctaggggatctgatgttggtggggctccgactcatacatgtgctctagccacggtatgggtggtagcagatacatgggtcgtgggggtggttctgggtcatactactgatattatagagactgtgaggcttctgtatggtgtggagcatttgaagctttggttttggtacccatggtattggatagaagcatgccaagtgctatagcctccatacattgtagtacaaggtcttttggcataagttcaatgtggaagaggcagcatgctggttcaaactgtttctagtttcacaaacaggttacttgtgattgtgagtattcaagtttatggtgtaaggaaaactaatctcagttagagatgaaacggcaagtgcttagaatatgctgtgtatgaacaacattatttacttttgtatttaagaaccctacccatggataatttggaagcatttatcacaaactctatgggttgagtattagagcgtggattaagtcattaatttgcattttggttatggatttttggatactttggcaggctgaactcatcaggtaagtgttgataaggtaagaaacaaggcattaatatctttcctcaaggatgataagtacaaagagatcatatggtacctataacggaagggtatatgaaaagtgtagaggatttacttgtatgctt

SEQ ID NO: 23629 - DNA, 622 bp, Gossypium hirsutum
  Clone ID: GOSHI-09MAY01-C34288_1
tcacttttgtctccgtatcttcatttcggggagctaagtgtgaggaagttttccagatgcaggatgaaacagatctatggcgaaagaacagaattctcaagggaagagagtgtgacactttttctgaaggctgtcgggcttagagaatattcccggtaccttactttcaactttccgttcactcatgagagaccgttgttgagcaacttgaagtatttcccttggaatgctgatgtgaaccgttttaaggcttggagacaaggtcggaccggatatccgttggtggatgctggaatgagggagctttgggcaactggttggatacacaacagaatacgagtgattgtttcgagtttcgcagtgaagtttcttcttcttccatggagatggggaatgaagtacttctgcgacacacttttggatgcggatggagaatgcgatattcttgggtggcagtacatctctgggagcttaccggatggtcacgagctagaacgattagacagcccacagattcaaggctccaaatttgaccctgaaggtgaatatgtgaggcaatggctgccagagctagcgaagatgccgactgagagaatccatcatgcttgagatgcacctcata

SEQ ID NO: 23630 - DNA, 605 bp, Gossypium hirsutum
  Clone ID: GOSHI-09MAY01-C134240_1
tttttttttttgttttttgtaatatgttctatttcttatttgatcaatcactaaaaggaaccattgttagttccttgtagctttagggctgtaccttgcaagcagggacagtaacatcaggcatgtgagtaaagacaatggataaaggagcaaccattattggctttgctgattttacatgtaaaggctccagatgaggtatgatcccagatgaatttacacttaaaatgtttccattaagtagaatgctttgactctgtaaattcccaccttttgctgttagatggtattcctctcttcttattttaccatcaatgccttgaggcagcttgattattgttgttttatgaattttgtgcttatggtgtgaaatccgagaccggtgcttgtgttgcaagctcattgtactattgaatgcgagctttgcccggacggtagtgctattgttgaggttgatcaaaagtagtgtgatgccttttgattgttttgcacagtgagtgtaggagcggatcttgtctgtcccggtgaagcttgtcgaaagaacatttcttcccattagccggtgccaaagaagtgcactgtagtagtctggatttggttcaaag

SEQ ID NO: 23631 - DNA, 263 bp, Gossypium hirsutum
  Clone ID: GOSHI-09MAY01-C34268_1
tccttgcgtccgcccacgcgtccggtaccggaggggctgcccacaaaaaaaaataattaaaaaaaaaattcgactttgttattagtttaccagcatgtgctccaataaactataagatttgggatactatatatttcaattctgatatttctttttctctattttcttttaatcctctctgctttcatctttgggtagagttttctgttattcgatgtccttttgttaaaaacgactgacaatgaaatttaattattgctgag

SEQ ID NO: 23632 - DNA, 265 bp, Gossypium hirsutum
  Clone ID: LIB3135-018-Q1-K1-G8
tcgcccacgcgttcgcccacgcgtccgtttgaagtttgcaacttcagtttgatgtaccgtaggcgcagcccacaaacaaagaaaaaagaaaaaaagattactaaaactcaactttgttattagtttaccagcatgtgctccaataaactataagatttgcgatactatatatttcaattctgatatttctttttctctattttcttttaatcctttctgctttcatctttgtgtaaagttttgtgttattcgatgtccttttgtt

SEQ ID NO: 23633 - DNA, 670 bp, Gossypium hirsutum
  unsure (1)..(670): unsure at all n locations
  Clone ID: LIB3829-023-Q6-K6-H5
tgaaagaaaaagctatnnactcatggcttnnncttcacaaaataagtgggaaggatggtnnaaagggccnngaatatattagnnatgagaaaggggggcaagnggtgtgnnctacacttnnnagcagcttgtcactttgtgnnttatgnannttgggncnnaataanatncctgacgtgtgtggggtgggtggnnagtgagncnnataaacnntttcgnntgatgtgnnaatggatnnggactgcacttnnncactgggctnngctttttgnntggcagagaagcgannnaccgttgnncaattcttagtcnntctgtgggaagcagnnctcctggnagccctcttacagnnacccnnatctccagnnaatttcnnctttgggcnnagaactcctnngctgacttggnncttctgcttnnnatggacacaaaggnannatctctggtnnntccttgcagnaaaatcttcctntgnannncagttacctnnttcttcactncnnacgatggatgaannncagaaggaagnnctgtaccaaaccagttnntctgnnatcgaatnnagcaactnntctgtnncaattattanngtgatgnnncgcaagnaaacatactgtncnnactgaaggnacnntcaattancctgctgtnnttgtaatggcttacacaa

SEQ ID NO: 23634 - DNA, 371 bp, Gossypium hirsutum
  Clone ID: LIB3135-018-Q1-K1-A2
ggaagctgtacaaacagactctgatcgaatagcaacttctgtcaattataatgatgcgcaagacatactgtcactgaaggactcaattactgctgtatgtaatgctacacaagctgctgatcgaatacatcaaatgttcaggatgcaatccttccagtggaaacagttgatagagtccagtgatgctgtgtctgatgaacatgttatttcacttctaactactaagacacgcaggccatttcaaagtgatggggtagctcatgctgctgcaacacaaatccagaaaaaatttcgtggttggaagaaaagaaaagaattcttattgatccggcaaagaattgtcaaaattcaagcccattgtaagaggacac

SEQ ID NO: 23635 - DNA, 1029 bp, Gossypium hirsutum
  Clone ID: GOSHI-09MAY01-C34228_1
tgcttccatcatttccagctgttaatacaattttactagctggcgttgctcctcatatcaatcctgctttctttggtcgtggaatggcacctaatgggttgggaatgatgggtgtagctggaatggatgggcctcattctgggatgtggactgacacaaacatgggtgggtggggaggagatgagcatgatcgcaggactagagagtctagttatggtggtgaagatggtgcttcagagtatgggtatggggatgcgaatcatgaaaaaggaaggtctggcggtgccactcgggaaaaaagatcgggcttctgagcgtgagtggtcaggcaactctgagaggaggcatcatgatgagaaggaacgggaatcggacaggcctgagagggagcacagggaacaccgttacacgggagagaaagacagctatagagagcatcgacatcgcggacgtgacgtggattacgatgatgactgggataggggacagtcttcttcaagatctcggaacagtcccatgcaacacgagaagaagagcacaggtctcgatcaagggatgtggactatgggaagaagagacgcctaccatcagagtgacaaactatgctgtgcatgcttctttacactttcttatgagacctttaattaagttttcactctcagtatctcttcccttggttgttatatcatttcagcattctctgtgatgattgttggtccaggtgccaaacgtcgcttcttaaagggagaagtaagtgctacttgcgtgggtggtggggaagaatagacttccctttttgtttcttactgcactctaaagagccactattagatgaaaaacttggtattcctatgttggaacttggaaaaacatagtattttattcaatgtggatattctttgtggggttggaatcctaacatcctacatctgaatatcaacattgggtttataattatctgcaaaacactatattcgagggaatgcttacttggcttgtgatcatgatacttagaaaatgttgttgttc

SEQ ID NO: 23636 - DNA, 410 bp, Gossypium hirsutum
  Clone ID: LIB3493-043-P1-M1-B5
gcactactagagagtctacttatgctggtacaacattgtgcttcagaatatggttctgggggtgccattaacgaaatcagacggactaactttgcccatcgggataaagatcatactcttacactagtctgcacctaattctcttaatcagcattatgattatgaggatcaaaaatcttacaggcctgttaattagcacatgtaacaccgtttcaaggatgagacagacagctatagagagcatcgtcatctatgacgtgacctagattatgatgataactgatataggggacagtcttcttcaagatctcggaacaggtcccatgcaacacgagaagaagagcacaggtctcgatcaaggcatgtgtactatgtcaagaatagacccctaccatcagagtgacaaacta

SEQ ID NO: 23637 - DNA, 757 bp, Gossypium hirsutum
  Clone ID: GOSHI-09MAY01-C35988_1
gttgaagatatattctacaagtatggtcgtattttggatattgaattgaagattccactccgccctccatgtttttgttttgttgagtttgaggatccccgggatgctgaagatgcaatcaggggtcgagatgggggcaactttgatggttgtcgtttgagggttgagcttgctcatggtggcagaggacaatcctcaagtgatcgtcggggtggatatggagggggtgcagctaaatttggcgtctcacgacattctgaatatcgagttattgtccgtgggctcccctcttctgcttcctggcaagatttgaaggatcacatgcgaaaagctggtgatgtgtgttttgccgaaatttcgcgtgacagtgatggaacttttggtattgttgattataccaattatgatgacatgaaatatgccatccgcaaacttgatgacaccgagtttagaaatccttgggcaagggcttatattcgggtgaagagatatgagagcagtccatccaggagccgaagtagaagccgcagcgttagaagagatcggagtagatcaagggaacggtctgcatccaaatctccagttaaatccagatctgcctcccctgtgaagtcacccagagcaagatcgagatcaaagtcaaggtcaaggtcaaggtcaggatctcctgaaaaggcccaaccggttagcgactgatgcacatacaacaatatacgtccaaaatccagcttggctaagctgaattgagtataagggg

SEQ ID NO: 23638 - DNA, 590 bp, Gossypium hirsutum
  unsure (1)..(590): unsure at all n locations
  Clone ID: LIB3829-013-Q6-K6-B10
gcgttcggccacgcccttccatgttattgttttgtnntgagtttgaccaattcaagggnnatgctgaagatgcaattaggggtcgagatggttacaactttgatggttgtcgtttgagggttgagcttgctcatggtggcagaggacaatcctcaagtgatcgtcggggtggatatggagggggtgcagctaaatttggcgtctcacgacattctgaatatcgagttattgtccgtgggctcccctcttctgcttcctggcaagatttgaaggatcacatgcgaaaagctggtgatgtgtgttttgccgaaatttcgcgtgacagtgatgaatgttgcaatgtcatattcttatctccttatgagggcacacttatatggatgttttttgatgttcaatctggctgatgcttagagttaaaagatcaattgttcctgccacttcccctttctatgcctgaacttttggtattgttgattataccaattatgatgacatgaaatatgccatccgcaaacttgatgacaccgagtttagaaatccttgggcaagggcttatattcgggtgaagagatatgagagcagtccat

SEQ ID NO: 23639 - DNA, 1427 bp, Gossypium hirsutum
  Clone ID: GOSHI-09MAY01-C35958_1
gtggccaatggtcattgttctgtcctaatgaggctccaggcctggcagattgttggggtgaagaatttgaaaagctgtatattcattatgaaaaagagggcaaggcaaagaaggttgtccaagcacagaacctttggtttgagatcctgaaatcacccacgcgtccggggaccccttacatgctatttaaggatacctgcaatagaaaaagtaaccagcaaaatcttggcaccattaaatcttcaaatttgtgtactgagataattgagtacacaagtccaatggaaacagctgtgtgcaatctggcatctattgcactacctagatatgtgagggaaaagggtgttccactggagtctcatacatctaagcttgttgggagtagaggatctcagaatagattttttgactttgataagctggcagaggtaactgaaattgtaaccagaaatcttaacaaaattattgatgttaattactaccctgttgaaactgccaaaagatcaaattgcgtcataggcccattggtattggagttcagggtcttgcagacacattcatcttacttggcatggcctttgattcacctgagctcaacagctgaacagggacatttttgagtccttatactatcatgctctgaaagcttcttctagtttggcagagaaagatggcccctatgagacatatgctggctgtcctgttagtaagggcattcttcagcctgacatgtggggttttactccttcaggtcggtgggattggactgctcttagggacatgatagccaagaatggagtgagaaattcactattgttagcacctatgccaactgcttcaactagtcagattcttgggaataatgaatgctttgagccatatacctccaatatttatagtcgcagagttttgagtggggagtttgtagtggtaaacaagcatcttcttcatgatttaactgagatgggtctttggtctcctgttattaagaacaacataatacaccccgcgcgtccggttcagaatattccagaagtacctcatgagctgaaagcaatttacaggactggttgggaaatcaagcaaaagacactggttgacatggctgttgatcgtggatgcttcatagaccagagccaaagcttaaacatacatatggaccaacctaattttggaaaactaacttccttgcacttctatgcctggtctaagggtctgaagactggtatgtattatctaagatctcgagctgcagctgatgcaatcaaattcacagtcgatacttccatgcttaaggaaaaaccaaaggtagcagatgatgatacaaaaatggcacaaatggtttgttccctgacgaatcgtgaagagtgcatggcttgtgggagctaagcagcaacagcagcactttttgaagcttttggaagtaa

SEQ ID NO: 23640 - DNA, 545 bp, Gossypium hirsutum
  unsure (1)..(545): unsure at all n locations
  Clone ID: LIB3543-065-Q6-K6-D2
cggncgcgtgggcggccgcgtgggcggacgcgtgggcggacgcgtgggtttttgagaccatatactatcatgctctngaatgtcccntgttcagctgttgagcctgaagtgaatcaaaggccatgccaagtaagatgaatgtgtctggaaaaccctgaacttgaaatgcaagggggggggacgttcagtcagtgggattggactgctgttacggacatgagcgccaagaatggagtgagaaattactattcgtaggacctatcccaactgcttgacctagtcagattcttggcaataatcgaatgctttgagccatatacctgcaatgtttatagtcggcagtactggagtggggagtttgtggtggttaacaagcatcttgttcatgatttaactgagatgggtctttggtctcctgttattnaaaacaacatantacaccgaggatggttctgttcaggaatattccagaagtacctcatgagctgtaaacaatttacaggactttttgggaaatcaagcaaaagacactggttgatatgggt

SEQ ID NO: 23641 - DNA, 595 bp, Gossypium hirsutum
  Clone ID: GOSHI-09MAY01-C135890_1
attttttttttttttttttcacttaatagctcatttttatttcagaatgactaaatcactactgagcttataagaccacgcgaccaaagaagtttaaccaatttgtacctttgcatatcccaactctttttctttttctttttcttttttcaagacttgggaaagcaaacaaattgaaagcttgtctagaaagaaaagtcattgcaaaccctaaatgagaaacaaaattacagaaatgaaagatttgatgcctactacaacaaaattgcagttctagagctaggaggacacctaaacccacctgcaaatttcctcatgcatcgacaatgccatgcatcaattccggtccattttcactgttttaatccggttggctattattgcctctattcatctgttacacaccctactgaagctggttgcacattcttaatgtacttgtgtaagacacctctgttagccttgtaaggaggtggactccacttctttctccgctcgttcagttcagcatctgccagctctacatttatggccctcttttgatcatctatgctggatgatgtcccctttttgaacaagacgattggggcccctc

SEQ ID NO: 23642 - DNA, 944 bp, Gossypium hirsutum
  Clone ID: GOSHI-09MAY01-C35878_1
atttgccccatccgttctctccttttggcgatagcgtttcccaaggttttcattgttttctatctctttttagacataagttcacttccagtcttcttagtccaaatttctagttcattgttcctttactctcatatcatgctgaatcagctcctcgttctccagagaagcaacattacgatgaataatcgatttcgtggtcaaaacttagttcatcggacccttatctaccaaccccgacactgatctgaactctctgttgttaaatacggcgtcgaactggatcttcataatcggtacgtcttctctatttctttgattgagcctcgtatgtgatgaagtcattttaactttaatccctttgtatactgccaaatgatcctgaatttttcgtgcgaggtccctactcgttgtatttacccgttcatgcaaaagttggttccttgaatgccacagtatccataagccataacaaaaatgcctgcattgttcatttgttccttggttgaagatcagggtgagccactcccagaaatcttgatgcgcaaaagttgtgatccaagatagatttaaaagttgccaaacctctatacttgtggaatattgccgaaaaatatgatgacagtcttcattttcatcaccgtaccggggacatctggcatttgtcactaaccttctttgttgtagattgctcaatataggaatgtaattccatgatatgcgtcagattatgattgtgatcttaggtggtaattgtagtttccatagtttactgaaaaattccttagcttcagcctgtaacaaataattactaggattcagattagcaatttgtaatagtttataggcactatggactgagtattcccctattggttcgcccctccagacttggaagtcctcgtgtgttgattctgataatgaaatctgtaagtttttcgagc

SEQ ID NO: 23643 - DNA, 651 bp, Gossypium hirsutum
  Clone ID: GOSHI-09MAY01-C35838_1
ccttctcgtccgctttcctcctcctcccgtgcttgtccttcttcaatttgtgcaaccagttcacttcgcaaatctccaggtaagttatttatctccttcttcaagctttatttgttatgattctgatgatctgggtttttcagtgagtggattatttgttgagaaaaaagacgagattttttataatcccctgtttgtttgttttttttgaacggtgcatcctggttttgctttatttttgacaatccgaccaaactttttagtcatttatggggaattctttgcttctgttctttcatggaggaccagtgttttgcttttgttctttcatggaggaccagtgttctttcatggaggaccaaacttttaagggatccttcagatcggctatttggtacctttgggagcaggggtgctaagcagaattcaaagaagaaatctttggatgcattgataaaaagactccgggatgtgagctaatttggcctggaggaggtgtatgtatgtctatgttcttctgcctgttgcctttgttgattgcaattggctatatttcttaccttatggttggtcaattggttcattaaaattaaaagggtggctggcctttttacttggtggattaaaataattaggggccagtgaaaaatt

SEQ ID NO: 23644 - DNA, 479 bp, Gossypium hirsutum
  Clone ID: GOSHI-09MAY01-C35548_1
tttttcaagcaatgaatatgaaccatctcatcgagatatcctttatgctgaagggatcacccaagggaatggtttggcattcatagagttttctcttgatgatcgtagtccaacgtctgaaacctacactgacaatttggaagctccatccctccccctgaccaagtatcaacttataagggtaaatgcaaaggggatgaatgagggatgcaagtgggtggaaatgtttgaagatgtgcgatctgtagtcttctgcgtggcccttagtgattatgatcagatatcgatatcaccagagagcagtggcagtggaacgctacttcaaaataagatgttgcagacaaaggagctatttgaaacaatgataaggcatccttgctttaaggataccccattcgtgttgatactaaacaagtatgatctgtttgaggacaaagtcaatcgggtgccgttaagtacatgcgagtggttcatggatt

SEQ ID NO: 23645 - DNA, 683 bp, Gossypium hirsutum
  Clone ID: GOSHI-09MAY01-C135540_1
caaagttaaagattcttcctttctattaaagtatatatattttccttcttttctaaccggaaaaaggaagaatatttttatcagatttcccagtttacccttattatttctcttaattctctcttacacccatcctccggaagcttacccctcgtttcttttttgtatagcgcgatctgggtaatttcaaaagaagggggaaaaatgctttgtaaaatggtgttgatgccccgaaaaaagaaagtcgggtctgttccggtttacttgaatgtatatgatttgactccgattaatggatacgcttattggtttggccttgggatctatcattctggtgttcaagttcatggggttgaatatggttttggagcgcatgagcattcaacgactggaatttttgaagtggaaccaaagcaatgtcctggtttcacatttaggaaatctattttgattggaaggacagatttatgtccgaaagatgtccgcgcgttcatggagaaacttgctaaagagtactcggggaattcgtaccatctcattaccaagaactgcaaccatttctgcaatgatgtgtgtattcagttggtagggaagccgattccgcgttgggttaatcgtcttgctagattgggtttcctttgcaactgtgttctcccacagggttgaacgaaacaaagttcgcc

SEQ ID NO: 23646 - DNA, 872 bp, Gossypium hirsutum
  Clone ID: GOSHI-09MAY01-C35538_1
gtcattagaaagaagagaactggaaaagggtgatattgttcacacgctaaccaacaggaggtggatggaaaatgtgttgcttatgctgaaagccatgaccaagctctagttggcgacaaaacaatagcattctggttgatggataaggttaaatatgttcttacttacattcatgcggattagtattacatgcttagagagctaactggctgtcgggaatgcttttttaacaattcttttatatgtagctattagaagcttgcaattatactgccttttgctaagttataaatacaaaaagatagagctaaattagctttataatcttcaatataattagattcaattccttttcgcaggatatgtatgagtttatggctctagatagaccaagtactgcacttatagatcgtggcattgcattacacacaatgattaggctcgttacaatgggactaggtggagaaggatacttgaatttcatgggaaatgaatttggacatcccgagtggattgatttcccaagaggtgaccagtgtcttcctaatggtgtagtaattactgggaatggttacagttatgataaatgtcgacgtagatttgatcttggggatgccgactatctcaggtatcgtgggatgcaagaatttgatcaggctatgcagcatgttgaagagaaatatggtttcatgacttccgagcacacatatatatcgcggaaggatgaaaaagatagggtgattgtctttgaaaaaggcaacctggttttcgtattcaacttccactggaataacagctattttgactaccgtgtggggtgtgcaaaaccaggaaagtacaagattgttttggattcagatgatccgttattc

SEQ ID NO: 23647 - DNA, 627 bp, Gossypium hirsutum
  Clone ID: GOSHI-09MAY01-C35528_1
gtcaggatcaagactgcaagaggtagagcagggtttgtgaaagacatcttcgtgagaagaatgtctttgcacaccatgaaatgggtgttttggatgacagggaactataaacaacatgctgataatcattacgatgcccaatgcattgccagtgattcaagggatcaattatagagacattgtggccaataacgtgtcgatggcggccagattggaaggcatcgagggtgatccatttactcaaatctgcatagccaatgtcacaattggaatggcagctaaagcaaagaaggtgccgtggacttgccctgatgttgaggggatcacaagtggagttagtcctcggccatgtgacctattacctgatcaaggacagaagaaaatcgcagcttgcgactttccggccaagcccttgtccattgatagagtggtgctcaaaacttgcacctatagggtcaatcatatgtgattgaatcctttaaagtaaaacctaagtcgattgttacatgtggtaagattctcataattatcttatgacaagttgcatcatattataataacgtaaatgcattctcatacagtgatgggttatatagatcatcccttttacaaaaaaagaagtgtttt

SEQ ID NO: 23648 - DNA, 970 bp, Gossypium hirsutum
  Clone ID: GOSHI-09MAY01-C35478_1
cccacgcgtccgcccacgcgtccggttattttattggcaatccttccccaaatcagcaccgatcggaaatggcttcaattgctggaatctggttaaccaaaaacctaattttctcttctccgcaaaccctaacaaaaccccttcaaatcccacaattcttatccctaaatcaacgcatacggttcccttctggaagaacccaccagaaaacagccgtaaaagcgtcgagctcgagcttcagcccaagcgcaccctccggctcgtcgtctaccggactgtactcttcaaagaaattcgagctcaccgctcaaaacgtggaccttgttcttgatgacgtgaggccttacttgattgccgatggcggaaacgtcgacgttttgtccgttgaagatggcatcatctcgcttaaactccaaggagcatgtgagagttgccctagttcaacaacaaccatgaaaatggggatcgaaagggttttgaaagaaaaatttggggatgcagtcaaggatattcgacaagtatacgatgatgaacaaaaggaaactactgttgaggcagtgaatcgtcatcttgatatattgagaccagctattaagaattatggtgggagtgtggaagtattgtctattgaggaaggggaatgtgttgtgagttatacagggcctgaaactattggatcagggatcaaagctgcaattaaggagaaattcccagatattaccaatgttgtattaactggctagctttttcattttcatatcagaagctgaaagttctggccttttgtttatttttttcctttttcactggtaatgcctgtttcttttagataatagatagacaaagtacatggggatggtgattaaatgttgcatctgtatgcaaagattcatccttattttcataggtcatacatgtaaaatcttatacaggtattcaataatttcatatggaaatcgaaattgctgtt

SEQ ID NO: 23649 - DNA, 409 bp, Gossypium hirsutum
  Clone ID: GOSHI-09MAY01-C35658_1
ctttcgtgcagcaattgattcctgtttgactagaaaagccaaatcccacaagaaaataagcggcattgttcttttggtcctcgcttaaagacccaggtgaaccacacccaaatactctgaatactattgttaagcacccaagagaagtttaaatacctccaaactgctgtccgatgtagagacatacttctgaaaacatgggtgcgtggcttcctctaactgccgacatctggggcaccaggcttcatttgcaactcgcttcaatttcagattagctagcgtagggatataattccaggaaattttccagattgtaactttaattttcgaaggaatgtgtaaatcccgtagttttcatgtgaaaaaaaaaaaaaaaaaagaaaaaaaacaaaaaaatactatataataa

SEQ ID NO: 23650 - DNA, 634 bp, Gossypium hirsutum
  Clone ID: GOSHI-09MAY01-C135640_1
agagcaaccaccttccggacatcaacacgattcccaaaataacttctcttgctctgaaagaatacgacccacaggcatgaacatcaaacaccccctctctcccctcttcctaaccttcctcttcttctatctccaccctatcccaaccctgtgttccgccgactacgacgccaacaccaccaccccatcaaacgccactgatttcatccgtataagctgctccgtcaccttataccccgacctttgctttgcttccctttatggctacgccaacgccattcaacaagacccagctcgtctagctcgtactgccattggtgtcagcctctctagggcccgtcacatggcagcttttgtctctaacctctcccgtgaagcagactacggtgccgacccacgagccagctccgccttacacgactgtttctccaacatggatgatgccgtggatgaaatccggggctccttgaatgaaatgcggcggcttgtgaatccgggttccgagtcttttaggttccaaatggggaatatccacacatggatgagcgctgctttaacggacgaagagacttttagatgggttcgaagatgtgggtgacgacccatgaaaacggcggtgtgcgaaaaaacggcc

SEQ ID NO: 23651 - DNA, 643 bp, Gossypium hirsutum
  Clone ID: GOSHI-09MAY01-C35678_3
gcgtttcgggcaaattttctataatcgccttgtgtggtggacggtgtgtgtaaactcctcactcaactactcctatggggctgctgaagaaaccgggccttatctccgggtcggccctgcgttttgcgacacttgccgtgttgaattcgaggctaagcggggcgaacccattagtggagcagtgggggggattggaatgtaggaaccgtaccaacgaagcgattacattccagagcccagaaatagtggctgacagtcacggagactaccacatcatagtggaaggcgattatgaggaatcagactgcgacattgctttggtgaggagtccaagggctgattgcagtgatcccaccgaagcgtggagaaaatccagggtggttctcaccacatttgatggtctcagcaataaactgcgttttgccaacaatcttgggtttaagaaggacatagctcttcctcagtgcactcgaattcttaaagagatgggctattatgagcttagtcaagaagatggagactttgagcttagtcaagaagatggagactttacccattcgtcagaactataatatgtattttcacttcaactttctttaaaagctcggcattagcccataataagaattgagtcattattatt

SEQ ID NO: 23652 - DNA, 745 bp, Gossypium hirsutum
  Clone ID: GOSHI-09MAY01-C35678_2
gaagaaaggccaatattcccataagcgcggtggtcggcggcaccatttttgtttcgtcctcactcaatttcgtctatggggctgaaaatatgacctacattgttgtaggccatgtttactgtgacacttgtcgtgttgagtttgagaccaaactcagtgaacccatcggtggagcagtagtgaaattggaatgcaggaatcgtacagacaatcagcttaccttccagagccaagaaatagtgactgacgaacatggagactatcacattgcagtggaaggcgattatgaggaatcagactgcgacgtcgccttggtgaggagtcccaacccggattgcaatgatccctcagaaatatggaggatatctagggtagttctcaccacacttgacggcgttagcggtgagcttcggtttgccaacaatcttgggtttaagaagaaggttgctcttcctcaatgtactcaagttcttcaagagataggctattatgagcttaaccaagaagctggaggctataatgagcttagccaagaagctgaagacatttccccttcgtcagaactataatatgtattttcacttccaacttttctgaaagctcggcattagcctatattaaaaattgaatcattattattctactatatgtcaatcatttttctttcctggccactgagctaagcgttcaataaaacaaaaaagaaaaaataaataaaattaaagcagcagtcgaggagatcaac

SEQ ID NO: 23653 - DNA, 641 bp, Gossypium hirsutum
  Clone ID: GOSHI-09MAY01-C35678_1
cccacgcgtccgaaaagtgagaacgaaagaaatggcaaatattcccataatcgctcttttctgcttcaccatttttgtttcgtcctcactcaatttcgtctatggggctgaaaatatgagctacgtcgtcgtaggccatgtttactgtgacacttgccgtgttgagtttgagaccaaactcagcgaacccatcgctggagcagtagtgaaactggaatgcaggaatcgtacagacaatcaccttaccttccagagccaagaaatagtgactgacgaacgtggagactatcacattgtagtggaaggcgattatgaggaatcagactgcgacgtcgccttggtgaggagtcccaacccggattgcaatgatccctccgaaatgtggaggatatccagggtggttctcaccacacttgacggcgtcagcggtgaacttcggtttgccaacaatcttgggtttaagaagaaggttgctcttcctcagtgtactcaagttcttcaagagataggctattatgagcttagccaagaagctggagacattgccccttggtcagaactataatatgtattttcacttcaactttttctaaaagctcggcattagcctataataaaaattgaatcattattattctact

SEQ ID NO: 23654 - DNA, 591 bp, Gossypium hirsutum
  Clone ID: LIB3828-031-Q6-K6-E12
gcgttcgaaaggagacgaaagaagggggggggccggggggggctcttttctgcttcaccatttttgtttcgtcctcactcaatttcgtctatggggctgaaaatatgagctacgtcgtcgtaggccatgtttactgtgacacttgccgtgttgagtttgagaccaaactcagcgaaccggtgggtggagcagtagtgaaactggaatgcaggaatcgtacagacaatcaccttaccttccagagccccaaatagtgactgacgaacgtggagactatcacattgtagtggaaggcgattatgaggaatcagactgcgacgtcgccttggtgaggagtcccaacccggattgcaatgatccctccgaaatgtggaggatatccagggtggttctcaccacacttgacggcgtcagcggtgaacttcggtttgccaacaatcttgggtttaagaggaaggttgctcttcctcagtgtactcaagttcttcaagagataggctattatgagcttagccaagaagctggagacattgccccttggtcagaactataatatgtattttcacttcaactttttctaaaagctcggca

SEQ ID NO: 23655 - DNA, 534 bp, Gossypium hirsutum
  Clone ID: uC-gsflmaxxa119a09b1
tcccggcccccggacttacatacattaactcgccgggggacgttagggggacatctgaagaaatgggggcgtgtggcataatccgcccttctgtgatgcaccagatgtagatgcttcatcactcaactgctgccatggggctgctgaataaaaaatgcagcatatggtggtaggtcatgtttattgcgacacttgccgtgttgaatttgagaccaaactcagcgaacccattagtggagcagtagtgaaattggaatgtaggaaccgtaccgacgaagcgattaccttccagagccaagaaatagtggctgacaatttcggagactaccacatcatagtggaaggcgattatgaggaatcagactgcgatgttgctttggtgaggagtccaagggctgattgcagcgatcccaccgaagcgtggagaaaatccagggtgtgctttaccacattcgatggtcttagcgggtaactccgttttgccaacatcttggctttaagaaggacaaagtcctttcttagtgcactcgattc

SEQ ID NO: 23656 - DNA, 411 bp, Gossypium hirsutum
  Clone ID: LIB3145-055-Q1-K1-G7
ggcatttttatactacattgtattgtagtgctgaattttgaaaaattgtgatttgagtgtgtcttgttatgttgtaggttttagggtaatgagagggggagaaggaataattgagctgtggaacaaagagtctttttgttatttgtctgatggagatttgcatacggtttctatcaaatgtaggatctgctttctgctttatgtgctaaaaaaaaaaaaatgacaaacgtagagactatcacattgtaatggaaggcgattatgaggaatcagactgcgacgtcgccttggtgaggagtcccaacccggattgcaatgatccctccgaattgtggaggatatccaaggtggttcttaccacacttgacggcgtcagcgatgaacttgggtttgccaacaatcttgggttta

SEQ ID NO: 23657 - DNA, 965 bp, Gossypium hirsutum
  Clone ID: GOSHI-09MAY01-C35628_1
gctcttcttgtctgagcaaatgttaacatcagcatccccattagatgatgaatccatctttgaagaaccatttgagggtttccatgcgatgtagccactaatacaggagggattgaagccattgggatggtctgaaccctccctttcatcaaacatttcactggtgtttggatagctcatgcaggccaaagattttctaatatcctcaagtatttcatgggggtttctttgagttgcacggttttgctccaagatcaccttaagtatatcccgaagccagccacactctttgctaagcaatgggctttcagacttcatttcattgttcaacatgctactgtctggctgactgtcaggaacagggactatctccttacatattacctcgaaggaacttccacttgtcccagtttgcataggtccaagggtcccattagcatcatccgaagaaacatgagaatttccagaaaattgatcagcagaaactaaagctaacttttccatttcgacaaagtcatccatcagatttatttctgaagatccaacagttttacgtaatggcgactccctcaactgtctattcctgcattgctccagttctgaaattaaagctgaagcccaggattctgcgcagctggctttatcatcgctgccaacatcagacatggatgctagagagacctcatgtggcagtgcactattcctggttgcctcattgtttacttcactttttgatgattcttcagtgtgagactcaacctccgataatttggaagctgtacgtgcatacatgactcgcgagaagtgaagttcattcattttcttattaagggcttccttgagagccttattttcttcttccatagcacaaaaaaaaaaaaaaaaaaaaaaaaaaaaaaaaaaaaaaaaaaaaaaaaaaaaaaaaaaaaaaaaaaaaaagggggggccgttttagatgaaccaaa

SEQ ID NO: 23658 - DNA, 546 bp, Gossypium hirsutum
  Clone ID: GOSHI-09MAY01-C35158_1
aaactgtgcatactggataatttgtatcgtttggctaggagtgccgaacaaaggcgtagtggcacaaaaacaaaaagtggcatcagtgatcgtaattatggaagtggttcatagcgtcgaagaaacaaacaggtgcactgggtttatggatatggaaactgacacaaaccctatagatagatccatagcacacctactatttcacaggccttcagatccatctcaaaggccagttactgatactgcattgttgaagtctcatggcaagatccatggctctatcacgaatccacctctgatgatgcctgaaaaactcattggccacgaagaaactgatgccggttcagataaaaaagtgccgacaaacactaacagcaggtaactgggaatttattaatatctttgtaaaatttaatctatttgtttatgataatgcctaatggtggtccctgtgagtccagccgacacataagatgcaggtttccttccctgttttagacccttttttttttatatcttagacaccccatggtcttttattagtct

SEQ ID NO: 23659 - DNA, 437 bp, Gossypium hirsutum
  Clone ID: uC-gsronu33B113a03b1
cggacgcgtgggcggacgcgtgggcggcggttaaggggaggaggttcttggatcttaacgatgacgacgacaccgaggatgaaaacaaaggcgatgatgatgaagtaacggtggcgaagagaaaaaagaagagggtattgaggaacggtgcggtgcggaaactgggcgatgattttgagcgagtggcgaagaatagcggcttggtgagcaaaagagaggaactttagcgatgggataggtagcgatgtgaagaagatggtggaggaggttaacaatgaaccggaaagtgaaggagataaggagaaaacagaggcgcagagtgggagtagtaggacttcaccaagataggcaaggcgtagccgctattaaggttaatgtatgtttgttttaatttggtgatggtgtcatttagaagcatttgtaatcgtaaatacaaa

SEQ ID NO: 23660 - DNA, 424 bp, Gossypium hirsutum
  Clone ID: LIB3145-011-Q1-K1-A5
gggtattgaggaacggtgcggtgcggaaactgggcgatgattttgagcgagtggcgaagaatagcggcttggtgagcaaaagagaggaactttagcgatgggataggtagcgatgtgaagaagatggtggaggaggttaacaatgaaccggaaagtgaaggagataaggagaaaacagaggcgcagagtgggagtagtaggacttcaccaagataggcaaggcgtagccgctattaaggttaatttcaagtgtatgcaacgtattctgtcgccacctcaagagctcgatgacctatacaaatcgacttgtggaggagactcgaggaatattagccaacattccacaaaaagtatattgagatgtgggagtgtagcttcaaagagtaggcaacattgccgtagaaggccaaaacgagtacctatc

SEQ ID NO: 23661 - DNA, 699 bp, Gossypium hirsutum
  Clone ID: GOSHI-09MAY01-C35138_1
cccacgcgtccgcccacgcgtccgcccacgcgtccgcccaattgctagggtttcggcgccgcagctctgtggcttttccagtcccctttgcccttttggttgacttgcaggctaccacggcaccacgcgcgccttcatcatccgtcgtagctctgaccggatccccaaggatccgtttggccttggacggagaggcaactgtcgattaagtcggcgtcgatcgacaggtaagagatcctcccccttctttatactcgtatcacagataaagaaaaataaataggagataaataaaaaagaaaaacgatgaatgaacaaccttgaaatctttgctttctctatttgattgcttgatattcgtttgttttttggtgcgtatctctgtgtttatgttgcgttcgtaaatgtgcgtaaccaaatacaatcgatcaattcctggctttatagccgaaactaaaatggaaaatgaaaaatcaaaatacaatctttttgctttttgctgctggcgtttaaccatttcttcgcaggtacaggggtacggggtcaactgtggggatatgtggcactagacgtggcgtgtacggaggcgttgaaggcggtcgaactgcgcgaaggctggggctcgcctgcggttgcggcgcaaatgtgaggaggaaaccctagggttacttttctaaaaacattgggcctatcgggctt

SEQ ID NO: 23662 - DNA, 377 bp, Gossypium hirsutum
  Clone ID: LIB3165-058-P1-K1-H5
cggacgcgtgggctagggtttcggcgccgcagctctgtggcttttccagtcccgtgtgcccttttggttgacttgcaggctaccacggcaccacgcgcgccttcatcatccgtcgtagctctgaccggatccccaaggatccgtttggccttggacggagaggcaactgtcgattaagtcggcgtcgatcgacaggtacaggggtacggggccagctgtggggatatgtggcactcgacgtggggtgtacggaggcgttgaaggcggtcgtacggcgcgaaggctggggctcgcctgcggttgcggcgcaaatgtgaggaggaaaccctagggtttcttttctaaaaacattgggcctatcgggcttgtaatctggg

SEQ ID NO: 23663 - DNA, 603 bp, Gossypium hirsutum
  Clone ID: GOSHI-09MAY01-C135110_1
aatgtagtgaatgtgagagtaagagatgtctcagatgtgtgattgcgcttacccctggtgctcgaacatctttgagacatgagcaccccctctttttctacaaagattaccatgggcgctgtgatgcttgtggtaatcttacattgggagcattttgttgtaaggattgcaattttgtgctacattttggatgtttttcacttccaattacagctcatcacaaatgtgatgagcatcttctttcactcactgctcataatgataacaaatatttagaaagtcattattgcgatatttgtgaagaaagtcgagatacaaatcgttggttttatcattgtgcaatatgcgatacttctgttcatgttaattgtgttcttggaaaatatccattcctcaaacttgggagcatatttgaagaaacagatcatccacacccactcactatcgtgaagaagaagtattactaccttgattgtaataaatgcggtaagccttgtgaagatttatctcttgagtgctcaaagttggagtgtaaatatattgtccacttggattgtgtagtacactacactctacggtgttttttgtggtggcgcatgtaat

SEQ ID NO: 23664 - DNA, 540 bp, Gossypium hirsutum
  Clone ID: GOSHI-09MAY01-C35098_1
cacggcaattagcaggcgatttacattcgagtaacccaaaatttcgcagctggatccgcctccgcctccgaacagttgtcaccggaatcggaaattcagataagtgaagatgaatggagaagtccccaacataaagaaatgggttgttttctatcctgtttatattaattcgaagaaaacagtagctgagggaaggcgaatcagtttggctaaagcctgtgaaaatcccacttgtgttgaaattgctgattgctgcaaccatctcaaagtccctaatgccattgagattgataaggcgtaccctcgtgatttcatgcaaagagggagagtgagggtccagttgaaaaaggaagatgggactttatggaatccagccatttcttcaaggaagcagctgatgctacaagttgcagagttggcacctagacacccgggaaggactatgaagcaggaagcttcatcaacatcaaaagctgctgacagatcttacaagcacacgaagggcggaagaaaaaagcgatagttgcgcaaccttcctaa

SEQ ID NO: 23665 - DNA, 536 bp, Gossypium hirsutum
  Clone ID: LIB3582-019-P1-K1-D2
aactaaccaaactgtcttcctatctctctcttttattcttttttttttcagtaaatgcttcccgtaataatttggaaaagaaagctagggttttggatttgaaagagaaattttccttttaaagatttgatctactttagcttttccttttcttttggtgggatagaagtggtttaaacttaggagggttgaatagcaagccaatgccatttgtttgtaaacttggaattgaagtattaaagattaatttcaatgtctcggattaatttgccatgatgatagctttctctacacttgtcttgctacctatcttggcaaaactcgttatgttattgggagatggccgtcatcttttggggttactgcgttcttttgatcaatttgctagtattgttctagaaggagcttgtgagcgagttattgtgggtgatttgtactgtgacatacccttgggtctaaatgtaatccgtggggagaatgtggtcttaatcggagagatggacatggaaaaagaggagctttcttcacatatgact

SEQ ID NO: 23666 - DNA, 434 bp, Gossypium hirsutum
  unsure (1)..(434): unsure at all n locations
  Clone ID: LIB3145-009-Q1-K1-B12
acccacgcgnncgagagcggtaaactttnntgacttnttttgtgtcttttgtttaggccaaatccaatgcccccggcttttaattggggatttaaaaaagtaccaaaaaatattgattttcaatgtcttgggctggccctgatgatatctttctctccacttctcttgctacttatctagacaagaaactccttgtcttgcttagagatggccggaagcttttgggattactacgttcgtttgatcaatttgctaatgttgttctagaaggagcttgtgagcgagttattgttggcaatttgtactgtgatatccccttgggtctatatgtaatccgcggggagaatgttgtcttaataggagagctggacttgtaaaaggaaaagctttcatctcatatgactgctgtcttggctgctgagattaaaagggca

SEQ ID NO: 23667 - DNA, 338 bp, Gossypium hirsutum
  Clone ID: GOSHI-09MAY01-C35398_1
cgcatctcaagctttacttttaacacgtggaagggcatgggcgatttcccttgcacctagaagcaccatcactgaagaaattttgaaattatgcttttctgctgatattgttggaactgatcaaaatcttctttatcggtcctctactcatggaaaaggcttgaacagattctggtcgaatgtcgaaggtcctcatggtccattacttgctctcatatctgctaattcagaagatgcctatcaggataataacacagcctggaaatggatcataggagcacttacacagcaaggtttctaaaataaagattcattctattgaagctcggagaacctat

SEQ ID NO: 23668 - DNA, 799 bp, Gossypium hirsutum
  Clone ID: GOSHI-09MAY01-C35348_1
taatgaaaaaaattataaaaaaaactctggtgctctgctagggtttaaaccctagcatcctcgcgtcgccgccgcaacgcgccttcgcttcaagcctcagccctccaccggatctccgatttgaacgcggcaaacgtgggcttcatcggcgaagcttagaaggtaaacccctcaccctttttgtattatttttaaaaaaaaacaaaataaaaagaatgaagcatataaagaaccgattcaccttaaaaaaaactttgaactctcagttttacttttcgatttctttgtctctttctctgtttatccccttttacagatttaaaagggccttttataggccgaaaagaaaataaatcgagggaaaaaaaaacaatattgcttgctgtttttttctctttggactccttgagtccgtttttcaggtgttcgtggagagtttggcgcgcgtggaggctccgagacgtgcgcatggaggctgaaacctgcggcggttgggggctgtgggagcggcgcacatgcaaggctgcttagggttttaggttttctttagttgctggactagggaccattatttttggcctgtacttaggtttattatttttttgggccactgtattgggttgttaattgggcctgttttaagtgggtttgcactatgtctttttttgtgtttggacccaggccaattgggccctattacatatatattataaaattaagcattatttgtaatatttatttttaatagtgtttaaatttattattataatttagaatgtaataaattattattttcgtt

SEQ ID NO: 23669 - DNA, 447 bp, Gossypium hirsutum
  Clone ID: LIB3145-013-Q1-K1-E11
cgatttctttgtctctttctctgtttatccccttttacagatttaaaagggccttttataggcccaaaagaatttaaatcgagggaaaaaaaaacaatattgcttgctgtttttttctctttggactccttgagtccgtttttcaggtgttcgcggagagtttggcgcgcgtggaggctccaagacgtgcgcatgtatgctgaaacctgcagcggttgggggctgttggagcggcacacatgcaaggctgcttatggttctaggttttctttaattgctggactaaggaccattatttttggcctgtacttacgtttattattttttttgggccactgtattgggttgtcaattgggccctattacatatatattataaaattaacccatatttggaaaatttatttttaatagtgttaaatttattattattatctagaatgtaat

SEQ ID NO: 23670 - DNA, 644 bp, Gossypium hirsutum
  Clone ID: GOSHI-09MAY01-C35288_1
gcgcttgctagtggttgccctatttggttaagtgaagtgaagaatgtagaggagttacttcagaaggggcagattggttaagagcaactcgaggatcacttgtcgttaatttggatatcaatttggatatgggcgagcatttagatgcaagtgccagtgatggtggggcacaagataatggaattgaatttcctccaatggtgggcagtcaaattggagcttctagtattgcatcgagcagtacaggtcgatcgacatcattcaagttgttagggcttatgagtgggaggagttttgtggcttgcacattaaggaggttggcaagtagttctcggagttaactcggaattgcaacaacaaccaaaaagaaaaagagtgacaatagaaagcactcttggtatgaactgtttacattatttttctgttggtagttctcccttgtttgtgtatttaattcaattctgtgtgctgatgattgccttttgaattcaatcttcatcttcaacattttatagttctcaatttgatctgttggtttgtagttcctttatttagcaagctctgtctatgtcttcattcttctcaaacatatttgtcctatactggaatttaaagaacatctttctgatttattggctaaggtt

SEQ ID NO: 23671 - DNA, 592 bp, Gossypium hirsutum
  Clone ID: GOSHI-09MAY01-C35238_1
caaaatcaaaacaaagaacctaagcttcctatttctctctcactcagtcgaatccaagaaaaacactccaactacgattttgcttccatattcggccgaccgatgctacgccaccataacaacgatctacatgcccgccgttcgactgcttttcagccttagatcccctctatgcttcgatttcgacaaagcaaaaggaatccacggcatttggtaatgtttttcttttattttcaaatgttttaaaattataatgaaaaagaatagaaggaaatagaatcgaaataaaagcatagaacctagaaaagatgaatctaaaatcaccttttaaaaactgactttggattggtcttatattttctttacaatatgcgtgtatttctctgggaaaaccgaccccctttacaattgattatctggctttttatagccgaataaagagaaataagaaaaaataaaaaaataaaagaaaatacaatggccttggattttctgttatgcctttgctgtcaattgctagatatctgctgtgttgtttgctagtccgttttgcaggttcaaaggtcgtggtgttgctgatgcggtggagctg

SEQ ID NO: 23672 - DNA, 1053 bp, Gossypium hirsutum
  Clone ID: GOSHI-09MAY01-C36948_1
gaaaaaactagaaaatgcaggactcttccagaccggtaactggttacccggttcataacgttaacggctgcggtccgccaccccccgccacctccactaccgcctacccttacgttaaccccagcccatacccttactacccagcgcccccacctcaaaatcctcgccccaccttcttccgccgcctcttcgtcgccttcgccttactcttaatcatcttcggcaccatccttctcatcttctggctcgtcctccgccctcacctccccgatttctccatccaatccatctccctttccaacttcaacgcttccaaccagcgcgtgaacggcacgtggaatgcccagttccaggtctccaaccccaacaagaagctctccatctactacggagacatcgtttcgtcggttttccacaaggacgacttcttgactgagacaaggatcgggcagttcgtgcagggcacgcgcgaagtgaactcggtggaggcaagttattcggtggtggattctttcgtggaaggaaaggttgtcacgcgatgaatggggagaggagccgtggcgagctcaagttcaatataaaggtggtcgccgacgttgcgtttcgatacggggggtggagaggacggcgtaggatacttagggtttggtgtgacgacgtggcgcttactggttcctccggaaagatgaccggcggttccaaaaaatgcagtgttgattgatttactgagcagatgagatgaatggcattcatggttaaaaggggaagaatagagaagaaaagaggcaaggaaagaatgaataggctacaaatgggaggaattgtttgagtagtttcgagggatgttaacctgcccccaacaatctctatttatctttcatcctgtgttaaatatgaatgtaaatttgatggttctcttttaggtgttctatttatatataaatataattatagtttcggccaagaagtgatatttatttgagtctagagtgaataaattgctaattttcgatttatgaataaatctagttctcaaaaatatagaggtttatt

SEQ ID NO: 23673 - DNA, 1127 bp, Gossypium hirsutum
  Clone ID: GOSHI-09MAY01-C36868_1
gatataccgaaaaaagctctttcattgaacccttaccctctctcaaaagcagaaaaaacgatagggaaataaataaaaatccaaaaaaccgattaggttcgacgatttgaatcgctccgtctatttccccgtttctagctctacgaatcaatcggaaaaaacctccgatttggccggtgaatggaagcaatcagaaaacaagccactcggcttcgagaacaagtcgctcgccaacaacaggctgtctttaaacagttcggtgctgggggatatggaggttcagataacgtaattactgatgaggtagaactccagcaacatcagaaactcgagaagctttatgtctcaacccgtgctggcaagcattttcaaagggatattgttcgtggcgttgaaggatatatcgtcactgggtccaaacaagttgaaataggaacgaagttgtctgaggatagcaggaaatatggtgctgaaaatacttgtaccagtggcaatacattatcgaaagctgctctagggtatggacgtgctcgtgctcaaatggagaaggaacgcgggaatctgttgaaggctcttggcacacaggttgccgagccactaagagcaatggtaatgggagctcctttggaggatgcacggcatcttgctcaacgttatgacagaatgcgacaggaagctgaagcacaggcaatagaagtttcgaaacgcccggcgggagtaagggaaacatcgggaaatcctgagatcgtcatgaaattggaatctgcagagacaaaactgcaagatctaaagtcaaacatggcaatattgggaaaagaagctgttgcagcaatgaccgcagttgaagctcaacaacagaggttgacacttgagagacttattagtatggttgaagctgaacgtacatatcatcaacgagtccttcagatacttgatcagcttgatgccgagatgagatccgaacgacaacgaattgaagcacctgctcgccaaatcccaactgcaattccctctattactttcttttctccaccactttctcattctactcctttgaagtacccactcttgttttatctgcggcatactggatctggcttaataaggttttagtcgacttgtgtctt

SEQ ID NO: 23674 - DNA, 542 bp, Gossypium hirsutum
  Clone ID: GOSHI-09MAY01-C36818_1
atcactttggtttagtagtaaagtactgaagccatggcagcagggaagttttttgtgctgatagtaatggtcgtattaatggttgagggctcaagggcaatgaccttgtgtcgcatgaatgatcagggacttgaggcgtgcaagccatcggtgacacagccgaacccggtcgacccatcacccgagtgttgcaaggctctgaaaggggctgacttgacatgcttgtgttcttataagaattcggtgtggctaggtactttgtgggattgatcccaaactttgccttggatttgcctccaaagtgcaagctccaaatgcctagtgtttgctaaggtttccagaagagcatgaagctgctttctcatgtttgttggactttcacaagtttctttgtattggtttgatgtgaaaatctttgcaaatcttgtatctgtttcgtgttaaattattatttggttattgaagtttgtacggacaagtgagtggaattggccgccttctgctctttttaatttcattactctttttatgttttggtgttc

SEQ ID NO: 23675 - DNA, 415 bp, Gossypium hirsutum
  Clone ID: LIB3145-033-Q1-K1-A1
acccacgcggacgtcgctttggtttagtattaaagtactgattccatggcatcagggaagttagtagttctgatggggatggtcgcattaatggttgaggactcaatgcctatgacctcttgtgacatgaatgacgagggacttgaggcgtgcaagccatcagtcagacatctgaaccctttcgacccatcgcccgagtgtagcaaggctctgaaaggggctgacttgccctgcctgtgttcttataagaattcaacgtggctacgtagtttggggattgatccaaaacttgcgtttgatttgcctcctatgtgctagctccaaattcacatattatgtcatttataacaaaatgccatttgtgacatatactgaaaccttaatgatatcaactcatttgttgcatcaaattttt

SEQ ID NO: 23676 - DNA, 353 bp, Gossypium hirsutum
  Clone ID: uC-gsronu33B156g08b1
aaagtactgaagccatggcagcagggaagtttgttgttctgatggtaatggtcgcattaatggttgagggctcaagggcaatgaccttgtgtgacatgaatgatgaggggacttgaggcgtgcaagccatcggtgagacagctgaacccggtcgacccatcgcccgagtgttgcaaggctctgaaaggggctgacttgccctgcttgtgttcttataagaattcagtgtggctaggctgtttgtggattgataaaaacattgtgttggtcttgcctctaaagggctagtctcgaatctacataatttgtcttttttagcaaatgatgccctttgtactttaactcttgttcct

SEQ ID NO: 23677 - DNA, 502 bp, Gossypium hirsutum
  Clone ID: GOSHI-09MAY01-C36808_1
tttcatttttctttttttaaaaacataaacagaggggaaaagggagaagtttgtctgctagggttgccaaccctagccttcatggcgccattgactgccatggaaccaccgcgaacggtgctcggatccggttctcaaaaccaggtgcgatgcgcaaggcatggcgctcgtggaggagcggcgcacgtggaggcgcaaattgctcggagggaggcttctggccccgagtcgtgcggcggttggggttgcttggctacgacgctaggagttgtgctgaaggttctagggttttttagtgttgggctggtttgtttattgtttgggtaattgggcttgagttttaattttgttgggcctgtattggtttaggcctgggcaataactgggctctacatgtttataaaataatgagatctattaaatattatttcatttataatattttcaaaagtaccatctataagagtcctccttcttactatttctattttataaacccttt

SEQ ID NO: 23678 - DNA, 1260 bp, Gossypium hirsutum
  Clone ID: GOSHI-09MAY01-C36578_1
gttctgtgtccgcagcacttcggtcatggctctggggtctgttagagaaagggttgtagctcgccttaggcgagatttattcagtcatcttattcatcaggaaatagccttctttgatgttactcgaacaggggaactcctcagcaggctatctgaggacacccagattataaaaaatgcagcaacaactaatctttcagaggcactccggaatctagcaaccgcctctattggtgttgccttcatgttttcttcatcttggaaattaacgttaccggttatttctgttgctatacgaagacttggacgctatctcaaggaactttcacacaaaacacaagcagcagctgcagtagcatcctcaattgctgaggaatcttttggagccattcgaacagttagatcatttgctcaagaaggttttgcaatatcaaattacactgaaaaagttgacgagacactgcagctcggactaaaacaagctaaactagttggtctattctttggaggagtaaatgctgcattcacattttctgttatggccgtagtgttctatggtgcctacttgacaataacaggatctatgactgtgggttctctcacatccttcatcctctatagcctcactgttggatctgcagtctcctctttgtccgggttatattcaactgccatgaaagctgcaggcgcaagtaggggggttttccagctcttaaatcgcgtgtcaagcatgccgaaatccggggacaagtgtccagaaggaaatcccgatggagatgtagaattgaaagatgtgtggtttgcttatccttctcgaccaagtgatatgatactaaagggaataacattgaaactaaaacctggttcgaaagttgcccttcttggaccaagtggtggtggaaaaaccacgattgcaaacttaattgagagattttacgatcctttgaagggagaggttttgttaaatggagttcctttagtggaaatatctcatgaatatcttcataaaagttaatataaaaaataaaaaaaacttcacctcatggatatcacccctaattatggtacataaaacttttgacttctgtttcctgcttggataagtttgggagctcaagaaacaggcaaggtaagtatagtcagccagtattaaagggattcctccatggtcaaaccgacaagcagctctttaagaaaaatgttcttatagttacttatgaagatgtcaagcctacatagataggattgtagtggggagac

SEQ ID NO: 23679 - DNA, 398 bp, Gossypium hirsutum
  Clone ID: GOSHI-09MAY01-C36468_2
cccacgcgtccgcccacgcgtccgggaagaacgggacgtgcagggaagactgtgtgtggctacaacatttttgactctgtcacggcgccgatgtcttcttcgatctcaagcagatgcttgttcaaagtggcagccctgtgcctcatgagctggcaaagcatgaggcttctaaattcaaaccaggaacaattcctgatagacctcctagacgcaatgacactgtttttgctcactgagaagctctgtactatggtattttagtttgccaaattttctttcgttgctgcttacaagtgattgcttttgtacttttatcgcagcatttgaaagtggtatttgctgactttgcctttacttgctgctacaattgctgatcatagcaaaagtaacattttgaa

SEQ ID NO: 23680 - DNA, 941 bp, Gossypium hirsutum
  Clone ID: GOSHI-09MAY01-C36468_1
tttcttatgccatctagtaatttgaaaccgggggaaggaagagaagagcttgatgaaaaaagatatatcggactacttatatgtttagtgctacaatgcctccagctgtggagcgcctagctaggaagtatttgaggaatcctgctgtggtcaccattggtactgctggaaaggctaccgatttaatttctcaacacgtgatgatggtgaaggaatcagagaagtttcctagattgcagaagttgctcgatgagcttggggacaagaccgcaatcgtgtttgtcaataccaagaagaatgctgatgctatttctaagaatctggataaggctggttataaggtaacaactttgcatggtggaaggtcgcaggagcagagggaaattagccttgacggttttagggccaagagattcaatgtccttgtggctacagatgttgcagggcgtgggattgatattcctgatgtggctaacgtcattaactatgatatggcgaatagtattgaaatgtacacacatcatattggaagaacagaacgtgcaggcaaaactggtgtggccacaacatttttgactctccatgacactgatgtcttctttgatcttaagcggatgcttgttcaaagtggcagccctgtccctcctgagctggcaaagcatgaagcttctaagtttaaaccaggaacaattcctgatagacctcctaggcgcaatgacactgtttttgctcactgagagtttttattgacatgtgaaaattcaagcccccaatttgcttagctgtagtatggtattgtagttgccaatatattgatcattgctgctcacaagtaattgcactggcattccaattgtaaaatttggacttggtatttgtcaactttactttatagtgctgcagcagtacttggtaataggaaagatgttgaacttttgtga

SEQ ID NO: 23681 - DNA, 430 bp, Gossypium hirsutum
  Clone ID: GOSHI-09MAY01-C36438_1
agcccagagatttaacgctagcggtattagatatcgcttctctatttccgaactatgatagtagaacgcatccaattcgtgcagttggccaattatcatgagaaatttatacaaacccagttttagaaaattttgatggtagttttcgaggctcggctcagggcatagaaggaagtattaggagtccacatttgatggatatacttaacagtataaccatctatacggatgctcatagaggagaatattattggtcagggcatcaaataatggcttctcctgtagggttttcggggccagaattcacttttccgctatttggaactatgggaaatgcagctccacaacaacgtattgttgctcaactaggtcagggcgtgtttagaacattatccgccactttatatagaagaccttttaatatagggat

SEQ ID NO: 23682 - DNA, 430 bp, Gossypium hirsutum
  Clone ID: LIB3145-027-Q1-K1-F5
gctctagcccgggagagcacacattaaaggtactcgatatcgtttctctattctctttatatactagaataacgtattggaggggaggggtttcacaattaaaacgagaaatttatacaaacccattgttagaaaatattgatggtagtttattaggctagactcagggcatataatgaagtattaatattacacatttgatggatatacttaacagtataaccatctatacggatgcttatagaggataatattattgatcatggcatcaaatactggcttctcctgtagggttttcggcgccagaattcacttcttcgctatatggaactatgtgaaatgcatcttcacaacaacgtattgttgctaaactaggtcagagcgtgtatagaacattatcctcctctttatatagaagaccttttaatat

SEQ ID NO: 23683 - DNA, 611 bp, Gossypium hirsutum
  Clone ID: GOSHI-09MAY01-C36788_1
ttgatatacatggtggagggatggaccttgtgtttcctcaccatgaaaatgaaattgctcaaagttgtgctgcatgtaaacagagcaatgtaagctactggatacacaatggctttgtcactgttgactctgagaaaatgtccaaatcgctaggaaacttcttcacaattagggaggttatggatctttatcatccattggctttgagacttttcttaacgggaaccgcactatcgatctccaatcaactactctgatgtgctacttgaaagtgcttcagaacgtattttctacatttatcagacactacacgattgtgaaaatgttctgagccagcatgacaaagggcttcaggagtccattccgcctgagactttgaatgtcatcaacaagttccataatgacttttcgacttccatgtctgatgatctccatactccagttgttttggcagcattatctgacccattgaaaaccatcaatgatctactacatactcgtaaggggaagaaacaggcaatgcggatagaatcggtggctgctttagaaaagataattaggaatgttctaagtgtgctggggctgatgccaacaagttactctgaggcact

SEQ ID NO: 23684 - DNA, 667 bp, Gossypium hirsutum
  Clone ID: GOSHI-09MAY01-C36718_1
caaaaattctatctgttcttttataattcatcaaaatattgctgttgttaggccccttgtttgtttattactagaagtgtatgattttctttctgggaaacttagttttttgaagtgagtgctttaccatgatttattttgctagttttttgaagtgagtgctttaccatgatttgttttgctatctctaaacaataatgatggtggcagttgtgacactgtgatttgggggtaattgcaatcgctttactgaatttgttatttgctgcattgagtattgtgctttgttggtatttcctttgaaaatatacttgtcaatcagaattataacttgttaagaaccttagcatcatttctctttccagctactgaatcaaatatcaatgccatccctatttccacttacaatttgcacttgtatactttgattgaatcactgttagtctgtaactattgtaattcaatttcggcagtttgtgttgctggaagtttctttgctacaatgctcaaacaaattttaatcaaactcccgcggaagttacaaaaatctgacctattagattcatctggaagtgattctggaaaccatacttctaactcagggaatagagttgaatgtacaaatatcgggaatagtatatcaagtcgtctaagtggtgttaaaccg

SEQ ID NO: 23685 - DNA, 1111 bp, Gossypium hirsutum
  Clone ID: GOSHI-09MAY01-C36138_1
ctgtctctagacggggacaacattattgctgtgtgtagcagcccgatagatgttcctcaaatcaaatatggctgccttgtggacaaagtgactaatacaaccgcttggcattggttaaatgtctcaagccccatttttaaatgttcagagaaggttatgtctctgctttcacatcttcagtttggtatcacgcaaattccagtgaaagatgtttctgattgcttgacaaaaggagctgctaagtcttttgaggcaatatttgtatcttccaaggtaaacaatgcacctgatccgctaatagtggtcctccatggagggcctcattccgtctctttgtcaagcttctcaaagtcattggcatttctttcttcacttggtttcagcctattaattgtaaattatagaggttcactgggatttggcgaggaagcattgcaatctcttcctgggaaaattgggtctcaggatgtcaatgatgtactcacagctatagatcatgtcattgagaaaggacttgtcaacccatctaaaataactgttcttggtggttcacatggtggctttctaactacgcacttgattggtcaggtaccgaataagtttgttgcagctgccgcacggaatcccgtttgtaatctttcatccatggttgccacaacagatattcctgactggtgttacgtggaatcttacggaagcaaaggaaaaactatctttactgaagcaccttcagctgaacacttgactcacttctacagcaagtctcctatattgcatatttctaaggttaaagctccaaccatctttcttctaggtgctcaggatcttcgcgtcccggtttctgggggattgcaatatgcacgggcattaaaggagcgaggagttgagaccaaaatcatcctgtttcctaatgacatccatgcaattgaaaggccgcaatccgacttcgagagctttcttaacattggtgtttggttcaaaaagtattgcaaatgaaaaggtaaaaggttcatgtcgtctagggccaaacatgtttgttattaaggacttaatcatcataataatctctgagatggttaatttgtcccttgctctacatgcaatcatgtaa

SEQ ID NO: 23686 - DNA, 609 bp, Gossypium hirsutum
  Clone ID: GOSHI-09MAY01-C36088_1
gtttcaggatacctgatcacaagtctggctagttggatgtccaatatcttcatcctcatgctgccattgattctaccattggcctgaatccaactcccctattggagctttcagcaacaattggcagcaaggagcttgctttgggtggtgaaattggatttgatacagcttctgcttcttttaccgagtacactgctgggatcaacttgaacaagccagatttctctgttgctcttttgctgactgataaaggtcaggcattgaaggcatcttatatccattctgtcaaccccttcacttgtgttgccgctgaaatggctcatagattttccacctacgaaaacactttcaccattggaagttctcatgctgtggatccttttaccgtggtaaaaacacggttctctgacaatggaaaggttggaatgctgtgccaacgtgaatggaggcccaagtcacttgtaacattttcggcagagtatgattcaaaggccataaatgcatcccctaagatggggcttgcccttgctctcgagccttgacgggaaggtctcattttggattccatatttttaaattttgatttgaccttttccccgaacccttggg

SEQ ID NO: 23687 - DNA, 408 bp, Gossypium hirsutum
  Clone ID: GOSHI-09MAY01-C36018_1
aaaaaaaactgcaatcccgagtggtgtgatgaagtgagtctttcaatcaaagatcttagtgatccaatcgagtgagtaagtaatatatctgattctgcaatttgtatgcatgtatatacatgaatgaatgtgaataccattcaccactactacttgcatggaattccatttgtgttttgcagacggtgtacgacaaagacacgttgggtgcggatgatcctatgggaactgcagagattgacttaaaaccatacttacaagcagcgaggttaaggaaagagttgcaagaactcccaaatggctgtgcactcaagaaagtacagccaagcgggacaaatgacctcgctgatgaaaagccgcattctttgggaaaatggcaggatcacccaagacatgcgtctcatactc

SEQ ID NO: 23688 - DNA, 595 bp, Gossypium hirsutum
  Clone ID: GOSHI-09MAY01-C36348_1
ggagaatagatgtgcttcgaaattggagaagttgatgatgctgtttacatcgaaaacggaacggcaagactgagccaggaatttgacaagttggataattctgaatcagagaatggtgattccttgatgtctctttctcaggttgaccttacatcagttgctgaactgcctgctgcagtaccctctacattccatcctgcagtatccctgcagggttcaccaggagaaagccctgcatcatggaattcatgcatgcatcatccattttcttatccccatgagacttcagatattgacgcttctatggattcccccattgggagccctacatcttggaattctcactcacttgcccaaacagaagtggatgaagctcgaatgaggaagaaatggggaagtgctcagaaaccttttcatgtagctcatgtaacccaaaatcagtcacgcaaggatgtgacaaaagggatcaaaaggttattgaagtttggacggaaaagccgtgggacagacagtttggtggactggatctcagctacgacttctgaaggagatgatgacatagaggatggcagagatcctgccaatcgatcatcag

SEQ ID NO: 23689 - DNA, 641 bp, Gossypium hirsutum
  Clone ID: GOSHI-09MAY01-C37968_1
ccccgcgtccgccccgcgtccgcccacgcgtccggccgaactctttcaggaccctctccaaaaccctcacccgctcattctccaccaaatcatcccaccagaacgcaccaccagaaaacccacaaatatttagatcccaactccttgttgggcagctggaagacccccaacaaccccaaagaggccgagaagaaactcgccctgttgcgacgagactacgccaagcaagtaaaaaatgtacgcaaggagtacatccacgagatggagttgttgcgtcttgagaagctcagaaaagaagaggctaggaaagaggctatacgagttgctaatgaggagcgtaaaaggcttaaggctgaggctgctagggttagagctcaagagcgtatcgttgctgaagaagagtttcgacaaaccctgttgaaagaaagagcagaaaagcttgaaaattggagaatgaaacaaacgctacatgagaataagaagaaagaggcgaaagatctagtgcgtagaagaagttccatgtggattgaagaacaggaattggagagtaagatctttagtgccattgttttttaactgattttcctttaaattcgaagaacataaaataaggattttacgtgaatctagtgactaatggc

SEQ ID NO: 23690 - DNA, 898 bp, Gossypium hirsutum
  Clone ID: GOSHI-09MAY01-C37498_1
tcggacgcgcgcgcttcaatcggggttcctttctccagatttctcgctcctctctctacgatatgtcaaaggtggcgctaacggaaagtctacccataaacggtaccgttttcgacagttccctggtcttcgctttgcaaactatggttgtcgagaccgccattgttgccacaaagtctttcgcttggtcgctcatgatgatgggaactctgcctaatggaattgatgtcttcatcaaagagcctgaggcatatgcagggtttccacttgctcaacttatcgcgatgactaaacctggtcctgagaacaaggatgccagcgacactgatgatgacgacgacgatgaagatgaagcagtggatgatgaagatggaggtgaggaggaagatggatctggcgaagaagatgaagaggaaggtgatccagaggatgaacccgaggccaatggagacggtggcactggagacgaggatgatgatgatgacgacgatgacgacgatgatgagggtgaggaagaggaagaggaggaagaagaggaagaagatgaggaggaagaagaacttcagccaccagctaaaaagcggaaatgagctcgggtcttttttctcgttcttttattttgccttgctgcgttgtgtagtgggaagttatgtctgtctgtctgtctaaattagagtagaggggattgtgacatttcagcagaacagacttgtttccatatttctgcttccattcttctcattcaaggattacaaagaaaaatttccacttagatgtattaaaatataaataaaattaatgtttagtgattatttaaaaaatattttattaactgttgtcaattaccatccttgtactgttgcttcccatcttaaatataaaaaccaataactattcc

SEQ ID NO: 23691 - DNA, 677 bp, Gossypium hirsutum
  Clone ID: GOSHI-09MAY01-C37458_1
cccacgcgtccgagaagagatctcttttctaacacaaggagaagatccatacgatgatggtgttgtccgtaagttgttccactcgaatttgaaattgcttctagttacagagggcccggatggttgccgttattatactcaggaattcagtgggaaagtgaagggcttgaaagtagaagccgtagacaccactggtgccggggatgcttttgttgctggaacattatcgcaactagcttctgatctttccttgattcaggacgaagaccgattgagaaatgctctcaagttttctaacgtttgcggtgcattgaccgtgacagaaagaggtgcaattcccgctttgccgactagagaagctgttgttaatgctctcctcaaaaccgtggcctaagttttcttccccaaacaccgtgattagcccactttcaggcatctattcctatatatgtcttgtggcaactaggactaaatcggaatgatgatagtaatattctatcatcacctctgccttcatcggtggacttaaatgattccttaaattgatgtgtcaaggaacaaaatcaataaaattactcaaatgattggtgatttttgtattcttctttccctagtatgtactatatgtatgatactttcaaattggtttagcgaatggaggaaattccttgattttt

SEQ ID NO: 23692 - DNA, 1052 bp, Gossypium hirsutum
  Clone ID: GOSHI-09MAY01-C37428_1
tttgtagggcttgtggacttcaatgtgctttaaaatgtatgccaagaaggacagatattgctgcgtggcagaaatctatagatagtatgtgctacaataagcttgctgagccagatgtcttacctgccaagtgtgatgatagtcttgaaccagattcagcatggtacactccactccgcccgtgtgttgtggtcccaaagccagaacttaagaagtcagccttagagtcccggctcaaagtggccagagaggttgcaagtcgcacctgagcgcatctcaaatgttcccggtgggagtagcactgctttaaagcatgatgacggcaagtggaaggtccgagccacgcactacaaaaagttactccctgcacttgggaccaatgagataaggaatgttatggacatgaatacagtttatggaggttttgctgcagctgttattgatgatcccctgtggaccatgaatgtggtgtcttcctacgctgccaacacactgcctgtggtctacgatcggggtcttattggaacttttcatgattggtgtgaagcattttcaacatatcctcgaacatatgatctccttcaccttgacggcctcttcacagctgagagccacaggtgtgacatgaagtatgtactgttggagatggaccgaatcctgcgacccaagggttatgcattaatacgggaatcaagctattttattgatgcaatagccagcattgccaagggattgaggtggagctgccgtagagaagacaccgaatatggtgtagccaaggagaagttattagtttgccagaaaaagctctggtattccgctagcggcagttcaagatgacaatatatgtcttgcctggttaagttaaaaagtactatataatataatattattgttcttcaagcctaacgtttgagcttaaaagaatgaaagtgcatactgatacaagcatattcatagaaatcaaagagcctctaaattcatattcgtccattgaagggtagcctcccgccataataggtgattttatagatatatattctttgaaggca

SEQ ID NO: 23693 - DNA, 452 bp, Gossypium hirsutum
  Clone ID: LIB3147-039-Q1-K1-C4
cccacgcgtccgcccacgcgtccgcccacttgttcgcccacgcgtccgcccacgcgtccggttttattgatgcagtagccagcattgccaagggattgaggtggagctgccatagagaagacaccgaatatggtgtagcgaaggagaagttattagtttgccagaaaaagctctggtattccgctagcagcagttcaagatgacaatatatgtcttgcctggctaagttaaaaagtactatataatataatattattgttcttacaagcgtaacgttggagctgaaaagatggaagttgcatacggatacaagcatatccatagaaatcaaagagcctctaaattcatattcgtccattgaagggttagccctcccccaataatagtttgatttatagatatatattctttgtaaggcatctatctattctatacacagattttaaattttt

SEQ ID NO: 23694 - DNA, 544 bp, Gossypium hirsutum
  Clone ID: uC-gsronu33B098a11b1
gctatttactacaaaaagttactccctgcacttgggaggaattagttaaggaatgtggtggatataaatacagtttatggaggttttgctgcagctgttattgatgatcccctgtggaccatgaatgtggtgtcttcctacgctgccaacacactgcctctggtctacgatcggggccttattggaacttatcatgattggtaatttcaaatgcatttacatggcatctgaatcctagtcatgttgttcttttgatgtttctcatgggtgtctaatctgttgcatcttttccaggtgtgaagcattttcaacatatcctcgaacatatgatctccttcaccttgacggcctcttcacagctgagagccacaggtagatattgggtgcatttcccatttgatgttctttgtttgttctgggttgtgaacataattgcatgtttggttttggcaggtgtgacatgaagtatgtgctgttggagatggaccgaattctgcgacccatggggtacgctttattacgggaaacaaggctttttattgat

SEQ ID NO: 23695 - DNA, 399 bp, Gossypium hirsutum
  Clone ID: LIB3145-042-Q1-K1-A7
cccacgcgtccgagctgccgtagagaagacaccgaatatggtgtagccaaggagaagttattagtttgccagaaaaagctctggtattccgctagcggcagttcaagatgacaatatatgttttgcctggttaagttaaaaaggactatataatataatattattgttcttcccaaccgtaaacgtgggacctgaaaaatggagctggattccggtaccagcctatccctagaaatcaaagagcctttaaaatcatattcgtccattggaagggtagccctcccccaataataggtggttttatagaaatatattctttggaagggatttatctattctatacacagatttttaaatttttttttctttaatttttttgggggccttaatttccttcct

SEQ ID NO: 23696 - DNA, 442 bp, Gossypium hirsutum
  Clone ID: GOSHI-09MAY01-C37788_1
cccctcttccgcccacgcgtccgcccacgcgtccgatcgtctccgcccaaaaggaaaaattattttcccctttcaccataaattgaacgttgaactcctcaaaaatcttcaaagcttcaacttttccaaacatcagcgatccctttcactccaaatttcatcgggtgaataatggcgacgtttgagctttaccggaggtcaacgatcgggatgtgtttgacggagactttagacgagatggtttccagcagtactttaagccctgagctcgctattcaggttctcgtccagttcgataagtctatgactgaagccctggaaagtcaagtgaagagcaaggtttccattaagggacatctgcacacctatagattctgtgacaatgtttggaccttcatcttacaagatgctttgtttaagaacgaggatactcaagaaaacg

SEQ ID NO: 23697 - DNA, 1060 bp, Gossypium hirsutum
  Clone ID: GOSHI-09MAY01-C37738_1
cccacgcgtccgcttctcttaatggattcacatctagagggacacttctcatctgaagaggcaactgtggtctttgatcttgcctcacaatgtttgcaatatgaaccaagggagaggccaaataccaaagatcttgtgactacacttgccccattgcaaaataaacctgatgttccatcttatgtgatgttgggaattcccaagcatgaggaggggcctcctactccacagcagccgttgtctccaatgggtgatgcctgttcacggatggatctcacagctatccatcaaattttggtaatgacacattacaaagatgatgaaggaacaaatgagctctcctttcaagagtggactcaacaaatgagagatatgttggaggcaagaaagcggggagatgtagcatttcgtgacaaagagtttaaaactgctgtagattgttattctcagttcatagacgttggaaccatggtttctccaactgtttatgcacgaagaagtctttgttatcttctgtgcgatcaaccagatgctgccctccgagatgcaatgcaagcacaatgtgtgtaccccgactggtcaacagcattttacatgcaggctgtagccttggccaagctagacatgcagaaggatgcagctgacatgttgaatgaagctgcggcactacaagaaaaaaggcaacggggcggcagaggatcttgacacgttggttcaactttgtggccctgtaacgttcttattttttgtatgggtgggggcctaaagagcaatttgtggctgtccttgtggttgttagcaaacatgctgagattaatgtataatggaaattgaaattgtggttttgtgccaaaaaaaaaaaaaaaaaaaaaaaaaaaaaaaaaaaaaaaaaaaaaaaaaaaaaaaaaaaaaaaaaaaaaaaaaaaaaaaaaaaaaaaaaaaaaaaaaaaaaaaaaaaaattttaaaaattttaaaaaaaaaaaaaaaggggggggcccttttaaaggataaaaattttttcccgggggtgtgaaagataaaattttttttttgggggcc

SEQ ID NO: 23698 - DNA, 912 bp, Gossypium hirsutum
  Clone ID: GOSHI-09MAY01-C37618_1
aagttcacagttcctcagagattcttctctcatttctacatgacgggtaccctgtggacaacccttttgctactcaccacatggctatatgcatgcactgctggctcaacctcatcaaccatctttgcattgcacaaatcccacagggtatggcgtgctgtgttcctgctttggttgatggaagctcaagtcttgagacgcctttacgagtcattatatgtattccattatcggcccttagctcgaatgcacatattcggctatttcattggcatgagttactacatagtagcaccattgtcactttgctgcacttgtgccccggaggtgtttgagtttactttggatctggtgtctgaaggaaggaaacaatggcagccgttggaagtgataggtgggaacagattccctttgtggcttaaatggaagcagtgggttggcagtgctatatttctatggggttggattcatcactccgttgtcatgcaattcttggttcaatgcgagcagaagtgaaaagtattttatcccaaagggatgggttgaaatggtttcatctccacactatttggctgagattgtcatttatgtgggcttgttgattgctagcggaggagcagacatcaccatttggttactcctagcatttgtggtcacaaatctggggtttgcagcagctgaaacacagaagtggtatattggtaaatttgaagattacccaaaacatcgatatgccatgattcccttcatcttttaatgttttagggcgggagtaattattcgtcccacattgaatgccaagtggtgtttgagaaccttacaataattgatgggcttgtcacttgtgtaatactacaaccctacttttgcctttcttgccatcatttgatcctattaattatgccagcatgc

SEQ ID NO: 23699 - DNA, 524 bp, Gossypium hirsutum
  Clone ID: GOSHI-09MAY01-C37608_1
agaggttgtaacactaattggaagctgccaggatgcagctagtctgataaatcagagaagaaatacattggggattactagaagactccttagaagaacgtttggagaaggaaggaggtttgtttcagattctgaaaagacagaagcagagaacaaagaaggggatgtagatgacagtaagaaaagatcagttgaaggtggaaagcaaggtgcttcaacgaaaaagttgaaaaaggacaaagctgttaatgcgacagcaaaaagtgctcgccctgaggctaaacccacccctgctgcaccacgagtcaagccagagctcactttgcccgtaatgtctacagaggtagaacagtctatactcgaggacttaagaaaccgtgtacagttgagtagcgttgcattgccatctgtcagcttttatacgttcctcaacacgcataatggtttgaactgttcatcaatatcccaggatggatcttttgttgctggagggttctcagactcatcactgaagtttgggatat

SEQ ID NO: 23700 - DNA, 365 bp, Gossypium hirsutum
  Clone ID: GOSHI-09MAY01-C37138_2
gttatgttgcagtaagatcaaagagcaaaagccttgcctttgccaatatctgaagaaccctaatctcaagaaattcattaataccccaaatgcaaggaaagttgctagcacttgtggtactcccttccctaaatgctaaaagaaaaaactcaagttgtgttgtggtataatatctttgttttggtgtttgtagtgaaaaaaaaactgtggtttagtcatatgttggggggttaaagtgatggggcaccaatgtgtgtcactggtgttttatgtgtgtgtgaaatctatatcatgtactactagttgttgaagaagtaatttatttaatggaaatcagtgttggattattagattaccactaaaaa

SEQ ID NO: 23701 - DNA, 588 bp, Gossypium hirsutum
  Clone ID: GOSHI-09MAY01-C37138_1
aagctatatacacatagagagtgaaaaaacacaagaacaaagggcatcatcatcatgaagaaggcatcctatacggcggcattctcagcggcagcagtggtggtcctcctcctactggccgaagcaaaggtgtcaatggctgtaacatgtagcccaacacagctaagctcatgtgtgagtgccataacatcatcatccccaccatcaaagttatgttgcagtaagatcaaagagcaaaagccttgcctttgccaatatcttaagaaccctaatctcaagaaattcattaataccccaaatgcaaggaaagttgctagcacttgtggtactcccttccctaaatgctaaaagaaaagactcaagttgtgttgtgctataatatctctgttttggtgtttgtagtgaaaaaaaaaactgtatggtttagtctgtgatggaaacaatatgttgggggttaaagtgatatttcaccaatgtgttcactttttttttaatgtgtgtgtgagatctatatcatgtactactagttgttgaagaagtaatttatttaatggaaatcagtgttggatgattagattttttttggtt

SEQ ID NO: 23702 - DNA, 401 bp, Gossypium hirsutum
  Clone ID: GOSHI-09MAY01-C37128_1
tgttaacatactgaatattatttttaagttttgattaataaaatttgcattaccattaggtttttacattgtggctgtgttgctgcttgagttaaaactattgaaagttcggttgaactctgtttacatgagtcttgttcaattcttactcaaaaagaaggaaaaaatgctcaatgaggtagcggtggaggtatcaaattgtcattgttcttgaatgtatggtctcattcgcagagggctttttttgaagaaatcaggattttattaggcttatttaataatggtgtttagatacacactagtgtctggttgtctagctcttactcaaattgtcattgcattgaaactatgctttccttgtttggagaattagaatcttactatgtttctttgctaagtgg

SEQ ID NO: 23703 - DNA, 577 bp, Gossypium hirsutum
  Clone ID: GOSHI-09MAY01-C37098_1
aaatgcaattagactcctactacaagggcctccatgttacttttaccaccttaactcgttctaaaatatattgtgtattaatcacaacttgcaagaaaagaattcggtttgaaacttcattagaagtgtttgttgtaccatggatttgtaaccaaacttaaccctcaccattttagaacaagttgtttacatggattttttgtatgcttttcatttacatctatatttacaataaacagaccttgatgtaaggactcttttctaattatttcttctcatttggtccggagactcaaatctgtctaaggttggtattgattttattggatcttatctcagaataaagcagctatctacagctttagttccttcacaatgagcaattgcaacatgactaggtttcgtgctgttcactgcaaagctatggctccctgctccatgagcagaaggtggagaaatggatgtcaaagaaccctttccaccagcactacacatttctctcgaaacacttcacttactgtccatgccccaacatctatagttcttgctttgaaccttaccacatttgatgcaacct

SEQ ID NO: 23704 - DNA, 933 bp, Gossypium hirsutum
  Clone ID: GOSHI-09MAY01-C37038_1
cccacgcgtccggatgactcaaactattcaggaagctaaaggggagcttacattagaatcaaacattgtgtgctctctttcgatgacatgaaatcgcactgatgactgccttcttaaatcatggacttgaaggaaactatgtacatgttatatgaaactttactatatcaagtcctcagcggttagtgtctgttcagttgttgtctttaagctagtgtcttccttaagcgtctgatacaatgtatataactgtagtttgtagattcacctctaaattgcttaccccaaatccttaggtttcttttcttattctttttcccattatccttctttccttggtctagactttagtgtcctttgtttctaattgtctaacttggattagcccctttgtttctttttacaacctagtctaaattagccatcctagatgttctttctttgtcttgcaactcttttcctctctccagcattgccttcaattggctgcttaacaatcaaatatcctcaaaatactcttttcttttacttgggatttctcttcctcgccatctttttctgtttttttatgaaggaaaaggtaggaagggaaaaaagtaaagtggttatttgtcacctctgaagcttgttaggttaatcagttccatgtccagttgaaagtgttgtttgtgtcttgttcatcctagtgggtaatgccactctgtaacgtttcatagagccatctgtcatggagattgtcgactgtgccaagctacttactaggtagccactgggataagtatttcagaaggctttttgttaaaagtagagatgtgctcgtgttagatgtctttaatgcaagcctttaggaaaccatctgtatccagggactgtctcgggaatgtttgttttcagtgtctgttgtttgttgagtagtttgagcagggtcttatg

SEQ ID NO: 23705 - DNA, 749 bp, Gossypium hirsutum
  Clone ID: GOSHI-09MAY01-C37308_1
aagatatccaaatcttgctatcctgaactgctccctactccgtgtcctttcatcttcaatccggaggttctctccatctcccctctggttctgctatactgtggatcatcgtttcccctcccaggtatgtgtctcccttctcactaacgctgcttttgctagattgtgggcttgaatgttctttgttttatgaataaacttgaaaatagcttcttttaccctgaatttcctgctttgtatgtcataaataatcgctccaagaaccgatttatccatttccatcctttggcatttttgaatgactgttttcaaatccccttctatcgttgcttttgttaaccccatttctattactaacttcatggcgtctaatcctgcgagggcttttgctacgaacggggtgggaatatcctcatgtataactggctttgaggctttttaatctcccatctggtctcaaacgactatacctgaggcagatctagcattcttctatcaaaggctgcgtcaaactgagctatgatgcccttcgtcgccccggtataactgattcccctttgggtataaagaatcggtactcatatcaccatacgccagcaaagaaccggcatgtctatgaccccttcagaaccaggcaagacaaaaaatgctactgctccccttagtttgacgagaacccagcgtcttgtatttctaactaattactcgaagatattccgaatttccaccaattttttactggttgaacc

SEQ ID NO: 23706 - DNA, 566 bp, Gossypium hirsutum
  Clone ID: GOSHI-09MAY01-C37288_1
cggacgcgtgggcggacgcgtgggttgtgtttgttctggcagcaacaaacctcccctgggaattggatgctgccatgctccgtcgtcttgagaagcgaatccttgttcctctcccagagccagaagcaagaaaagcgatgtttgaagagcttctgccccaacagcatggtgaggaggctcttccttatgatacattagtggaaaggtcagaaggttactcaggttcagatgttcgattactctgcaaagaagcagccatgcagcctttgagacgcctaatggctgtccttgagggtagcctggaactagtgcccgacgatgagctgccgaaggttgggccagttacgtctgatgatatagaaactgccttgaggaacaccagaccatcggctcatttacatgctcatcgctacgagaagttcaatgcagactatggcagtcaaatactccgatgatggctgccaccgccaagatacttcttaattttccagattttctagtcttattaatgcctactacttagtactggagtgagtttagactacggaaactagaagattactcat

SEQ ID NO: 23707 - DNA, 392 bp, Gossypium hirsutum
  unsure (1)..(392): unsure at all n locations
  Clone ID: LIB3145-040-Q1-K1-C8
gacataatgaactcaaaaactattttgttgtttgcagagctgccgaatgttgggccagttacgtctaatgatatagaaactgctttgaggaacaccagaccgtcggcacatttacatgctcatcgctacgagaagttcaatacagactatggcagtcaaatactccgatgatggcatgcttctgcaaatatacttttaagttgttagttataacttccccagattttatattcatcagaattctattcagtttttactttgcattgtgtctgtttatggaaacttgtatatctatgttttttttttcaaaaaaaangaaaaattaaaaattattaataattataatttaaaatttttataaattttattttttatatttttttttgggtttt

SEQ ID NO: 23708 - DNA, 258 bp, Gossypium hirsutum
  Clone ID: LIB3148-019-Q1-K1-C6
cgagaagttcaatacagactatggcagtcaaatactccgatgatggcatgctgctgcaaatggacttttaaattgttagttagtaacttccccagattttatattgatcagaattctattcagtttttactttgcattgtccgtttatggaaacttgtatatccatgttttttttttcgaagtgttctcagcaaagtctattaaccatacaagcattgaattgttttgaaatttatataagaattattactaatgtgt

SEQ ID NO: 23709 - DNA, 920 bp, Gossypium hirsutum
  Clone ID: GOSHI-09MAY01-C37258_1
tgcattctggccacacgtgcacagccgcataatagcaagcttattgatctctcaacttctattgatgggcctgctcagtacaaaagaggctgctaattcaactcctctgcttgttatcttaccaatattgacattatccttccataagtattgcaagagccgctttgaacctgcattcagaaagcatccactggaggaagcaatggcaaaggacttattgggtcggacaactgaacctgatataaacttaaaagcattcttagctgacgcttacttgcacccaattttccgatctttcaaggaagacgagttggtagagatcagagttgataaagttagagttgatagacaccaatcttatgccgacaaggcccaaagcagagatgatatcagttcccccccccccacctcatcatgcatatcatccaacctcccctcctcaccatagctatcatcagcccaccacctctccaccccaagatatctatcaccatggcattccgccccagtatgattataacctttatggctatcattatgaagcagagtcatggacttcaagggactaaaatgcttagaaagaatcttaaccaatttgtccaatctcataacttaccaccagggactagtaggcattgatgatgagtcctttcctttcctgtaattattattattatttagattaagtacatatggttctatcagtttgaaggcatttttattagaaattatgttgaagttccagcatgctaaatctggtgtctgcaaaagaagtgagagatgttccgagtttcgatctgtttgaagatttgaacttccctttgttactcggttgtaatttttgatactttggttcaatgattttctttcctcctttatttggaaattattgatttgtcaatgtaaaatgactttaacat

SEQ ID NO: 23710 - DNA, 639 bp, Gossypium hirsutum
  Clone ID: GOSHI-09MAY01-C37208_1
ttttggaaaccccttctttcttttatatatatatttatcttctccattaatccatctccgttggattcaggagaatcttttgtacgccataatcgaagctctatctctcgagtcttcaatcatgagtttcttcaaaagctaattcacgttattcttatttcattcatttatttttcttctttgaatccgctctctgaggagagaaaagagaggggagggaaatgacatcggggttctccgggggtggcacagagttttacggtagaatagcaggcggatccgtctctaacagtggcaccatgagcaacaaccaacccactgcaccgtacgggacacatggaatcttcatggaccctaagtctcaaatcgtgaacagggccgcacccggtttcgtcgggaagcgaacacgagctgacttcaataaccacggcctcaatgatctttatccccgtccagttaagcccagaaattaccagcacgcttatccgatttctcccttatcgcctatagatttctcgtgcaacatattaccggacgttacatgtaatttctcgccttcttcttccatgtcgcagcgatacggggtgccggttttacagcagctgaggcggcagcaacttcctctcggtatcagctccg

SEQ ID NO: 23711 - DNA, 409 bp, Gossypium hirsutum
  Clone ID: GOSHI-09MAY01-C37238_1
cattagcatatggtttggttggagtccaagtctcggagagtgaggaggatgaggtgatccatcatgctgatagcctcggatatgaatatgtactggtaaatgatgacgagatctttcaacttttgatgcactagttagatttaattcccaaggggccagggtgaggctcagttcacatcttacagaaagccatgaagccgatggaaaggggctttccaatcctcttaatcgccagtggaatagccaggtcatgtggttattctcattcattttttgtaatatatgggtttgggtactgctgccttggtagattactaggtttcttgctatgtaccatcacacatgcatatatatgtgtttgatgctttgaatcacttaataatctatcttggtaccgttgctccaatat

SEQ ID NO: 23712 - DNA, 474 bp, Gossypium hirsutum
  Clone ID: GOSHI-09MAY01-C30938_2
cccacgcgtccgctcaatcatctttttccttttttaacataatatataagtctccttgcttcagcttaaatttccagccatgaatcacaaccagcaacacttcaatcaatcatcagcaggtcggttctcttcttcaatctttcctttcttatatagcttacatgaaaaacccagaaatattaatgtggtttagtacttgtttaatgatcaaacagctgcatacccaccaccaccaccctccacggcgccaggaccctacgtgactgcaccgccggccggttacccgatgagcaaagacgagtacagtcagcaaaatccggctgctgtcgaaaccaagtccagaggtgatggattctggaaaggatggtaagtactacctaatacctatacatacatacatacatacatatatacccaatgaaatcttctctttcttgtatatattatatatttactgatgaaatcgcatcgttc

SEQ ID NO: 23713 - DNA, 442 bp, Gossypium hirsutum
  Clone ID: GOSHI-09MAY01-C30938_1
cccacgcgtccgcccacgcgtccgctttactcaatcatctccttcctttcggaacataatatacaagtctccttgtttcagcttaaatttccagccatgaatcacaaccagcaacacttcaatcaatcatcagcagctgcatacccaccaccaccaccctccacggcgccaggaccctacgtgactgcaccgccggccggttacccgatgagcaaagacgagtacagtcagcaaaatccggctgctgtcgaaaccaagtccagaggtgatggattctggaaaggatgttgtgctgccctttgctgttgttgccttctggatgcatgcttttgaagcttttatttttgttctttccattgggggtcatatattcggttccattgttggattgaaattatgggtttctttttattgatttttacagattcagatttgattgtat

SEQ ID NO: 23714 - DNA, 446 bp, Gossypium hirsutum
  Clone ID: GOSHI-09MAY01-C30858_1
tcgtccacgcgttcgtccacgcgttcgtccacgcgttcgcattattgtaacaaaagctagagccttgaaggtgacggaagaggttgaaaggctagtgtccgtgagccggccggtgaggatgcattggaccggttgccccaacacgtgtggtcaagtccaagtggcggatataggtttcatggggtgcatggcaagggatgagaatgggaaaccatgtgaaggggcagacatattcttgggagggagaattgggagtgactcgcatttaggagagctttataagaagggtgtcccttgtaagaacttggtaccctgtagttgctgacattttgggggaacactttggagctgtccctaggcaaagggaagaagcggaagattgattcaaaatcaacttcatttgattacattacttctatatttgtttattgatttatttttctaat

SEQ ID NO: 23715 - DNA, 734 bp, Gossypium hirsutum
  Clone ID: GOSHI-09MAY01-C30878_1
cggacgcgtgggcttttctctggccgcaaacaagcctctggcttcaagttccctatacatctggaaattgaataagagtataggtggggtgtaaacgaagcaatgaatcgcggtcaatacccacaattcatgatgctgctcagtattctaatactggtcctactgtcttagtttgcgtcttgtcttttgaactggatttgccgacttgaactgcgttgttgatggtttccaaaacccgagcctgcaaatccagtcaaaagttaaaaccgggctgagatttacgagtctgatatatattgggaggtattatgtgttaaaactaattcaggtgagcttcttctttttctgggatatgtatatgtatatgtataatgagtgtgggtgtgtgaaaatctttgctatagtggatatttgtacagcctttattgaagttgaacattatactgcaaacaggacttgtaataattaatgagcttgcaagatgtgagcatgatagcgtatttgaagagtttagctagagttctttcctagtgctatatataatctgaatatttattatagtgcttttatatataatagttggattttttgtgcaaacatataaccagacctaaatgaatttaaccaaaatctaatttgatatcatatctactcctacatggagtttggaattgatcaaatctatttggctggtcgaaaacaacaaccatggcacctttcatattatggatccc

SEQ ID NO: 23716 - DNA, 606 bp, Gossypium hirsutum
  unsure (1)..(606): unsure at all n locations
  Clone ID: uC-gsflmaxxa047b05b1
gtgtttttgttaattactctctcaaggtgaagcctgctttagcacaacaactacagctgcggtaaaattgatgtcaaactggaacatattctgctcctggtatacgtgagcatcgatttgtggatgccatgaaggacagttatatggtatggatgatattttcaatggttactcttggtctatataagaatagctttttattgattcataccaacaaccagtttgaacttgttgacccttggcttcattgcagctaaatatgcagagatgtgtttcctccccatgacaaaaatctttgctatagtggatatttgtacagcctttaatgaagttgaatattatcctgctaacaggacttgtaataattagctgatgagcttgcaagatgtgagcatgatattgtcaattttagagtttagctagagttctttcctagtgctatatataatctgaatatttattagtaatgaaagtgctttttatatataatgagtttgtatttttgtgcaatgcactacctgagtgtgttttattgaattnnnttattaaaaatangttaaaaattacaacttacatcatatactattataaattattataaattaa

SEQ ID NO: 23717 - DNA, 987 bp, Gossypium hirsutum
  Clone ID: GOSHI-09MAY01-C30838_1
tttaatttttattttgcatacaagcattgggcgtatttagctctttcttctcccctttaatctatatttcttttcagttctttggggtggtacattcaagaaaaaaaaaccagtgaaaaattaaaaaaaaaaagtggttatttgttattagatggaaatttttcagacaattattgtaattacaacatctctgatgctgctgagttcggtcgtttcttcagacaacaccatcaccacttcaaacacgacatcgaagtaccagatcgagtgcaccatgtgttcatcatgtgaaaatccatgtcagcaaactccatcgccgccaccaccatctccaccgccgcctaaaccatcttcaccaccacctacagttcctaaccccaaccactgcccaccccctccttctccacccacctgcagcggtggtggaaactactactactctccaccaccaccttctcaatccagcggcggaaataactactacgctccaccaccacccggtggtgtcattggtggcatgtactaccctccacctacatacaaaaactacccaacgccaccaccacccaaccctatcgtcccttacttccctttttactaccatacgccgccaccaccgtcggaggcgagaagcttatcatcaacagcccattggctttctatttttatttccatgttgggttttttcctttctttcttttaatattaaaaaaataagtaattaaaggagaaaagatggtgaaaataaatgtagaagatttgcagatctgaagaagccattgcagggatgaaaaaaaaaggaactgagaaatttctgaagatgtatgaagtaataatatttttctcttccttttttctaatatttattttcttcttatgatgtagattttatcctttaatttttgtttttatgatcatttttgtatctatttttgttccatatgaatggttaattacaaactaattaagaaaggtaagttcattttc

SEQ ID NO: 23718 - DNA, 501 bp, Gossypium hirsutum
  Clone ID: GOSHI-09MAY01-C30548_1
gtccgcacttcccttccctttctcgttgttcactcaaaagaaaagaactctcactttcttttttcaaccatcaaattctcatttctcaccaatttttttctcatccgaaatggagtgccagtaaacattaaacgcagaactcgaaaatctatcaccatgcggcagtggaaaaaggagtacaagcagccattcaagttcacccgagttcgagttctggatggtccgaaacccgccttttcccgaacccgacctcatctctgccgatgaactattcgttaatggcgttctccgtcctctccatctcttacccaacaaacaacccgaagagaacccacaaatagactcaaatcaacccgcatcacaacctcctatacccgaccctgaccctattataacatcggatccggttcctgtattgtcagcttcgaaacggtggagagatatctttaagaaagaaaaaggaaaaaacggtaaacaaagtaaaaaagacaaggataaaga

SEQ ID NO: 23719 - DNA, 540 bp, Gossypium hirsutum
  Clone ID: GOSHI-09MAY01-C30568_1
cccacgcgtccgccacgcgtgcgaagatcagcaacctcaagctttagcagttggtttctctttctcctcaattcaagaactaataaagtatggcaaccatttcagctacctcatcaatcaccattgcagcttctctttcatacaagccatcatcactcaagctcacctccccaattgccattgggttgccaacaatggcgaagaaagggaaagtgatgtgttctatgaaggaggaggaggaaaagaatagctctagcgttggcatgagtgctgcatcgctgttagctgcagcagtcatgtcaagctcaccggctatggctctggtggatgagagaatgtccaccgaaggaactggacttccctttgggttgagcaacaaccttcttgggtggatcttgtttggtgtattcggcgtgatatgggctctttactttgtttacacttcatccctcgaagaagatgaggagtctggattgtccctctaaacccataaaagtgtaacttcactcaagctcaccaccccaattgccattgggttgc

SEQ ID NO: 23720 - DNA, 648 bp, Gossypium hirsutum
  Clone ID: AI055711.1
cctaggttcgttgtgaaacttaagtttaattctgtttctttctaactcttcttatgatttattaactttgacagctacagggttcttgtaggttcttaaattaggagttgaaatgttaccatgttttcgtttcgtagtttcttatttatatatgttcattcttctttaattatttgcggatgtatggtgctttatttcattgccagccttgctctgaattgtatttatagcctggaaccatatctagtttcatggttttttggcatattttaatgtgattctatttgttgtttttttgtttgcctagttgaatgcacgttgaagagggatgtcatgttttccatatatatatattctagcttattatattctcttcttttccctgctaatttccttaatagatcccgacatatttgtcattcttcacgcgctgaaacgcgtccactcaggagcttcaaatatgcttcccatcttgattgaatcctctcttcatctccaggttctgcatattaaatgcctgcattatcatctcatgctggaaattttgcactgctggtcatggataacgctttttattgaaggccccttcttatctagtccccactagggatcccattagatctacatggttcatctatcttccattcg

SEQ ID NO: 23721 - DNA, 653 bp, Gossypium hirsutum
  unsure (1)..(653): unsure at all n locations
  Clone ID: AI054553.1
cttaaattaggagttgaaatgttaccatgttttcgtttcgtagtttctgatttatatatgttcattcttctttaattatttgtggatgtatggtgctttaattcattgccagccttgctctgaattgtacttatagcctggaaccatatctagtttcatggttttttggcatattttaatgtgattctatttcttgtttttttgtttgcctagttgaatgcaggttgaagagggatgtcatgttttccatatatatattctagtttattttatcctcttcttgtccctgtttaatttcctaaagatcctgaagtatatgttgattntgcagggcttgaaagtgtccaattagggaagtttaaatatgctttttgcatattgaatgaatctnctcttttccatttctaggttntgtgaatntaaatgcctgacttattttcaatcattctcatgcaggtaattttgtcattgcttgcgatggatagcggaaccaatgtgaaggtgccatcttatgcttgnttcctactagggatntcccatangttgcaagtggntcaaccatactgagtagacatgtatcattgtgactcagacgcnacaggtagactatgctactgcgatngtagatgctgntgagcttgctgtgagactgc

SEQ ID NO: 23722 - DNA, 470 bp, Gossypium hirsutum
  Clone ID: GOSHI-09MAY01-C30158_1
cccacgcgtccggcaaaacataaggcaatggccactactacagccacctgttttcacttacaaaacataccatcatcaccatgggtgaacaacaccagcagaataacaacatacaaagccatggatggatcattaagagcttcaaacccccgaacccaaacattcattaaacccgtgaaatgtagtagtagtagtagtagcggaaatgagataggcatagccgatttcatcggtggagatctattaaaattcgatttagggcaatggctatcggatgtagaacaacacaaagcccttgctatttacacccctcacgaaggtggctacgagggtcgttactttacacggcttcgacaccagggttactatttcctcgaccttactgctcgtggccttggtgatcccgaaactacactcactaagatccatcctgtttgccctcctcatgttgggaaggcaaccaataagca

SEQ ID NO: 23723 - DNA, 687 bp, Gossypium hirsutum
  Clone ID: GOSHI-09MAY01-C30138_1
acgctcacccatttccttctgcgtagaccacggttgaacgctgttgctgctggttgatctcttgacaaagagacaattttagtacaattaatgtgcctagtacgatgatgtctggtccacttagcatgagcataggcttatcttcagctctgaacatcactgaagaagcaactactgtcactaagaagcaaggcatagtatctattcttggatcggatactgatcagagaccaaccaaagggtcttcacttagaagaactttatcagctgatatgtcttccaagaaatggctcactcaactgagccatattgcatcttccgatgaactccctgtttccattgcagactcatcctcagaggaagcagaagaagaggattatcaagaaaagaaggcactcgaaaagcctgcccagttcgatatatggacctcaatcatttcaagcaaacctcaagacgactccaaatcgctccccccgccttacattcaccctcttgtaaaaagatcggggagctgtttaagcgagaaaagcctcgaaatatgcactgagagccttggttccgagactggctccgatgggttttcttcctatcctccgacggaaaccggtgacgtggaggaagatcgtaaagaggaaggtcaacgactccgacagcaaaaactcgcttctacgatgataaaatgatcag

SEQ ID NO: 23724 - DNA, 618 bp, Gossypium hirsutum
  Clone ID: GOSHI-09MAY01-C130300_1
cgactggtgtagatatttcattatctgaattgcaagcatggaatcgtacaattaaagcaggacaagatcagagacactgcactctggaagtgaaactgccatggattgttagatatcgcttggctattctggtttactctgttttagctttgttgcttcttgctttggtaggaataatttgtgcggtgacattagcctgccgggtgtgcctcaaaaaatgcaagactgattgagtttgatatggagttcagtatggagatcctcgggaactaattacaaaatgtagtatctgacacacgagttagtgctatgttaaagctaaagatgtaatagcaatcaaactttgttgattctcacatcttcctgagataccttcattgtggcctttttttcttccattttgaagttgtgttctttgaaaaagaatattttctgaaatgtttctttttcttagaatggcagacacaagacttgttggatttctccaactgtcaaatgaagaatgtctttattttacctttagagagcttgttgtctccaatttggagaggattcggaaaagatgaaaaatttacgggcttcagatttgaattgagacctaaaaaaaaaaaaaaaaaa

SEQ ID NO: 23725 - DNA, 1126 bp, Gossypium hirsutum
  Clone ID: GOSHI-09MAY01-C30258_1
ctcttctcttcttttctcttctcactctctaattttgtgagtgacaatggaagctggacttccaatgcttaactgtctcttgcagcacacgccccacgcgtccgtacggagcttgtgttcatattcagattcttcttcttcttcttcttcttcttcatcaaagtgggtttatgcagtgttttggaggatactgcctcgaaattatccaccaccaaagtgggattatggagggagtgcacttgatcgttccaaaggaaacaaaagaaactggattcttgtatgggaagatgggttttgtgatttccatgaatgtgagcgtgctggaagtggttatgtaaagggaaggtttggagctgatattttcttcaaaatgtcacatgaagtttataactatggagaaggattagtagggaaaattgcagcagataacagtcacaaatgggtgcataaagaaatcccaaatgaaaatgatccaggcttcatctcctcctggaatatgtctattgaacctcagccaaaggcatggacatcacagttcaattcaggcattcagacaattgccatcatttctgtcagagaagggatcattcaacttggttcattggacaagatggtggaagatcttaatctggtgatcagcatacagaggaaattcagctatctccagagtatacctggtgtattcgccattcaaagaccatacttgccgattcaacatccgtacgcccttaaaccaaataaccagatgcctgaacaccatgaaacaacaaccatctgtcatgatgacaaacgccagtttggcggaacaaaaagattgatcgaagaaagacccgaggattctccaatcaagtccatcaacttaggttggaacagcccacaaaatggcattataggaccacccttttggtcaattccaccccttcttcctactgtgtcttgcagtcttggagctttgttatccaagctgccttctgtcatcccatcttatagcgttagcgaacctcctgaaataaacatcatcaaccagaccaacaaatacaacccaaagaggaaaggccgataatggaggttcgttcggtgaagttcccattgctgagaccaaattagaagcttcaaatcaattgga

SEQ ID NO: 23726 - DNA, 564 bp, Gossypium hirsutum
  Clone ID: GOSHI-09MAY01-C30208_1
gcagttattgctctgcgggcaagctgttccaaatgtatttgatgggaggatggatttaggtggtggcatgtttttgaagggtatatttacaagtgtggaggttggattcctcacccttctggaatcccttaatttctgtaaggttggtcaaaatctaaaatgcccaaaatggccgatatgggttgttggaagtgagtcccattatactgtcctgtttgctctggatacagctgttcaagatgagaatgaattggaagaaagagaatcacagatccggaaagcttttgatgcccaagatcagagtggaggtggtgggtttattagcgtggaagctttccatcaagtgctgagggagacaagtatccgacttccatctgagaaacttgatagcctctgcaactcaggcttcatagtatggagtgagttctggcaggttattttggatttagacaagaacttgggaggtcttaaggattcaactggacagatgggtagaaagatatttgatctttaccattttaatgggattgcaaaatcagatttgaatggcagccaagcaacagc

SEQ ID NO: 23727 - DNA, 546 bp, Gossypium hirsutum
  Clone ID: GOSHI-09MAY01-C31918_1
tttttatctttccctgaaaaatttcctttccttttcaagaaagaaaagaaaaatctttagttccaaaacggcccagacgccaaacattagccatttgaatcaatggaaccaatggagttacagttttgtaatggcggaaacggttcgtcactgggcgaccccttgaactgggccgcgtcagctcagtcaatgaaaggtagccatctggatgaagtgaagcgcatggttgaggagtacaagaagccggtggttcgtcttggtggtgagacgttaacgatagctcaagtcacggccattgcgaaccgcgacgtccccgttcacgttgagctctccgaggcggctcggccggccgttaaggccagcagtgattgggttatggaaggaatgaatcgaggtacggacagttatggtgtcaccactggctttggtgcaacatctcatcggagaaccaaacaaggcggtgccctccaaaggagcttataaggttcttgatgctgagttttcgggcaagcaccgagcatgccattctttgcccacactgaacga

SEQ ID NO: 23728 - DNA, 445 bp, Gossypium hirsutum
  Clone ID: GOSHI-09MAY01-C31938_1
cccacgcgtccgtccacgcgtccgtttctcttttttgagtctccccatcgttcaaaaaagatgtgcaaaggtttagaacaaggagggaacagaagcagttcttggctgaaacagggtttttcatcagggttggtgaattgtgagctctgtaattccagggcttccttatattgccaagccgatgatccatatctgtgtaggaagtgtgacaaatgggttcaccaagctaatttcttacctctcaggcttttcacgggtttcctttgcagtccatgtcaaaccttaacccagagatatcttatcggagcttcacatgaagtgatgctaccaacaatggtgacctcttctgaaacaagccactgttactctgacatggaaacccacctttcaacaacgctgaaaacaccttttctttttctctgactctaaaacttttctcttcttc

SEQ ID NO: 23729 - DNA, 1016 bp, Gossypium hirsutum
  Clone ID: GOSHI-09MAY01-C31928_2
tttcatgcgtccggaagcctttagggctagaaaaacgtgctgttataaaattaatagacaactgttgggaccgaagaatactatttaccctattccattatccatgtgcattagggcttcaagatgatgctttacccccactgttcaatgaataggcataagtgcctgcaaaacttcctccatgcttctatatttatgttaccggatcatataaactctacggtctccattccccaggaccaaagagaatgcattgtatcttgcactcaattcctgtatctgctattcaagaaggtggcactgcttcaacaccatcagctttcccccaatccttagatgaacaacctttctcccttgcatagttcacccgcgcggccgccgattgtagacatcatctcgcccagcatccaagccacaccagtattctccccaggctcacgagaaccattagcccttaaaaacaaggctcctagatggcatgaacagttacagtgctggtgccttaacttcaaggggcgtgtgacggtggcctctgttaagaatttccagctggtcgcagctgttgagccatcacataatgtatcacctgaagagcaagagaaggtagtcttacagtttggtaaaatcggcaaagacatcttcacaatggattatcgataccctctatctgcttttcaagcctttgcaatcagcctaagctgctttgacaccaaacctgcttgtgaatgatcaccacaggttggggatctgcatcattgatgttgccatagattatcaagtacccctctttcaatgccatcgcaatctacaaagtagctttacgcgagctggcatatggatgccagtatctcggtaggagataaatatctttctcctctaaattgcttcctgtattttagtactgtatttatggttgtaatggaagcttttcttgtttggtctttactggctggctgatgtaagttgtctggtgcatggcttttctgatcatgcaatctgacttgtatattgttggt

SEQ ID NO: 23730 - DNA, 1296 bp, Gossypium hirsutum
  Clone ID: GOSHI-09MAY01-C31928_1
tttattcgtccggatttttctagggcgagcaatacgtatgttggtaaactaaggtcaaattttttgggtaccaagttcactgtatatgacagtcaatcctcatgtgactcatggatccaatctactgctcgaccgagacgtagattccactctaagcaggtgtctccaagattacctgcatgcaactatatcattggtacagttacttatgagctcaatgttctgcggacacgaggaccaaggagaatgcattgcatcttgcactcaattcctgtatctgctattcaagaaggtggcactgctccaacaccatcagctctcccccaatccttagatgaacaactttctcccttgcatagatcaaaaggaaaggagccgattgtagacatcatctcgccaagcatccaagccacaccagtattctccccatgctcacgagaaccattagcccttaaaaacaaggctcctagatggcatgaacagttacagtgctggtgccttaacttcaaggggcgtgtgacggtggcctctgttaagaatttccagcttgtagcagctgttgagccagaacataatgtatcacctgaagatcaggagaaggtaatcttacagtttgggaaaattggtatggacatcttcaccatggattatcaataccctctttctgcgttccaagcctttgcaatctgtctaagcagctttgacaccaaaccggcttgtgaatgatgccaccggaaggagatccattgatgtgccatggattagtgccatcgttcctcgttttcattttgcaagccattgtaagtctcaacctaccagagcagctttatgcctaaccggcaaaccggctggcatgtaaatggtagcaggttgtagatgggagatgcacatctttctcagatcgaatgcttcctgtattccaattcctagtgtttgtattcggatggaagcgtttcttgtaaggactttgctcggctgatttctaccttttcagtgcgtcatgtaatctgacttgtatgttgtttggtcatcttaattagaatcaaaactgaattaacagcaaattgcctattaaaaaaaaaaaaaaaaaaaaaaaaaaaaaaaaaaaaaaaaaaaaattaaaaaaaaaaaaaaaaaaaaaaaaaaaaaaaaaaaaaaaaaatatttttttaaaaaaaaaaggggaaaaaaaaacgggtttttaaaaaaatataattttttaaaaaaggggcggcccccttttaaagaaacacaatttttcccccccgcggttgggaaaaaaattttttttttttt

SEQ ID NO: 23731 - DNA, 418 bp, Gossypium hirsutum
  Clone ID: LIB3120-034-Q1-K1-F10
cccacgcgtccggtagacaccatctccccaagcatccgagccacaccagtgttctccccaggctcacgagaaccattagcccttaaaaacaaggctcctagatggcatgaacagttacagtgctggtgccttaacttcaaggggcgtgtgacggtggcctctgttaagaatttccagctggtcgcagctgttgagccatcacataatgtatcacctgaagagcaagagaaggttgggaatctgcatcattgatgttgccatagattatcaagtacccctctttcaatgccatcgcaatctacaaagtagctttacgcgagctggcatatggatgccagtatctcggtaggagataaatatctttctcctctagattgcttcctgaatttagtactgtatttatggttgtaatggaagc

SEQ ID NO: 23732 - DNA, 540 bp, Gossypium hirsutum
  Clone ID: GOSHI-09MAY01-C31878_1
tgggaggtttagggcagtatcctatcggagaaatcggacggttcgatgcagaacagttcgctcctaggtttcctggtaatggtgtttccctcacactcggtcttccgcactgggaaaacctttccttatctggatcccatcagaacttgctcccaaaccaaacaatgcaaatggggagaaggctagacattgatgaaccaaatgagtttggtgccataaaccctcccacacctcactcttcggctgcgtatgagagcatcaaccttcagaacagaaaaaggtttgtagcccaattattaccggacttcgtcgcctgaagaacgtgattcgaaccagacaaacatatatatctttcactattttcatttctatccattagggaacaagggaaatgcatggtatagtgtaaagaagaaatttctcctagtataggctttatactttgcatagcgcaatttgagtccttcaaacatttcaggatctcgccatatatattttaaaggattgtatattaattttataagttttggggattggttt

SEQ ID NO: 23733 - DNA, 617 bp, Gossypium hirsutum
  Clone ID: LIB3543-061-Q6-K6-A3
ccccgcgtccgccccgcgtccgccccgcgtccgcttttaactttttaatagagagatggcagccttttccgcaacgcattgccgttcatattcatactctcattcttcatcgataaatggaggccaaaatcaacgcttttctttctcttctttttcgagattgtctgttccagctaaagctataagaaattcccatcaaactgttgttctcatgcaagatggtgtagtggccacaaaagtgacccctgtggaaaaagaaacacctaaggagaaattgaaagatgagttgttgtcagttacatctacaaaggaatgggatgagaaagcaggctttgatagcaacgaaaatgagtcaactgtcagtatcacagtggtcggagcttctggggaccttgccaaaaagaagatatttcctgcactttttgcactttattatgaagattgtcttcctaagcactttactatctatggttatgcgaggagtaagatgaccgatgcagaactaaggaatatggtaagcaagacccttacctgcagaattgataaaagggagaactgcagtgaaaaaatggatcaatttcttaaaagagtttttaccactctggccagtatgattc

SEQ ID NO: 23734 - DNA, 405 bp, Gossypium hirsutum
  Clone ID: LIB3120-021-Q1-K1-G8
gtcgttttggttttccttgattcaacagaggaaagagcttttaactttttaatagagagatggcagccttttccgcaacgcattgccgttcatattcatactctcattcttcatcgataaatggaggccaaaatcaacgcttttctttctcttctttttcgagattgtctgttccagctaaagctataagaaattcccatcaaactgttgttctcatgcaagatgggaatacaagcaaagatattggagaaaagaattttcaattatggaaaatctttattctgtttggaattgggaaaaatccttgactatcaatttgcttaatacaaatacatggttgatatataaacatatttataatttatgaatggcttttgatgcataggtgtagtggccacaaaagtg

SEQ ID NO: 23735 - DNA, 423 bp, Gossypium hirsutum
  Clone ID: GOSHI-09MAY01-C31438_1
cttttggaggaaaaaaaagaaaagtgcgctaccccattctacaagccaaatatgagcttcaccatggtaaaaccatggattcactggagttatcttcaacctaccaaattcggcaactacccatcttcaagcagcaccaggcttttcaacaatggctgccagcagattgatgaaggcaacaagagtaaaagaaggggagcttttgttaaagtgaatgctctaccagactggcctctaatggcagttttagttcatcatgttcaacaacttgatgcccaaagagaaattataaccaataaatctatttggcatcttagtgatgaagccattaaaaaaggttatgctttctacattatgttcacttgctggggatgtttggtttttgggtccaccaaggatccatactatgattctgaagtatac

SEQ ID NO: 23736 - DNA, 302 bp, Gossypium hirsutum
  Clone ID: GOSHI-09MAY01-C31778_1
aaaccttccatcacccaagaaaagttctcacctcacttgcacaatggccgcggcaaccatggccctctcttccccatcctttgccggaaaggctgtcaagttctctccttccactcctgaaatccagggcattgggcgtgtttccatgaggaaaactgccaccaaccctgctgcctctggaagcccatggtccggccctgacagagttttgtacttgggtccactctccggtgagcctccatcctacttgaccggagagttccctggtgactacggttgggacactgctggactttcagctg

SEQ ID NO: 23737 - DNA, 490 bp, Gossypium hirsutum
  Clone ID: GOSHI-09MAY01-C31608_1
cagtaacatatgcacagctcaagcattactagcaaacatggctgctatgtagcctccgcccccgggtccggagggcttaaaggccattgcacaacgtgttcatggtcttgctggggtatttgctttgggactgaagaaacttggcaccgtggaagtccagggccttcccttctttgatactgtaaaggttacatgtgctgatgcccattcaattgctgatgctggttacaggagtgagataaatcttcgggttcttgatgccaaaacaattactgtttcgtttgatgaaacaactactttggaagatgtggacaagcttttcgaagtattttctggtggcaaaccagtctcattcactgctgcatctcttgcatcccaggttgagactgcaattccttctggactagaacgacagagcccatatcttacacactcgatatttaacatgtattacacagaacacgagttgttttgatacatccacaggtta

SEQ ID NO: 23738 - DNA, 596 bp, Gossypium hirsutum
  Clone ID: GOSHI-09MAY01-C31048_2
acctcgtcagtgtggcaaggaagacagaatcatcacttcaaagaataagacaaggtgcacaaagacgggctggggcaagctcagatgtctcggatcataatgtgtctgatactgacaaaatttgcatgcaattgtttcttgatattcaggagtatgggcggaaccttgctgtcttgggagtggaagctgctgatattgatgcataccgatccttatggcagtgcgttgcacctgctgataggcaggatgagatcaagttttaaaatcagtatcgcattgcatctggttctttcacatggaaacttcttcaagcttcagaatatattcttcagcaacaagagttcaattttattcacgggcgagaccaaaagtcgtagtagcttaattccattaaaagaagaagttacagtatttcaagagaaatggagaaattgcagagcacttgcaccttcattgcccctaatttcctgtctatgttgatttctttattatttttcttgataacagaatatttactgccaagcgttaaaattggtatcccatttaagtatatgaaaattttgattctttttccttgaaaaaaaaaaaaaaaaaaa

SEQ ID NO: 23739 - DNA, 795 bp, Gossypium hirsutum
  Clone ID: GOSHI-09MAY01-C31048_1
gttattcatgacataaattgtctgggcaaggaaatttctggtgcttacctggatcatgtacttagagttctatcttcatgttccactgaagtccttgaccttgtaaagcagagcattttgcactgtggaaaatcattggatgatttgttacccttagttatcaacacaattaaagaggctttagttcagaagtctgttgaggacttgagacagttgaaaggaataactgcaacttacaggatgacaaacaaacctcttcctgtcaggcattcgccttatgtagctggggtattgcgcccattgaagactttcttggatggtgaacaagctacaaagtatttgaccaacgatgcgaggaatagtctactgctaggtgctgcaacagacataactattcgctattatgaattagctgctgacctcgtcagtgtggcaaggaagacagagtcatcacttcaaagaataagacaaggcgcacaaagacgagctggggcaagctcagatgtcttggatcataatgtgtctgatactgacaaaatttgcatgccattgttttcttgatattcaggagttatgggcggaaccttgctgtcttgggagtggaagctgctgttattgatgcataccgatctttatggcattgcgttgcacctgctgaatagcaggatgagatcaagttttaaatcagtatcgcattgcatctggttctttcacatgtaaactgttttcccctatctttaacttgatcttatggtgattttctttcccctcctttttgttattaaaaaaattaac

SEQ ID NO: 23740 - DNA, 1011 bp, Gossypium hirsutum
  Clone ID: GOSHI-09MAY01-C31078_1
acttgaacttttcagtgttcttaagttatttgtatacctggaaagctcaagccttctcctatggaggtttcaacttgtgttgataatgtttgtgctcatgatgcttgtcgacccgccataagtttcgctgtggagttgatgtatgcatcatccatatttcaaatactggagcttgttccactttttcagcggcggcttcttaactttgttgagaaggctctcctagaggatatcatcccaatcctcgtggttgctttccactgtcaatgcagtcaactagtttctcaatgtgttgatagagtagcaaggtcggatcttgatagcatctgtatcgagaaagagcttccttatgaagttacggagagtattcggttgcttcgccgcaagtctccctctgatggtgaaggcaatgaggcagtggttgatcctttgcgagagaaaagaattcggagaatacataaagcattggattctgatgatgtcgaacttgttaaattacttttaactgagtctgacataactttggatgatgctactgcactccattatgctgcagcatattgtgaccccaaagttgtctctgaggttcttggccggcgtctggctgatgtcaatctgcggaattctcgtggttacacacttcttcacatagctgcaatgcgaaaagaaccatcggtgataatggcacttctagcaaaaggggcatctgcttcaacactgacattggatggacaaagtgctgttaacatctgccggaggttgacaagaccaaaggattatcatgccaagacggagcaagggaaggaaacgaataaagaccggatatgcattgatattttagagagggaaatgaggagaaatccaatggctggagatgtttctggtgcttcccatgcattgtctgatgatctgcatatgagacttctgtacctagagaatcgagtggcattggcaaggttacttttccctagtgaagcaaaacttgccattgacatagcacatgccgaaaca

SEQ ID NO: 23741 - DNA, 607 bp, Gossypium hirsutum
  Clone ID: GOSHI-09MAY01-C31008_2
atttaaagaaacttcgcttcgttacggcagctcccgtctcaacgcgcctcccttaccattccacgcgccacctttcttcggtttcattttccttctctttcattttccttctatcttaaatgaaatgagaaagatctgaaggagattggaagttggtgattgagatttgaggtttctgaggagggtgacttattttggtaattttaatgaaggatgaacaacgtctggtgctaagaagaagatgggaggagtaacgtcttcgattgccgcgaaatttgcgttcttcccgccaaatccgccgtcatacagagtgctagaggacgagttatgcgctggtcagctttacataccagaggtaccgaggagggacggtgtcgacgtcttgaagctacgcacgcgccgcgggaacgacatcgtcgccgtccatataaaacaccccaaggcttccgctactctcttgtattctcatggaaatgccgctgatttaggacaaatgtttgagcttttcgtcgagttgtgtaatcgcttgcgggttaatcttatggggtatgattattctggctatggacaatcaactggaaagccaacagagtgtaatacatatgca

SEQ ID NO: 23742 - DNA, 733 bp, Gossypium hirsutum
  Clone ID: GOSHI-09MAY01-C31008_1
aaaaagcccaagattagaagcccctagtaacaatttcgttttgttacgacggctgctctcattccacgcaccacctctgccctttttaaaagaaagaatctgaaaaagaagatccgatggtggatattagctgaggtttcgaagcgactgagttgttttagttttggtaattttaatgaaagaggaacatcagcttatgctaagaagaagatgggtggagtcacgtcgtctatcgcctcgaaattcgcttttttcccgccaaatcccccctcctacacagtagtagaggacgacgcgtgtgacggtcggctgtatatacccgaggggccgaggagggatgacgtcgacgtcttgaagctacgcacccgccgtggtaacgatatcgtggctgtccatataaagcaccccaaggcttccgctactctcttgtattctcatggaaatgccgctgatttgggacaaatgtttgagcttttcgtcgagttgtgtaatcgccttcgagttaatattatggggtatgattactctggctatggacaatcaactggaaagccaactgagtgtaatacatatgcagacatagatgcagcatatacatgccttaaggaacggtatggagttaaagatgaagatttgatattatatggtcagtcagttggtagtggacctactgttgatcttgcttcacgtttgccaaacttgagaggtgtggttctacatagcccaattttgt

SEQ ID NO: 23743 - DNA, 1286 bp, Gossypium hirsutum
  Clone ID: GOSHI-09MAY01-C31028_1
gacggtcgatttgtttaaccccagcaactcgttgaaatggcgtccaagttgtgtgactcatgcaaatcagcgacggccactctgttctgccgtcctgactcggcttttctttgccccaactgcgactccaaaatccatgccgccaacaagctagcctcccgtcacgctcgggtcttggtctgtgaagtttgcgaacaagcaccggctcacgtcacctgcaaggctgacgcagccgctctttgcgtcacttgtgaccgtgacatccactccgctaaccctctcgctcgccggcacgagcgggttcctttggctcccttttacgattccgtcaagcccaacacagcgtttaacttcctggacgaccgttacttatccgacgttgatggagacgctgacagcagcagggaagaagcggaggcagcgtcgtggttgcttcctaaccctaaccacaaagcacatgaaagcccggacgtgaacacagggcagtacgtgtttcccgagatggatccgtacctagatctggattacggtcatgtggatccgaaaatggaaaccccggaccaggaccagaacagttctggaactgatggagtggtccctgtccaaagcaacatccgtccaagctccgatgatcaacgatcactgtttcgacatggagttcactacaccaaaagccttcccttatggctacaactacaactgtaactacaaccctcactgtcttagtcacagtgtatcatcttcttctctggatgttggggtagttccagatggcggtagtacgattacggatgtatcagtcccgtgcgcgaaagtgacggagacgacttatcagactgtgcaactctcgttggcggagagagaagcgagggtgctgaggtacagagagaagagaaagaacagaaaattcgagaaaacgatacgttacgcttctaggaaagcttacgcggaggtgcggccgaggattaaaggaagatttgcaaagcgcagtgacgttgaagtcgaagtcgacggcggtaacatgtatggatttggcgtcgttccgtcgttttgaaattaactaaggtagccatgtagtaatattctacgttaaattttggaattgtaattttccaagtgtttttttttcttcttttctttcttttttacttcattgctcacttaattaataggtaaagaagatgaaggtagtgtgatttgtataatccaaataactatggaatcttgaccattgattttgtacaagtctcatttttatgttattaatactctgttaatatttgtat

SEQ ID NO: 23744 - DNA, 392 bp, Gossypium hirsutum
  Clone ID: LIB3120-015-Q1-K1-C8
cggacgcgtgggcggacgcgtgggcggagcgtgggcgatgatcaacgaggactgtttcgagagggagttcactacaccaaaagccttcccttatggctacaactacaactgtaactacaaccctcactgtcttagtcacagcgtatcatcttcttctctggatgttggggtagttccagatggcggtagtacgattacggatgtatcagtcccgtgcgcgaaagtgacggagacgacttatcagactgtgcaactctcgttggcggagagaaaagcgagggtgctgaagtacagagagaagagaaagaacaaaaaattcgagaaaacgatacgttacgcttctaagaaagcttacgcggaagtgcggccgaggattaaaagaagatttgcaa

SEQ ID NO: 23745 - DNA, 263 bp, Gossypium hirsutum
  unsure (1)..(263): unsure at all n locations
  Clone ID: LIB3493-036-P1-M1-G3
gatggagtggtccctgtccaaagcaacaccgggcaaggtccnatgatcaacgagcactgtttcgacatggagttcactacaccaaaagccttcccttatggctacaactacaactgtaactacaaccctcactgtcttagtcacagtgtaagcaaaagagcagctacttcatacttcttccataattaaagttcgaacccttcactatcttactgtttttgcaggtatcatcttcttctctggatgttggggtagttccagat

SEQ ID NO: 23746 - DNA, 673 bp, Gossypium hirsutum
  Clone ID: GOSHI-09MAY01-C31368_1
cccacgcgtccgatgagaggccaatatagagggaaagaagaggcatgaagaacacaatccggtgctgcatctcttgcattctgccctgtggagcactcgatgtgattcgaatagtacactccaatggccgcgttgaagaaatcagtggctccatcaaagccagcgacatcatgaaggcttaccctaaacacgttctaaagaagccttcctcttcttccgatgatgggatggtcccaaaaatcgtcatcgtcccacccgacgccgaacttcaacgtggcaagatttatttcctaataccactcccttcaacacccgataaaacccgttccaaaacttcctcaacaaccaagaagaaaaaaagagacaggcttgacaccaccaacaacaacaacggccgcggcgccagcagcaacggccgcacccgccagcataatcacagccgaagcatgagcaacgccaacaagaacaacaacacaatttcaatgtcgaatcttttgatatcggatcagtatttaagtgagatactttcagagaaactatcaacgcaaagggatcgaagaagaggccgagttggggtgtggagaccacacttagagagcatctccgaatctccaaacgatggatgatcatcatccacgtcactctgttatattactactactactattttcta

SEQ ID NO: 23747 - DNA, 436 bp, Gossypium hirsutum
  Clone ID: GOSHI-09MAY01-C31258_1
aactctccctattcccttcctttctccgcaccactctttgcattacattcccatcttgtgagcgttattttctccagaaactaaatttcttctctcaaatttcccacatttttgttattctgttcttttttttctctaacgcttaaaccttgcgtgacgactcactagtcgcaaatctatcagtatattgggtcagtcccaagcaacaaacactgaccactccctcttgaccgctaatccccccgccatacccccggttcatcacttttaacggagcatcatgaacccagggggtgttgccaccacaaatggtggctccggaagcggctcagtcggtgttcggatccaacaatcccgaagtctaccggatttcctccaaagcgttaatctcaagtacgtcaaattgggttaccactatctaatttccaatctttta

SEQ ID NO: 23748 - DNA, 659 bp, Gossypium hirsutum
  Clone ID: GOSHI-09MAY01-C31218_1
ctccgatttgcttacttaaaaagaatgtaacgctccagatcaattcccaaccatcttctttatcttcgctcacccttccttcctcactttctccacttctctctaattcattatcttccatctctgaaagacccttccatttgcctgccatggccggtctcctcaagacgctgccgggggggtccactcctcttcctcctctatctccatccctaagacccatttccttgaactctccaaggcccttttatgtctgcttcaaactaagacttcctcgtacacccggtgccctccggttcagctcctctccttctcttcggttcgtaaagttggttccttttgcttctaatggtggtgaaactgaaaccgctgagacccaagaagaagttgaagaacctcaaattgaggactcttcagatggtgctgtcagtgttgaagaggacaccactggagatgagagtaatgattttgaggatgcaccgtctccaactatcgtgtcattgctccaaacatacaaaggagctttggccagtaatgacgagtcaaaagttgccgacatagaagcgtttttaaatttcattgaagatgagaaagttgatcttgaaaagaaaatggctttctttgtcagaagaatttgtcaattgaagaaggatcggggt

SEQ ID NO: 23749 - DNA, 412 bp, Gossypium hirsutum
  Clone ID: LIB3120-018-Q1-K1-A5
attcatcatcttccatctcgaaagacccttccatttgcctgctatggccgttctcctcaaggcgctgtccgttaaatccacttctctttcttctttattttcattcctaaaaaccattttcttgaacttttcaagggccttttatgtctgcttcaaacaaagactttcttgtacacccggggcccttcggttcaacccctcttcttctcttcgggtcgtaaaggtgggtccttttgcttctaatggtggtgaaactgaaaccgctgagacccaagaagaagttgaagaacctcaaattgaggactcttcacatggtgctgtcaatgttgaagaggacaccactggagatgagagtgacgattttgaggacacaccatctccaactatcgtgtcattgctccaaacatacaaa

SEQ ID NO: 23750 - DNA, 642 bp, Gossypium hirsutum
  Clone ID: GOSHI-09MAY01-C132990_1
caagtttatcggctttcagaactgaaagatgctactcatggatttaaagaattcagtgagctcggacgagggagcttcggtttcgtatacaaagctgttcttcctgatggaaggcaagtagcagtcaagcgagctaatgctgctacgataattcataccaacagccgggattttgaagcagagttagaaatactatgcaatgtaaagcataccaatattgtgaacttattaggctattgtgctgaaatgggggaaaggttactcgtatatgaatatatgcctcacggtacacttcatgaccaccttcacggcgacctctcgccgttaggttgggacctccggttgaagattgcatttcaggcttcgagaggacttgagtatcttcataatgaagtcagtcctcccatcattcatagagatgtgaagacttcaaatatacttttggactccgaatggggtgcaaggatagccgatttccgcatagtaagtgccactacagacaatgatttaagtgggaacatggaggatgatgtttacaatttcggaatcgttctactggagatattaagtggaagaaaagcttatgatagagactgcacacctccagggattgttgagtgggcattacctcttataaggcgc

SEQ ID NO: 23751 - DNA, 338 bp, Gossypium hirsutum
  Clone ID: GOSHI-09MAY01-C32978_1
cccacgcgtccgattttcttcaatccctgtctttatatgttatgacctcttcacaaccacctggcatgcaccacctctttccctctatctcatccaccttcaatccattagtttgcttgtattttcacctgttcgatggaaccaacatagcctaagtcccgaaacctcgaccagttcatgaacgaagtcgccccgcctcggtttatctcggtttccaagcgtccattgacgacaatgttggccaccatagccgaggaagaaaaagatttcaacgacaatgaggtcgttaaaggacgacgaacatattcgtcgtcagtgtgtggcaaagctgctatatg

SEQ ID NO: 23752 - DNA, 785 bp, Gossypium hirsutum
  Clone ID: GOSHI-09MAY01-C132950_1
ctagcttggaacaaggaatacaggaatatcctcgctagtgcaagtgctgacaaacaagttaagatttgggatgttgctgctggaaaatgcaacataacaatggaacatcatgaaggcaaggttcaagcagttgcatggaatcatcatgtgccacaagttcttcttagtggatcgtttgattgttcagttgtgatgaaagatggaagagtgcccactcattccggttttaagtggtcggtgactgctgaggttgaatgtttggcatgggatccgcacactgagtactcgtttgtggtgagtcttgaagatggtacaatcagaggatatgatattcgagctgccaagtctgatccttcttccgagtcaaaaccaagtttcacactccacgctcacgacaaagctgcttgcaccctttcatataatccggcagcaccaaatcttcttgcaactggttccatggataaaatggtaaaactttgggatttgtcaaacaatcaaccttcatgtgtggcgtccaagaatcctaaagctggagctgtcttctccatttccttctcacaagataatcccttttgtctggctattggaggctcaatgggaaaactaggagtttgggatacattaaccgagataaccgtgtccggaaagttcgggaactacagccaacagccgaacagaccgaaagcttaactcgaaaggtgaaagtttgtattgtttctttgagagttggtatttataacgaagatgagtttgattttcctagttttgagatcatgtgtatattt

SEQ ID NO: 23753 - DNA, 649 bp, Gossypium hirsutum
  Clone ID: GOSHI-09MAY01-C132930_1
gctttctttgcttcaagttttgtacttacactttttggttatcttttttagctacttgggtttgttttttcatcgattttggcttttcctgcagatcccattttcttgtatatattgtattggttttgtctctgacaaatgagaaagtttgtgcaatatttacctcttctaaactcctaaagtttgtgcaatatttacctcttctaaactcctataaaatgttactctgatttgggtatagtttggaggaccgatcctccctatttatagctgctatatcagtttgaactttggactcaaatttgcttgtaggaggatccgtagtgggaactgtatacgagcaatgaaagggcaaacaacagaaactgggtttttcaggggagctggaattggtgctgttgcaggtgcgatcacagccgttcaattgctggaatcattggctgatggggagtcattgtctaaggtcaccattcgcattaatttcatcctcactaatagttaaacattcaagtggaaaagtttctattttaattaaccctttgttgtaatataaaaataaaaaaataataaagtataaatttccttatttaatttgctgtcttatacgtggccttattggttagcttactaatgggatagttttcattgc

SEQ ID NO: 23754 - DNA, 591 bp, Gossypium hirsutum
  Clone ID: GOSHI-09MAY01-C132570_1
ggtaatccgatcggagtccgatacggagagcgatacagacgccgagaccatgaagtgcatatcgtgcaaggaagagtacggatcacgcgatgccggcacttgcaaggagtgctacgaggaagcaagcgagaccgaggaagagttgaagcgagagatcgaagatctcaaagccaaagtcgccttcttacgcttttggtctccgcttgatcacgcccaccgtggctccaccaccactcccggtcccttcttctccgatgtcgttttgatcgcttccgatgatgggtctcctgggtttccccctgtgcccgtacccgccaataaagccgttttggtgaatcgatcacccgtattcaaagcaatgctggagaatgaaatggaagaaagcagaagtggaacaatcaaagtaagtgatgtatcatacgatgctcttcgtgcctttgtaaactatttgtacactgcagaggcatgcttggatgaacaattggcttgtgatcttctggtcttagctgaaaaataccaagtgaagcatctcaaagggtattgtgagaagttcttggtatcgaattgaactgggataattcacttatgagg

SEQ ID NO: 23755 - DNA, 432 bp, Gossypium hirsutum
  Clone ID: GOSHI-09MAY01-C32448_1
tcgcccactcgtccgaaatctttcattattcctaaatattccaaacttctctcgaagagagtacccaagcggataggcaaaccagtttctcgattccagcaactaaattttcccagaaagtgagcaacaattacaacaggcaagtagttagcagcctaaacgatctttgagggggaactggaaaaggtttttaagtacccagaaagggaggagggaagcaattatgccatcaggttctaagaagagaaaagctgctaagaaaaataaggaacaagcagccaaaaatgaaaattcatcaactaataacaatccacatggaaatgatgacagtaaaagccaagatgaaggggacacttatggtggtgatgttggctaccctgcatcccaggatgaccataatcaccaccatcggttcaatcaccgtgaagaaga

SEQ ID NO: 23756 - DNA, 362 bp, Gossypium hirsutum
  Clone ID: GOSHI-09MAY01-C32768_1
gtcttcctttacttcacaaacaaacagtactatttctttcaaaactttgcttaatattttgggttcttttgcaatatgtgccgttcttaccaagatttagagcctgattgccaatacaaagaaggagaagctcatgaccttatcgagtttcatgtcaaacattttagataggaccagctgaaagttcacttcggcagcaacaacgtcctaaccgtttccggcgaacggcccctggaaggaagtaaatggacccgattccgcagggaattcaccattcccaaagactgcaaagcgaacgaaatccgtgcgaggttcagttccggttttctttatataccattcccaaagaaaatcgttttttc

SEQ ID NO: 23757 - DNA, 549 bp, Gossypium hirsutum
  Clone ID: GOSHI-09MAY01-C32688_1
tcccaatggcatcctttgtgggttagccatgaatgtgtagaagaagcagtatattgataaagaaaagatatttttttccaaaatcaacagagcgattgggttgaaaaaataaaggatttcgaaccgtcttcttatcctataacgaacataaatcaattagatggcaaacgataggatagagactccgttgatgaatccgcctgtctccgaggtatctattctcttctcactataataccttgataagactgtatcgcactatgtatcattgactaaccgaatagatcccctatctttggttcaaatcgaatttgaaatggaggaatgccaagtatatgtagaactaaatagatcccgccgacacgatttcctatacccacttatttttcgggagtatatttatgcacttgctcatgagcatggtttaaataaatcgatgattctttttgaaaatcagggttatggtaataaattcagttcactaattgtgaaacgtttaattcttcgaatggatcaacagaatcgttcgattagttctgctaatgattc

SEQ ID NO: 23758 - DNA, 1177 bp, Gossypium hirsutum
  Clone ID: GOSHI-09MAY01-C132690_1
gcttggatgagcttgaattgtatgaaaaccccatagcaatagccacatttgctgctatagagaagaacattttcgtttctacatctgcaggaaatgaaggcccagatttagagaccctacataatggaaccccttgggttttaactgtggctgccggtacaatggatcgatccttcggcgcaagtttaacccccgcgtccgctggttatgtcagaggagctgctctttatcctgggaatttttcttcaatccaatacccaattgttttcatggacaaatgtgatgagaccaaagagttgaagaaacttgtgggaatgattattgtttgccaagatccaggcaaggaagattccctcaatgaccaatttagcagcattcaagtggcggggaatgtacctggtgttttcataacaaatagtaccctcttggatatattcactcaaagccctttaccagccattttcctggaacaaaaaggtggcgatattgtcgtcgattacattaagaccaataaaaacccaaaagccagcattgagtttaaaacaacatttctgggttccaaaccctcacccactgtaactagttatacatctagaggaccatcctatagtgctccatcggtcctcaagcctgatattatggcccctggtgactcaatcctagctgcttggccgctaaatatcggagtggctcgtttgaatgacgatatgttgtttagtagcttcaatttactttcgggaacatccatggcatgcccccatgtagcaggaattgcagcactcctgaaaggggcacatccggattggagccccacagcgatccgatcagccttgatgactacgtcggatcccatcgataacgccggcaatcctatcgaggatatcggtactaatctccaaccggccactccactacaatgggagctggccatatcaatcccaacaaagcgcttgaccccgggatcgtatacgatgctacagtccaagattacatcgactttctttgcggtctaaactttacaccacaacaaataaaaaccatcacaggatcatcttcaaacaagtgttccaacccttctttagatctcaattacccttcttttatagcgtatttcaatgacaggaatgtgaaaccggattccaacactgtgaaggaatttcaaagaacggtgactatt

SEQ ID NO: 23759 - DNA, 657 bp, Gossypium hirsutum
  Clone ID: GOSHI-09MAY01-C32658_1
ttaaatattgtcaatatcaaaactgtgtgaacctaaacattatgcaacacacactccctcagggaaagatgttacaagcaccgagcataattgagagaggtaaggaacaaattgacgctctattccaccatggtaaaaaaccacaccatcacaaagggacacatggcacgagcgatcatatcgccgacgaacaccgcttgctgatgatgttaaaggccctaacgtgtttgaaagagtgaaagaagaagtggaggccattgttggagcaattcatcccaagaaagaatctaaaggaccgtgagtcaccttcatcgatgcaaggtgggtttagaattctgattcgaggatcatatcgaataatttaggtttataatctcaggatgatgtgtaatttgctcattcaactatgaaagcattctagaatttgattcttgtgtttgacatgtagcgttgcctttgtctgatttcctttacatctgtccctctgctttatgtttggaattctctatcttaatgttgctcgattgctctttgacagagtccattgaatacaaacgcgtctattatctaaaaaaaaaaaatcaaacaaccggccggtgttttacaaactagggacatgaaaaactcttgcttaccccaaacatattctctttcata

SEQ ID NO: 23760 - DNA, 413 bp, Gossypium hirsutum
  Clone ID: uC-gsflnu33B022d06b1
cacgcgtccggttggagcaattcatcccaagaaagaatctaaaggaccgtgagtcaccttcatcgatgcaaggtgggtttagaattctgattcgaggatcatatcgaataatttaggtttataatctcagtatgatgtttaatttgctcattcaactatgaaagcattctagaatttgattcttgtgtttgacaagtagcttgtctttgtctgattttctttacatctgtccctctgctttatgtttggaattctttatcttaatgttgctcgattgttctttgacagagtccattgaatacaaagcgtctattatctaaaaaaaaaaaaaaaaaataaataaaaattaaaattaaaaattatattataatatattaaaacatacataaaaaatattaattcaaaattaatat

SEQ ID NO: 23761 - DNA, 737 bp, Gossypium hirsutum
  Clone ID: GOSHI-09MAY01-C32148_1
cccacgcgtccgctctcctccctctcctatcctttgagcataaaaaagttatacacaaaaatggagcgaggaaaagagcagggaatggtggtgatgcctcagcaaaaccctttggaacagttgcaagctaagttcaaggaagtggagaccagtttcagaggatggctagccaagcagtccttgcccatcgaggcggctgttgtaaccaccaccagcgctgctcagggtgctgctatcggtgctttcatgggtaccctcaccaacgatgtctcctcctctcttccaactccccctcaggcttccctcgatcctcaagccatggcttctctcaagcaagcccaggctctatcaggaggccccttgatacaagctcggaattttgctgttatgacgggtgtgaatgcaggcatatcttgtgttatgaaaagattgagaggaaaggaggatgtccaatctagcatggtggcggctttcggttctggggcaatgttttctttagtgagtggtatgggtggccaaaatcaaattgcaaatgcagcaacatctggtctttttttcgcccttgttcaaggtggccttttccagctaggtcaaaagttttctcaaccacctgccgaggatatatactactccaaagcaagatccatgtgaagtagtcttggcttgcagaactacgagaaaaacttcaagaaaggcttgttaacggacaacacattgcctttgctcactgatagtgc

SEQ ID NO: 23762 - DNA, 387 bp, Gossypium hirsutum
  Clone ID: LIB3120-028-Q1-K1-F8
cccacgcgtccgctactccctgtgctatcctttgagcatcacaaagttatacacagaaatggagcgaggaatagagcagggaatggtggtgatgcctcagcaaaaccctttggatcagttgcaagctaagttcaaggaagtggagaccaggttcagaggatggctagccaagctgtccttgcccatcgaggcggctgttgtaaccaccaccagcgctgctcagggtgctgctatcggtgctttcatgggtaccctcaccaacgatgtctcctcctctctttcaactacgccttgatacaagctcggaatactgctgttatgacgggcgtgaatgcaggcatatcttgagttatgaaaagattgagaggacaggatgacgtccaatct

SEQ ID NO: 23763 - DNA, 517 bp, Gossypium hirsutum
  Clone ID: GOSHI-09MAY01-C32178_1
gaagactctgaactcaaacaatgggaaagggttgggcagtgaaggtgatgatgatgagtttggtggtggtggttggtgcgggtgatgagagtgggttagccaaagagtgcagcaaagatttacagagcgtgatgacttgtttgagctttgcgcaagggaagatggagaaaccttcaaaggagtgttgcagttcggtttcgagtataaaagaagaagaaccaaagtgtttgtgttatattcttcagcagacccaggcatccggggctcagaatcttaagagcttaggcgttcagcaagataagcttcttcaacttccttctgcttgccagttgaagaacgctagcgtcactgactgcccaaagcttcttggattagcaccaaactcaccagacgcggctatatttacaaattcttcctcaacaccgacgacgccatccaccgggacaccgtcaagtgcttcagagaatgctgataataactccggtggtacaaagctagaaactgctcacttggttgg

SEQ ID NO: 23764 - DNA, 623 bp, Gossypium hirsutum
  Clone ID: GOSHI-09MAY01-C132310_1
ataaaccctaaatatagttttaacaaagaaaaaagactaaacattgtaagactcaaaccagaggagggcagggcagaaaagggggtcctcgatcaccatggctactggtttgagtactaggaatggcaatattggcatgaccctccccaccgccgccgccagcaaactcaacaatccattactatccaaagaatgcagcaactgcagtggccattctcccttctttatccaccaagttcgccacttaggcatcctacgccgcctttgcactgcctgtgtcctccgcctccacccttcctcgttctgccctgcttgctttaccttctacggcggctccccaccccatccttccaaacgtgtcaactgctccaattgctgctccctcacccattctcactgcgcaggcgacaccgttctcacctcttacctctgcccaccttgtaaggactcttctttctctttctttcctctcaaggacaacaagatcgacaagaagctcgctcacgctttgctctgcgctgccaagattgcctccttttccatggggaaggccgttaccgtaccatgggccgaggctgacagaaggtaagggaagcggcgcttgcaaaataacgggcaaggga

SEQ ID NO: 23765 - DNA, 350 bp, Gossypium hirsutum
  Clone ID: LIB3120-031-Q1-K1-G1
cggacgcgtgggcggacgcgtggggttagaatcatagctgatattgatccttcaaaagatttttggtgtgtttgtaaggacaattaaaggagcattgatagaagctgaacttaaggtttctgcattgaataattactatgactagaataggaaagaggtaaagattggatctgtatctgatttggcctacaaaggatggatagttcatttccttactagttacaacatttaataattcaagcaactcgtatgtatctttgcttgagaaacaaaacaatgtaactaattaatgccaattccgttcatttctctatggtatgtaggttaaaattaccagcaacatgattgaa

SEQ ID NO: 23766 - DNA, 340 bp, Gossypium hirsutum
  unsure (1)..(340): unsure at all n locations
  Clone ID: LIB3147-032-Q1-K1-G2
cggaattnnccgggctcgaccccacgccccgtccgggaccgaattaaagggagctatnntgatagaagtctgtaactttaaggggtttctggcatnntgaataattacgtgatgactgagaanntaggaaagaaaggtaaagaatnntggatnnctgtatctngnnatttggccccctacaaaaggatgganntagttcaaatttccttactttagttaccaacannntttaatanannttcaagccaacntnncgtatgtatttctttngnncttgagaaannacaaaacannnatgtaactannattaatggccaatnnntccgttcaatttcttctt

SEQ ID NO: 23767 - DNA, 661 bp, Gossypium hirsutum
  Clone ID: GOSHI-09MAY01-C32248_1
ctttgcagttgagcatttcagccaggactgcgatcaggtccttgataataaactagattcctctgagtttgagattcagaatttctctttcctgcccaagatgatttttgagaaacatgaggagtacttgtacctaaatatgattcaagatatcatatctgagggtaatctgaagggtgacaggaccgggactggtactttatcaaagtttggttgccagatgcgattcaacctgcgaaagacttttccgcttctgacaactaagaaagtattctggagtgcgcccgcgcgtccgctgctctggttcatcagtggctcaaccaatgcgcaaggtcctgtcaagaaaagggcattcatatatgggacggtaacgcgtccagggaggttcttgacagtatccggttgactgatagggaggagggtgacttgggacctgtgtatgggttccaatggagacattttggtgccaggttttctggcctgcatgctgactacaccggacaaggatttgatcagttgttggatgttattgacaagattaagaataatccaaatgataaaaggattatactctcaacctggaatccttttgatcttaaactgatggcgctttcaccttgccacatgtttgcttaattctatgtagcaaaatggggagtta

SEQ ID NO: 23768 - DNA, 599 bp, Gossypium hirsutum
  Clone ID: GOSHI-09MAY01-C33948_1
gaagattcacctctgccagtttcctctcctcctcctgaaggtgtccctttaaattcgccgcatgagaatgaatcttcagggaagctggtctcagccatgagggaaagaagacatctctcaggtagatttcaatggcttttgaggtttggacgaaacaatgtcagtcaggaggcatcggataaaggaggaggtaccaatgagacaccaaaatctctaaatcgtgatagcaagagcaatacagcagactcatctattgctggtgcttctcgtaattcatctctcgccagccaaagagatgtggaccagaatgtaatgggaacattgaagaatctggggcagtctatgcttgaacacattcaggttcttgagtctgttttccagcaagatcgagttcaagtgggatcagtggacaacttgggtaaaagcaatttagttggcaaaggacaagttacagcaatgacagctctgaaagagcttcggaagatcagtaaccttttgtcagagatgtgagatttgttgttctacttataaaatctgtatatacattttgtagttacattggttttttaaatgcaaataataaaatgatttttgttggt

SEQ ID NO: 23769 - DNA, 440 bp, Gossypium hirsutum
  Clone ID: GOSHI-09MAY01-C33898_1
attcatttgcaggttgggtttgatgagctcgggggaacagacgagttttccactgatgatttggcggacagattggcgaaagtgcaaggcatcttctctgaaggcgaatcgtcatcgaaacccagaacacaaaccaaaaggagtgtccgacagagctcgaacccagactcgtccgattcggattaactgtgggttgtctcggtttgtaagctttctttacctgtttcagtggaaatcaataggatttatcatcattccgtgtttaaatactttaaaagcaaatgaagagaatattgtttgttgtatgaatgagatcatttaatcatctcgatatttatatatacgcgctaaatctaatgttgctggaaaaaaaaaaaaccaaaaaaaaaaataaacccattactattaaacccataccttaaaaaacttttaaatttttt

SEQ ID NO: 23770 - DNA, 362 bp, Gossypium hirsutum
  unsure (1)..(362): unsure at all n locations
  Clone ID: LIB3135-055-Q1-K1-D11
ggcgaaagttcaagtcatcttctctgaaggcgaatcgtcatcgaaacccagaacacaaaccaaaaggagtgtccgacagagctcgaacccagactcgtccgattcggattaactgtgggttgtctcggtttgtaagctttctttacctgtttcagtggaaatcaataggatttatcatcattccgtgtttaaatactttaaaagcaaatgaagagaatattgtttgttgtatgaatgagatcatttaatcatctcgatctttnaaaaaaaaacaattatttagtaatcaaacaagagtcttgaataaataactcttttatgcttatttggttcattatccatttaaaaaaaaaaaaataaaa

SEQ ID NO: 23771 - DNA, 339 bp, Gossypium hirsutum
  Clone ID: LIB3189-032-P1-K1-C10
gctatttcaaagtcaaaccaaaaggctacagacttgaaacaagaaacatcccaggataaagagggaaagtttctagatgatgatcattcacatgatacacctgctaaaatacttcgaaggcaacttagagatgatagacgtgagaagcgggccactgaattggtgaaacaagatgagaaagttaccgtgaaacttgaaagtgctgccattgaacgatccaaagctgtagactctgctgttttgggcaaatacaatctatggaggagagaaaatgagaatgttaactctgatttcacagtgcgcttgatgagggatcaaattataatgtcaaaggtttat

SEQ ID NO: 23772 - DNA, 263 bp, Gossypium hirsutum
  Clone ID: LIB3135-009-Q1-K1-H3
cgcgtccggtgagaagcgggccactgaattggtgaaacaagatgagaaagttaccgtgaaacttgaaaagtcgggcattgaacaatccaaagctgtagactctgctgttttgggcaaatacaatctattttgtactttatataattgctttttgatttattgtcttgcatgaagtgatctactacaccttcaatggagagaatatttgctttttgattaaattgtaaagttgggatattgactaatcttaatttatcaaatta

SEQ ID NO: 23773 - DNA, 1082 bp, Gossypium hirsutum
  Clone ID: GOSHI-09MAY01-C33838_1
aaaaaagcagactctgtatcttctcttcctctctactatttccttctttaagctaatttcttagtttcttgctagctaagcatggcaaaggaaggagagaacagcactttccatgccagggattatgttgaccctccaccagcaccattgattgatgcttcagagcttaagaaatggtcattttacagagcattgatagctgagttcattgcaactatgctcttcctttacatcacagtcttgactgtgattggtcacaagagccaagttgccacctcccctgacgcatgttctggtgttggccttcttggtattgcttgggcctttggtggcatgatcttcatccttgtttactgcactgctggtatttctgggggtcatattaacccagcagtgacatttgggctgtttttggctcgtaaggtctcattgatccgagccattgcatacatggtggctcagtcgttgggagccatatgtggggttgggctggttaaggcattccaatcagcatactacaacaggtatggaggtggagccaacactctagcagatggttacagcacaggcactggtttgggtgcagaaattattggaacctttgtgttggtttacactgttttctctgctactgatcctaagaggaaggctagagactcccatgtccctgtattggctcccctccccattggatttgctgtattcatggttcacttggctaccatcccaatcaccggcactggcatcaaccctgctagaagtattggagctgctgttatcttcaacaacaagaaagcttgggatgatcattggattttctgggttggtcccatgattggagcagccatagcagcattctaccaccaattcatcttgagggcaggagctgctaaggctcttggttcattcagaagccaaacccatgtttgattcatttgcctttccttgacacttttctagaagacccctccaaaaaaaacacatttttataaattgtgaaattaatgtgggaatttgcttggtttgacctgggtatgtttaaccgtcctctagaggcttcttttttttttcaatttctcctt

SEQ ID NO: 23774 - DNA, 582 bp, Gossypium hirsutum
  Clone ID: LIB3825-024-Q6-N6-F5
agagctaaatagaagtgcttgaataataagtgccaattgttacataataaagtaaaacaaatgggcgatgatttgaaactagtacaaaataagaagctaaattaaagtgcttgaaaagccccttctacccccaccacttctcaaagagtagtttatctacattttcatgaaacccttcaatttctataaaattttccaacttcctcgaagggaaattttgaagaaaaagggacagttaaacatacacaagtcataacaagcaaattcccacattattttcacaatttatatatatgtgttttttttggagggttcttctagaaaagtgtcaaggaaaggcaaatgaatcaaacatgggtttggcttctgaatgaaccaagagccttagcagctcctgccctcaagatgaattggtggtagaatgctgctatggctgctccaatcatgggaccaacccagaaaatccaatgatcatcccaagctttcttgttgttgaagataacagcagctccaatacttctagcagggttgatgccagtgccggtgattgggatggtagccaagtgaaccatgaatacagca

SEQ ID NO: 23775 - DNA, 588 bp, Gossypium hirsutum
  Clone ID: GOSHI-09MAY01-C33828_1
atgaacttctaaaaatggaacgtcctggtccagaaaacaaagatgctagtgatacagagggggatgatgatgatgaagatgaagacgaggacaatgcagatgatcaagatgatgatggaggtgatgaggatttttcaggtgaagaaggtgaagaaggagatcctgaggatgaccctgaagccaatggagatggtgggagtgacgaagaagatgacgatgacgatgatgatgatggggacgaagatgatgatgacgacgatgatggtgaggatgaagaagaggaggacgaagaagatgaggatgatgaggttcctcagccaccttctaagaagaggaaataaatctagtcataggtcttaagatattctactatttcctgctttttttctctctggctgaggaaattttagtagggagggagatttcagcttgtttgtttgcttagagtagaacattcgtcgttccaaacaaaccttatttccagcatttgtcatgtagtcatgctataggtggttatgatacatatcattgcatcttgaactaacagtcaaggcctatttgtttagtagaacctggtattcttagtag

SEQ ID NO: 23776 - DNA, 572 bp, Gossypium hirsutum
  Clone ID: GOSHI-09MAY01-C33578_1
gcaacgtcagctctctctcccatccgaaaactttcccacctcctatcccacatcaagctcctcatccgccgcataaccgccgcgatcgctgcctcggatgccggcctatactcagaatccgtccgccatttctcgaaaatcgtcgacggccgccgccttgcctctcagggcttcctcgcagagtgttacatgcaccgagcctccgcttacaaggcctcgggtcgcatagccgagtccatctcggattgcaacaagaccttagcccttgaccctacttccatccaagcgctcgaaaccagggccgaactgttggaaacaatacgctgtttgcccgactgtttgcacgaccttgaacacttgaagctcctttacaattcaatcatgcgtgatagaaagcttccaggtccaccatggaagcgtcacaatgtgaggtacagggagataccggggaagctctgtgcgttaacggctaagattcaacgattgaagcaaagggtagcttcaggggagaccgggaatgtcgattactacgcattgattggtttaaaacgtgggtgctcgaggtctgaatt

SEQ ID NO: 23777 - DNA, 395 bp, Gossypium hirsutum
  Clone ID: LIB3135-005-Q1-K1-F6
gttgttcaataagaatgatggtggttgtgatcgaactttgatcatctttgatatatggtgaaataaataaatatataaactggcaaaaaaaaaatctttacccaatctataaaaaaaaaaaaaaaaaaaaaaaaaaattaaatataaaaaaaaaaataaaaaaataaaacatacacaaaaaataaaaattacaaatactataataaaataaacaaaatccatctcagattacaacatagaacttaaccattaaccctacttccatccatgcgctcgtaactatggccgaactgttgtaaacaatactctgtatgcccgactgtttgcacgaccttgaacacttaaagctcctttacaattcaatcatgcgtgatagaaagcaaccacgtccacca

SEQ ID NO: 23778 - DNA, 424 bp, Gossypium hirsutum
  Clone ID: GOSHI-09MAY01-C33568_1
gaaaataaaaaatcagactcactagctgaaatttgtataaacgaactccaaatggcgtttggtaatgttcccactactatcacaaatgatattggccatggccagcatctagtattgctttcgtcgagctacagacctatcccggataacatcactatttcagggaattctcagcaggaaatgccagacaactatgtgaacggagcttttgtgtatgacgtcggtgatggcttcatctggatcgttttctggaccaagaataatcaggtctctactaagatcttcatacgttataatgactccactgaacccaataattccattctctggcaccaagttgtaaacaatcttcacccccgcctcagcgaagattgcgcttttggatataccgcatgggcaaggattgaaccaaatgctaacggtc

SEQ ID NO: 23779 - DNA, 720 bp, Gossypium hirsutum
  Clone ID: GOSHI-09MAY01-C33538_1
aaaaaggtgaaagacactactttgtgcaaaagctacagacaacaaccaaaatggatcacgaaaagccagcagcttgtgtccttgatgcatcaacctatgtgggtttttggattctcaaaggactgttgaatagagggtacacagttcatgcagctattcagatgaagggatcagagacagatatagtgaagaaaattaaggaaatggaaagagtggaggagagattatcagtttttagtgtggatattctggattaccatagcattcttgttgctttgaagggttgctctgctttgttctgttgtttagactgtccagatggttatgatgatctaattgtggatttggaagtgaggggagcaatcaatgtagttgaggcctgcgcacaaacagatagcatgcagaaaattgtattcacttcttccttaactgcagctatttggagagaaaacatttgttcacagacagatgtagatgagaggttttggagtgatcaagatttctgccgcaaaatgaagttgtggtatgcccttgctaaaacactctccgagcatgctgcctgggctcttgccatggatcgaatgcttaacatggtttctgtgaatgctggactagttgttggccctgctgttgcacatcaaaatccttgttcaaccatgtcatatcttaaaggagctgctgaaactgttgaaaacggagttctagctgttgtggatgtga

SEQ ID NO: 23780 - DNA, 365 bp, Gossypium hirsutum
  Clone ID: LIB3135-005-Q1-K1-B6
ctcacacataataatacacatcagttttgcctcctgcgcacacacaaatctcatgcagaaagtcgtttttacttctcgcttaactccaactatttggatagaaaacattcattcacagacagatgtatataataggccttaaattgatcaatatttctgcctcataattaaattgaaatatacccttgctaaaacactctccgagcatgctgcctgtgctctcgctatggatctaatgcttaacatggtttctgtgaatgctcaactaatatttcgccctgctctttcacatcaaaatccttgttcaaccatgtcatatcttaaaggagctactgacatgtttcaaaacggagttctacctgttg

SEQ ID NO: 23781 - DNA, 1145 bp, Gossypium hirsutum
  Clone ID: GOSHI-09MAY01-C33448_1
cccagcgtccgtgtaattttaaaaccaggggggtaaagtaaaaccacactgtgaaatcgcacattccggaatctcaatccccgaaaattcaagaaataacttttctaggagtcttttcttacgattctgatccctgatctgcatggatttaagatcggagcggagcactgcattggtggttactgatgacgcaagttatgcccgtaatgcgctggaagcaatttggagttctgagaacgaagaccagaaacgcttggaccctctaattatctttcaaacttcttctttagctcgtctgccattgcaatcatcctatgtagaccaggtcattttcttcactaggtcagttgaattcccggttgatgagttgtatgccgaaatctttagagttatgactcctggtgggaaactggtggtttatcgaagttttcagattgagataagtgaagtagagacggcattgtctgctttggagcgcaagttgctattggcaggatttctagaaggggaacgttttcaacttaaaaaaattgctcacactgtagggattaaggctaagaagccatcttggaagattggatcttcttttgccatcaagaggaccgtgaaaagtccattgaaaattcagatggacgatgactcagatctcattgatgaagattccctcttaactgaagaggatttgaagaaaccccaattacctactgttggtgactgcgaagtgggaagcacaaggaaagcctgcaagaactgcacttgtggaagggctgaacaggaggagaaagtacagaagctagaactgagtgctgatcagttgaacaatcctcaatcagcttgtggcaattgtggactaggtgatgcttttcgctgcagtacatgcccatacaaaggtcttccaccattcaagctgggcgagaaggtatctctgtcagggaacttccttgcagctgacatttgaactcccaaatgatggatttttggcccaaaatttaatttttggatacctcaaaacattagatactggtttggtttagtggtttaatgtggaagtttaaaattctacttcattttatagaacatttgatgaaaatacatgcagttcttatgtaagtgttcaagtggatattttatttttatggaaacat

SEQ ID NO: 23782 - DNA, 466 bp, Gossypium hirsutum
  Clone ID: LIB3135-004-Q1-K1-A12
cttttacttgttcggtttttgaaatctgctttctattcaatctttcactgaaaggaaaaggaaagaaaaagaagcaaagcgttaaaaatgaagtcggactttgtactgctgcttttctgtatgctttgaaactgtggtgtgttgactaatacttctttcctttttggtaatttctccttatgctttgaacttgtgaacagtgtggactaggtgatgcatttcgctgcagtacatgcccatacaagggtcttccaccattcaagctgggcgagaaggtatctctgtcagggaacttccttgcagcttgcatttgaactcccaaattaatggatttttggccaaaattttagtttttgaacccctcaaaacattagatactgattttggtttagtgtttaaatgtggaagtttaaaaaaatacatgcagttcttatgtaagtgttcaagtggatattttatttttaat

SEQ ID NO: 23783 - DNA, 910 bp, Gossypium hirsutum
  Clone ID: GOSHI-09MAY01-C33468_1
cccttccttttccttttggtcagccagtgatagatcatcaacaaaataatgggttctttactgtcaggatgggattctcctacatctgatccttcatcagctatacttaaaagaaatcggtcacttactaaagaagagattgaagctttctggagatcaaaaaggaaaacagaggaagagcatcttaatgctatatatggttcaccagatagttgcaatcagcagtatggaagggaatatatgagatcaagctccatgcctataccaaatagaaaccagggtttcatagacatggacacagaaaaaagcctggaaaatatcgtaaagcaaagtgggtggtggacaaggagcacttgggcattcttgaatgaacctccagttcttgaccgacctacaaacaattaccaaccacagttccatgttgccagcctcgctacttcaaagtttaacaagaattctggaatcagtgccaattagtgtttttaactcctaatggtatcttatgtgggtgtatttatctacttaatctgtttatatagaacataatattactgagataatattctggtttgtgcgtgttgagtgtgtcatggttttgaatctgtacaaagtatagagagaggactaaattagtgatagtagtgtggggatgaatctgttgcaagtattggtctctagggttcctttgacagcttaagatttgctaagcttttgtgctgtatacagatctgtatgacggatttttcttctagtggtggctttttctttttcttttttttggtaaaccaagaagaattgtgcaaaatcgttttttgatttcatataattatttaattatataaataattatatgaggtgttggtttttatattattatatatatttatttattttcttcttttattatatt

SEQ ID NO: 23784 - DNA, 441 bp, Gossypium hirsutum
  Clone ID: uC-gsflmaxxa090a03b1
ggtcaagcaagtgatagatcgggagactttaattgggttctttgctgttatgatgggattctcctacatctgatccttcatcaggttctttgcagaaacctcttactacatgcctcactgtttccatgctgctctctgtttttgacttttttttaaataaataaataaaaaaacttaacccttgttgtttaatctttgatcatatgaaaaatatttcagctatacttaaaagaaatcggtcacttactaaagaagagattgaagctctctggagatcaaaaaggaaaacagaggaagagcatcttaatgctatatatggttcaccagatagttgcaatcagcaggtacaaattatttgtttgataatcagtgtagcatggtaattttgtactgaactagtaccatcttttgacatctatataacatgaaactccattgatg

SEQ ID NO: 23785 - DNA, 454 bp, Gossypium hirsutum
  unsure (1)..(454): unsure at all n locations
  Clone ID: LIB3189-010-P1-K1-A3
cccgtaatgtcccgggtcggacccacnngcgtccggctattactnttaaaagaaattcggtcactttactttaaagaatgagtattgnnnagctttctggagaaatcaaaaaggagaaaccgagaggatagagcatcttaatggctatatatnggntcaaccagatagtgtgcannatcagcagtatggaaggggaatatatganngatcaagctccatgcctataccaaatagaaaccagggtttcatagacatggacacagaaaaaagcctggaaaatatcgtaagcaaagtgggtgtggcaaggagcacttggcttcttgatgacctcagttttgccgactacaacaataccaacaagtcatgtgcagctcgtctaaagtaacagattctgatcaggccataggtttactctatggattatgtgggatatcactatcgtatatgacatata

SEQ ID NO: 23786 - DNA, 357 bp, Gossypium hirsutum
  unsure (1)..(357): unsure at all n locations
  Clone ID: LIB3146-015-Q1-K1-B6
tccggaaatatatgaaacaaagctccatgcctataccaaatagaaaccagggtttcatagacatggacacagaaaaaagcctggaaaatatcgaaaagcaaagtgggtggtaagtagctaaaatcttaatacccaccaaaaagaaaagcttaaaaacttgaaattaagagattttccatggatgattgtaggtggacaaggagcacttgggcattcttgaatgaacctccagttcttgaccgacctacanacaattaccaaccacagttccatgttgccagcctcgctacttcaaagtttaacaagacttctggaatcagtgccaactacgcgttttaactcctaatgggatcttat

SEQ ID NO: 23787 - DNA, 749 bp, Gossypium hirsutum
  Clone ID: GOSHI-09MAY01-C33408_1
ctgttctcgtgggatgatttgcacgaaagacagaggggggatttttatgaagattttggttttttcaacccggctacaaaatagaaaatttaccagaacgcttagtggaattgcagaaaacagaaaattaaccagaatacttagtggaactgaaaggattggtttgagctggccagagcctccactaaactttcttcctcagaatgttttggagagaccaggttctttcaaaccaagaaaatcttttagagcaataaagtcttttaaaacatataattccttcaagtccataaatgatatgggccatatggtatctgtgatagctttgcttgctgaacttgaccttgaatccctcatgaagaggagaagaagatcatcatatgtcagaatagtaagcaagcagatggcaggaattttcctcactatatgggtctcgtaggagttcgcgcaggcatattcagattctgaaggtgtctactgttggtgttggtgtaatgggttacattggtaacaagggatccatatcggtcagcatgtccatatatcaaacacttttctgttttatatgcactcacctgacatcaggtgaaaaagatggggatgaacttaaaagaaatgctgatgtgcatgaaatacttcgacgaactcgttttcattctctttcagcaattggacttcccaacgcatccatgatcacgaaagataatttggatgggtgatctaaataccgtatcacctgccatatgaca

SEQ ID NO: 23788 - DNA, 433 bp, Gossypium hirsutum
  Clone ID: uC-gsflmaxxa094e12b1
tgagtttagatggattgaattgcttgcagatggaggacttttctgaagatgtaggagattcaatcaggctacaaaatagaaaatttaccagaacgcttagtggaattgcagaaaacagaaaattaaccagaatacttagtggaactgaaaggattggtttgagctggccagagcctccactaaactttcttcctcagaatgttttggagagaccaggttctttcaaaccaagaaaatcttttagagcaataaagtcttttaaaacatataattccttcaagtccataaatgatatgggccatatggtatctgtgatagctttgcttgctgaacttgaccttgaatccctcatgaagaggaaaagaagatcatcatatgtaagaatagtaagcaagcagatggtaggaatttttctcactatatgggttcgtag

SEQ ID NO: 23789 - DNA, 652 bp, Gossypium hirsutum
  Clone ID: GOSHI-09MAY01-C33428_1
gagatgaactgcttgtgacagaactgatttttaatggtacattcaatgatcttgatcatcagcaagtagtagcccttgcaagttgtttcattccagtagataaatcaagtgaacaaatacagttgaggacagagattgccaaaccattacagcaactccaagaaagtgcacgaaaaatagcagagatacaacatgaatgcaaattggatgtaaacatcgacgaatatgtagaatcaactgtgagaccatttttgatggatgtgatttattgttggtcgaagggtgcaacttttgcagaggtaatacagatgaccgatatatttgagggtagcattattaggagtgctagaaggcttgatgagtttctgaaccagctccgcgctgccgcacaagctgttggagaagtcaatttggagagtaagttcgctgcagcaagtgaaagcctacgtcgaggtatcatgttcgccaactccctttatctgtaagattgtgtttttgccatggatatagacgtaaaagctgtgtgcggtctaatggtacattgacacccatagatttctccccttcatcttctaaaaggtaaccctgccttccgaatataatccctttttttagttaataatccccaggaggggcgcctttaaatttggtt

SEQ ID NO: 23790 - DNA, 373 bp, Gossypium hirsutum
  Clone ID: GOSHI-09MAY01-C33708_2
cggtgaatacttgaagatataaaaatatgacctcttcacatacgttaaaaaacacataaaagggcctggatcatactcatgtcacacgtgcaattccatttaacagtctttgccccaccattacctgattgctccaagcaagttggctccatcgagctttgcaccttctaagtgcgtatcacgaacattaacatgtcgtaaataagccctttggaggtttgcacccttcaaattcgcattgcttaatttcgcacccttcaaattggctccttcaagattagctccctctaagttggcatcagttacatcagcactctgtaagtgtgcataacgaacatcatccacacagaagctacaatctatcaaaaaaaca

SEQ ID NO: 23791 - DNA, 535 bp, Gossypium hirsutum
  Clone ID: GOSHI-09MAY01-C33708_1
atgacatatatcttactgttatgaacgagtcaactcaggaaacaatttgcattttcacccccaccatctttattgccttccaagtgaagtttcataaacatttcataaccccatcatatatatatttatgtatcacctgagtgccccaagtaggttggcaccatcaagcttagcaccttccaaatgtgtatcacgaagattaccatgtcttaaataagccctttggaggttcgcacccttcaggttggcattacttaattttgcgcccttcaaattggctccttcaagattagctccctctaagttggcatcagtaagatcagcattctgcaagtgtgcagaacggagattagccccacaaaagctacaacctatcaagcaagcatcttgaagatttgcactttgaagattagcaccagctagtaaagccccacgaagatttgcaccagtaaattcacacgcacccacgcgtccgttgtgaaagatggagccctcggcatccacatcctgaaattttgcacactgaagatttgca

SEQ ID NO: 23792 - DNA, 537 bp, Gossypium hirsutum
  Clone ID: LIB3828-032-Q6-N6-B7
agacaacttcatcctttttttactcttatttttcttcaagtattcacaacatgggtatagatataaaaatatgacctcttcacatacgttaaaaaacacataaaataatcttaatcttaatcacactcatgtcacacgtgcaattccatttaacagtctttgccccaccattacctgtgattgctccaagcaagttggctccatcgagctttgcaccttctaagtgctgataaatcaaaacgagaaaaaaatacaaacaaaaattatgtaacgaattccggtaaggtatctgaaaaaatataaagactgataaatcttttgacttgatctgcatcaatgttgcatgcaatccagaaggtttagataacaagcatccatcatgttgtgtgaaagtttttagataattgcacactaaaaaaacttcatatacttactgtatcaggaagattaacatgatgtaaataagtccttcggaggtttgcaccattcaaattcgcattgcttaatttcgcaccctggaagacatgttcattacaa

SEQ ID NO: 23793 - DNA, 777 bp, Gossypium hirsutum
  Clone ID: GOSHI-09MAY01-C133660_1
tggatacggtaataggtgccgttataatcatcctcgtaaccgtgccgcggttgaggctgctgtaagagctacaggggagtaccctgaacgacctggggaacctgcatgtcagttttatttaaaaactggaacctgtaaatttggtgcctcctgtaaattccaccatccaaaacaccgaggtggatcctttggccatgttccgctgaatatatatggatacccattacgaccgggtgaggaagaatgctcctactatttgaaaacggggcagtgcaaatttggcgttacttgtaaattccatcatcctcaacctgctggcacatcaatgccagcatctgcacctcaattttatcagccggtgcagtctccttcagtccctctgcctgaacagtatgggggggcacccaccagtgtgagagtggcgaagcctccactattacctggttcatatgttcaaggggcttatggtcctgtactcttttcccctggagtggttcctattccgggctggagtcactactccgcacctgtgagcccggccctctctcctggtgcgcaacccgctgttggagcaacttctctctatggactaacgcagctatcttcttcagcaccttcccttgcagggaccttatccttccttgccctcttccactggcccttctagcagtaaccagaaggatcaaacatttccaaaaagacccggtgaacctgaatgccaatactatttgagaaccggtgactgtaaatttggatcaacttgtaggtatcatcatc

SEQ ID NO: 23794 - DNA, 752 bp, Gossypium hirsutum
  Clone ID: GOSHI-09MAY01-C133650_1
gtgaaaaaaaaacccagtacaaatgactaagaaactctactcggcagcatcctgctacctaatcatgttgttgctgttgcaggaaactagttgttccaccggcatcaggcaagacaagttatttgaacttggatcaaagttacaagagctggcatcgccaccttctgttcctctccatctcgactccttagactcagtcaccaaaaataatggaagagcgttctacccaattgcgtacggggcagaccctactggggtgcaagagagcagtgacgccatttcgcaagcgctgaatgacgctttccaggtccaaaccactctccaaatgctgcctggcttgaaggacttgggtggtgtcgtcattgatttgctcggcggaagctacaaaatcagcaatcctataaggtttcctgcttctgggggagccaatattgtggtgaaaggagggtcgttgcgggcgtcagacacattccctggtgaccggcatctcatagaagtatggtctccgaattctcaaccatcatcccctaccggtttcaacgatatgaaagatgagaatgtaggaatctactacgaggacgtcacattccgggacattcttttcgattcgagctcccgaggcggagggatctctgtaattgattccgccaaaatccgcataaataattgcttcttccttcacttctcaacccaaggaattctattccaaaaaggtcacgagactttcatatccagctgtttcctaggcaggt

SEQ ID NO: 23795 - DNA, 262 bp, Gossypium hirsutum
  Clone ID: GOSHI-09MAY01-C33628_3
ctcatgaccacctcctgctcaccactactaaacaatggctttgaccgcaccaaggggaacaggagagtgtgctccaataaagcgacagagaaagagagcagtcagaggtggcctactctccgcgtttcaagagatggaaaaagaaaacaataatgatgtagacaagtagtagggtcaataaaaaacaaggggttcatcgttttcacacataaaaaaaaaaaaaacaaaacaactaaagaaataatgaaaaaaatattaattt

SEQ ID NO: 23796 - DNA, 471 bp, Gossypium hirsutum
  Clone ID: GOSHI-09MAY01-C33628_2
cccacgcgtccgtccacgcgtccgcccaagcaccctttcacgtataagtctcccccaccacccacggcagtctacaaatataagtctcctccccctcctcctccagcttactattacaagtctcctcctccaccaccaccccattatgtctactcatcaccacctcctcctcaccactactaagcaacggctttgaccgcaccaaggggaacaaaagagtgtgatccaataaagcgacagagaaagagagcagtgagaggtcgcctagtctccgcgtttcaagagaagaaaaagaaaacaagaatgatgtagacaagtagtagggtcaataaaaaacaaggggttcatcgttttcacatttgtattattcagagggtctcgtatttcttgctgctttagtatacaaacgttgcctagatcttatgggtttgtcttttccgaccctttttgcaaatgcaggggtgatggggt

SEQ ID NO: 23797 - DNA, 523 bp, Gossypium hirsutum
  Clone ID: GOSHI-09MAY01-C33628_1
ccttcgcgtccgcccacgcgtccgaaaaacccggggatacctgaagcttccttggcactatctcaaacccaacaaaccatgtcgctccaatgccaccgccattctcctactttcccttcttgctttagaccttgcaccaccccattatgtctactcatcaccacctcctcctcaccactactaagcaacggctttgaccgcaccaaggggaacaaaagagtgtgatccaataaagcgacagagaaagagagcagtgagaggtcgcctagtctccgcgtttcaagagaagaaaaagaaaacaagaatgatgtagacaagtagtagggtcaataaaaaacaaggggttcatcgttttcacatttgtattattcagtggttctcgtatttcttgctgctttagtatacaatgtttcctagattttatgtgtttttcttttccgacctttttgcaaatgcaggggtgatgggtttgatctttaataaaataaaggtttttacttaaaaataaatttttttattaaaa

SEQ ID NO: 23798 - DNA, 620 bp, Gossypium hirsutum
  Clone ID: GOSHI-09MAY01-C133190_1
aggcatgtgaatgtatattgaccaaaatacccttctctcgcccttcagtctttcacgtttccctttctacttgccttgcttcccttctctctatcttctcttgcaatgcaagtgccatatcagagttcctcaagaaacttctaatactttcttttcattttatttatatttccaaaaatcattctttttaaactcttgaatgccccccatcccccccccccaaaaaaaaaactttatcaccgctttctttgttaggtccttttgtttttttggggtatttttgtttgtaaagcttgtatcttttaaagaaaagtgaaaataggtatgggaacaagcaattttgtgatcagatggatcaacttccttactatgcttttagctattgctgttgcaatttttggggtatggatgagcactcaccatgatggatgtcgaaaatcccttactcttccagttctaggcgttggtggtttcatttttttagtatccatgatcgggtttctgggggcgctgaaaaaaaacgccatactattgtggatttatttgatattgttatgcatgattctggtggcgatcctggtattcacggtgttggcgttcattataacaaataatggatt

SEQ ID NO: 23799 - DNA, 521 bp, Gossypium hirsutum
  Clone ID: LIB3828-017-Q1-N6-B6
ggataattgggcctctgtttccttcaaaattaaacaggaataattatacaaaattgcgaaagggtgaaaaacctaacgagacggaaaaaaaaagaacaacgaaacgaaccgggcgagcgaactcaatcttgatttggtttccgggcaagggggctccttggaaagcgtccttcgccgccttcgcattttccatgcgcttaaattatgtccaaacttgatatttattcccacagttttttgggactatgatcctaatttcatggctgccagtttggatgaagcttaccttgatattactaagggttgcaaaaaaaaaacattactggggcaaaaaatgctaaaaaactcaaatctaaagtatatgaaaaaactggtttgacatgtagggctggagtggctccaaatcgcttacttgctaaggcattgcaaagtggaaactgatgtgggggattggggctgcatatacaaaaaagtttagcaggtttcttcaagtattaatgccgattatattcttgggctag

SEQ ID NO: 23800 - DNA, 427 bp, Gossypium hirsutum
  Clone ID: LIB3135-002-Q1-K1-H4
gttttttgggactatgatcctaatttcatggctgccagtttggatgaagcttaccttgatattactaaggtttgcgaaaaaagaagcattactggtgcagaaaatgctaaagaactcagatctagagtatatgaagagactggtttgacatgtagtgctggagtggctccaaatcgcttacttgctaaggttctattttctgttcttggcacataattgcagttgagaaggtgcatctgcaattgtcatcactatgaatttagctattgtagcattgtcaaatcaaaatttgaatattgcattttatgcagaaattctacaattttccataggatgttatttcttcaaattgatgaagtcagtaatgatgttggacgaaaatgtgacaactcttttggtgaataacaatactttggtcctgactggt

SEQ ID NO: 23801 - DNA, 391 bp, Gossypium hirsutum
  Clone ID: LIB3135-020-Q1-K1-G11
attagcggttcggccgacgcgtccgcccacgcgtccggttggccaacatccgaaagctaaagacagtccccagcctcaggggagaccgtcacatttgtggatggggcagaatcttcacgtgtgccgcctgctaatcaagtacctacccgggggaacgaagctggtccatcgaatcaacccccacaaggggtcccctatccgcatcaagaaaatcaaattatagggggggattcgatcctagcgatcgaacggcgccttttggagcacaaacacactccttctgaccacgagctctacatggctcgtattcaagccgaacatcttttcgaggtcaaggtcgagattatcaaactcatggctgttcttgaaccaacgggggattggatggggc

SEQ ID NO: 23802 - DNA, 312 bp, Gossypium hirsutum
  Clone ID: LIB3135-002-Q1-K1-G2
cttcctcttccgagtccgggcccttccgctccagcaagctccaataattctgatgctgattctttcggcatcaatgttatattggagagttggccaacaaccgaaagcgaaagacagtcgtcagcctcagcagaaacgggcacgtcggtgaataagccagaatctggacgtgtgccgcctgctaatcaagtacctccccgggggaacgaagctggtccatcgaatcagcccccacaaggggtcccctatccgtatcaagaaaatcaaattatagggggggattcgatcctagcgatcgaacggcgccttttg

SEQ ID NO: 23803 - DNA, 309 bp, Gossypium hirsutum
  Clone ID: LIB3135-018-Q1-K1-B7
cttccgagtccgggcccttccgttccagcatgctccaataattctgatgctgattctttcggcatcaatgttatattggagagttggccaacaaccgaaagcgaaagacagtcgtcagcctcagcagaaacgggcacgtcggtgaataagccagaatctggacgtgtgccgcctgctaatcaagtaccttcccgggggaacgaagctggtccatcgaatcagcccccacaaggggtcccaaacaaaaaaaaaaaataattttataaattatttaaataaatattaataaataatatttaaaaagggcgg

SEQ ID NO: 23804 - DNA, 892 bp, Gossypium hirsutum
  Clone ID: GOSHI-09MAY01-C33318_1
cccacgcgtccccccacccgtcccgtcttcctcgtacaagaaatacgaaatcagaaagcgagatccaaaccctaaaaccaccgctttgttagtgatcgacatgcaaaactattttgcctccatggccaaacctattctcagcaacgcaattaccaccatcaacctttgccgagaagcttccatccccattttcttcactcgccactgccacaaatcccccgccgactacggcatgctcggtgagtggtgggacaacgacctcatcttcgacggcaccgttgattccgaactgatccccgagatcggacggctttcgaaacccgacgaggtggttgagaaaaacacgtacagcgcgttcgagaacacgcgactacatgagatgctgatggagaaaaaggtggaggaggttataatcacgggggtcatgacaaatctgtgctgcgaaacgacggcgcgtgcggcgtttgtgaaaggatatagggtgtttttctcaacggatgcgaccgccccggcggattcggagatgtacgaggctactttgaagaacatggcctacggggttgcgtacctggttgacttgcaagaggcttcaacaggggctttttgggaaagggatgaagtaattttgtttcccatggcgaagagtactggtaataaaaatccttttcattgcaatcctttttctgtttatagtttctattatcttctggagatgtatgtatgtgtgattgaaatgctatcctagtattagtttttctggaataaaagagtgagaaattattactcaacacagttttttctggtattgctagtttggtaatacttttaaaaagtatttttgaaaagtgatgtagaaaaatatttttgagaattacttttaaaagtttagttt

SEQ ID NO: 23805 - DNA, 578 bp, Gossypium hirsutum
  unsure (1)..(578): unsure at all n locations
  Clone ID: LIB3829-029-Q6-K6-G9
aaccctnnaaaaccacncnngctttgtnntagtgatncnngacatgcannnaaactattttnnngcctccatggnnnccaaacctnattnnnctcagcannacgcaattaccccaccatncanacncttntnngccgagnaagnncttccatcnnncccatttnntcttcactttcgccnnactgccacnnaaatccnncccgccgnnactacgnngcatgctncnnggtgagntnnggtgggnanncaacgacncnntcatcttnnncgacggcnannccgttgnnattccnnngaactgnatnnccccgnagnaatcggnacccggctttnnncgaaacnnccgacnngaggtggnnnttgagaaaaaaacnnacgtacccagcgcgnnnttcgagaaaaacacgcgacnntacatgagaatnngctgatggnnnagaaaaagnngtggaggnnnaggttatannatcacggggnnngtcatgacaannnatctgtgcnntgcgaannnacgacggcnngcgtgcgnnngcgtttgggtgaaaaggggatatagnnggtgtnnttttctttcaacg

SEQ ID NO: 23806 - DNA, 447 bp, Gossypium hirsutum
  Clone ID: GOSHI-09MAY01-C28178_1
ctcgagttttttttttttttttggttgggtttctcaaatggggctgaggataagagtcatagttaacaaatctccacattgactcatattttcacatcgccatctttgccaaagcccgccacgagcctatattaaactatgcatggaattaaccgagtcgaatttgtgcttagaaactgaaagacttccagccctcgacttggacacggccaaatcaaaacttacccgagtctgctttccacgaacacagtgccctaacttttcaaaacctgcttccaaaagggaccctctcttcaacgaaacgggcatacttttttccctcctatgaccaagttgcctccgctccaaacaagttgacttcaactccgtaacggacgagggacgtccgatttcaccggtcactatataaccttccagaatataaagactgtcgattctttacctttt

SEQ ID NO: 23807 - DNA, 332 bp, Gossypium hirsutum
  unsure (1)..(332): unsure at all n locations
  Clone ID: LIB3048-042-Q1-L1-G4
gcggaaggtgtatgctcttgcacgcgtttgtttcgtcccatgaagggnnngatgagaaaacactgaaaataagaggcatatttaacaaatctgcacattgactcatattttgacaacgccatctttgccaaagaccgccacgagcctatattaaactatgcatggaattaactgaggcgaatttgtgcttagaaactgaaagacttctagccttcgacttgtacactggcaaatcaaaactaacccgagtctgattcatacgaacacagggccctaacttgtcaaaacctgcatccaaaagagaactgctattcaacgaaacggacatacat

SEQ ID NO: 23808 - DNA, 454 bp, Gossypium hirsutum
  Clone ID: GOSHI-09MAY01-C28058_1
gccattgttatcttctctgttttctttcttcactctgttcagaacaagttaattaagaaagaagaatgactaaccaacaaaatgtggtggttgtggatgtgaaaccccatggtggggttaagccaccattatcattgccagtggccaagtccttttcaccacaagacctgaagttattgttaatgaagaaaaggtttgaaactgagaatgcttgggtactggattccatgagagcttcttcacctagtcgtatcagcaaccctactacgacttccttacctgaaactgatgtcaaaagttcctggattgttcatcatccctcagctttgaacatgtttgaacaaatagtgactgcttcaaaagggaaacagattgcccgttttgttccttgactacgatggcacactgtcaccaatcgttgaagacccggatcgagctttcatgcccagagaga

SEQ ID NO: 23809 - DNA, 394 bp, Gossypium hirsutum
  Clone ID: GOSHI-09MAY01-C28008_1
ccaaagcaaaattcccaaaacacactagaaaatccgagtcaacattttgttccccaaattcattggcctttgcgcagatttctagggtttgtggcggatttcaattcccacttctctgtttctgtttctttagggttttaactaccggtcagttttatttaattattactctcgcttctcttaattttaatcccattgaatcaatcataggagaggaggaagaaattacgagtctatagaaaatggattcgtcgcaagcttcaacgttagggacgagtgggagcggtggaaacgggttggtaagcactcaaactactgagacggcaaacgcaacccctaatgatgatcctaagcagaatctgaatcaagtaatcaactccatccagaaaacttt

SEQ ID NO: 23810 - DNA, 457 bp, Gossypium hirsutum
  Clone ID: GOSHI-09MAY01-C28028_1
tcgagtgtctgctttcttgtcgctaatgatgagtcttctgtactcgcgcaagtgattttgaaatgtctgagtcaatggcatatgacagttcaaaatcatttggtgaaccatattgttgattagttctagctaattaagttattccgtatcacatctggtcatgtagattagatgagatatgatctggttatgcttagactggatcaatgcaattatgatatatgtcctgtttttactttttacactcaatttgcaggctaactagttactgaaatgtatgataagtctgtcataattcttgttgggttgcaatatgatgagcatcaattaatttacaatcacttgcatgaatcgtgaagttgacatgtctgaaatgatggcatgctgaaagttttacagtaattagtttcttttgtgacaggagagtgaagctgctatctttagaaaggatgctttt

SEQ ID NO: 23811 - DNA, 816 bp, Gossypium hirsutum
  Clone ID: GOSHI-09MAY01-C28258_2
caccccgcgtccgctcgccccaatcatgggaaagaagacgcgtacagaaccggtaacggtggccggaccagacaccgtttcatctcaatctgatatcttcaaaaccatcttcggtgacattactgagccaaatgccgctgcttcttcccttttttccgatgaccatccattcaaaagaaaacccgaagaaaccgtcaagaaccctgaaaagtttattcattggattcagatatggtggaattgaagcataggaagcggaaggagaaagagaaagctgaaaatcttaccttgggttctagcgaagaagctatagagactcagaagtcaaagaaagggaggaaccctgaaaacctaaatttgggttctttagatagcaatgttgaaagttcaggtcttgatgcaaaaggcaagaaaaggaagagggatgaagtggagaaagagtacgaggacagaaaatatgggacggtggcggtggcgtccgatgcagaggaggaggttgtcgtggggcagaagaggaagaagccagaggacgttggggtagttgctttggttccaaaagaggggtttgatgatgacagtaaacttatgaggactgtttttgtaggaaatttgccttttaaagcgaacaagaacgtcttgttggaaggagttcagtaagtttggagagattgagtctgttagaattcgatctgttcctctaaatgatactaagaagccgagaaaaggagctataatgttaaagcaaattaatgagaatgctgatagcgttcatgcgtacattgttttcaaaactgagcaatctgctgaggcatcttt

SEQ ID NO: 23812 - DNA, 801 bp, Gossypium hirsutum
  Clone ID: GOSHI-09MAY01-C28258_1
gaaaacccgggccgacgccacgcgtccgcccacgcgtccgcccacacgtccggtttttgtaggaaatttgcctattaaagcgaagcgtagagtcttgttgaaggagttcactaagtttggagagattgagtctgttagaattcgatctgttcctctaaatgatactaagaagccgagaaaaggagctataatgttaaagcaaattaatgagaatgctgatagcgttcatgcgtacattgttttcaaaactgagcaatctgctgaggcatctttagccaataacatggctgtgattgcagagaatcacattcgtgttgatagggcgtgcccgccgaggaaaaagttgaaagcagagaatgctcctctctatgataacacgaggactgtttttgttggtaatctcccatttgacgtgaaggatgaagaaatttatcagcttttttgtggtatcaataatctggggtctagcattgaagctgttcgggttattagagatcctcaatttggtgttggcaagggtattgcttatgtcttgttcaaaacaagggaagcggcaaatgtggttgttaaaaagcgaacactgaagcttagggatagagagctaaggctttctcatgccaaatctgatgctacctcatctaagagaaagaacaatcatcttcagggacagaatataccccaccaaaaaatttgccattgattcaaggactccctcaactacctgcaacaaatcaaaatacaaaacttctttggtcttaccaaggcttgcgtgctaataaatcaagtttggataagaaagtg

SEQ ID NO: 23813 - DNA, 1045 bp, Gossypium hirsutum
  Clone ID: GOSHI-09MAY01-C29878_1
gaaacttggagtccctcccctttccttttcacaaaatttttagtttttgctctgccttcatttctgggaaaggaagaggaataataagatggtggatgtttggatgaggtgagaagattaaggaattaattacaaataaattataaaaatatatgggaagggattcagagtcggactcgaatggatggagtcgagctcgaggtttggtagtgaagacgctggtgttaattggaggcgcccttttgctcaagaggtttaccaaatccaccactcgttgggaccacgctagaatcgttgctcgttctcttagcggcgaaaagttctcgcgggagcaagcctctagaaatccagatagttacttcaacatcagagcacttacttgcccagcaacggagatggtggatggttcaaatgttttatatttcgaacaggcattttggaggactccccagaaaccttttcggcagaggtttttcatggtgaagccttgtccaaaggatttgaaatgtgatgttgaggtaagttcttacgcaattagagatgcagatgaatacaagaatttctgcgatcgtccaagggatcaacgcccactacctgaagaagttattgatgatattgctgaacatctgacaactatatatctcaaacgctgtgagagggggaaacgctgtttatacgaaggttcaactcccccaggtggattcccaaattcatggaatggagcagcattctgcccttcagaacttacaattttgaagaccaatgagatacatccctgggataggggttatgatgacgatggaaatcaggtttggggagtgaaggaaggtccttatgaattcaagcctgcccctgcctctagtttcaatggtatgttttcccccctaaattttgccccttcccagccaatggagaaaaggatagagggatcgtttgtcttgcaagaatgattcatggttatatataaatatatatggtcatagtctgtaaaattttaacccctttccataatcttgagtgaagacccttggcttttctcttggct

SEQ ID NO: 23814 - DNA, 652 bp, Gossypium hirsutum
  Clone ID: GOSHI-09MAY01-C129850_1
ggaaactaacagagaccggcgccgccggcagtaggcgggccaattaagggaaccgtatcaccctagacaagatttagttccatcaaaaggcccacacgtgttacgtcccatgatccaacggatatcaacatctaaaactgtagcggtagccctgccagtgccagactacagatgctatgccacttcattctttaatcccaacaccaccatggttttggttccatgcaatgagactcatggaaaaaaacacacacagtcacatgataactgctatgattgagtccttttcttatgattgagctccattaccctttttttctttttgcctctttctatctcagatcgccactctctatcttcctttgtgttttttttttggctttcttaatttcagtgaatgattattttgttgactttctcttttgaagaagattaggagaactcaatcatctcttgtaagcccagagaagaatatatcttgatataataacaagaagaaggggaggaagagattgtgcacttgccggctgattgtttgtgaactgggaagttaagataaagagactgatagatattccaagagatgggatctttcaagggtcatgctttgccaggacactgttctgatggtgggtgtatggcacatatggac

SEQ ID NO: 23815 - DNA, 416 bp, Gossypium hirsutum
  Clone ID: GOSHI-09MAY01-C29548_1
atcgtttcaccggcagccgccaaccaaatctccctttctccggccgacttaaacggcgccgtttccctccgcccatgggtccccgtacagagatcggaccgccgagttccgatcactatcccaaacgcttcaaaagctcggcggagggatctcaaccgtcaatcataatagtaaggatctccaagacgaccacgttgctaaaccactgccgtctccatcctccagatctgagttcaataaaaaggcttctttaatcgggtcgggtatccatgaaacctctcaaaagattggtcgacttgctaaattggcgaaaaggctcatcaatgtctcgatgatcccggtgttgaaaatacaagaactgacttgcgtgataaaaactgatattaccaccttgaatatggcactttcctgattta

SEQ ID NO: 23816 - DNA, 749 bp, Gossypium hirsutum
  Clone ID: GOSHI-09MAY01-C29758_1
ctccttgaacacacctgctcctggaatgcacgggtttatgatctctgcaaaactactttcactccttcaggcttgtcttcttctccttctcctcaaccaatccacaaactctgctctcttctggacacatttggccctgctgatgttggacttaaagaggaaagtccagatggggagggagggcgtgggttttttggactaaatagagtaactcgatgggctcaaccgataacatatttggacattcatgaatgtgatagttttacgatgtgtgtattctgctttcccacttcttcggttattccattacatgaccatcccgggatgaccgtattgagcaaagttctttacgggtctatgcatgtgaaggcctatgactgggttgaaccatcatgtattaaggaaagccaggagccaggttgccctcaagtaaggttagcaagattggcggctgataaagttttaactgcaccatgcggagcctccattttgtacccgaaaactgggggcaatctgcattggtttacggcagtcaccccttgtgccgtgcttgatgtacttgctcctccttacagagaagatctaggtcggaaatgcacttactatgtcgactatccgtattctgccttggtaagttaatctttccattcctaatatatcattcttgttgtgcttcgatttttcgcccggttttgtgcaacatgaaaaccatatgacttatgtcatcatacatgttacaagggaatgac

SEQ ID NO: 23817 - DNA, 423 bp, Gossypium hirsutum
  Clone ID: LIB3148-040-Q1-K1-C2
aaagttttaactgcaccatgcggaacctccattttgtacccgaaaactgggggcaatctgcattgttttacggcagtcaccccttgtgccgtgcttgatgtacttgctcctccttacagagaagatctaggtcggaaatgcacttactatgtcgactatccgtattctgcctttggaaatggagctcagataagcaacggaaaggaagaggagtatgcatggcttgcagagatagaaacaccagacgacctatatatgcgttcgggtgtgtatgttggcccatctattcgggtttagggtttggtatatataaatatcatgttggctgctcagttctttggcctgaatctagggaaagctttgagaagataagtcatggcctcaatcacatgcaaatctgaaatatgctctttcaatgagctt

SEQ ID NO: 23818 - DNA, 594 bp, Gossypium hirsutum
  Clone ID: GOSHI-09MAY01-C129710_1
agcccctctttagatatccccaatgcttagcttagtccgaaacgaatctcttcctctcccttaggtaatcaagcaaacaatcagaatcccaagactcctcattgcacacatttcatcttctaaaaaaagtcttgaaccttcaacaattctatggcagatccttccttctatcatcctccgccgctactgctgatttcgatactcttccttccaggcatcgccctcgatcactacctgccaatatccaagatccagccctttctgaactgcctgcagacaagccaacgcctgatcaactgcaaacaaggttagagcgagcatattgaccattgtctttgaccccaaaataaccccctttaaatcccgactgacaatacctataccaaatatgtttgactatttctcaaaagtggtgtcaaagtttattttaacctcaaataagtccaacagtctccatcgctcctttatctttcgcttaggtattttattgtttaccctatcttagttgttaagatatgccttagtaaactgtatagtttctaatgttatttgatgaaatcccttatgcgaggccttattctgtccgtccatatt

SEQ ID NO: 23819 - DNA, 531 bp, Gossypium hirsutum
  Clone ID: LIB3582-036-P1-K1-D5
cggacgcgtgggcagaaaagatgataaaaacaaaacaaaaggaaacccaaaagctttgagtccaaccatggagattcaaagaaccttctccattttcaaagcgatctacaacaaactttgatgtctctgtgcccaaactctctgatctttctccaccaacattttaacagaattcgagacttcatcaacccaaaacccagagtgttgtcttctcctttcttccatcgccagggtatgggccaccctattaaccaacggggaacaaagagaaaatgacggaaacccatgttaatcgcaaaaagcaatgctctttcacaagctctcgcttcagccatgaacgcatcaaccacaccattaaatagataagtttctactcctacatattcccctttataatatctggctattactgctgatgtagaagttcttgagtcactttgaaatgttgcatcgaaatttattttgatgacacccaaatctggtggactccaaagtggttctgattactatctgtaaaaaactcccatcttt

SEQ ID NO: 23820 - DNA, 549 bp, Gossypium hirsutum
  unsure (1)..(549): unsure at all n locations
  Clone ID: LIB3582-051-P1-K1-E9
cccacgcgtccgaatcgatctgtctggtttttgtgccttgagcttgttaataaccgtcaaggaatctccttccactagaaaatgacggaaacccatgttaatcgcaaaaagcaatgctctttcacaagctctcgcttcagccatgaacgcatcaaccacaccattaaatagataagggggggactcctacatattcccctttataatatctggctattactgctgatgtagaagttcttgagtcactttgaaatgttgcatcgaaatttattttgatgacacccaaatctggtggactccaaagtggttctgataactatctgtaaaaaactcccatcttttcttgacactggctttactcttgactatatccacgaatgaagcctaaaagatcgtgtagagaaaatttaataccttcattgattagcttatttnttctgtaccacaaagcctatatagagatagcaataagaagtttgctttggtcatctgctatacaaaaaggattaacaaaaatattnnggcagntngaactactatnannaggag

SEQ ID NO: 23821 - DNA, 363 bp, Gossypium hirsutum
  Clone ID: LIB3048-048-Q1-L1-A1
aaacaacttctttaaccacagaaaagatgataaaaacaaaagcaaaaggaaacccaaaagctttgagtccaaccatggagattcaaagaaccttctccattttcaaagcgatctacaacaaactttgatgtctctgtgcccaaactctctgatctttctccaccaacattttaacagaattcgagacttcatcaacccaaaacccagagtgttgtcttctcctttcttccatcgccagggtatgggccaccctattaaccaacggggaacaaagagcttgttaataaccgtcaaggaatctccttccactagaaaatgacggaaacccatgttaatcgcaaaaagcaatgctctttcacaagc

SEQ ID NO: 23822 - DNA, 657 bp, Gossypium hirsutum
  Clone ID: GOSHI-09MAY01-C129350_1
aggcgatctccgccacagcatttaccgtgactggtgtagtgaataagtttcttacagttgtgatcaatgtgttgatttgggataagcatgctactcctttcggattggtctgtctcctcttcacgctggcaggaggggttctttatcagcagtcagttactggaccaccacgtgagtcatcggcatctaagcagaccggtgacgtagacaagaatgacgctgatgagaatcaagataagagtgtatctggtaaacatgcttctgtatgagaagtgttatttcttagttttcatggttttagcctctaagaatactgttcgaatgtatgaatctttagtacccctatttttgaaagtacctttgctgtgtcagatctcacaatcccatgtctagaatttaaacacggttagcgctttatgctttagcaatttggtgatttacgagtcattatgcttcatattcataattgaccatattgtcgcattctttgttgcttaatgtactagtggctggctggttacagttttccatatatagtctttggctcattgatggttttgaatatgtattttgttgtgtcttatttactttttcattgttgccttggtttagatattgatgttgctatcagttatagggtctcggattagtttcaat

SEQ ID NO: 23823 - DNA, 593 bp, Gossypium hirsutum
  Clone ID: AW187267.1
cccaaaatcacagagatcggatttttggtgttaacaaaaattcaaatggttgtttgccaagcttcaaagatccatctcccaactccctttgcctcaccttcttcttctaaaactccaacgtctctcctctttgaaccccattctttttccctcgccctttcccactctgattcttctctttccctatttccttccatttccttccctttctcttccacccaaaagtccctttctattcctcctccttcctcttcctccactttccttctcctcaaaacccaaaagtctcctaaccccagggtccttttcgtcgttgctggcccttataaaggtggttccaaggttctccttaaattttttctttataggaatgatggaagcaaggcttttgagaaggctaaagttgttgtttccaagcaaaagggtattgagtttgatgataaagttggggttttgattgatgtcagtcatggtttgaaacttataatttctgggtctgttaatttttttgcactgtattcggtttcaagctccaaagttttaatctttggggttaacttggtggttgatactgatgaaagtgatgatgggat

SEQ ID NO: 23824 - DNA, 266 bp, Gossypium hirsutum
  Clone ID: AW187139.1
tctttcattccaaaacccaaaatcacagagatcggatttttggtgttaacaaaaattcaaatggttgtttgccaagcttcaaagatccatctcccaactccctttggctcattgatggttttgaatatgtattttgttgtgtcttatttactttttcattgttgccttggtttagatattgatgttgctatcagttatagggtcccggactagtttcaaggacctctctgagtaaatcaactttcggtaaaaaaaaaaaaaaaaaa

SEQ ID NO: 23825 - DNA, 472 bp, Gossypium hirsutum
  Clone ID: GOSHI-09MAY01-C29318_2
gctttctgttctggtgttgatgctgttgctctttatcgcttacataatgaagggaaagttgaagattgtaaaagatttctcgagacactatataagtttgtatacccccacgcgtccgatctgaagccgcatgttgcaatcttggacggcataacaatgggatgtggaggtggaatatctctccctgggatgtttcatttagtgaccgataaaactgtttttgctcatccagaggctcaattggggttccatcctgattcaggggcttcattttatctttctcgcctacctggttacttaggggaatgcttagctctaacgggagaaaagttgaatggtgtcgaaatgattgcctgtggcctggctacccattattgcttaaatgctcgactttcttgggtcgaagaatgccttggtaacatgatgaatgatgatcccactgtcatagaatcttctcttgcacaatatggtg

SEQ ID NO: 23826 - DNA, 797 bp, Gossypium hirsutum
  Clone ID: GOSHI-09MAY01-C29318_1
gcagaggacatcaaagatgcagagagtgaaagctctaatagtaaggcatacctttcaaacacttaggtgtcgctctcccatcagagatgcttctctgctcagcctaactatgccccatatcatgatttccaggaccaggtcttagtggaagggagagcaaaatcaagagccgccattctcaatagacactttgctctcaattcacttaccacttcaatggcatctcggttgaagaaattgtatgaatcatgggaagagaaccctgacattggatttgtcatactgaagggtaatggcagggctttctgttctggtgttgatgctgttgctctttatcacttacataatgaagggaaagttgaagattgtaaaagatttctcgagacactatataagtttgtatacttacaaggaacgtatttgaagccgcatgttgcaatcttggacggtataacaatgggatgtggaggtggaatatctctccctgggatgtttcatttagtaaccgataaaactgtttttgctcatccagaggctcaattggggttccatcctgattcaggggcttcattttatctttctcgcctacctggttacttaggtaataaccattctaacaacttttccaatgcatagctaaattccttgattatttgctcgcgtctggatttgcactgtccatttttcttaacaagatgtgtgttgttttcattaggggaatgcttagctctaacgggagaaaagttgaatggtgtcgaaatgattgcctgtggcctggctacccattattgcttaaa

SEQ ID NO: 23827 - DNA, 729 bp, Gossypium hirsutum
  Clone ID: GOSHI-09MAY01-C29218_1
gaacctactgtttgcaccaatggggcaagttttgattttacacccagaaaaaaaattctctccacaccatcatctccttccttcaggaactggtctatattgcctaacttgtcaggtgtcagataatgatagtgaagagaagctgctcttggctgcacagagagttttctttaactcaccacatccacttgagatcttaagcgaccgttctgcatatggttctgaaggaacaatccaaagagaccatgacatgaattcttacttaaaatgtgttaaaggcgtgatacgacaggagctaaaacgcatcaggaagaccaagagagagcagcgacgcaagatctggtggcccctggtattacctcacgacataaatgcgggtggtatcattcttcggaggtcagtagcaacaatgaatgcggggcaagaccaattcaactttgctggcgttttacaaacagggagagaatccttgaaaagattcagtaggctggttgcatcacagcacatgcatttgtttgtggttcttttgttgcctgccaagctgttactcgtaggtgcatttagcttgatcagtctccgctgatcatcttatttggtaggccatttaatgtttgttcctagaggtggcgagccgattctttattcattgagttagataaggtaactcaagacatttattctttttctttcttttaatcggatgaaaatctcaaatagatttattgagat

SEQ ID NO: 23828 - DNA, 677 bp, Gossypium hirsutum
  Clone ID: GOSHI-09MAY01-C24948_2
agagaatgctggaagttcatacagctactccagaggtggcgatgagagctcccatatagaaagttaccaggatatttgtggccaggattccaccatcagtggatgaatcaacctttcggaggcattttgaggagtatggtgagataacagatttatacatgccgaaggatcaagtctcaaaagctcatcggggaattggctttatcacttttgctagtgcagaatctgtggagaatctgatggctgatgctcatgaactgggtggttctacagtagtagttgatcgagcaacacctaaggaagatgacttaaagccaataggcagaatgtcacagggggggtatggtgcatacaatgcttacatttctgctgccactaggtatgctgcagttggtgctcctaccttgtatgaccatcctggccccatgtatggaagaggggagtccagccgagggatgggcaaaaagatatttgttggcagacttcctcaggaggccactgctgatgatctgcgtctgtattttggtagatttggccgtgtaatagacgtttatgttccttaggtcccctgggggtcttgaaattttctttttcttttaatttctttggtggtttgtgagcaaaaagagcaataagtgatgagtcccacttgcatggggtcatttctttattctttt

SEQ ID NO: 23829 - DNA, 1545 bp, Gossypium hirsutum
  Clone ID: GOSHI-09MAY01-C24948_1
ttattcccatcccaccatgtcacctgcaaccaccgccctcttcttcctcctcctcctcttctccacctcaaatgcacacaacatcacacgcatactcgccaaacaccctgagttctccaccttcaaccactacctcaccctcactcatttggcttccgagatcaaccgacgcgaaaccattactgttctggccctcaacaatgctgccatgtcatccctcttgtctaaacaactctccctctacaccctcaagaacgtcctctctctccatgtcctcgtcgactactttggttccaagaagcttcaccagattaccaatggaactgctttgacttccaccatgttccaggctagtggcgccgctcctggttcctctggctacatcaacatcactgatcttaaaggcggaaaagtcggcttcggggctgaaaacaacgatggaaatatcgatgctgtttacgttaagtccgttgcagagattccttacaacatctctgtcttacaaatcagtcaggttgtgaattcagctgaagctgaagccccaacggcggagccaagcaagcttaatctaacagagataatgtcaaagcaaggatgcaaagcttttgcagatttgctgatcgcttcaggagctgatgcaacatttaacgaaaacatcgatgggggtttaacggtgttttgccccaccgaccctgttattaaggatttcatgcccaaatacaagaacttgacagcatccaagaaagcgtccctgctgttgtaccacggcgttcccgtgtatcagtccatgcaaatgctggaatccaacaacgggattatgaacacattggccactgatggagcaaacaagtatgatttcaccattcaaaacgacggcgaggtggtgacattggagactaaagttatgactgcaaagattacagggactttgaaggatgaagagcctttgattgtttacaaaattaacaaggtattgttgcccagggagttgtacaagccagtggaagcaccggctgagtcacccaagccatccaaatccaaatccaaatccaaacacaagatagccgatgcaccggaatccgatgcaccagcggagagtgatccagctgatgatcagacggcagacaatgacaatggggttgcaggactggacggtaggagattggtgatggggatgctgagcctgtgcattggggtattgctgatttgaatacactgatatagaaatatttatcagattgatacaaatggtatgggagacaatactttttaggccattggataacgagaaatggggtccttatttcatgtgagagatttgaaattttctttttcttttaatttctttggtggtttgtgagcaaaagagcaataagtgatgagtcccacttgcatggggtcattttctttattcttttttatttattcccgtttgtcattattagcttgtaatgtatagaataggttacattgcatcttgtttgagctgtaaatgcaatattctttttgtttcttttttctaaatctcttatataattatgattc

SEQ ID NO: 23830 - DNA, 549 bp, Gossypium hirsutum
  Clone ID: GOSHI-09MAY01-C24968_1
atttcttgccgctataatgatactagcatcaggttggatgtgcatgagtttccggcgcaagatacttgcatccaatagcttgaagtaccgaaggctcgacatggagctgcctgtatccgttgcggcaaaagcagaaccagaacgagatgttaacgacgggtgggataacagctggggtgatgattgggatgacgaggaagcgcctatgactccgtcgaagcctgtcacacctggcctctcctccaaaggccttgcctcccgacggttgagtaaagagggatggaaggactaataccatttttgattcaaacaagcaaccaaaacttgatcaaagaatactgtagtatgtaatatgctggtttattttagttgatcagtttttccacttagaaagctgtttgtttctttttgttttatttattgttttctttagctgagggaatgtagctgagtgggactgtcactgtttttgtattgacctctgaatcaaaccaaatttcatcggctcaatttggtttggttgatcggttataaatttttttttaagtt

SEQ ID NO: 23831 - DNA, 1123 bp, Gossypium hirsutum
  Clone ID: GOSHI-09MAY01-C24938_1
agctgtcccaaagctgagaaaattatctcagattatgttaaagaacacatccctaatgctccgtcactggctgcctctttcattcgcatgcacttccatgattgcttcgtcaggggctgtgatggatcagtgcttttaaacttcaccaatggccaatcaccagaaaagaatgctgtcccgaatcaaactctaagaggctttgatttcattgacagattgaaaagcatggttgaagctgaatgcccaggcattgtctcttgtgctgatatccttactttaattgcaagggactcaatcgtcaccgttggaggtccctcgcggccggttccaacaggtcgaagggatggagctgatctcaaatgttactgaagctaacaacaatattccaagcccattcagcaacttcacaactctccttacacttttcaacaaccaaggactcgatacaaatgacttggtcctcctatccggggctcacaccatcggcatagctcactgcccagcattttcacgccgattgtacaattcgaccggccctgggggagtagacccaacgcttgacagtgaatacgcagctaacctcaaaacaaacaagtgtacaacacccaatgataacaccacaatagttgagatggaccctggaagccgtaagacctttgatcttagctactacacattgttaaccaaaagaaggggtcttttcaattccgatgctgctttaactacggactccactagcttgggtcttatcaaccagcttctttcgagccctcagtcgtttttctatgctcagtttgcaaagtctatggagaaaatgggtcggattaatatcaaaacaggatcccaaggtgagataaggaagcaatgtgcactcgtcaacagttaaaaaaaacacttaattcagctgaagaaggttccttcaaaattgtatagggaagtttcatagtgtggtctcggtgggtgctctgtgtgtgtgtgtcatgtcctgaataattgggctcactgttacgttttttcttctttttcctttttatgttctttttttgctgttgagctcaatgggtttcataatcttcatatgttctgtatttgggtggattgaataatttattcttaatttatt

SEQ ID NO: 23832 - DNA, 496 bp, Gossypium hirsutum
  Clone ID: GOSHI-09MAY01-C24898_1
cccacgcgtccgcccacgcgtccgcccacgcgtccgttctttttaaggtacaatcaaggctgagttgcaatgactttgtggaccatagactagttggaagcttcaccatggctggtattaaggatatgatcaagttggcattgaaatgcatgagttttcccggggaaaggcggccagatatgaacaccgtttcgattgaactcgaacggatccgtgaaaacgagatggaaatgacaacagtaaaaggtgaaggtactgcaaaaatcgctctaggtagtgagctatttgcttcaaaataaggatccatcccaatgtagttttattaaagcttggggccaaagcttaggataaaaaatgaagtgtttataaagtaggggtagtgaagctgctatcataaattaatggaaatgtgtatatttattttatgggattttattgataaatattaatgtatcatacagcttattaacagccatgcagattagaagattttcgg

SEQ ID NO: 23833 - DNA, 589 bp, Gossypium hirsutum
  Clone ID: GOSHI-09MAY01-C24848_1
gacttttcttttcagttttttttatttcacagatttctcaactccctaatccccaatttcttaatttttacagaatatcaggtgttttaattcgcggagaggtagctatgtttaaagggatttttggaaaaaccaagccggaaacaaatgctctaaccactttagacaagttaaatgagacccttgaaatgctagagaaaaaggaaagtgtgcttctgaaaaagactgctgcagaggttgaaaaggccaaggagtatgccaaagggagaaataagaaagcggctatacagtgcttgaagaggaagaaactgtatgaacagcaaatcgaacagcttgggaactttcagcttcgtgttcacgatcaaatgataatgttagaaggtgccaaagccacaactgaaacggtggatgcattgagaactggagcaactgcgatgaatgcaatgcagaaagcaactagcatagatgatgtggacaaaacaatggatgagatcaacgaacataccgaaaacatgaaacagattcaggaagcactatcaactcctatcgagctgcgctgattttgatgaggatgaattggaagctgaac

SEQ ID NO: 23834 - DNA, 907 bp, Gossypium hirsutum
  Clone ID: GOSHI-09MAY01-C24838_1
gcgttcggaaatatttggccagaaaccgggctggagtagggtaaccgatgatggagtacaaacgcgtgctcatttagaagctcaattggcttcgtctttggctctgaaatccccaaacgaataccgccagagccttctttcctacatacgcttccttgcaagagaagcggatgagtctcgattacgagaggtctgcgaaagttttcttggtccaccaaccggaatggcttccgattccaagaaccctgcttgggatgcatatgtgctcggaatgaaaaagcacaaacttttaagagaagacattcttccagcaatggcatcgaataggaaagtccaacgattacttaacgagttcatggatctcctctccgaatatgcaagtatcgaaaataacttagaccaaagagacccatctccactgaccgtatctcaaccagagattgacccgatggactccaacccccctgcaacctgccaaacagatactgttgagccaacaacagataagacggaaaacccgtcccccggtataatagatcaaatggattctattctatcgaatcaagtaaactcgggtaccaaatcttccgatcaagtaaatcaagctccaccaagcgaagatcctgctggttcataatgcaaatactaactaatggtgttaaaaacttagaataggggactgcactggtatatatatatccctttgcttgatggtttaatgcttgaaactgaaccatcagatgttctttttttctctttgatcttctttgggcatctaacttgtagaatttcccttgttagtgttaagagttgagttttcttttcttttttctttttctttttcatgttattgatagaaaccattaatcctttgtacacttgagctttgatattaatagtttctatc

SEQ ID NO: 23835 - DNA, 857 bp, Gossypium hirsutum
  Clone ID: GOSHI-09MAY01-C24598_1
acttgacccagtagaagaagcaaacaagcccagctttaagcatattgtagctgagcagcaagagaagcagaaggaagcagagacatctaagacccagatgatctcacttaggcctgaagcgcctaagcccaaggaaaaatggtacgttgttttgagcggaccaaaagcaggagtattctcagaagctgaaaaggagctgatcaaggaccagcccaatatcaaggaggcccaaacgtagtttgaagcccaaacaattttgaggatagcaaagaccatggcagaattcaaaaagcccaaggtcgaaagaagcaagtttatgatgccccagctcataaacagcaggatgccaggaggacccctattagcagaagaaacccaattctcattcgaggaatggaagaggtattatcttctagccaagaaggatgatgaaagcccaatcactttcatcagaaagaacggactgaagcaagggatagccagcctaatggctaccaaggaagacaaaacaaggctactctactctagactagccatgtgtatctatttcaacgaagaagctcaactgaagtttcttccagaaggattacaagctgcaataatcaaatattgcagaattctcaaaattcattttgacaggactatacctggacataaggagcagtctaccagactgagaaggaaataactatttccaaccgatccatttcatcaaaatcggaacagttggaaaaatgaacatactgaaggatgatggaatacctcagataaacatctataaggaacctgaactagtggagactagatgtaggagaatttcttccatttgtgaagaaataataaaaaaggaataacag

SEQ ID NO: 23836 - DNA, 702 bp, Gossypium hirsutum
  Clone ID: GOSHI-09MAY01-C24588_1
cataaccaaagctaagaaacttattacgcggcacacaatgaagttccgttcaaggggacaaaaaggttcaggttcaggttcatcttctcaacagagagaatcacttccatcatcaccgatggagttggagatcacttcatttgaaacagactcttctagtggatcctcaccatatgaggattttcatgaatagactcgtctctcatcaaatgacagtattattcttaggccttgaatggagcaaacagtatgcagtccgcaaatatgtgcccaattacttcagagcgttgatgacaagcaaccgcatttttttgctaaaatgtaacagtgcttgaagacagactcgtttctgatcttcaaaaaaaaaaaagatggttgaagaacacccagctccagaaatatgaaggtatgcctgcttggttattgactgtgcaggtactggttgatgatgtacccttgtattctatggtgattgatctttgaaagctgggttagatcatgtttgttgttttatgaccatctgcttcatttgaccgagtgattgaagcaggttcaaatccataaattttgtaggttgggtagaaaatattaacagattatacgagctaccaagtactataattttgtacatacatttaaataatatatattggaatagaaataaatgtgaaagttacaatccttgtgatgccaaaaaataat

SEQ ID NO: 23837 - DNA, 651 bp, Gossypium hirsutum
  Clone ID: GOSHI-09MAY01-C24558_1
tcttgatgacttttccgatggtgtataccgttggctcgacggtgctctattggcaaaacaatcccaactatcttctcccatacgagaaagcacaactttctgtggcctgatactaaaattgattgtatagtttcaattggatctggctctttgcctactaaggctcgaaaaggtggttggcgatatctagatgcagggcaagtgctgatcgagagtgcatgctctgtagatcatgcagaggaagctttaaggacgctgttacctatgcaccctgagatccattacttccggttcaatccagtggatgaacgatgtgacatggagctggatgagacggatccaacaatttgggcaaagttggaagctgcaacgaaggattacatcgataacaattcggaaactttcaaggatgcttgtgaaagacttgttgcaccatttaaaaatgcgtaagtggagagagttataaatataaatctcaacaaccaatcatgtattttgttgttacagtgtaaaagatataaatgttgtaaatcgtattacgtagatgaagagagagggaatcagaaaaaaacatctgagacctctttgtgatgaatcagatgagagccgtatttaaaaaaaaaacctttttattatttattttttgcagaa

SEQ ID NO: 23838 - DNA, 806 bp, Gossypium hirsutum
  Clone ID: GOSHI-09MAY01-C24548_1
cccacgcgtccgcccacgcgtccgcccacgcgtccgcaagattgcagcagctcgtggaatggggggcatgtaatcaagacactacactttcagtggttcaactctaattaagtggactgttatttcaggacatagaccctacactgacgggtacgtactggctgtatttagatctagactaatcattatttatgtcgtgctcgtgattctgtgatgtactaaaagtgttaaacctcatgaagctacctttgaagcttccgcttggtgtactgattgtagcattgccatgtcctgaccggattatgttcttgatacataacctgcaatgtatataaaaccaatgtggtgcatgtaacagatctggcacataaagctcaagatatcggttcaaagagaggaaagttatcggttgaggaggttctgtttctaattcgcaaggtcttcccgtaactcgattacgtgaggaactataatctgagtatgttcctggaattggtttttattgaaaaccgatttgaatctgcaggacttgccgaaactaaatcggtgtacggaattgctgtcaatgcaagaggaactgaagcaagcaaggaaggcatttgaggttgatgaagacaagctagcaacattagagtagcttaattggctctttatttgtttaggtcaaaaggccaagtgcattaagcgttgcaaacaaatgtttataatgattttgttataagataaaaggggtttagggttttagaaataatttttggtccctgaatttaagtctactttggtatattggtatttttttttttggt

SEQ ID NO: 23839 - DNA, 302 bp, Gossypium hirsutum
  unsure (1)..(302): unsure at all n locations
  Clone ID: uC-gsflnu33B082g12b1
tttttatttggggcatgtaatcaagacaatacgctgtcagtggttcaactctaattaagtggactgttatatcaggacatggaccctaaactgacgggtacgtactggctatatttagatttagactaatcattatttatgttgtgcttgtgattctgtaatgtattaaaagttttaaacctcatgaagctacctttgaagccgcttggtgtactgattgtagtattttcttgataataactgaaatttatataaaaccaatgttgtgcanaaaaaaaaaaaaaaaaaaaaaaatataacaa

SEQ ID NO: 23840 - DNA, 1057 bp, Gossypium hirsutum
  Clone ID: GOSHI-09MAY01-C24448_1
cgaaaaaaccgaacgcatttctcttttctaccctttctgcttgcttttagccttcttggcgccaaaaaggagaaagtgccgctatggcgtttgggcaaaccctagtatcaagccgaaacatgttgttcaccgtcgtctcgcaaaaccctaaaccaaacaccaaaaccctggcttttttcccatctccgactcccctgaactcatcttctgttctcgctaaacgacagcgtcttcccttccgaacgctcggatgccccgtcgaccgcgcggcccaccccccccacccccaagtatcgtacccaaaaccctctgaaatcccgtggagcaaggaccgctgggatacggtgcacctaatcggcaatgtcggctcccccgttgaagtcaagcacttgccttctggtaaagtcctcgcctggacacgactcgccgtcaaaaaatcccccaccgacactacttggattaatttgacattctgggacgagctggccaatactgcgtatcagcatgtggagaaagggcaacagatatatgtatgcggtcgtctggtttcggatacggttgaaagtgatgatggcgaacagcagacttattaccagaatagttgtccaacaaataaatttcgtccaaaggaactcgccttcaatggcttctaatgaccgtggctttagtgggatgtcaagtaataggaaagttggctataatggtgagaataatgtgggttctgctatggaattatggcaagcttttttcgccaatcctactgaatggtgggataataggaaaaataagaggaacccaagatatccagattttaagcacaaggatactggagaagctctatggattgaaggtaggaatactccccattgggtgagatcccagttggagatactagattctagaatgagctctctgcaagatgaggatgaaaggatgttttcttcgatggccagtgacaatctcctgcctttttaatgggttaaaccagtgtgtttatgatgttactataaggtgattgcacttggccagggccctgcattttggatgcaaaaagttt

SEQ ID NO: 23841 - DNA, 638 bp, Gossypium hirsutum
  Clone ID: GOSHI-09MAY01-C24788_2
cggacgcgtgggcggacgcgtgggcggacgcgtgggttatcccttgtaggtaaagttggaggttttattgcttcaattcctgaagtcatggttgcggctctcctgtgcttcatgtgggcgatgcttgcagctttgggtttgtcaaatctacgttatagtgaggcaggaagctctcggaatatcataatagttggattatcgttatttttctccctctcgataccagcttactttcatcagtatggcatctctccgaattcgaattggtctgttccaagttattttcaaccatatattgtgacatcacatgggcctttccgcactaaatatgaaggggtaaattacattatgaacacattgctatcattacacatggtaatagctttcattgtggctgttatactcgacaacactgtacctggaagcaggcaagaacgtggggtttacgtatggtctgagtctgaggctgcaagaagggaaccagcaggcgtcaaagattacgagttgcctttccgggtcggtcggatcttcagatgggtaaaatgggttggtctttgacttgaacaccaacatcgcgaagagctggacgacaacgaccattagtaagacccattctctgtaatttatattgtagaaat

SEQ ID NO: 23842 - DNA, 1213 bp, Gossypium hirsutum
  Clone ID: GOSHI-09MAY01-C24788_1
cccacgcgtccgcccacgcgtccgcccacgcgtccgacatgacaaactattaaaggatgctttagatgaaattccagataccaggcatgtcggttccggtggccttttgaattgtgggcatcaacaccacatcagccggctgggttgttgttgctgcttcttgcttcttgattatgctttacaaacttatggcatattggtttgtggagctcttggtggttcttttctgcataggtggtgtggagggccttcaaacttgcttggttgctttattgtcaaggtggttcaagcgccgtgcagaatcatacgttaaaattcctttgtttggagctgtctcataccttacattggctgtttcccctttctgcattgcgtttgctgttgtttgggctgtttaccgcaatgtttcctttgcttggataggtcaagatatactcggaattgcattgataatcacagttctgcaaattgtccatgtacctaatctcaaggtgggaacagttctactcagttgcgctttcttatatgacatcttttgggtatttgtttcgaaaaagttgttccatgaaagcgtgatgattgtggttgctcgtggggatagaagcggagaggatggcatcccaatgctactgaagatcccacgcatgtttgatccatggggtggttatagcataataggatttggtgacatccttttacctggactgttgataacattttcactcaggtatgattggctggctaacaagactcttcgagctggctacttcttgtgggcaatgattgcttacggcttaggtcttctcattacatatgtggctctaaatttaatggatggacatggtcaaccagcactcctttacattgtcccttttacactaggaacctttttaaccctaggaaaaaagagaggtgatctaagagttctctggacaagaggagaaccagaaagaccctgtccccatattcgacttgaacaccaacatcatgaagagctggacgacgacgaccattagtaagacccattctctgtaatttatattgtagaaattgttgtgtggctgaggctgttcatttggaaacttactttagctctagcataaatcttgatgacctttgaagacaaggcaaggtatgttatcaattaacaatagtctgtatcattcaaaaaaaaaaaaaaaaagacaaaagaaagcgtgcattgataagcttc

SEQ ID NO: 23843 - DNA, 591 bp, Gossypium hirsutum
  unsure (1)..(591): unsure at all n locations
  Clone ID: LIB3829-027-Q6-K6-B5
ggttcaagcgtgctggnaaaaactacattaaagtgcctttctttggaactctctcataccttacattggctgtttcccctttctgcatagcatttgctgttgtttgggctgtttaccgcaatgtttcctttgcttggataggtcaagatatactaggaattgctcttataatcacagttctgcaaattgtccatgtacctaatctcaaggtgggaacagttctactcagttgtgccttcttgtatgacatcttttgggtatttgtttcaaaaaagttgttccatgaaagcgtgatgattgtggtaagtaatccgtcttatccaactctagtccatgtgctatatcagaattagaaggttagtctttatactattaaggatattcaaattatgaaaggctagaaagtaatactgatttactcgtgtctattgcataggtagctcgtggggatagaagcggagaggatggcatcccaatgctactgaagatcccacgcatgtttgatccatggggcggttatagcataataggatttggtgacatccttttacctggcctgttgataacattttcactcaggtatgattggct

SEQ ID NO: 23844 - DNA, 517 bp, Gossypium hirsutum
  Clone ID: LIB3585-050-P1-K1-G7
cccacgcgttcggtctgttccaagttattttcaaccatatattgtgacatcacatgggcctttccgcactaggtgtgagggggtaaattacattatgaacacattgctatcattacacatggtaatagctttcattgtggctgttatactcgacaacactgtacctggaagcaggcaagaacgtggggtttacgtatggtctgagtctgaggctgcaagaagggaaccagcagtcgtcaaagattacgagttgcctttccgggtcggtcggatcttcagatgggtaaaatgggttggtctttgacaattcttttttgcctaggataatcacttggttcaagttcgtcaatatcatggggatgactactcatatcggtaaatagatgtctgaactgttcttttttttttcctcacacgatggaactgtgttttttggtgggctaataaagatttaagctattttgtgtacattgaaagatccagatggatccagttgttttgtaatcttagaattttg

SEQ ID NO: 23845 - DNA, 268 bp, Gossypium hirsutum
  unsure (1)..(268): unsure at all n locations
  Clone ID: LIB3583-033-Q6-K7-E7
gcggttggtaccatattgtgtgcttcatattggtctgcatggagtgctagagaagctgctattgaacatgacaaactattaaaggatgctttagatgaaattccagataccaggcatgtcggttccggtggccttttgaatatcaacaccagatcagctgtcttatttgttgtttttgcgtggggggtgttgattatgctttacaaacttatggcgtattggtttgtggagctnttggtggtttttttntgnataggtggtgnggagg

SEQ ID NO: 23846 - DNA, 669 bp, Gossypium hirsutum
  Clone ID: GOSHI-09MAY01-C24758_1
ggacaggttatgaagttgaacagaccaaaaactgggcactccctataaactgcagtgcactagcagaggaatctgtttcaatacaaatggcagcaaaagcagcagtgtcagaatgtagagcagatggatggatccaattcgaggaaggagaattacagcaaagaaagaactttgtcgaaaggaatgacacgtggcagcacaaaatgcaattctcttactcatgcctatcacctgttcttagccctaatcctacctctacgacggcagcgattagcactgtcaccaccgtcgcccctccgccaccaataagaccaatgggcccaaagcaccaataccaacaccaacagctctttaagactcatcatggtcttaataatatctttaaatcaccatgcggatataccaccaacaataccaatgtctttgatttcaactttgttagaaaccaagaggcgacacttggagaagatgactcacaaaccctacaactcttccctcttcatagctgtaacgatgacggttccgatgattccaacgagaaagaaaacgagatatcgatcgccaccgccccggggaatgctaaccttggtggtcctaattatcagttttttgagttccttcctttgaagagctaaaatggaaaacaatggagggatattttttaaaaat

SEQ ID NO: 23847 - DNA, 628 bp, Gossypium hirsutum
  Clone ID: GOSHI-09MAY01-C24718_1
acgggcctgaaagcaccaggagggggcgaatgtatcatggctgggctcttcttttaccggacgggagagtcttgggtgccggcggcaacccttataatacatacacttgcaggaacgttgcttacccgacggagctaagattacaagcttttgtccctgattatatggaccggcaattcaatgatttgagacctgggaatgtaacgatagagtatgaggggcattcatctggtgttgcatatgggacagcgtttactattcatttctggcttggacgaaggccaagtaaagacgtggaatatagtgtttatgcgccgccgttcacgacgcattccatttcaatgaatcaaaggttgctgaaactgaggtgccggcacaaaacaagggacggcggtggttcgatgagtgctgttttggaggctccaccgtcgccgaatgtggcaccacctggttactatttgcttactgttgttaataatggcatccctagcttatctcaatggattagattcatccctgcttgatctttcttgcactttgtcttcaatatccaaaataatatgttttttaatctccctgaataaagtgtaaccacctattctgttaaaaaaaaaaaaaaagggcggcc

SEQ ID NO: 23848 - DNA, 527 bp, Gossypium hirsutum
  Clone ID: GOSHI-09MAY01-C24618_1
ctgatgcattaatattgaatcgtctctttggacatttatttagcaatggagttatacttgttgcaacttcaaatcgtgctccagataatctctatgaaggtggattgcagagggatctttttctacccttcattgccactttgaaggaaagatgtattgttcatgaaattggttcagcagtagactaccggaaactgacctcggcagaagaaggtttctacttcattggcaaagatttgtccagcctactaaaaacgacctttcagcagttgattggtgaacatgttgctagtccacaagtggttgaagtagttatgggttggacgttgcaggttccccttggtgctaatggatgtgcttatttctcgtttgaggaactctgtgacaaacctcttggggctgcagactactttggattgttcaagaactttcacaccctagcgctggaaggtgttccaaaattcgggctccacaacaggacagcagcatatcgggtagtcactttagttgatgtaatgtatgaggac

SEQ ID NO: 23849 - DNA, 1019 bp, Gossypium hirsutum
  Clone ID: GOSHI-09MAY01-C124630_1
cccacgtttccttgaatgcatactttgattagagacagggatatttctaagcatgattttgtcttctattcagatcggcttattcgtctggtggtggagcatggtcttggacatttgcctttcaccgagaagcatgtaatatacgccaacagcatcgatatatactggggttgatttttgcaaaaagttgtgtggtgtttccattattagaagtggtgaaagcatggaaaatgcattacgtgcatgttgcaaaggaataaaaattggcaaaattctgattcaccgtgatggagatgatgggaaacagcttatctatgagaagcttcccaaggatatttccgaacgacatgtcctccttctggatccggttcttggtacagggaattctgcgaaccaggccattgaactactgatacagaaaggagttccggaatctcacattatattcctgaacctcatctctgcgcctgaaggaatccattgtgtttgcaaacggttcccatccttgaaaatcgtcacttcagagtttgatgttgcactaaatgaggaattccgtgttataccagggatgggtgagtttggggaatcgttactttggcactgatgactgatccgccattgttgacaaaagtccaactaaccaggtatcatatggaaaccggtgcttgaatatgaacattccaaatacatgtaaaggtattgggtaggatgatggagagaaagtccgttgagacctccattcaattaccttgtttctggtgccttaaagcctgattccgacttgcgtgaagtcgaaaatttattccaatctttccttttttaacaatccgtagaagtgccttaatcagaggtatgtggttggttggaaaaaaaaaagggcgccttaagacaattcaccttttgaattatttttttgacaacttaatggccaaacaggtgaatgaaaaaaatggaaattttttgtttatatttttttattactatttatatttttatttaatttatttatttatataatt

SEQ ID NO: 23850 - DNA, 673 bp, Gossypium hirsutum
  Clone ID: GOSHI-09MAY01-C124180_1
cctattcgtacgcccactcgtccgcttttctttatgggacttatttaaccaaatccgcgcagtttttgttcccagtgaccctttggggtgctttttcttatcatagccactcctccttcttcagatggggtggcttcaatccctgttttctccattgatgaaactctggtttcgtctccactcatctcagagaaaaaggagagggatatacattttgtatgaagatgtgaaatcttgcccttgtgaggatgtgcatgctttatggcacaatactgggggaatcaaatgcacctgctaaaacattgaactgatcaagaaccctttttctgggtatgattttttctaaagaagcacacctgttgtacataagtatatgtatatatctatatgatatatccgctttcgggtgagtgcattatacgagcatgtatcctttatgagaaagtttaagttttttttatacttatattcgaatatatgttgaatgtaaatattaaaaattaaaaaaatataagaaatttgaatgactcagcataattatttatgattcaaaaaaaaaaaaaaaaagaaataataaataaaaatatatataaaaaaaattaaaacatatttaatataaaaaaaatacatttttaccaatccatttttcttaaagggggccctctttaaagat

SEQ ID NO: 23851 - DNA, 591 bp, Gossypium hirsutum
  Clone ID: GOSHI-09MAY01-C24138_1
cttgaatggtcttcagctccaaggatagcacaattacagatgaagacattgatagaatcattgccaagggagaagcagcgacagcggaacttgatgccaagatgaagaaatttactgaggatgcaattaaattcaagatggatgatactgctgaattgtatgattttgatgatgacaaggacgagaacaagtttgacttcaagaaaattgtaagtgaaaactggattgagccccctaaaagagagcggaagcggaattactcagaatctgagtacttcaagcaaaccttgccccagtctgctccagcaaaaccgaaggagcctcgtattcctcgcatgcctcaactgcttgatttccaattcttcacactcagaggctgagtgaagttgtatgaaaaagaaagtacgctatctcatgcaacacatcagagaatccggtaaagacctttgatggggattgactctgagaaggggaaaccgtaactgtgaaagttgaaaaaggaccactttgaagagattttcttatgagttagagattcatacttcttaaactggagaattgacgatgattaaagatgctcaatgaagagaa

SEQ ID NO: 23852 - DNA, 794 bp, Gossypium hirsutum
  Clone ID: GOSHI-09MAY01-C24098_1
cccgccattgacttggaagcaacgattagaagcatgcattggtgctgcccggggactgcactaccttcatacaggagcagagcggggaattattcacagggatgttaaaacaaccaacattttgttggatgaaaattttgtggctaaaatgtcagattttggcctgtcaagagctggtccttctttggagcatactcatgttagtactgcagtgaaggggagcttcggatatctagaccctgagttttttcgcaggctacagttgaccgagaaatctgacgtctactcttttggtgtggtgttgttcgaagttgtttgtgctcgtgctgctataaatcccagcttgccaaaagagcagataaatcttgcagagtgggcaatgaaatggcagagacaaaagtcgcttgaaaccattattgaccctcatctgaggggaaactattctgcagaatcaatggagaaatttggagagatagcagagaaatgccttgctgacgaggggaagaaccggcctacaatgggggatgttctatggcacttggagtatgtgctgcaacttcataaagcatggattgggtccaacaccacggataattccttctcaagcagtcaggccctgagggatttggaagtgaaagaagctgaaaataagcagtttgatggaaactcttgtttaagggcatcgaactctcattgtagcttgtcttatgacggacaagtgaaaaactggttattggattcctttacaatataaaactacttgtagctggaaattctttttatttttggtggat

SEQ ID NO: 23853 - DNA, 789 bp, Gossypium hirsutum
  Clone ID: GOSHI-09MAY01-C24068_1
caaagattattttgttatgtgcttggcagctgcaaataagctgatattattttgatttgggttcctaaatcgttgggaggagggactgtaaaaaagcataggttccccatgcagatcctcccgtttcgaggaggcgcacttgtgtgcttcattgcttccttgttatttgttgccagtttttgcaatgccgatgctaaaacagtcgaggttgtcggggctggtgagtgtgcaaattgtgcaaagaataacttggagattagccaggctttctcagggctacgagtaaacatagactgcaagcccgaaaatgggaagaacttcaaaacacgaggatcaggggagcttgataaacaaggcaattttaaagtatccgttccagaggatttggttgaaaatggggaactgaaggaagaatgctatgcacagcttcacagtgtatcggcagcaccttgtcccgcccatgatggcttggagtcggccaagttagtgttgaagtccaggagtgatgggaaacacgggtttgggttaaaaggaaagctcaaattctcacctctaacctgtgcttctgccttcttttggcctcactttaagtttcctcccttgcctaattggaaccatccccctttgcccaagtttccacttcccccattcaaaggcttccaccaccattatccaataatccctcccatctactagaatcctcttccgccaccgtccccggtgtacaagccccctccatttcccgtaaacccacctgttccaatctataaacctccaccatttccagtc

SEQ ID NO: 23854 - DNA, 896 bp, Gossypium hirsutum
  Clone ID: GOSHI-09MAY01-C24038_2
tctcacgcgtccgaacagctgttcgtaattattggtcccttctgtcccccctaatattctcagatcatccaaagagacctggtgacgaggatccttctccaccttataacatgttcaggaatgtgctagacatgaatgctcgctatggtggttttaatgctgcattactggaagcagggaagtctgtctgggtcatgaacgtagtcccaacaactggacccaactaccttcccctggttcttgacaggggatatatcgctgtattccacaattggtgtgaagcatttccaacatatcccagaacctttgatatggtgcatgctgatggacttctatcccttgagactagtcaatatcgcaggtgcactatgctctgatcttttaacggaaatagacaggttgcttcgtccagagggttgggtaataattcatgataaggctcctcttatcgaatcagctagagctctaactgtgcagttgaagtgggatgccagagtcgtagaaatcgaaagcaacagtgatgagagactcctaatctgtcagaaaccattctttaagagacaagcaacaagctaagaacaatatctggagaagaagccccaaaatatcccagaacttatgatatggtgcatgctgatggacttctatcccttgagactagtcaatatcgcaggtgcactatgcttgatcttttaacggaaatagacaggttgcttcgtccagagggttgggtaataattcatgataaggctcctcttatcgaatcagctagagctctaactgtgcagttgaagtgggatgccagagtcgtagaaatcgaaagcaacagtgatgagagactcctaatctgtcagaaaccattctttaagagacaagcaacaagctaagaacaatat

SEQ ID NO: 23855 - DNA, 708 bp, Gossypium hirsutum
  Clone ID: GOSHI-09MAY01-C24038_1
gtttacactccgaaaactcaatgaggataccacagactctagaacagctgttcgtaattactggtcactgctgtcacccctaatattctcggatcatccaaagcgacccggccgcgaggatccttctccaccttataacatgctcagaaatgttctagatatgaatgctcgttatggtggtttaaatgctgcattactggaagcagggaagtctgtctgggttatgaatgtagtctcaacaagtggacctaactaccttcccctcattcttgacaggggctatgttggtgtattacatgattggtgtgaagcatttccaacatatcctagaacttatgacatggtccacgcagatggacttctatcccttgagactagtcaacatcggagatgcaccatgcttgatctattcactgagatagatcggttgcttcgtcctgagggttggatactaatccgtgacgccgctcctcttgttgaatcagccagagctctaacgacacggttgaagtgggatgccagaatcatagaaattgaaagtaacagcgatgagaggctcctcatttgtcagaaacctttcttcaagaagcaagcaatgtgagaacaatttctccattaaaccctagtttatgtcttgggattcaaactcctcgtggccgtgcctcctcgtcttcagctccaccatgaaagaggaatccatatattttg

SEQ ID NO: 23856 - DNA, 446 bp, Gossypium hirsutum
  Clone ID: LIB3829-032-Q6-N6-H10
aaacctaagctatacgtttttcacttgcaatggcgcctctgtttcgattaattacaagaccctatccatgccttgcggctttcatttttgtttttcatcaactatctttgctgctttcttctttctttctgttcaaaatgcacaaaatgaatttgaataccaagacttgaaaaattttggggcttcttctccagatattgttcttagcttgttgcttgtctcttaaagaatggtttctgacagattaggagtctctcatcactgttgctttcgatttctacgactctggcatcccacttcaactgcacagttagagctctagctgattcgataagaggagccttatcatgaattattacccaaccctctggacgaagcaacctgtctatttccgttaaaagatcaagcatagtgcacctgcgatattgactagtctcaagggatag

SEQ ID NO: 23857 - DNA, 395 bp, Gossypium hirsutum
  Clone ID: GOSHI-09MAY01-C24248_1
ttttttacataaaagttttagaatatatataataaatatatatcgtcgagttacagagagtgggggagggggggggggattttaccaagagctgaaatgcagctgcagcaaacaaaggcccggaaaaaaacttcccaacataagttctcccatgaccttcaaccaatgtctacaaatcgtcaaacacaaagaaaaaagggaactgacgggagaggaatggagaaaccaagtagaaaaatgaagatgtatccagagtgtatgagaaaacgaccagattgtaaaaatgaacaaaacgtgtgaattagactcggactacatcctggaggcaatcataaaagtgagatatcttaatcttttccttccctgagtagattgcctctgctgctccaccttgc

SEQ ID NO: 23858 - DNA, 496 bp, Gossypium hirsutum
  Clone ID: GOSHI-09MAY01-C25988_1
gtttgggatagggatctaaagagttcaggtcttttcatggagaaaataggccccggttcggctccaaaggttttcctcttgtctaattctataagttcttccggagcaaatattagtactggtgtttttaacatgactgttatcccaaaaccctggagggctagcatgttagcagcagctctacaacgcaccatgggtgttgggaacaaagggaatccctgtaatgggcagttacctagcttgtctcttcgaaatcttcttcttgggagaaaaattctaatcgtagatgacaacaatgtgaatctaaaagtagctgctggtgcattgaagaaatacggagcagatgtggttagtgctacaagaggaatagaagctattgagctgctcacaccacctcaccagtttgatgcctgtttcatggatatccaaatgccggaaatggatgggtttgaagctacaaggagaattcgggatatggaacataatatcaataatc

SEQ ID NO: 23859 - DNA, 419 bp, Gossypium hirsutum
  Clone ID: GOSHI-09MAY01-C25948_1
gttcacagccgtcccatatttcagtgtgttgatcaactttctcagggagcatcgcagtctcaaaatgagtctcggcataaagacattcccatgtttcagagaattttgatgaatggcaatgggtctttcaatcattcttcagaattacagggcaattcaaatagtcaggctgggcaagcacaaaatatgcacactttagatggaagctcgaagattcccaatgtacttgagcggcagttaagtttacagaatgatgccaggtctccttcacagagttttgggtctcatgaaatcgcttcaaattacagcttagagaataagcgaggcatgagagagaagcatggaggtagcttatataggagccgtagccagaaagagcaagacaaacttctgcttgggggagctgattgtgctgagac

SEQ ID NO: 23860 - DNA, 1095 bp, Gossypium hirsutum
  Clone ID: GOSHI-09MAY01-C25938_2
catagaaccaaaaacaagaaaaacatgggttctgaaaagcaagggtttatatggttatcagggcttttgtttctgaatatccttgtgttatccacagctgatgtccattattacgagttttttttgcaagaatcccagttcactaagctgtgtagcacgaagagcatcttgaccgtcaatggcagctttccagggcctgagattcgggttcgcagaggggacacagtttttgtcaacgtccacaatcaaggaaaccatgctgtatccctcaagtgggagggcgttaagggttcaattgatggttcgaatgagtcgattcagccagggggagacgtcacttacaagatagagttagggggtgaaataggaactctgtggtggcacgccaccagtgcttgggctgcggcaaccgtccacggtgcctttgtcatttcgccggcagccaatgaagactatcctttccccgcacctacttctgaccaaacaattatacttggggaatggttcagggaagagttaacggaagctaatcaaaccattgctcctggctcagcagatgcttacactatcaatggtcatcccggagaaacatatggatgcagcaacgatacaacttttgagatgcaagtagattaccagggcctttaccttgttcgcgtaataaatgcagttgccaatgaaacaatgctgtttgacatcgaaaaacacagattgacgattgtcggacaaaatgggacatataccaatcgttcctttacaagttctttaaccctagccccaggccaagttattgacgtcttgttgtgtccaaaccaaaatgttggccgttattacatcactgctcgatcttcctccggcagacatattaccaatggaattctgcgatataccaccactactactagtttttaatataggtaaatagtttcgtccgttgctaaaaataataataagagtaatgttgaaataagagattaaatataatgtgtgtatgttcctttatatttgttgtgatcgttgttgtttgtttgaacgatgtgttttgaatgctgtaatgggaagatgttgtttaactaaaatgtacaatatttattc

SEQ ID NO: 23861 - DNA, 722 bp, Gossypium hirsutum
  Clone ID: GOSHI-09MAY01-C25938_1
ccggggaagaacacagatacatagaaccaagaaacagaaaaacatgggttctgaaaagcaagggtttatatggttatcagggcttttgtttctaaatatccttgccttatccacagctgaagtcctttattacgagttttttttgcaagaatcccagttcactaagctgtgtagcacgaagagcatcttgaccgtcaatggcagctttccagggcctgagattcgggttcggagaggggacacagtttttgtcaacgtccacaatcaaggaaaccatgctgtatccctcaagtgggagggcgttaaggattcaattgatggttcgaatgagctgattcagccagggagaaacttcacttacgagatagagttagaggatgaaataggaactctatggtggcacgccaccagtgcttgggctgcggcaaccgtccacggggcctttgtcattttgccggcagcgaatgaagactatccttttcccgcacctacttctgaccaaacaattatactgggggcatggttcaggcaagagttaccagaacctataccatatccggctacaaagctcacttaatgcatccgaaacttcggtgccaccttacctttgaacgcgtattcagggttaccttgtaaaaattcttcgaaaaaaattgcctggatcccattcatttggaaaggggtttaaactttaattttactcaccccccgtttgtttggaa

SEQ ID NO: 23862 - DNA, 403 bp, Gossypium hirsutum
  Clone ID: LIB3135-062-Q1-K1-E8
gaccgacgcgtccgcccacgcgtccccaagaacacagattcattttaccaagaatcagaaaaacatgggttctgggaagcaaggggttatatggttatcagggcttttgtttctaaatatccttgccttatccacagctgaagtcctttattacgagttttttttgcaagaatcccagttcactaagctgtgtaccacgaagagcatcttgaccgtcaatggcagctttccagggcctgatattcgctttcggagaggggacacacgctttagcaccaactcccccatataaccccccaagtgctacacctccagctaagccaccaacaactacagcatactcttacgaagccaccaaattcaccatagccaccttgtacgacaaaaaatgattgcatcccat

SEQ ID NO: 23863 - DNA, 760 bp, Gossypium hirsutum
  Clone ID: GOSHI-09MAY01-C25858_3
tatgtctattcttttatacactttggggccttgccatgttggtttaatgtgatattttggaagggtttttggtttctgttactttccatattgaaacttgtcttcaagtcatagctaacatctctaccagcaatttattgctgtacttgtgggatgtaacacataatgtatattgtgaaggatttttgactctaccaatgctgacttggagaattcaagagttccaagctcttctgagttaaaaactaagcctgatggttgggaaacaacatcaaaagctcctgatggaaacgtgtgggagatgtcacagagggaagaagatattctcctcccaagaatttgatcgccgaattgcttactgtaaattccagatagctagttttattaagactcacatatttagccggaggagacctattgatgggtggaaatacatgatagattagatagggcctaatgcaaggaatggcaagggcagtgttttaaggttaccgagtttgtctgatgcatagaggcaaccagttaaggaggagaagttacaattgaaaccttgattggtggttgagacttgacaccttgagaggtcacataatcaactataccccagttgcagaatctgttcattttgagtagttcttacaataagagcaagcagttatggggaagcaggatgctctggttacaaaaggaggtcctaaaggaaaaagagtagatggcattctatttaagcattggaagggagaggaagagaggataatgt

SEQ ID NO: 23864 - DNA, 807 bp, Gossypium hirsutum
  Clone ID: GOSHI-09MAY01-C25858_2
tatgtctattcttttatacactttgtttccttgccatgttggtttaatgtgatattttggaagggtttttggtttctgttactttccatattgaaacttgtcttcaagtcatagctaacatctctaccagcaatttattgctgtacttgtgggatgtaacacataatgtatattgtgaaggatttttgactctaccaatgctgacttggagaattcaagagttccaagctcttctgagttaaaaaccccgcccgtccgcccgcgcgccccatcaaaagctcctgatggaaacgtgtgggagatgtcacagagggaagaagatattctcctcccaagaatttgatcgccgaattgcttactgtaaattccagatagctagttttattaagactcacatatttagccggaggagacctattgatggccgcccacgcgtccgcccacgcgtccggcctaatgcaaggaaaggcaagggcagtgtttcaaggttaccgagtttgtctgatgcatcgacgcaaccatttaaggaggagaagttacaattgaaaccttgattggtggttgagacttgacaccttgagaggtcacataatcaactctcctccagtcgcagaatctgttcattttgagtaggtcttacaataagtacattggtcttctgttaatagtattaattatttgtgtattatataaattttgttatatttatgagttaggatgtttgagactaacctgtgctggatgtgtgttattgtacttttctttcttgttatatttaggtacaggaaagtattgtgtagaactact

SEQ ID NO: 23865 - DNA, 469 bp, Gossypium hirsutum
  unsure (1)..(469): unsure at all n locations
  Clone ID: uC-gsflmaxxa043f05b1
ttcaaggttaccgagtttgtctgatgcatcgaggcaaccagttaaggaggagaagttacaattgaaaccttgattggtggttgagacttgacaccttgagaggtcacataatcaactctcccccagttgcagaatctgttcattttgagtagttcttacaataagtacattggttttctgttaataaaacttaaactaattaactcctatattgagtttgtggttggaggaaacggtgacacatttaataacaaaattattaggaaaattgcaccgacataccatagatttcgacttaggttgtagacatatcatctgggggccccagaaccgacagtattgggaccacaaacgtgcaaaatctattatagcgtctagggtaaattaattatgtttaaatttgaatctaatttttgaacagacctaactggctcccnctacgtttcttaaagaaaaacaaattagtttc

SEQ ID NO: 23866 - DNA, 297 bp, Gossypium hirsutum
  Clone ID: uC-gsronu33B087f02b1
ggtgaccctctgatgggtggaaatacatgatagaagagatagggcctaatgcaaggaaaggcaagggcagtgtttcaaggttaccgagcttgtatgatgcatatactcaaccatataaggaggagatattcctcttaccacatttattggttttggccaccttttccattaacttgtctcttttttaacactttctttcttcatcataattttattcttaaccatgaccacttcaagacttttttccacatatcttcttcttatgctatattcctttaaatgtggcaccaccctgtc

SEQ ID NO: 23867 - DNA, 472 bp, Gossypium hirsutum
  Clone ID: GOSHI-09MAY01-C25598_1
gacaaaaacatcatccctttcgtgataatgaagacagtcttcactattttctcggtacttgtatccaccgtaatctcccccgccaacggctgccctccgtcggaccgcgctgcgctgctagcattcaaagcagctctccacgagccttacttgggcatcttcaactcatggacgggcaccgactgctgccacaactggtacggcgttagctgcgacccacagtcacatcgagtcgccgacattaatctccgtggtgagtccgaagatcccatctttgagcgagctcaccggaccggttttatgactggttttatctctcccgaaatatgcaagctaactcgcctctctagtcttactatcgctgattggaaagggattacaggcgagattcctaaatgcattaccagtctaccatttcttcgcatccttgatttgatcggtaacaagctttccggagaaattcctgctgata

SEQ ID NO: 23868 - DNA, 324 bp, Gossypium hirsutum
  Clone ID: LIB3149-064-Q1-K1-B12
ggccgacccacgcgtacgtagtgctgacacacctgttaccgcttttgtttttacccacccacacaaccagtcgcgggcggatatttccgtggtgaggccgaagcacccatcctttgagcgagctcaccggaccgacattacgactgggtttatcaatccagaaatatgcaaactaactctcctctctatgctgactatcgctgtgtggaaagggattacaggcgagattcctaaatgcatgaccatcctactatttgttcgcatccttgatttgatcggttacaagctttttcgtataaattcctgctgatttcagcaagttga

SEQ ID NO: 23869 - DNA, 719 bp, Gossypium hirsutum
  Clone ID: GOSHI-09MAY01-C25558_1
tgggcttcgaaactgttgacaaatctggtcctaatatgaaaccaccgattcccaagccaaagcttatacccaattcaaagctggagaggatgaataatacatcagtaactgaaaggaagatcaatcatccccaaatagcgtcacctgccctctatgctactcctgaggcaactccactacctgattcaccatcttcttttcccccttcaccttacatcaggggtagagttttttgatgcttgggacgaattatcctctgagagtggatcacagtccattctgcgtgacactgaagctgaagcacgtgaaataagactcagcttactcatggaaatagagaagaggaagcaggcagaagaagctctaaataagatgctacatatgtggaaaacaatcagccaagggttagctgttgtgggattgtcactgcctgcagatcctattgatgtgacagatgatgagctggtgaatcaagctgaagaattgaggcagcaagcagatgttgcacgatttgtatcattaaccgttggaaggggaattgcaagggcagagatggagatggagatggaagctcaaattgactcaaaaaactttgaaatcgcccgattgttggaccgactacactactatggagctgtaatcagggatgtctcagaggaaccaggaggctgtagagatggcacggcgagagagacaaaggaagaaaagaaggcagagat

SEQ ID NO: 23870 - DNA, 630 bp, Gossypium hirsutum
  Clone ID: GOSHI-09MAY01-C25578_1
aatgttttgaactttcttttgatacccattccctttccattcatcaagggctttctcctattaccctttcccctctccctttctctctttcctcttcacctgaccctatcaaaggaacccagctttccatctcgctaccagacgacgatattttgaactccttcttcatcgttttttctacttcccgttcttcttctgctctccaatggctatccccgccgcatacgtttggcttgatcatgatttatatgacagaccaaattttgagaggccccaacgaaccccttcctgcgcattgcagtttgctgttaccggctcttcaattcatgtctttggtttggccatctaactaggagagtgtgttcgtcgcagatcatctctgtagcattgggatacagtatagagcctgaaaaccttgcccgggtttctgtacacaagttacacggtaatgtttcgggacagcgataatttgtcttccagttaaataagtttgtcgagttccaaatatggtgcaatggacatgctttgaagcgaagcatgtaagaaatcaaagtaatggagcaataaaggcatgaaaaagcatgcatgtgaaacatccaagtgccactcggattaaagtggcctgggcac

SEQ ID NO: 23871 - DNA, 795 bp, Gossypium hirsutum
  Clone ID: GOSHI-09MAY01-C25508_2
tttttgtggtgggattttcaattaacaatggcctccaaagcaagcagctccctcttccaaagcctgagacgctacatcaagaagccatgggagataactggaccctgcgccgacccagagtacaaaaacgcagtgcccaaagccacggagtatcgtgttcgctgccccgccaccactttgcaaaagcccatcgtccctacctccgaccctgaaaccgtcttcgacatcaaatactacagccgcgatcaacgccggaaccgccctccgatccgccgtaccatcttgaagaaagatgacgtggtgaagatgatgagagagaaaacatttgatgtcaacgattttccaaaggtctacttgactgctaaagttgaagaggatgagaatgccgttggcggaggctaccagaaataggcgagcactgagcactgagcacttatggctgaatttaatggtgcaccagtcccatctgattcactctcttagtagcttgttattgaacaaatgcaggtattgtagcatagcaatttcttgagacacttggagttaaaaggggttgcagtttcggggtttccgacattattaagggtggttgtccacattttttttatttgtttggtttttctttttcagttaatcagcatgcttgtattaatccagatgcaacagcagttggatgatgaatgatataattgactcgttcaagcttttgatggtttttgaaccatgaacaataagaaatgaatcagatatgttgatgaagaattgcaaaaaaaaaaaaaaaaaaaaataaaaata

SEQ ID NO: 23872 - DNA, 736 bp, Gossypium hirsutum
  Clone ID: GOSHI-09MAY01-C25508_1
gtccctctctcaatttctgtggtgggttttcaattaacaatggcctccaaagcaagcagctccctcttccaaagcctgagacgctacatcaagaagccatgggagataactggaccctgcgccgacccagagtacaaaaacgcggtgcccaaagccacggagtatcgtgttcgctgccctgccaccactttgcaaaagcccatcgtccctacctccgaccctgaaaccgtcttcgacatcaaatactacagccgcgatcaacgcaggaaccgccctccgatccgccgtaccatcttgaagaaagatgacgtggtgaagatgatgaaagagaaaacctttgatgtcaacgattttccaaaggtctacttgactgctaaagttgaagaggatgagaatgcagttgggggaggctaccagaaataggtattgtagcatagcaatttcttgagacacttgaagtcaaaaggggttgcagtttcggggtttccgacattaataagggttgttgtccacattttgtttatttgtttggtttttctttttcagttaatcagcatgcttgtattaatccagatgcaacagtagttggatgatgaatgatataattgactcgttcaagcttctgatggtttttgaaccgtgaacaataagaaatgaatcagatatgttgatgaagaattgacatgtggtttctatgggatttctctgacattaataatgaatcattgtcattcat

SEQ ID NO: 23873 - DNA, 613 bp, Gossypium hirsutum
  Clone ID: GOSHI-09MAY01-C25498_1
gaagaactgatccctggctttaagttctctcgatgcagttacctccagagcctcctccgtccctccgttatcagtgaactagagttagcgagacatggtttgaagttgttgaagaggaatccatcatcgtttacgccttgtttggatgggcgatatcttttgttagggcctactaaagtgcttaatcatagggagatctccaagttctccagacgagatgccgatgcttatccgaaatatgagagtcaattagagagattctgtacactcatggatccacttttggattcatcgcctcctgaatctttgcaaggtatttcatctctccaagagcgtctcaagaataaagtacacaactcggtattttggactcgtttgctgcaccaggctgcttccttggggcagaaagacatggcggattttatggatcttttattgtccccagcttcccaggttttgaataactggtttgagcctgtggttccgttggcaacccttgcaacagatgctgtgatagggagtacggcgagtgtcaacacaccagggagtggatatgtactgctgcatcatgtgatgggagaaactgatggtgatcgtggaatgtggtcatatg

SEQ ID NO: 23874 - DNA, 466 bp, Gossypium hirsutum
  Clone ID: uC-gsflmaxxa043e10b1
ttccacgcgtccggaagaagaagaagaagaaagatgatggaaattgaggaagtaagcaattatgaggcattgccattgctctcattgaatcatgtatcattgttgtgtagatcagttttggattctatgaggttctatgaagaaatcttgggctttgttctcatcaaacgcccctcttctttcaaattcaatggagcttggttgtataactatggcattgggatacacttaatcgagaacccatccattgatgatttcgacaccattgtcgaaccacggccaatcaatcccaaggataatcacatattattccaagtgtaggatgtggggcttgtgacgaggaggcttgaagacatggggatgaagtatgtgacagcagcggttgaagatgaacggaatgcggttgaccaggtgttcttccatgacccagatggatacatgattgagctctgcaactgtgagaaca

SEQ ID NO: 23875 - DNA, 437 bp, Gossypium hirsutum
  Clone ID: uC-gsronu33B087g12b1
attgccattgctctcattgaatcatgtatcattggtgtgtagatcagttttggattctatgaggctctatgacgaaatcttgggctttgttctcatcaaacgcccctcttctttaaaattcaatggagcttggttgcttttctatggcactgttatacacttaattcagatcccactcattgttgatttcctcacctttgttttaccccggccattcaatctccatggctcatcccattttatttcctgtgctgtacttcctttctcttctctcttctttccttactctctccttttttttttttctttttccccttattttcttttttattcttttctactacttatcctcctttcttcttttatttttcctcctctttctcttttacctctcatccctcccttttttttcttcttccctctttctccctctcttt

SEQ ID NO: 23876 - DNA, 766 bp, Gossypium hirsutum
  Clone ID: GOSHI-09MAY01-C25458_1
cttaaacgtaaatttgggcgatttgggtttggtcagagatttcgaaatcatcggatgcatggcttgccgtattaattttaatctccggtgtccttcctcccatacgccgcgtttcgtgcccctcaaaaaccctacgctccttattcctccttttaaaccccactcccatacccaccccagccatccctttaagctttctatatccacttctcggtggctgcggaggcgacggatgggctttgtgacagtcaattctcatatggccaccgaggaaaagcctatttccgatgatagaatgctggtgtttgtgcctccacatccgttaattaagcactggatttcggttttgagaaatgagcaaactccttgccccattttcaaaaatgccatggctgagttggggaggctacttatgtatgaagcttcaagggattggctgcctactgtaacaggagagattcaatcgccaatggctattgcttcagttgaatttgtcgacccaagggaacctttggcgattgttccaatcctaagagctggtcttgctttggctgaacacgcatcatccattttgccagctacaaaaacataccattttgggttaagcagagatgaagagacactcttgccaagtgtttatcttaataagttgcctgacaaatttcctgaaggatctcgaatatttgtggtaaatcctatgctacaacaggtggcacaattgtggctgcactcaacctcataaaggaacgtggagttgacaacaact

SEQ ID NO: 23877 - DNA, 461 bp, Gossypium hirsutum
  Clone ID: GOSHI-09MAY01-C25408_1
aggtttgtttttttggaatcattgccagtgtctgccagtggaaaagtagactatgcacagttgacagactcaatattctgcatcagtcatgttaaagatgagataggtgacattggggctagcaatctcatgcaaattataaaaaaggctatttgtgacgctttaatggtggaagatgtttcagatgatgatgatttctttatgataggtggtaactccatcactgcagcacatgtttctcataatcttgggattgatatgagattgctgtataccttttcaactccagctaagctcgtaatttccctcctagagaaaaatgtattaaataataccaaatttggagtcaatgatatcccagaatcaacaatggaaccagacaaggtgaatcaatattcttttcctgaatctgaaacttctgatccacttggctcaaagctacaaggacatttgcattgatg

SEQ ID NO: 23878 - DNA, 605 bp, Gossypium hirsutum
  Clone ID: GOSHI-09MAY01-C25748_1
gaattatcgaattatcgaattatcgctgctcttcttcttcgatcgaattatcgaatccctaattttttatttttggaaaaaaattcctaaatttttgcaattttggagcatcgaatacttcaactctcactctttctcgtctcgaattttgtttgatttctttttttgaaatttttggatcaaaattttgttcgatttttttcagcgattttctccgtcgatcaactcatcgataaagggagagaaaaaggggaaaatccgatttttgttttaattggggttttgctatggctgcaaatattaatacggctaatttcaatacctcttccgcttcagtgacaactgttaatcactctcccagtagccctaaacaatcacatcgcgctacgagggcgggttcttcgactaggactggaatcggtcgtcgagaacccgacccgatcgccggtgttccgttatcgccttcgtcttcttcgtcgtcgccaccgccattaatagctgcgactgagcagccacctgttgtggcggtggttgaggagcaaggcgggagaatgcgggttctgggtctaatggaaatgcgggtaagaggcccgcttggaacaaac

SEQ ID NO: 23879 - DNA, 411 bp, Gossypium hirsutum
  Clone ID: GOSHI-09MAY01-C25768_1
aattaactggtttttgtcagtagaaaaacccttgtgctgggataattgttgggctttttttagagaaatttactgttttcttaaggggaaattaaaatttaattttttcattgcagaaattttttgggtccagataaaatttctcggtttgattattttctcgagaaaactagtgggtttgtttggtctctgagaaaaccattgtttccctggagtgaaagatcggggtttgatttagaaaacaaagcagaacatttattttggagacgatctgcttgtacctgggccatggcggtttcaacaatagctctttacgcgagtccaccgggcagcgtatgctctacgccacaccatatcaacattaattcctgtgatttcgacttgaattcaagatcttcatcttcaactccc

SEQ ID NO: 23880 - DNA, 464 bp, Gossypium hirsutum
  Clone ID: GOSHI-09MAY01-C25718_1
gcggccgttctaaacctagggatccccccggcttgaaggattccggaccaaggttgaagtcagtgcgcgagcatagaggtgttctccctaaagttttatcccaagtgcggcaggtaagcccctctagatttgcttctttactagattgcacaatgctagatgctctgctttcttaagatgcccttaacacccttcttgagggatttcctggatgaatggtgagcttctaagtgaaaagtaaattgagaatttaatatgctagacatttattttccccatctgatgcatggagtttgatatggtgctggcagcagcttaataccatattctagatgccaaatcgataacagaattttctgtatatgttatattggttgaaaatagaagaaattgtatttttctagtatatttatattcatttggtatatatttgtttgtgtctgattttacctccgatgagcata

SEQ ID NO: 23881 - DNA, 1056 bp, Gossypium hirsutum
  Clone ID: GOSHI-09MAY01-C25728_1
attcatacatgatggctatcaagagccaccattgctgcctcagctttatctttttgttattaccattactcctacagcttcattctgtcaaaggtaatctccagttgaactactatgctcaaagttgccccaatgctgaagagatcatcaaacaacaagtcatcaagctctacaacaaacatggaaacacagctgtttcttgggttcgaaatctcttccatgactgcatggttaagtcatgcgatgcatcgttattgttagagacggtgaatggaattgaatcggaacaaaaatcagataggagttttgggatgagaaatttcaagtacgttaagacaattaaagatgctctggagcaagaatgtccaaggacagtttcctgcgctgatatcgtctctctttctgctagagatggcattgtcttgcttggaggaccacgcattgagatgaaaaccggtcggaaagatagcaagagaagttaccttccagaggtagaaaataccatccccaaccacaatgattcaatggagttggtgctttcacgctttcaatccattggcatcgacacccaaggagtagtagctttactaggagctcactccgtaggtcgagttcattgtgtaaacttagtacacagactctaccccacagttgatccgacattggaacctgactatgccgagtaccttaaagggaggtgtccgacacccgaccctgatccggaggcggtgttgtactcgagaaacgaccgggaaacgccgatgattcttgacaatatgtactacaagaacttgttgaagcacaaggggttgctggtgatcgaccagcaactgacctctgatcccactacttccccttttgtggagaaaatggctgctgataatggatatttccatgacccagtttgccagagctgtgctgttgttgtcagagaataatccacttacgggagatgaaggagaggttcgaaaggattgtcgttatgtcaacagtgaataaaattacaatgttaaaagaaactgggaatgcaaattttccttagtatgcttgcaactc

SEQ ID NO: 23882 - DNA, 384 bp, Gossypium hirsutum
  unsure (1)..(384): unsure at all n locations
  Clone ID: LIB3048-002-Q1-L1-A3
gctattaagagcccccattggtggcttagctttaatcgttttgggtaattacccattaactccttaccagctttcatttcttgtcaaaagggtaaatcttcccaagttggaactaacttatgcttcaaaaggttgtccccaaatggcttgaaagaagaatcattctaaaacaaacaaaggtcattcaaagcttcttacaaacaaaacattggaaaccaccagctgttttcttggngttcgaaatctcttccatgactgcatggttaagtcatgcgatgcatcgttattgttagagacggtgaatggaattgaatcggaacaaaaatcagataggagttttgggatgagaaatttcaagtacgttaagacaattaaagatgctct

SEQ ID NO: 23883 - DNA, 320 bp, Gossypium hirsutum
  Clone ID: GOSHI-09MAY01-C25688_1
ctccaatgcttaagccaatccattaatccttcccaagatgtttccaccattctcttctgcaacaccaacccttcttacgcatcagttttgcaagcgtacattcgtaacgctcggttcaacacctcttcgacgcctaaaccggtcatcatcatcactccattggaagaatcccatgtttccgcagccggaatctgttctcagaaagtccgttttcagctcaaaattcgtagcggcggtcatgattacgaagggttatcttatgtttccgataaacccttctttgtactcgacatgtttaaccttcggtctatatctatcga

SEQ ID NO: 23884 - DNA, 619 bp, Gossypium hirsutum
  Clone ID: GOSHI-09MAY01-C25658_1
cggaccaagtcaagttttttttgctttgttgggtcaaaggtttgggttgatcaggaactacattctttgcacgttcagtagaggttcctgtcaactccttttgactgtaatgagtaacagtatcgaagatgattcattttctaagcctgttggaagatggtctgtttactgttatggtgtgggtcacatgctaaatgacatcacttctgcatgctggtttacttatcttctattgttcttaactgagatcgggctctcctctagggatgctgctattgtcatgctttccggccaaatagccgatggtctagccaccatattttttggtgaactgattgacaggtttggacatttcaaaatatggcacggtgcaggagctatcttggttgctgtttctttttcttcggtttttggtggttgtataccttgtaaactcctttcgtctttctcaacaatagtagagactgtttcatacagtacatttgctgcaatttttaatgtcggctgggctgctactcaggtttcacacatgtccatggtgagttgcatcactctcaattcaacaagcagagtagtactggcaagctgtcgaaatgcctttacaatggttgcaaatctc

SEQ ID NO: 23885 - DNA, 954 bp, Gossypium hirsutum
  Clone ID: GOSHI-09MAY01-C25648_2
gatgagtactcaaaattccatggtcattcacctgctgtggtgactggaaaaccgattgatcttggaggatcacttgggagagatgcggccactggccgaggggtgctgtttgcaactgaggcccttcttaatgaacatggcaagtccatctctggacaaaaatttgtaattcagggttttgggaatgttggttcttgggctgcacactcatccatgaaaagggagggaaggttgttgcattaagtgatataacaggggccatcatgaacagcaatggcattgatattccctcattgctcaaacatgtgaaagaaaacaagggtatcaaagggttccatggtggggattccatcgacccgaaatcggttcttgtcgaagactgtgacatactcatcccggcagcactcggaggcgtcatcaacagggaaaatgcaaatgagattaaagcaaagttcattattgaagcagctaaccatccaaccgacccagaggctgatgagattttgtcgaagaaaggagtcattatactgccagacatttatgcaaactctggaggagtcactgttagttactttgagtgggttcagaacattcaaggtttcatgtgggatgaagagaaggtgaacagtgacctaaagacatacatgaccaaagggtttaaagatgttaaggagatgtgccaaacacacaactgcgacctccgaatgggagcctttaccctcgaagttaaccgcgttgctcgggctaccgctcttagaggttgggaagcataagaatgcttagtgctaatgctggttttgaaataaacatggaggatactatggacccctctgattcttgcccactattgtggtaaaacctcattcatatttaggagcttcaaataaagttttgccatttgtatttgttgcttaaatgttgaattctatcttagtagcaatttcgaaggccccc

SEQ ID NO: 23886 - DNA, 891 bp, Gossypium hirsutum
  Clone ID: GOSHI-09MAY01-C25648_1
gagaaaaaatcttctgatttttctgagtctttttcttatcttctgtttggctcctgagaaagtgttttaagaagaacaatgaatgcattagtggcaaccaacagaaacttcaagctagcagccaggcttcttggtttggattctaagcttgaaaagagtctcctcattcccttcagggaaatcaaggttgaatgcaccatacccaaagatgatggcacattggcaacttttgttggctttaggattcaacatgacaatgctagaggtcctatgaaaggaggaatcagatatcaccctgaggttgaccctgatgaagtgaatgcattggcgcaactaatgacatggaagacagcagttgcaaacatcccatatggtggggctaaaggtggtataggatgtaaccctggagagttgagcaaatccgaactagaacgcctcactcgagttttcacccagaaaatacatgatcttataggaattcataccgatgttccagcacctgatatgggtactggtccgcagacaatggcatggatactagatgagtactcaaaattccatggtcattcacctgctgtggtgactggaaaaccgattgatcttggaggatcacttgggagagatgcggccactggccgaggggtgctgtttgcaactgaggcccttcttaatgaacatggcaagtccatctctggaccaaaatttgtaattcagggttttgggaatgttggttcttgggctgcacagctcatctgaaaaagggaggaaggttgtgcattaatgattaacagggccatatgaacgcatggcatgatattcctcatgctaaactgtgaagatacaaggttcaaggttcatgtgggattcatgacccgaatagtctgtcagact

SEQ ID NO: 23887 - DNA, 545 bp, Gossypium hirsutum
  Clone ID: GOSHI-09MAY01-C25198_2
cgttttccgtggcactctgcatctctaatttgtttggtttttctttttggctaatcattcgctttctgtttctcgcatctttatatttttctccgattcatacacagtcgaaatcttttatctttgtgatttgcaaagaaaagaaaatgaaggaaagtatgggaaaccctcttcacctcaaatctttgaaccacatctcccttgtgtgtagatcagttgaggaatccatgaacttttatcaggatattcttgggtttgctccaatcaggagacctggatcatttgactttaatggggcatggttgtttggatacggaattggaatacatctcctgcaatcggaggatccagagagtttgcccaagaaaaaggaaatcaatcccaaggataatcacatttctttccagggtgagatttcaattcttttcattccagcatattattttattcctccttgggctaatccaatatctaagtgtgaagaaacaacatcctgctctctacagattaatatatggcgcatataaattgctactctgtttctc

SEQ ID NO: 23888 - DNA, 948 bp, Gossypium hirsutum
  Clone ID: GOSHI-09MAY01-C25198_1
tcgttcactctgcatctctaatttgtttggtttttctttttggaaatcaatcccaaggctaatcactcgctttctgtttctcgcatctttatatttttctccgatttatacacagtcgaaatctttctctttgtgatttgcaaagaaaagaaaatgaaggaaagtatgggcaaccctcttcacctcaaatctttgaaccacatctcccttgtgtgtagatcagttgaggaatccatgaacttttatcaggatattcttgggtttgttccaatcaggagacctggatcatttgactttaatggggcatggttgtttggatacgggattggaatacatctcctgcaatcggaggatccagagagtttgcccaagaaaaaggaaatcaatcccaaggataatcacatttctttccagtgtgagagcatgggagcagtggagaagaagctgaaggaaatggaactggaatacgtccgggcaatagtggaagaaggtggaatcgacgttgaacaactcttcttccatgacccagatgggttcatgatcgagatatgcaactgtgataacctacctgtcgtcccactagccggtgagatgcctcgttcatgctcccgacttaatctgcaacacatgcagcgtcagcagatacagcaagtggttcagcaataggaaccacgacacaacctcagcctccttcatttaattagctgtttattaatggagatcactagataaaaccaaaccacccaccctatctgctttgtttgtttctgtaatgatccctgtttaagtatgtggttggttttttacttgttttgtaataaagacgatgcaatgtgatcccaagggaagtgatcatttcaattaatttagaagtgggtttcatgtatggtccccttttcttgcttgaattgcacaagtctattataatataatggacaagttgaagcc

SEQ ID NO: 23889 - DNA, 526 bp, Gossypium hirsutum
  unsure (1)..(526): unsure at all n locations
  Clone ID: LIB3829-024-Q6-K6-H2
ttttcattggcactctgcatctgtggtgggggggggttttctttatggctaatcattcgctttctgtttctcgcatctttatgtttttcaccgattcatacaccagtcgaaatcttttatctttgtgattgcaagaaaaaatttttgaaagatgggaaaccctcttcagcgggggggggggaaccacatctcccttgtgtgtagatcagttgaggaatccatgaacttttatcaggatattcttgggtttgctccaatcaggagacctggatcatttgactttaatggggcatggtaattattaccaaaaagaaataaaattgttcttcatgtnaagcttaatttgtttgatgaaattcccaagaaaccttgggttgatttttcagtatataatatgagtgggttatgatgcaggttgtttggatacggaattggaatacatttcctgcaatcggaggatccagagagtttgcccaggaaaaaggaaatcaattcccaggataatcacatttctttccagtgtgag

SEQ ID NO: 23890 - DNA, 409 bp, Gossypium hirsutum
  unsure (1)..(409): unsure at all n locations
  Clone ID: LIB3829-012-Q6-K6-B4
cggccgcgtgggcagcgtcagcagaaacagcaagtggttcagcagtaggagccgcaacacaacctcatcctctttcatttaattagctgtttattaatggagatcactagataaaaccaaaccacccaccctatctgctttgtttgtttctgtaatgatccctgtttaagtatgtggttggttttttacttgttttgtaataaagacgatgcaatgtgatcccaagggaagtgatcatttcaattaatttagaagtgggtttcatgtaaaaaaaaaaaaaaaaaaaaaaaaaaaaaaaaaaaaaaaaaaaaaaaaaaaaaaaaaaaaaaaaaaaaaaataaaaaaagaaaanaaggataaaaaagaaaaaaaaaaaaaatacaatagaataaaaataatttaaatttat

SEQ ID NO: 23891 - DNA, 952 bp, Gossypium hirsutum
  Clone ID: GOSHI-09MAY01-C25168_1
cccacgcgtccgcccacgcgtccgagaaaatggaagtttcatctttacgccattggaaggttatcccaatcctgcttattacccttcaattcactactaacatggtcttgagcttagttgatgcaccatttgacaaccaaagaaacattgagtacatcaaatcttcatgcagctccacaacttatcccagactgtgctatcgctcactctcaatctacgcaaacaaaatcgacaccagccccagattgttagtggatactgccctcaatgttaccctcaaggccagcaaatcaacttcaaggttgatggtgaagatctctagaatccacggtttgaggcctagggtagctgctgccatggcagattgcattgaggtgatcggtgactctgttgatgagcttcaacagtctatagaggaacttggtcacgttagccgctcaaattttgcgcttacaatgagtgatattcaaacttgggttagtacagcgctgacagatgaagatacttgcatggatggatttgcaggaaagtccatgaatggaaatgtaaagactatggtaaggaaaaggattgttaaaattgcacatttgacaagcaatgccctggctctcgtcaacaactatgcctcaactcaaagtaacttaccttagtttctcatcatacgggggaggctactacttctcatgaaaacactaaagagaagataagtataagctgaaagatttgtaagatagcaggttatgttgtgaactgtattgagggaatatcaaatttgtgtttgtgtgaactgttgtgtatatgtaatacaatatcaacttgtgaatcaaggtttagttttcaaaaaaaaaaaaaaaaaaaaaaaaaaaaaaaaaaaaaaaatttaaaaaaaaaaaaaataatgaaataatttatttaaaaaaaaaataaaattaaaatatattttaaataaggg

SEQ ID NO: 23892 - DNA, 628 bp, Gossypium hirsutum
  Clone ID: AI731721.1
cacctccaccatcacccccgccacctacttatccatcaccacctccaccatctcctccaccaccttcaccagtatactgtgtgaggtctccacctcctccaccaccaaattcaccccctccaccacctccattgttttccccacctccaccagttccttactactataactccccgccaccgccacaccattcaccgccacctccggtacattctccaccaccaccaccacattcacctcctccaccaatttatccatacttatctccaccaccgccaccacctcctgtttattccccacctcctccagttcactcaccaccaccaccgtcacctcctccatgtattgagccacctccaccaccaccaccaccagcaccgtgtgtagagtacacgccatcacccccacccccaccaccatcaccatcacccccacccccaattcattacaaaccacctccatcaccttcacccccacccccaccaatccattatcattcacctccaccaccatcacctccaccggctcccgtatacgaagggccactgccacctgtaatcggagtatcatacgcttcacctccaccgccacctttctattgattctttcaagaatctctctctaaccc

SEQ ID NO: 23893 - DNA, 361 bp, Gossypium hirsutum
  Clone ID: LIB3149-004-P1-K1-E5
aaccattcaccgccacctactgtcacattttgcacctttctcaccacatccacctcctggaccaccagcaccatgtgtagagtacacgccatcaccctcacccgcaattcattacaaaccaccttcatcaccttcacccccaccctccaccaatccattatcattcacctgcaccaccatcacctgcaccggctcccgtatacgaagggccactttcaccagtaatcggagtatcatacgcttcaccttcaccgacacctttctattgattctttcaagaatttccctctaaccctgattaaaaaaaaccccaatatagacgagaaattctctcccataaattattttgatattttggagt

SEQ ID NO: 23894 - DNA, 481 bp, Gossypium hirsutum
  Clone ID: GOSHI-09MAY01-C25128_1
aaaaaaacacatattgtattttgattaattttcctctttctttcgggctataaagccagattctaatcttgtaatcggttacacacatttacaaaaaacaaaacgcagagcaaccaaaagcagataaggtgattgccactttcgatttctataatcttttctctttttttgctgttatttacttgaatctttcatcatttttttttaaaaaaaagagaaaataaaaggaaagggatgggatgagctttaccttgctttagggccatcggttttcttttgctccatcgaaatcggagttttaaggggagcttagaggctacaaggtagcccttcaaaacccgaactggtcgagtgctgcgtgtgaaggcagatcggcgctagtgctaaagaggtagggatcggctaacccgcgcggccggggtaggctagggttctggaatggctttggaataaaggcattgttagcctttgagagcagata

SEQ ID NO: 23895 - DNA, 499 bp, Gossypium hirsutum
  Clone ID: GOSHI-09MAY01-C25028_1
cgggccgaccgcacgcgtccggctactttaactcttcattttgatttgctatttttgctccatccgtcggttaccggggttcgcaaacataaaatggagagatagactaaccttgtatcacctgaattctagagacacttcgtccttaggtgtttaattttagctggtagttgtatttttcctctggaacacaggttttacttgttacatcctttattaatggcgagtgaagggaaatgatgcaattagtaaagtttttctctagacttaatcagttgcactcagagaagtagaggttaatagatttttcgtaaatcctttgcaggtttaaagacaggcttaactattacttagatcatttacatgatgacaagctttctcagtacaagaagcaccatctatgctaaattttcgttttgttttctcttttcccttttttgttttttaacattgaaaaatttataattcctatcacttacctttttgtatcaaatctatt

SEQ ID NO: 23896 - DNA, 888 bp, Gossypium hirsutum
  Clone ID: GOSHI-09MAY01-C25398_2
tcgcccacgcgtccggaaaaaagaaaacagagggcctttaccctctctccctctccctgctcatttcggctagggttcttagaaccttcatcgccgccttcaccgcagcgccaccacaggcggtggttggggtgtaaaccgggctttcaagcccctgtttaaggcgaactcaacagcgaaaacttcctcgaccaaagaagatccaaagaaggaaccccctacgacctcttcgggtcgaatccgacgacggaggagcgatctccgacgacggtcacttcgattcgggtcatgggagtgtcagacgcgtggaaggccggtgattggcgccccgagcggtggtggcgcgcgtgagaaggctggtggctgaaggcatgcggctgaaaactttggtggccgctgaaattttttttttaacatagtgggcttgggctattagggtttataaattgggtttgggtattgtatttggactaagggtaaaatttgggccttacactgtgattgtgccatcaacaacttgaagcttgtttttggataagagcgccagtttcattgctcgagaccaagaatgataattcgagcttgataaggcaggaaaaacaagaactaaggctagattttcatccatttggatgaaggtaataaggactagaaggtagtgtaggatcatagagtgccattggaaagaaagaaaccaatgaaaaccccccccccagagtgtttgggaagcgagaaaatgtagaaaaatgcaagagaattttacatctgatcccatgtagaaaaggagtgtaagggaattgttaagagtttttttccccaaaaaaaaaaaaaaaaaaaaaaaaaaaaaaaaaaaaccccccaccccccacgcggccgcccacgcggccg

SEQ ID NO: 23897 - DNA, 494 bp, Gossypium hirsutum
  Clone ID: uC-gsronu33B129b08b1
gtgtttcccctcgttacgatcagtttcatttcggctttatagccgattcccatattaaaatattgttgttttattctctgctactgcttgtgcttcttgctgccatttttcctcttttccaaatgtttgcaagtcatgggagtgtcagacgcgtggaaggccggtgattggcgccccgagcggtggtggcgcgcgtgagaaggctggtggctgaaggcatgcggctaaaaactttggtggccgctgaaatttttttttaacatactgggcttgggctattagggtttataaattgggtttgggtattgtatttgggctattggactcttatatttggttacttgggttttgttatatcgagcccggttaaagtttgggccaaacagaatcattatacgaatatagaaaaaaaagtttcaaaaatatgatattatagaacccctcaagctgaaaaaaatttaactgaattcaccttaaagtttaaatatatatta

SEQ ID NO: 23898 - DNA, 438 bp, Gossypium hirsutum
  Clone ID: LIB3493-026-P1-M1-G8
gaaaacagagggtctttaccctctctccctctctctgctcatttcggctagggttcttagaaccttcatcgccgccttcaccgcagcgccaccacaggcggtggttgcggtgtaaaccgggctttcaagcccctgtttaaggcgaactcaatagcgaaaacttcctcgaccaaagaagatccaaagaaggaaccccctacgacctcttcgggtcgaatccgacgacggaggagcgatatccgacgacggtcacttcgattcgggtaagtccccttctttgattttataccctttttgttttttagatttgtagtataaataaaaagaaatttaaagagatgaaagaacgaaatccaaatcaaagaaaaaaaattaatcagagatcaacccttaaattttggtctggtctttgattcaaatgtgcgtgtgccctcgtta

SEQ ID NO: 23899 - DNA, 429 bp, Gossypium hirsutum
  Clone ID: GOSHI-09MAY01-C26988_1
ctctaacaataatactatccacagttcaaatttatcctttgacttaagtttaaaagatgaggctggtatgatcggctttgaccaaccataaacaccaaaccaggaaacgtatatggtggcttttattttttttatttttttattttttttctttcaatttgtgttttctaagaaacacataggaaagaataaatagagatcgaggaatattttaatttttttggttaggatattttttggttcatattctctggtaatagaatcgaagaaggtggaagtagaagagagaaagcggattttctctcttctcttctacctttgtgttttttttcttttggttctcatgacggcataattcgtagtttttattccaataaattaaggtttggttttggtgaatatctaagatcatgaatgtgatgcgtcgtc

SEQ ID NO: 23900 - DNA, 691 bp, Gossypium hirsutum
  Clone ID: GOSHI-09MAY01-C26958_1
actttgcttttttgctttgtttgtttagtaagaaaaattgactttcctgggaaaataaaaaaacaaaatatgggtagaggtagggttcaactaagacggatcgagaacaatattagcagacaagtaacattctcaaagagacgaagtggtttattaaagaaagccaatgagatctcagttttatgcgatgctgatgttgctttgattgttttctctaacaaaggaaagctctttgagttctcttctgatcccagcatggagaggatcctagaacgatacgaacgacaaatatatgccccaactggttctgaatcacaggcaaattggtctttggaatcttccaaactcatgtcaactattgaagtcttgcaaaggaacttgaggaactttcgtggagaagagcttgaacccttgagttcaagggacctgcaacttttggaacaacaaattggtaattctctgaagcgaatacgaactagaaagaacaaactcatgaatgaatccatttcagtgctgcagaagagagaaaagacattgcaagaccagaacaacatgctagctaaaagcttaaagaaaaacagcagacaccgacagaacatgcacaacatgaagtgcaacaaaacttgtccaaaactcaccaccatcaacatccatacaaccaccaacaccaccaccggctgaacacggtttc

SEQ ID NO: 23901 - DNA, 434 bp, Gossypium hirsutum
  Clone ID: GOSHI-09MAY01-C26918_1
ctatccatctgcttctgaccctgtgtttgtgccaaccgtgtcgcagcatgctggtgcggcgggtacaataaaatgtgaaattggatgccaacatgaagctactgaaataaacaatattcaaggaaacaaacatgttcctgatgatattgatgtatctaagactgagaaaacagcatttgaggttccagtctcaatacatggaaataagtcccccagtaaatcgaaagctgctgaacaggttaaggaatccaatcctatggagtccacctcactccaagtggtcacatctgaggttgcatctctcactgttaaagacatttctcaatatattgccgattcaaaggttccagatggtcaacatgttacttttcccacccacttccaagtctctgaaaatggcttaacttttggaagctttgatactagttttggac

SEQ ID NO: 23902 - DNA, 1029 bp, Gossypium hirsutum
  Clone ID: GOSHI-09MAY01-C26808_1
gcgccctcgcttccggactgactaagatttcaactgtctctcactctcctgttttgctgcctttaccaagagagaatgaaaccaaaatttctgtttctcttccttgtattatgcagtctcactatagacaacgttttagcaacctcacttggaactcatggcaaaattcccgacaatgaaacaatataccgagtctccaagcaacggtgttggggttgtattggagagtcactagagttcctattcactcacaatttggtgagggcaaccaaatgggagccactcttgttttgggatttccagcttgagaaatatgcccgatggtgggcacttcaaaggaaagcagactgcaagctacagcattcgtttccagagggagatttcaagctgggagagaacatatactggggcagtggctcggcgtggaggcccagtgatgcagtgagtgcctggtccgaggaagaaaaatattacgactatgcaaccaactcgtgccaggagggacagatgtgcggccactacacccaaattgtttggaagaatacccgacgaattggctgcgctcgagtggtttgcgacactggagatgtgttcatgacttgcaattatgatccgccgggtaattatattggcgaaaggccatattgatatggttcaatattccaattctaaggggtacttcactatacttgttcaatattttcgaaaatttgttctcacgatgctatctcactacttcattaaagctaacaagttttccgaaaactagtgaacaagtatattaaggtactcaatagaaatatatatatatatatgaatttgatgtgaacattatagtaatgttgttaatatgtatgccatttgagtgtcgacatagctatatcatataggaggtaaggagtgcaggctaaattctgaacttgtcatctctatccatgagacgtgatgtgatggttactcatttcgtccctaaatcacgagatcgggaattcgatcattgctcatgagaatgaaaaatatttcgtgatc

SEQ ID NO: 23903 - DNA, 872 bp, Gossypium hirsutum
  Clone ID: GOSHI-09MAY01-C26588_1
ttttgttctaattcacaaggcaagacaaactgttaagaaagtgggtaggtactaagagcagattttctattgcaactttgtttcatttgggtttcattgcttgggttaactcatcatcaaaagttgaagaaatcattttaatattgagcagcctgttcaacaggttggccagcattagataaagctcccttgcaaataattgaaggagctaacaggaaatattgagatagaaaagaaaaaggaaagggaaactatgacacacttcgttctagttcatggtatgtgtcatggagcttggtgttggtacaagattgtgtcgctgctcaaatcaggcggccaccgtgtcactcccttggatcttggtgccagtggaatcaaccccaagaccatcactgacttggcttccttgtccgattatgcggagccattaatggcattaatggcctctttgcctgaagacgagaaagtgatactagtgggtcacagttacggtggggttatcatttccttagccatggaaagcttccccatgaaagtattggccgctgtttatctcacagcttttatgccgaatcatgattcttctattgcgactggagtagctgagtacttcagaagggttatggcggagccgctcatggatttccaggtattgtttgaagatggggtcggaaagtccaccacctcgccccttatttggaccaaaatacacggagacaaggtttaccacctctcaccaaaagcggatataaaattgggtttgacgttgatgaaacaagaaaattattcctcaagatttacaaacgaatcgctgctaagcaaagagaaattcggatccatccatcgggtttatatagttgcaaagatgattt

SEQ ID NO: 23904 - DNA, 435 bp, Gossypium hirsutum
  Clone ID: GOSHI-09MAY01-C26558_1
ctaacgttgaaatgcctcatcattatataaatggtggttgggatgagccttcccaccatattgtgcataagaggggtccaagtttgctgaagttaactgatgaacctgcagagttagcaaccatgcgagctgagcttcatcgacgaagtattgcacaaatgaggattaacaatcgatcgatccaagacatgcaaatatttggagatccttcaggagttcctattgtaattatggaacgtgtaataaatgcacctcgtcgtactgttagtgatatatcattcttgaagaattttgacgtcatgcatttagctaccacaagcactgttcttgaagctgggaagagccaatctagtacaagtgctgcacagagtgggcaagacttgaagatcgttgtctttgagcatggttttcatgggcatcatctggatctgcgac

SEQ ID NO: 23905 - DNA, 976 bp, Gossypium hirsutum
  Clone ID: GOSHI-09MAY01-C26488_1
cgtttttcctctaggcgttctgtctttttctccttctcaagagtgattcagaagcgacttgtgggaggaaagaagagttttcagaagatgggttcttatggaatgcttgccagaaggattgtggagactgaaatgccaatcatggttcagatacagcaattgatccgaggagcgaaaaatgctgtgtcactcgctcagggagtggtttactggaaaccacccaaacaggcattggataaggttaaagcacttgtagaggagtcttcagttagttgttatggtgctgatgaaggtcttcctgaacttagagaagcattgataagaaagttacgtcaggagaacaatttgcagaggtcttcggtgatggtcactgcaggagcaaatcaggcatttgtgaatcttgttctaacactgtgtgatgcgggggactcggttgtcatgtttgctccatactatttcaattcctacatgtccttccagatgacaggtgtcactaagatattagtaggtcctggttatccaaagactctttatccagatgcagactggttggaaaggacattgctggaaaccaagcctgtcccaaagcttgttactgttgttaatcctggcaacccatctggaacctacattcccgagccgctacttaagaggatctcagatatatgcaaaaatgctggttgctggctggttgtagataatacatacgagtattttatgtatgatggtctgaaacactcgtgcgtggaaggagatcacatagtcaacatcttttctttctccaaagcctatggaatgatgggatggcgcgttggatatattgcataccccccgtaggggagggccttgcaactcaacttctcaaggttcaagacaacataccaatctgcgcttcgtaatttctcacgactagctcttactcatagaagtggactgatgggtcgcgacaagtaagattgtgagaatcagaatagtt

SEQ ID NO: 23906 - DNA, 374 bp, Gossypium hirsutum
  Clone ID: LIB3196-064-P1-M1-D2
tcgcccacgcgttcgcccacgcgtccgcggacgcgtgggcttgccagaaggattgtggagactgaaatgccaatcatggttcagatacagcaattgatccgaggagcgaaaaatgctgtgtcactcgctcagggagtggtttactggaaaccacccaaacaggcattggataaggttaaagcacttgtagaggagtcttcagttagttgttatggtgctgatgaaggtcttcctgaacttagagaagcattgataagaaagttacgtcaggagaacaatttgcagaggtcttcggtgatggtcactgcaggagcaaatcaggcatttgtgaatcttgttctaacactgtgtgatgcgggggactcggttgtcat

SEQ ID NO: 23907 - DNA, 421 bp, Gossypium hirsutum
  Clone ID: GOSHI-09MAY01-C26448_1
gcaagtttcaatggcaaaggcaaacattctcttggttttcttgtgttcactgggattgctactgcttgggggtgttggagtggaaggaaatccgaattacagagatgcactacaaaaatcctttctcttcttccaaggccagagatcaggcaagctgcctgccaatcagaaagtttcatggaggtccaactctggtctttctgatggctcccttgaccatgtagatttgactggtggctactacgatgctggagacaatgtgaaatttaacttcccaatggcattcaccaccacaatgctttcatggggtacacttgaatatggaaagagaatgggtccccagttacaagaggcaagggcagctatccgttgggcgactgactatctcctaaaatgtgccaattccaagcccggaaagctc

SEQ ID NO: 23908 - DNA, 415 bp, Gossypium hirsutum
  Clone ID: GOSHI-09MAY01-C26428_1
aaagaacttttcctccccagtggatctttcagcatatgatggttttgagttgcgcttaaagggtgatggttgtcggtataaactaattgttcgcactagcactgattgggatacggtgggttatacagcaagctttgacaccattggaggccaatggcagtctattcgtttgccattctcttcactgaggcctgtatttcgagcacggactgtatctgatgctctacccttcaatccaagtaatgtcgtatcatttcagctcatgttcagcaagtttgaatatgatgggaaactgaatcccacttttgtagaaggaccttttgagcttccactctctaccattaaagcatacattaaggatcctatcacttccagggttgtacacgtgagctttgcaggagttactagaccggac

SEQ ID NO: 23909 - DNA, 844 bp, Gossypium hirsutum
  Clone ID: GOSHI-09MAY01-C26778_1
ggcgacgatatcgagagatgatacaggcttgtcaaccacctatcgaatgaagcaatgctggccttagtcaaggtaatgaaactgaaccactcacataaacatcgaatacttgagcctaacctcgacttggcctaggccagcggcagcatgtaatacggtcgaaccacgcttatctctataagccaatacatctttgtcgtacccatgaagaagctccattgaaagctttaaatttcctcctctaacagcatcatgaacagctttgtttgtgatcttccacttataaacagaaggtatttccccgatgtgctctttgaacccttctgcattagctgtcataaacctcggtgagactgcaaagtcctatataagcgtgaaaacctcagagtttttgcccctggcagcagcataaaggatatcagtaacaccatactctccttctccgaaaacaagtagaggattcctttgaagaagttcttgaatgaaacccaagtctccggctgaggcagccgtgtacataagccatccaccgtagccacacctgataagggaattctttgttttcttcgattcacattcgataaaaagcttcctagcaacctcagaacgacacttagcaacatcatcgaactgttcttcatcatcccatacagtctcgagccggcggatcctcctcaaagaggtcagcttgatgagatgattcccatcgatccgtagaagctctctgaccaagtcgtaatggccattagctgctgcccaatcaatgggagaagcataccaccattggtctccagtgctttcccagcgaagagggaagtatgtaggaagcattatgaagattaac

SEQ ID NO: 23910 - DNA, 443 bp, Gossypium hirsutum
  Clone ID: GOSHI-09MAY01-C26718_1
gacattgacaacacggccttttaaaacattaaggcttttcagtctggctatctttgaatatttcaagcaatcaatattttatgtttttgcaaagggcggttggcttttgcttttaaacactctaatagcaactcttggaattttgcttgtgaccattgaaggtcctcatgaaaaggtaatattttaggttatcaatgtattacatctgtctttctcattgttttcttttgatgcacaacatacatctgtaagtatttgaggtattttatttgtttagagttaattacttttttgcactattttctccgttgaatcatgcaattaaaagatgcaattggtactattagtttgtgtgtgggttgcggtggggagggtaagagtgggtgggttgtgctacttcatattgcctcatgattaaatttacatttggacctttttacttt

SEQ ID NO: 23911 - DNA, 432 bp, Gossypium hirsutum
  Clone ID: GOSHI-09MAY01-C26698_1
acatgctgttattgagttaactagaaaggctgaggaaataaccaaagctctgaatcttgaccatgttcttgaagtttctaacaaacagtgcccttgttacaattcaatgggagaagctgacattgacaacaataagctaaggaaagcagcttctcgagaagatgccactgacaactatttatattgtccaaaagctaaagatattgagagcggagatttgaaacatttccaaaagcactgggctaatggtgagcctgttattgtcagcaatgtccttgagaatgcatctggtttgagctgggagccaatggttatgtggcgtgcttttcgtcaagtaacaaataaaaaaagtgatcaccaattggaagttaaggcacttcattgcttagattggtctgaggtaagtggtcaatattcaccaattctttaaag

SEQ ID NO: 23912 - DNA, 370 bp, Gossypium hirsutum
  Clone ID: LIB3048-041-Q1-L1-C12
acatgctgttattgagttaactagaaaggctgaggagagaaccaaagctctgaatcttgaccatgttcttgaagtttataacatacagtgcccttgttacaattcaatgggacaagctgacattgacaacaatatgctaaggaaagcagcttctaaagaagatgccactgacaactatttatatggcccaaaagctaaagatattgatagctgagatttgaaacatttccaaaagcactgggctaatggtgagcctgctattgccagcactgtccttgagaatgcatccggatcgagcttatagcctatggttactaggcgggctactggtcatagtatcagatgagataagtgatcagcaaaaggaagt

SEQ ID NO: 23913 - DNA, 423 bp, Gossypium hirsutum
  Clone ID: GOSHI-09MAY01-C26668_1
tcttactcctcacatagcaaaagggaaagtaatatagtgtcaacgtcattggttttgagagggaaaaaggaagggtgaaatatggctggttacagagcagaggatgactatgactaccttttcaaggtagttttgatcggtgattcaggtgtggggaagtctaatttactctccaggttcaccaggaacgagttcagcctccagtccaagtctactatcggcgttgagttcgctactcgtagtttgaatgtggatggcaaggtcattaaagctcagatttgggacactgctggtcaagaaaggtatcacttttactattcccttgccttgctttcctttatttctgatctgggtatctttagttctcttctgattttgcatggaatttggttttgttcttattgaacttgaggaaagaaagcg

SEQ ID NO: 23914 - DNA, 437 bp, Gossypium hirsutum
  Clone ID: GOSHI-09MAY01-C26148_1
aggaaacactactctttccagttcttccccaaacactgccactccttccatttcatccctctctttgatctcaaaatagattctccaacttttagggtttttgaactgctcaaaaacctattggtagtgtttctgctctactagcgatggggaaacgaaacaccatcgtcatatcctcatcagacgatgaagattacgagccttcttcgaggttgacacggagctaccagaagcccaaatccacgtcttctcttactcgtaccaatcctagtagagccaaaaagcctcgtctcccgggctctcgcttaaccaagcaatccagcaatgtagatgagatgagactagcctttagagatcttgatgaagttttgaatgggttcaaggtttctgccggttctagaaggagcaatccaaaggaattgtgggttgataaacat

SEQ ID NO: 23915 - DNA, 430 bp, Gossypium hirsutum
  Clone ID: GOSHI-09MAY01-C26098_1
gttaaaattaagtgtgtttggagatgggttcactgttgaacagtcatacagcagattttttgaaaatatatggggattatttgggtgattctaaagaaagaaaattatttgagacgctcttagcaagaattttttccaagactgtttaggttgtcaggaaataaggatgtatccatgtctttgtctttgatctgtttcttttgattaggttgttgtacttggacatccatgaggtctggatagttatatgggaggaaaatgtttgaatccactaaccatgttgcaaagtcctttgtgcaagtgggaaaggaagatgtatatgtgtgattgtttgagtgcgcatatgtatatgcgttggacgcaatactaattggatagcaatgtaatagaattctgtacattcattttcttgattttgaaatatgtcaca

SEQ ID NO: 23916 - DNA, 399 bp, Gossypium hirsutum
  Clone ID: GOSHI-09MAY01-C126060_1
catctgcttcattggcgaaatggtgggacttaaaaaagacttttgggggggaacaccccagaaaaaaagaaaaaaaaaaggaaaaaagaaaaaaaaaaaaaaaaaaggggggcccctccagggggagcaaagataactccccggggcaggccaggcaaaagctcccgtaagggggccccaaaaaaaaaaaaacgggccacccctggccaaccccaggacggggaaaacccgggggaaccccacctaaaccgccggggaaaaaacccccagtccgccagcggggggaaaaccaaaaaggcgcgcaccaagaacccccccaaaaaggggcccaacaggaagggaaaaggggccgcccccggaggggccccataaagggcggcgggaggggggggcaacccc

SEQ ID NO: 23917 - DNA, 873 bp, Gossypium hirsutum
  Clone ID: GOSHI-09MAY01-C26058_1
agtaataataaaaagtttctaaacagaaattgttttaagcaaagttacaattttcaaacacactaccatatgacatcgcctgatccaaccgtaatgtctaggcagggtttggggtgttacaaatggcctttgttaaagagtttgaagataaatgcattagattgagacactgtttggaattcccttgcccgtaagtccaccttcactagttggatacaacaatgtgtatggcatattgaccggaccaacacggttcttcaattgctcgtcattgttcatctctacaatccgttcctctatctcggtaagccgctttctgaattcatcaaaagctgcaagtggggtttcgtctgacgtccattcagggttggctctctgccccagataaacctcatctgacgaatgccttgataggatttctatcaaggatattcccaaaagtgtctgcagttgcgcagttattgttttcaagaaaaccgtgcccgggggggactctagttctgtgtattctggtgttcctttctcaggcatgaaccgacgacttatggtcgggcggtttggaaggtagcctgcataaggatattggccaaagttaactgctgcatggagagccgaagccacccatatgataatggtgcaagaatcgatcaactcttctcgagtctgcattttaggccaccatggctcatctttcttgtcgccatggccctcctctcggagttctttccaccaggcttgaagttcagagtcttgttggaccatttcgtcggtcttgtagtagaaggagcaataatctttgacccaattttcaattgcaaaccaaatctccagtccatcaacagcatatggataatcttttatcaacaaaccctc

SEQ ID NO: 23918 - DNA, 1159 bp, Gossypium hirsutum
  Clone ID: GOSHI-09MAY01-C26018_1
cttatagttgctgttaacaaaaggtgctgtagattattctaaggaaagtttgatttgataatatcacagcttggggcatttctccgttcttgtggctttaaggattcctctgtctcttggattccattgagtgctgttgaaaaccagaacttagtgtctgcaccttcgaactttcgactatcctggtatcatggacccaatctgttagacgcgattgattccttccaacctcctactagggagttttcaaagcctctaattatgcctatatgtgatgttataaagtcaccttcacaggggcaggtgtctgcatgtggcaagttggaggctggagctgtaagaagcggatcaaaggttttagttatgccatctgcaactatagcaaccgtgcgttccttggagcgtgattcccaagcttgcccaattggaagggctggagataatatagctgtcagcctgaatggaatagacggaaaccatgtgatggctggcggtgtgttatgtcatcctgattttccaattgcatttgcaaagcatttggagttgaaggtgcttgttttggacggtgcaactccaattttaattggttctcagttggagtttcacatacaccatgcaaaggaggctgcaagagttgcaaggatatcatttttacttgattcaaagactgggaaagttgtgaagaaagcaccccgctgcattcttgctaagcagagtgcagttgttgaggtgattttgcaggaagcggtttgcgtggaagagttttcgaaatgcaaagtccttggaagggtgtttcttaggacattaggaagaacggttgctgtgggcatcgtgacccgaatagtggaggagcagcaatagttgccaaagtgtggtcaaagactcatacacacttaaaacacatacttgggcagcttttaaagcaccaactttgttagagaggaattcctgtagtattcaagatcaatgtgaacaatggagagatttccttttaagcggctaatctaatacctacctattccatgtctgaccaaataatttcatgtgtgatttgattctttacatataagttaggacaaggacttggaagaaacgtgtgaaaaatgtgctgcacgtcttggcttatatctccttgcaagaaatggaaccaattaatttt

SEQ ID NO: 23919 - DNA, 404 bp, Gossypium hirsutum
  Clone ID: GOSHI-09MAY01-C26008_1
aatctctgaaggtgacatataaagtaaatgctcaaagtgtggaccaatcagaactagttgtacgttccattactactttagaatatattttctaataatgcgacctaagctatgccctgtctcatccatatattgaaaatgtactgatctccctgacttgcacaacattaataagaacactgcaccaaagaagcctgacaaaaatcccaattccacggttagaaagaaccagtcaactttgtcttgatcctctcgatttttcagtacaccgctgccggtgccaaacctcacatcagtggaactctcacttagtggtggcccaaagagcttggtgccaagaaagctgtaagcattcaagctttgcagctgagttcctgaagggatttttccagtaaatttgttgt

SEQ ID NO: 23920 - DNA, 838 bp, Gossypium hirsutum
  Clone ID: GOSHI-09MAY01-C26358_1
cctaagcccttccctcctccctttttttccccaattcgaaaatccacttccaccgatccaccattccacctccggtcctccacggctcctcccatttccagaatcagaggttagagcggtgcttctacgtcttctacctttgaatttcaaagggatctcccaaatctacaccttatctatcaaatatgatgcaacaaccaccaccaggaggcgtagcaacgcctccttcaatggcagccgatcagtctcaaacccagcactaccagcaacaacagcaatcgcagacttggatgatgatgtctcaacaacaacagcaggtaggtcagccggttcctccaccttccggctggaatacgcagcctatccctcccccctctcagatgcagcagtaccccgccggttcagcggccgccggttccggcgagattcgatctctctggattggtgatcttcaaccatggatggatgagaattacctcatgaacatcttcgctcaaactggagaggttgtttcagctaaggtgattaggaataagcagacggctctaccggagggatatgggtttatagagtttgtctcgcaagcggcagctgagcgggttttgcagtcatacaatggggtgccaatgccaaattctgagcagaactttagattgaattgggccgcgctcggatatggggataagaggcaagaagagggcactgactacaccatctttggtgggggattaagcgggggatgtttcggatacttggtacaggagacctttaaactggttacccatctgttaaggtgccaaagtggtactggtaggacactggacggctaaaggtatgg

SEQ ID NO: 23921 - DNA, 448 bp, Gossypium hirsutum
  Clone ID: uC-gsflnu33B059h01b1
cattattccaccttcggtcttcgacggcttcacccatttctagaatcagaggttagagcggtgcttctacgtcttctacctttgaatttcaaatggcccctcctcctctttgcctgcttagtcttgagttgattttttgcaatatcaaagagaaagagttgtcttctttcgaaagtgatgctagtgaggataaagacatgatcatcacactcccaaaaatcaaagagttgaacttgaatgtgattaacaacatatggaagcaagactccccatctcgtgatatatgactccttgttattacagaatgttgaaccgtctgaagaaaagcatgaagatagcctttaattgcatgaagctgggctaatcggacaaaaacagtggttcagcaagggacacacagtcgggatcatgttcaaaatgaaggccagatggtgaggtattttgatca

SEQ ID NO: 23922 - DNA, 386 bp, Gossypium hirsutum
  Clone ID: GOSHI-09MAY01-C26368_1
aatatgtgctttcttttatttctcatttatttgtgttgtagtcgtgtgacaagagttatccaaatccattacaaaataatccagcttattcagttgtcgagcagtactttgttgatgaggatgataccgtcactgagaagattgttgtgcacaaggaaagtgcaagaggggtgcattttcgacgcgcaggacctcgccaaaaggtgtattttaaaccagatgatgttaatgcatgcattgtaacatgtggtggtctatgtccttggctcaacacggtcatcagggaaatagtgtgtggcctctatcacatgtatggtgtccgaaaagttcttggaatcgatggaagatataagggtttttatgcaaagaacactatcaccttaaca

SEQ ID NO: 23923 - DNA, 620 bp, Gossypium hirsutum
  Clone ID: GOSHI-09MAY01-C26318_1
tcatcagtgtgctctatatagaatatagaagcaggaaggagaaagagaatgtcagcttcaaaaaccatgtcatccagtggtttgaagtgcttgatgggttgctgggtccatactggaaggcagctggacttgctttcaactgtactttcctcttattcggatctgtcatacaactcatagcttgtgctagtaatatttactacatcaatgacaagctggataaacggacatggacctacatctttggtgcttgctgcgcaaccacagttttcataccatcctttcacaactatcggatttggtctttcattggccttgggatgactacctatacggcctggtacatggccatagctgctgttcttcacggccaggccgagggcgtaactcacagtggtccaacaaagctagtactctacttcaccggagctaccaacattctctacacctttgccgcacgcgctgactgtggaaatatgcatgcatgtgaagcctcaaattcagtgcatatattgttgcacatgtacgttttacctacaatctctctatcgtgtctgtcattgggaccactctaacatcatgcctttcttctctagaccgttccggagcgcgtatctatg

SEQ ID NO: 23924 - DNA, 451 bp, Gossypium hirsutum
  Clone ID: GOSHI-09MAY01-C26248_1
ggctagtttaaggttgttcttgtgtttctttctctttactgcaagttctgtcaacattgtatgcagccgtagtctgcaaaaagatcatatcgccttgtttgtctttggggattcagtgtatgatcctggaaataataactacatcgacacgattgctcgggcaaattattatccatatggtgaaaccttcttcaaataccccactgggaggttttctgatggtcgtttaattccagactttattgccgagtatgcaaatttaccactaattccaccatatcttcaacctgggaatcatgaagttactactggggtcaactttgcttcagctggagctggtgctttgtctgaaactaatcaaggattcgtgatagatttgaaaacccagctaagttatttcaagaaggtggcaaagcagttgagacaggaactaggtgatgcggaagccatg

SEQ ID NO: 23925 - DNA, 822 bp, Gossypium hirsutum
  Clone ID: GOSHI-09MAY01-C26278_1
cggaaccaccggcgatgatactactcgtaaaagagggattgctgccttcttggctcaaacttcccatgaaactacaggtgggtggccaactgcaccggacggtccatacgcatggggatattgctatgttcaggaacagggcaaccctggagattactgtgttccaaatcaacaatggccttgtgcccctggtaaaaaatattttggccgtggtcctattcagatctcttacaactacaactatggtccagcaggagaagcaataaaggctaatattctgaatgaccccgatttggtagccaaggacccgaccatttctttcaagacaggtctttggttctggatgactccacagtcaccgaaaccttcaagtcacgatgtcatcaccggccaatggaagccatctgcagaagacacggccgctggtcgggtccctggatacggtgtcatcaccaacatcatcaatggtggcatcgaatgtggcaaaggatccaaccctcaagttgaggatagaatcgggttttacaagagatactgtgacatactgaaagtgagctacggtgacaatcttgactgctacaaccaaagaccctttgcttaattatgcactttaatccatcgtatcatgggtggggtaataaatatatgaaagaatagcatttacaaatcaaattatatttaaaataatcatgctattgtactacgactatatatagatgcatcttccgtggagatggaataagataaatattcaattttaaaaaaaaaaaaaaaaaaaaaattatattaaatataataatttataaataagggcgggcggtt

SEQ ID NO: 23926 - DNA, 357 bp, Gossypium hirsutum
  Clone ID: LIB3048-015-Q1-L1-D4
ccggacggtccatacgcatggggatattgctatgttcacgaacggggcaaccctggtaaaaaatattttggccgtggtcctattcagatctcatacaactacaactatggtccagcaggagaagcaataaaggctgatattctgaatgaccccgatttggtagcaaaggacccgaccatttctttcaagacaggtctttggttctggatgacaccacagtcacctaaaccttcaagtcacgatgtcatcaccggccaatggaagccatctgcagaagacacggccgctggtcgggtacctggatacggtgtcatcaccaacatcatcaatggtggcatctaatgtggcaaaagatcc

SEQ ID NO: 23927 - DNA, 706 bp, Gossypium hirsutum
  Clone ID: GOSHI-09MAY01-C26208_2
ccagattcaagacttggatgcacagagatttattggcaaatgtctagtaaatgcttctaacagattatcagcggaacaactattgcttgacccatttctcgctaaggatgaagcgacgaggcttgggagtccaaagctctttctaaatcaaagtgaaatcgagaaatggcacctcaacgataatccaccgagaacagacatgaccatcactgggaagcttaatcctgaagatgataccatcttccttaaagttcagattgcagatacagagggttctactaggaacatctactttccctttgatattgtggaagatacgccattggatgtggcaactgaaatggtgaaggagcttgagataaccgattgggatccacttgaaattgcagaaatgattgatggtgaaatttcagctctagtcccacaatggaaaaaatcagacctccctagacatcaagcccataatacatataactaccaggaagatgatgatgatgggtgtcatcatccgttttactctttctcctcctgttcttcatcccaaatgtctgtcttgatgtcacatggctgcgattggctccgagatgatgataccagctctcagagctcttcgcactcaggaatttattccaactttagttacttgtctggagatgaccacaatcctgatatgagccctacaacaacagcacgcaaacatgtcagc

SEQ ID NO: 23928 - DNA, 641 bp, Gossypium hirsutum
  Clone ID: GOSHI-09MAY01-C26208_1
cttgcagccattctccgaggatccaaatcagcccacagtgttataggcactccagagttcatggcaccagaattatatgaagaggattacaatcaactcgttgatgtctactcttttggcatgtgtgtgttagagatgcttacatccgaatatccatatagtgaatgtgccaatccagctcaaatttacaagaaagtgacctcggggaagctaccaggggcattctaccagattcaagacttggatgcacagagatttattggcaaatgtctagtaaatgcttctaacagactatcagcggaacaactattgcttgacccatttctcgctaaggatgaagcgacgaggctggggagtccaaagctctttctaaatcaaagtgaaatcgagaaattgcacctcaacgataatccacccagaacagacatgaccatcacggggaagcttaatcctgaagatgataccatctgctttaaagttcagaatgcagacgagggatctactggaacatctactttccttgatatggggaagatacgcatggatgtgcactgaaaggtgaaagactgagataccatgggatcactggaatgcgaatgatgatgtgaaatcagtctatcccatggaaaatcgactcctaa

SEQ ID NO: 23929 - DNA, 790 bp, Gossypium hirsutum
  Clone ID: GOSHI-09MAY01-C27838_1
cactgggagaactgagattgcttcttgtgtccgggttgctgaggtggagcagataagaataacaatcaaggagcttccagtccattcaattgatctcgctgttggtgcagaaattgaactttcaataagttaccatgatgctataggaaatcccttttacgaggcttctaatgttattctccaccatgcctgaaactaattatcccgatgtggtctctgttaacaatacccgtggcaccaatatgattcatctaaaggcaatgcgacacggtagagctcttctccgagtatcaattgacaatcgtccacagaagtctgactatatgctgatttcagttggtgcctatgtgcatccccaaaatccagttctccaccaggggagttctattaacttcagcgtagtaggctctgatgatcaagcttcaggtcactggcatagtgtcaatgaaagtgttatagttttacacactcaatctggacaggcggaagcagttggagagggatcaacccaagtttcttttgaaagttcaaatgtcaagctgcgaacaacagtcacagttctacctggaagtacccttgttgtggatgcccccaaggagatgctgacaaatgttccgtttccctcccaaggatttagcttttccgtgaagttcagtgatacaaatgacaagatcaacactgttggaagcagtaaaggagccccatatgactgtagggtagaccctccttttgtcggctatgcgaagccatggatagaccttgatactggcaactcgttttgccttttctt

SEQ ID NO: 23930 - DNA, 854 bp, Gossypium hirsutum
  Clone ID: GOSHI-09MAY01-C27578_1
aagaaacccaccgggaggaaaattattttcttttttctcaggatggtgctcctcatcagaacagattatggctattacttcgatctcgacgaattggtcagctcttttccgcttctcaaaccactcgaaacattcactctctttaccccaaagtaccatttctttacggttttcccgatccagtctcagctgcggaaaacccctttcaattcgagcaaccgccgttccagcggcgcctacagcggaggggttggcaccggctattacgttgaccgatgatgctttgaggcacttgaataagatgagagcagagcgtgatgaggatttgtgcttaagaattggggttaagcaaggtgggtgttcgggcatgtcttatacgatggattttgagaagaggtctaatgctagagccgatgactctatcattgaatataacggatttacgatcgtgtgtgatccaaaaagccttctcttcttatttggaatgcagttagactacagtgatgctcttattggtggaggtttctctttcaggaaccccaatgctacccagacatgcggttgtggtaaatcgtttacggcagaaatgtgaaatcatatgtacaaagacagtccatccgtttcatgtaatgcaacatacaaattatgcctgtaaatctttcatgtttaactgacttcatatttctagcacctttcataccttcttttctcttttagaaggaatatatatttgttcgaaggccagacactgatattggtcttcttcatgcttacggattttggcctctctatccaaaatgttgctcgacaaactcgagtgaagggtcgatggattatttttacttgaggaatac

SEQ ID NO: 23931 - DNA, 394 bp, Gossypium hirsutum
  Clone ID: GOSHI-09MAY01-C27568_1
aatttcacttctttttcattctccataactctttttatcggaggctctttcgtcttcttcttatctaacaccttcttctctcttttttggtttctgttttgtcccttttctcctctctgtacacagcagaaaacacagagcatcattaatggcagccaacaaatttgctaccatgttgcataaaaacactaataggatcactcttattcttgtctacgtcttactagaatggattctgatcgttctcctccttttgaattcactgttttcttacctgatcatcaagtttgctgattactttggtcttaaaaggccctgcctttggtgttctaggcttgatcatatctttgagccatcaaagtacaacaaatcttatagagatcttgtgtgtgat

SEQ ID NO: 23932 - DNA, 340 bp, Gossypium hirsutum
  unsure (1)..(340): unsure at all n locations
  Clone ID: uC-gsflmaxxa010c10b1
gatatctgttccttccgagtctctctatttctcaggcagtcaatttatttttaaaaaataaaatctaatctgcattaaatttaggaaattttttttggtaataactgaaaattttcatttcaatgtaaaaattatgctttgaaattaaattttttgcttgagttttgggctattttatttttaaatccggacatgttttcgatccagctgaataacgatggttagttgaagcttcgcggaggattatcttcattncaaatgcctggtgaatacagctcagggagtatagagttgctcttttccgcccattcccatctctcttctctttccttccttcctt

SEQ ID NO: 23933 - DNA, 236 bp, Gossypium hirsutum
  Clone ID: uC-gsflmaxxa010c04b1
tatgaatttggatctaatatgcaaattctcaatctgggggcttttaatttaggtttaaaaaataaaatctaatctgccttaaatttaggaaattttttttggtaataactgaaaattttcatttcaatgtaaaaattatgctttgaaattaaattttttgcttgagttttgggctattttatttttaatttcggacatgcttcttatccagctgaataacgacggttagttgtagc

SEQ ID NO: 23934 - DNA, 408 bp, Gossypium hirsutum
  Clone ID: GOSHI-09MAY01-C27758_1
cacgagcagtgttgggatggggtcgatacaaaaaccgcctacgcacgctttacagtatatcaaagagagctcgccattatcaagagcaaataaaaagagtgtttttttttttaagtttaaaactaatggaacgcgctccttattagatcataattggatgaaatctcgcttattttaagctggttttgcgctatctttctatttgcagctctgctcctacaaacaaggtttgaacgatgtcccggcctctgcctctgcatcgaggtgtatccggactgcggaacttgagtaacagcaatgatttttgggattctgaagtgaaagatttaacggataaggaagatttggatagaaatcgtgcttctgatcagagctatttatctctcaagtttcctttttctttaactt

SEQ ID NO: 23935 - DNA, 407 bp, Gossypium hirsutum
  Clone ID: GOSHI-09MAY01-C27768_1
ggctgctggtggatttggaggcatcaggatcctcaggaggcccaggatcccggtccctttccccgaccctgccagcgatttcactgttcttatcggagactggttcaagactgaccataagaaactgcaagccaagctggataggggtcataaacttcccttccctgatggtattctaatcaatggtcatggtcctaatggtgcattcttcacagttgaacaaggcaaaacttacaggtttaggatctcaaatgtggggcttcaaaattcactaaatttcagaattcacggtcataaaatgaagctggtggcagtagagggaacccacaccgttcaaaccatgtatgagtcacttgatgtccatgtgggtcaatcctattctgtgcttgttaccatggatcaatctg

SEQ ID NO: 23936 - DNA, 386 bp, Gossypium hirsutum
  Clone ID: GOSHI-09MAY01-C27158_1
cgaagtttggaagtgtcacaatttgattaatttaggattagatcttgcattttttgaaactcttacaactttagatgtctggaattgcaatgggatgtcaaaattgattacatcttccaatgcccgaagtttggtgggccttgttacaatgaggattagagaatggtaaatgatgagagaagtagtttgcaagcgacggggatgaagcgtcatacaagattgtttttagagtgctgaaacgtttggagcttcattgcttacaaaacctcacaagcttttgttcagggaattacaccttatggtatccatccttagaacaggttactttgagccagtgtcctagaatgaagaacttctatcaaggagagctaatcacaccaaaactg

SEQ ID NO: 23937 - DNA, 354 bp, Gossypium hirsutum
  Clone ID: GOSHI-09MAY01-C27068_1
caaagtggtatcaacaggggcgattctgatttgaagagatgccccaacgctctggggcatatcacaagaccataagaggtggttagtattctctggtgctaccttgcaaaggggacaatcaactctaacacgcaaggacctttgcttcagattacagtaattaggcaaaaagttgttgaacaatctccatacatgaactttgattcttttggtacgcgcatagcccataaagacctgtaaaaatccttgtaacccacattattaggattgatgtaatttgtgtttagaagatgttctgtaattaagaccctgtatccgctttttacttagtagtcccctggacccgtaataata

SEQ ID NO: 23938 - DNA, 902 bp, Gossypium hirsutum
  Clone ID: GOSHI-09MAY01-C20898_1
aaattaccgggctggatctcaaagggattcccaccgtttacctccccatgagaggtcccttggcagtcgtcttcaaggtaaaataaagcttcctgggagatctgtaaatggatctgatttgcattctgaaagggagatagaaagagggcgaaattggggacgacactcacctggaaagcctcaaacctcttcccaagggaggctccgtgacagaataaaaggaaaggtggaaggggatttcaacaataatgaaggtcgaaattttggtggcccgaggatcagaagataagtaacagatgggagaaatgctgggttggcaggtccaaaaagtcttgctgagctgaaagttgggaagaacagtgataataagcagcatcagtctcttggaaagcgaaggagtgttggagatcatcaacaaattgaaggtaatctttcattcaaggggccaatgcctctaagtgagattctgaagagaaagagacaatctgaaggtgccgcttctggggatggtatagcatctgtaaataaagaagatgttgaccagaagcaaagcaagggaagcttgattagtggctccaataacaaagaagtatcggtgacagggaaagaggcgaacaaagatgaagaatccaaggttgcagctacagatatcggaataacggaagccactcatggtgaatcttctcaaccactcaacatgagcgagcacgaggctgacgcagatgctgaagatgggatcattggagatgagagaatagaagatcacgaagtcgaggcagatgaccagagggatggagagtattattatgagcaggttgacgaagggaatacaactatgaggaggatgaaaacgtggacccggaagaggaatacatagaggaggaagatggtgatgactttgc

SEQ ID NO: 23939 - DNA, 741 bp, Gossypium hirsutum
  Clone ID: GOSHI-09MAY01-C20888_1
aataaagccaaatgaattaaatccaaaagacgcagcttcgatcttatccatttctcaaaatccatcatcaaaattagggtttctgtaaagtaaaaaaataaattgaaatcaaaatcgttttgaaatcttagggaatgcggccgaattgttgtcatgtttcgtttgcttttgttctgaagttcttgaattttctccaagctttccttggagtgtcgattttactctactcgttttggatgttggatcaatggaatcatcacgtccccatttctcctccgccgtcagttccgtggccggattcttctctctcggctctcttcaattcgagaccggaggttgggggagctcgaggagccaaggttttcgatgatttagctgccggtttggtctccgggttggataatggagtcgggtttgaattgagttcggtgaagctacctgctccatggttcatctactcttttttgggtgtgggcattgtgctgtgctgcattagtctcattggttgcattgcagctgaatctattaatggctgttgcctttgtttttatacactcatcaaaattggtctcattttaatagaagcttctttgggggcatttattgcaattgatccgcattgggagaaggacattcccgttgacccaactggagaacttgacagtcttcgctccttcatagaagacaatatcgttatatgtaaatggggttggccctcaatgtggtcataaatacaaggta

SEQ ID NO: 23940 - DNA, 1317 bp, Gossypium hirsutum
  Clone ID: GOSHI-09MAY01-C20848_1
gaagaatgtcgaaaacgctggtgcaaccgatagggcaaaagcggctgacgaatgtggccgtcgtgcgtttgaagaaacacggcatgcgatttgaaatcgcttgctacaaaaacaaagtcctctcatggcgttcccgggtcgagaaagatgtggacgaggttctacagtcccatacggtttactccaatgtttcgaaaggggttcttgctaagaccaaagatttggttgctgcttttgggactgatgatcagactaaaatttgtttggagattttggagaaaggggagctacaagttgctgggaaggaaagggaatcgcaattttcgagtcagtttcgggatatagcgacgattgtcatgcaaaaaaccatcaatcctgaaactgatcgcccttacaccattagtatgattgagagactaatgcatgaaattcatttcgctgttgatcccaatagtagttccaaaaagcaggctctagaggttattcgtcagcttcagaataacttccccataaaacggtcgcccatgagattacgactcatagttcctggacagaactttcattctctttgtgagaagctgaatgaatggggtgctaccattgtttcaaaagatgaatccggaactcagctgtcagtaatttgtgaaatagaaccagggcttttccgagaatgtgactcccttgtgaggaatttacagggtagattggaaatgctttcagtgtctgtacatgccgaggggggatacgcaggtggataattacgatgatgaggatatatcatcacagctgcccaaggattcggccaagtcagcatcatcacgtttacccccagaatcttctgattcagttatccaactaagtgagaaaatacaaaagaataccatctattcaggaaatgggaatgctgaaggggaggcaaagcaacataagtgcagcacatgcaatgcatttgtgggggattccaaacagtacagggatcactttaagagtgagtggcacaagcataatttaaaacggaaaaccaggcaacttcctcctcttactgcagaagagtgcttagctgatgtggaattgagtgactcaaaatcggatttgcaggattattcattttgatttggggctaaaaactaatgtgagtgcatataccatttcttttcttttactatctttcgttgttttgatcagctggacatgaactcagttgtaaatttggctttgtattacttgggtatggccattagatgcgggtattcgggtgtgagtttcagatacgaatatgtcacattttgtttaagattgttatttagaggatttttg

SEQ ID NO: 23941 - DNA, 504 bp, Gossypium hirsutum
  Clone ID: GOSHI-09MAY01-C20868_1
tgatagaatagctcagttggagctttcgttgcgctgctcccaattgcttctgccctgttttaccctcccaacccgaaagccacctccaccctctccctcccaacatcaaacagaaccgccccttacattatcctacttctgtcccgtcaattgttctgcttgcttattgtttaagctctaggaaaatcgaagaggccttatagttttcgagcaggaactagggatctgacaaggtttttgatctcaaaattttgacaaggttgcctgtctcaagatttccttgatctccatcctttctggataaagccaatcccaagtgaaaatctgcctcctggttttgatcctggtgaaggctgcaagcttaattctttgcctctggaagggacctttttttgaagcaatgtagaatgggatagcaatgtatggtggtgggattattctttcttaatcaattatataatatatgaatttgattccgtttaattaaaaaatttattttgattt

SEQ ID NO: 23942 - DNA, 495 bp, Gossypium hirsutum
  Clone ID: GOSHI-09MAY01-C20458_1
tctgcggcatacatctaattcttccggccttccctttgaatattgttatgacctaagtgcaaatcaaaccagctttgagtaccccattgtgaatctgacaatgaaaggtggagactatttttttgttaatgatccaataatagtgatttccttgcagggtggagatgtatactgtttaggtattgtgaaaagtgacaatgtgaatattattggacaaaatttcatgaccggttatcggatagtttttgatcgtgagaggatggtgctgggctggaaagcatcctactgttatgatttagaggcctcgaacactttaccagtgaacccaccaactgcagtccctccagccattgctgtgaatcctgaagccacatcagggaatgctaataatacaaacatttcaggggcgtcaccatccattacatgttcatcacgccacctcaaaacattgttttacgcacttacatttgctctcattccattttttgctttgat

SEQ ID NO: 23943 - DNA, 725 bp, Gossypium hirsutum
  Clone ID: GOSHI-09MAY01-C120470_1
ggaaaattagccaacggcagcagtactgaaaaatgggtgttgattattacaggattcttcaggtcaccggaatgggtgtgatgaagatttgaaaaaagcgtatcgtaagctggccatgaagtggcatcccgacaagaatcctaaatccaagaaagaagccgaagccaaatttaagcaaatctccgaagcttacgatgttttgagcgatccccagaagcgtgcggtttacgatcagtacggcgaagaagggttaaaaggccagatgccgcctccgggtgcgggagggtttcctggaggggcggacgggggttctggcccgacgatgttccggttcaatcctcggagccccgaagatattttctcggagtttttcgggtgttccagtccgtttggagggatgggtgatatgggcgggtcacgtgctgggatgtcggggttccccaccggcgtgtttagggaagaccttttccggtcgtttaggggtggagctcgggagggtgctacacctatgctccctgaaggacccgctattgaacgacccttgaccctgccgcttggaggatccttttcagggggcctccccgcatgtgcagatttctagggatgttaccgatgctagcgggagacctagtacggaggaggaaattcttactattcagattaagccaggatggaaaaaaggtacataaataacatttccagaaaagggaaacgagcaacgaggt

SEQ ID NO: 23944 - DNA, 374 bp, Gossypium hirsutum
  Clone ID: GOSHI-09MAY01-C20798_1
tatgacccggactgaacgatttcgacacgaggccatcaccattctcccaaccttcctctctgctaataaagtccttgtttttgtatgcctaattgtgttgtcattgaaagaagggtatgccactgctgaggctgagagtcataccatccatgtcgcctctcttttaccctcttctgtttgcacccctcctgctactgcaaaaggtttggacaaaaagtcatctttacaagtcatccacaagcatggcccatgctcacaaccccatgaagagaaagcaaatattcccacacatgtccagatccttctactagacgaagtaagggtgaagtcaattcactccaagctagccaagaacctaggctccgtcaatgtca

SEQ ID NO: 23945 - DNA, 865 bp, Gossypium hirsutum
  Clone ID: GOSHI-09MAY01-C120790_1
agcctgcataaatttcctgtgtctatgactaatgaatgttcatagaaacttctcgaactaacaaaacactaacagctacccctcttttattccctcttaggctcccacccttacaagcaatctaccagacaccaaaactaaaagtccgaaatacgcttcctcgttggctacttcctttgaagcatttccacaagcatttggcagccatggcagaagacggagccgtaacactctacaaagccacgtccataaccgacgccaagaagaactccttctctatcaaagcggggcttgcccaaatgctccgtggcggcgccattgtcgaagtctcaaccctcagccaagcaaaaattgccgaggaagccggtgcctgttgtctagtcatcaccgaacccaaccgccaaggcatttcgcgcatgccggatccttcgatcatcaaacaaataaaacgctgcgtattaatccccgttatggctcgttcccgggtcggccacttcgtcgaagcccagattctcgaacgagtaggagtcgattacatcgatgaaagcgaggttttagcaatagccgatgaagataatttcattaacaagcataatttcggatgccctttcgtttgcggctgcaagaacctaggggatgcgttaaggagagtgagggaaggagctgccatgattagaacgcagggggacttgttggggaccggtaacattgctgaaacggttaaaaacgtcaggtctgtgatgggtgaaatcaggattctaaataacatggatgaagatgaagttttcgcgttttcgaaggaaattgctgccccttatgatctggttgcccaaaccaagcaaatggggagactaccagtggtgca

SEQ ID NO: 23946 - DNA, 484 bp, Gossypium hirsutum
  Clone ID: GOSHI-09MAY01-C20718_1
ccaaaagcaaaggttcggagacgcccatttcgtttcactctttttttgtgcgtaaaatctacagaaacgaaggcaagagaaagtgaactaaccgaagaagaaaaccatgggaatgccgctagtttccattgctgcagctcccaaaagcgcctttgttcccaattccatctctctaccttcaattaaggtgcgtaatattccatcttcgacagcttccaccggtggggtgtcgatagaatgttcgtcgaggccgcagaagaaggcaacgaagcatcatatgaagaccaggccacgcaagacgcagccatgggacataaggaggaaacccaccgtttacgctcctttgcctccgctgcctcctgattgggccttagtttcaagcgtcggagaaaatgatggcgccgatgttgctgaggttggtctcgctggctctgctctacaggctcctgcttcaactgggtagtttttttttcactgttcatcg

SEQ ID NO: 23947 - DNA, 528 bp, Gossypium hirsutum
  Clone ID: GOSHI-09MAY01-C20688_1
ctttctataaacaacaggatccaattttttcacccagttcgtcctcaacttattccaatgtttcctgctcctcagcagcctgcacttcattgaattctgctacaggtaactcgcctggctgctcagcatcaacttgtgtctatggcatccaatatggagattcatctttctcgattggattgtttgctaaagaaaagctcactttgacatcaaacgttgtgtttgacaactttctatttggttgtggccaaaacaatcaaggcctttttggtggtgctgccggtttgctaggactaggccgaaataaactatcttttccatcacaaacagccataaaattcaagaaaatattttcctactgcttgccatcatctccaagctcaaccggcttcctaaaattcggcaatgatggtctctcaaagtcttgtaaaattcacaacattatcaacaatctccggaggggaatccttttatggcattaccattattgctatgagttgtggtggcaagaaactattaaatctcgca

SEQ ID NO: 23948 - DNA, 815 bp, Gossypium hirsutum
  Clone ID: GOSHI-09MAY01-C20668_1
ggtttaagtgttgaaattattgattttacttgtacccctagcagagagagaaaatatacagaggaaaagaaaagaaaacttagaacgagcttcgtgggtggagcttgttttcgttgcgtttattattattatttctgatattcccaacacagagaaaggaagggatggagagcgattcagcgatggtggcatttccattgctgacaacgcccatcgaatccaactacagggcatgcaccattccttacagattcccttccgataatcctcgaaaggctacccctactgaaattgcctggatcgaccttttccgcaattccattccctccttcaagaagagagctgagagcgatactaccgtggttgatgcttcaactaaagctgagaaatttgctcaaaggtatgctgatatacttgatgacataaagaaagatccagaaagccatggcgggccacctgattgtattcttctctgccgacttcgtgaacaggttcttagagaactggggtttagagatatattcaagaaagtcaaagatgaagagaataccaaggctatctccctatttccagatgtagttcgtcttaatgatgatattgaagatggggggaagtgccttgagaatctagttagaggaatatttgctggatacatattcgaccttgggtctgcacagcttgctgaagtttctcaggggatgaatgtccctttggtagtgtcaaatcttgttctcgacttggtcatgatgactaacactttaagcaatgaacaaaaatcttgaaaaagcagcatttgagaaaacttggtgcgatga

SEQ ID NO: 23949 - DNA, 357 bp, Gossypium hirsutum
  Clone ID: LIB3189-015-P1-K1-C1
cgcgacccacgcgtcctcggacgcgtgggcttgtaacgagcttcgtgggtggagctggctttccacgcgggaaacatcataggggggatattgccaccacagaggggggaaacaatgcagagcgattcatccatggtggcatttccattgctgactactcccatcgaatccaactacagggcatgcaccattccttacagattcccttccgataatcctcgaaaggctacccctactgaaattgcctggatcgaccttttccgcaattccattcccttccttcaagaagagagctgatagcgatactactgtggttgatgcttcaactaaagctgagaaatttgttcaaaggtattc

SEQ ID NO: 23950 - DNA, 411 bp, Gossypium hirsutum
  Clone ID: GOSHI-09MAY01-C20168_1
acttgggaattgcatttgcgcattttctcgttaattcaaacatttttccagcccatcataaagcacaattatgatcagaaacaccaaaataccaacaaccaacaaacaaacatggaccgacggaaaccatgtttcgtgtttatcgcacaagaacacacacaaaaaagagaggatgaaatactctgtaatttgagtatttcggtctacaacaacagtcttgtccagcttatgacttgaacaaagaataccaaactgcattggcagaataactcgactttggagaacaaaaataataccctacttatgcttcagacataatgcaatctatagcctgcttgcatatgccagtcatcgtggcctcaggcccgtaaacctcaaggggtactcctagttcctccccaagagcacgca

SEQ ID NO: 23951 - DNA, 850 bp, Gossypium hirsutum
  Clone ID: GOSHI-09MAY01-C20078_1
cgcattttagagctgggaattgtttatatgtgtgtagggaagtacaaagaagctaaggaagagtttttgttggctttggaagcagctgaggctggtgggaaccaatggggttacttgcttcctcaaatttatgtcaatcttgggattgctcttgaaggagaaggtatggttttaagtgcttgtgagtattatagggaagctgctattctttgccctactcattatagagctttgaaacttttgggtagtgctctttttggggtaggggaatatagggcagctgtaaaggctttagaagaggctatttttatgaaaccagattatgctgatgcacattgtgatttagcctcagctttgcatggtatgggtgaggatgagagggcaattgaagttttccagaaagctattgatttgaaaccaggtcatgttgacgctctatacaatctaggtgggctttatatggacttgggtaggtttcagagagcttctgagatgtacactagggttttagctgtgtggccgaatcattggcgggcacagctcaataaggctgtatccttgttgggggccggagaaactgaagaagctaagaaagctttgaaggaggccttaaaaatgacaaatagggttgagttaaatgatgccatttaccatctgaagcagctgcagaagaagaaagtcaagactaacggtggtggcaatggggaggcggcttttgtaatagtggatccctcaaaattcaagactttgggtgagaagactacactgaggcaggatttaggaaatgctcttcaaattagggctttccagagacttactagattgaaccgatgtgaagtggatcttttga

SEQ ID NO: 23952 - DNA, 615 bp, Gossypium hirsutum
  Clone ID: GOSHI-09MAY01-C20028_2
cggccgcgtgggcgacgccgtactcctcttatcctcctctgcctctaccagatatttccttggcattatcccccccttcctcttccccaaaagctccgctcctccctgaaccactcttatcaatcgccgatcaactaataacctttccttcccttcttcttcttcttgttgttattattaaccgactcgtttaactcagtgattcgtccaagaagccactgagtccggtgatgtggtcctgagttcttctttctttgaagggggtagaatcggaaactgaaaaaaagagagacaaaaatggatcgagcagacttgacggtcggaccggctatggatatgccgattatgcacgacggtgaccgttacgatttcgttagagatatcggatcgggtaatttcggagttgcccgacttatgacagataaggttaccaaggagctcgtcgctgtcaagtacatcgaaagaggccgtaagatagatgaaaatgttcaaagagaaattattaatcatagatcattgaggcatccgaatattgttagatttaaagaggttattttaacacctactcatcttgccattgcaatggagtatgcctccggaggtgagcttttcgag

SEQ ID NO: 23953 - DNA, 1111 bp, Gossypium hirsutum
  Clone ID: GOSHI-09MAY01-C20028_1
gcggagcatccaccttaaacaccccgattttcttgtgtgtccttctcgaggacgtaattcctgggaatcatcacttcctcttccccaaaaagtcatcctcttcactgtggccctggcagaacactcaattaaacgccgtcctaataaaaaaacgctttcttttttattaaccgacttgtttaactcagtggcctctatctacaaaaccgagtcaagtggtgcggtttgatatcggtgatgcttcgtgagtttgttttctttttcaagtgataagattcaagaaacttaaaaaaagagagaaaaatggatcgggcagacatgatggtagggccgggtatggatatgccgatcatgcacgacagtgatcgatacgatttcgttaaagatatcgggtcgggtaatttcggagtcgcccggcttatgagggataagattaccagagagctcgttgctgttaagtacatcgagagaggcgataagatagatgaaaatgttcgaagagagattattaatcatagatcattgaggcatcctaatattgttagatttaaagaggttattttaacacctactcatcttgccatcgtaatggaatatgcatcgggaggtgagcttttcgagagaatttgtgctgctggtcgattcaacgaggatgaggctcgcttcttcttccaacaacttttatccggcgttagttattgtcatgcaatgcaagtatgccaccgtgatttgaagttggaaaacactttgttggatggaagtccagctcctcggcttaagatatgcgattttgggtattcaaagtcttcagttcttcattcgcaaccgaagtccacggttggaactcctgcatacattgcccccgaggtactcctaaggcaagaatacgatggcaagattgcagatgtttggtcatgcggggttaccttgtatgtcatgctggtcggggcataccctttcgaggatccagatgagccaagagactttcggaaaacaatacaaagaattcttagtgtcaatatggcatttcttgatgtaatccaaaatatacctgagtgtcaacatctgatttcaggattatttgtgctgatccttcagctagaattacaat

SEQ ID NO: 23954 - DNA, 568 bp, Gossypium hirsutum
  Clone ID: LIB3825-013-Q1-N6-C12
aacaatatccagtgatatacttgtatcgtcttccgaaagtcttttggctcatcaggatcctcgaaaggatatgccccgaccagcattacatacaaggtaaccccgcatgaccatacatctgcaatctgatatcacaacacaatatcatcaactcatttctttactaattttcatattctaacatcaacttgcagggacgtatgactcgcttgatgttctttcgtgtgcatttgaatatcaaacccagtctagccatcaacacttgactgataagaaccagccacaagactaaagcagatccattcaacaaatcctcgcattacacatatgcgaagcaacgacataccattccaggccttcttcattggaggactgcagcaactgtcagttcacatactatgaatactaaaccgaagttttaaatcaactaaggggcaaaagccatcaatttgatgtcatttcactcaaatatacaactagaacacggtgactaacccatataacatctagctctttacgtcttaaccaggaatttgcatgtggattgtaaactggaaaccaaaactga

SEQ ID NO: 23955 - DNA, 372 bp, Gossypium hirsutum
  unsure (1)..(372): unsure at all n locations
  Clone ID: LIB3149-019-Q1-K1-G6
cgtaggtattgtattcaatgcaagatgcttccttattngaagttggaaaacacttcgtgggatggtagtccagctcctcggcttaagatatgcaattttgggtattcaaagtcttcagttcttcattcgcaaccgaagtccactgttggaactcctgcatacattgcccccgaggtactccaaaggcaagaatacgatggcaagattgcagatgtatggtcatgcggggttaccttgtatgtaatgctggtcggggcatatcctttcgaggatcccgatgagccaaaagactttccgaagacgatacaaagaattctcaggatccagtactccattccagattttgttcaaatatcttccgaatgtcgacat

SEQ ID NO: 23956 - DNA, 796 bp, Gossypium hirsutum
  Clone ID: GOSHI-09MAY01-C20308_2
tgtcactgcaggaagctagacggtttgagttgagggagttgtctttggcgaccaaaaatttcagtgatagaaacctgatcggggaagggaaatttggtgaggtatataaaggtttgcttcaagatggaatgttggttgctatcaaaaagcgagctggagctcctagtcaggaattcattgatgaggcatgctatctttcatctattcagcatcggaatcttgtcactcttttgggctactgccaggaaaataatcaacaatttcttgtttacgaatatatacccaatggaagcgtttccagtcacttgtacggagttggtcaagtctcagcgcacaagataggattcaagcatagacgttcactagctctaggtgcagcgaaaggcttggctcatctccactctttaagtcctcgattggtacagatagatttcaaaccggcaaatgttcttgtagatgagaattttacaccaaacgctgcggttgcaggactgcgtaattttctgggaagaattgatgttgctggcccttcttcgcaagtgacagcagatgagatatttcttgctcctgaggtgagggagtctagacgtttttccgacaaaagtgatgtgtatagtttcggcgtattccttttggagttagtaagtgggcgagaagcatcacaattaccaccttcaaactccacagagaaccttgtcgagtgggtgccaaatacccacgattacagcaacatttccatcatcattgatccgacgttgggcgatagcttcactcctgatagcatggatgaattctc

SEQ ID NO: 23957 - DNA, 812 bp, Gossypium hirsutum
  Clone ID: GOSHI-09MAY01-C20308_1
ttctttagttaaactaatccaataggaataagggtcccacaaattgtttcgtaagcttctgtaacacttcgaaattcagatgttcatcttctatggttgtgattttcgaaatttactgcctgattttcgttgcctagatttgttatttgtcccttttgcaggcttggctcatctccactctttaagtcctcgattggtacataaagatttcaaaacggcaaatgttcttgtagatgagaattttatagcaaaggttgcggatgcaggactgcgtaattttctgggaagaattgatgttgctggaccttcttctcaagtgacagcagatgagatatttcttgctcctgaggtgagggagtttagacgtttttccgaaaaaagtgatgtgtatagtttcggagtattccttttggagttagtaagtgggcgagaagcatcagaattaccatcttcaaactccacagagaaccttgtcgagtgggtgcaaaatagccacgattacagcaacatttccagcagcattgatccgaggttgggcagtagcttcacagctgaaggcatggaggaattcataaggttaaccgtccgatgtttggaaccatcgagtgagaggagaccgaccatgagctatgttgtagcggaacttgatcggatactcgataaagagatgagcttgacgacggtgatgggggaaggaagcccaactgtgacccttggaagccagctttttagagcaacaaaatagaaaaaggaaaaaaaagaaaaccttgtagcctgcagcattcaaataccgggagtgacatgcgtgtgat

SEQ ID NO: 23958 - DNA, 424 bp, Gossypium hirsutum
  Clone ID: LIB3146-027-Q1-K1-E10
atgagatgacagctgttggtatctttctatgcatgaaaggaaaacttgtaagctttcatttctttgtgcatgtgtttgacttccagggcttcgcaaacgccatggattggagatgttatgagttgctggttctatacagacttaatcgtgcatttctaaatatcgtagttactaaccacgtgatttaacttacgagtttgcgatttctccatgagaaagcatttgagccttggcaatgaaattcagacattagtgtgagttgtagttaaataacataacttttcggcttttgcttttctggaaggtgcaaaatagccacgattacagcaacatttccagcatcattgatccgaggttgggcagtagcttcacagctgaaggcatggaggaattcataaggttaaccgtccgatgtttggaacca

SEQ ID NO: 23959 - DNA, 389 bp, Gossypium hirsutum
  Clone ID: LIB3083-091-Q1-L1-D3
caacaatttcttgtttacgaatatatacccaatggaagcgggtccattcacttgtacggagttggtcaagtctcagctcagaagatagaattcaagcatagactttcaatagctctaggtgcagctaaaggtgatcctctgcaaaatcagcttggctcatctccactctttaagtcctcgattggtacataaagatttcaaaacggcaaatgttcttgtagatgagaattttatagcaaaggttgcggatgcaggactgcgtaattttctgggaagaattgatgttgctggaccttcttctcaagtgacagcagatgagatatttcttgctcctgaggtgagggagtttagacgtttttccgaaaaaagtgatgtgtatagtttcggag

SEQ ID NO: 23960 - DNA, 457 bp, Gossypium hirsutum
  Clone ID: GOSHI-09MAY01-C20288_1
aaaaaaatgatcataatgttaaataaaccatttattttttcctgatgaaaagaccacaataggtggtttagcatatcacaaaggctggtttcctggaacagtaacaggaataattgtcaaagctacatagatcacttacaccactaaagatcatcaatggttgtttctcttcctagctagctcccgagccatctcccttaattcctccggtgatggaggtcgtggtccctctggaggatacactatatacgaacgatttcccattaatttctggagattcttggtgttcttggcgaaagtgtatataagaacgatagggatcgtaacatagagaccgaatttggcgatttcaagaacaccctttgaagtgcctaaagaagacattctccttttcactttctacagagaaaaaaaattgatgagaattcgcgaggagactgaaaacttttgaaaaatt

SEQ ID NO: 23961 - DNA, 489 bp, Gossypium hirsutum
  Clone ID: GOSHI-09MAY01-C20278_1
aagcaaaaaagttattaaagttgacataataaaaaaggctgtagcatgcacaaatgttgagtcttctttataacaatcacatctctttctttcattcttttataaacaaaaaaaaaaagttttggatccccaacatgacatagcttagtaagctttagttggttcactagtgaggccgaatccaaaggggaagagtggatcataatgtggatccccaacattcatcggcagttgatcaactgttttaaaccaagtacgaggaagcttgcctgaaaaaccatagtcaccaaatagaacatcagccacaccatgaccctcgcttcctggcaaccatgccgcaaccagagcatccacggagtcaatatcaggttctatcacaacggggcgacccgacattaagatgacaacacatttcaaagctccacatacatttctgattgtgggtggaccgggttctggaatcgcaagattcatgctgccaccttttgt

SEQ ID NO: 23962 - DNA, 474 bp, Gossypium hirsutum
  Clone ID: GOSHI-09MAY01-C20228_1
gggtgccccaaaaaaaaactaataagttggaaggcaggggaaggaaagttgggatctttaaaacggcccccccttttttttttttttttttttttttttttcttttttttccacaaaacttttaggaactacagtcgcgtagtagataattgcaaatttcataattttaatgaaaacttctctcaacctccaaaatagatcaaggatccttgcacataaactaaaatctcagaccgctaaatcaacacatatcatgtctagttcattctcctaattagctcgttgatgtaattttcgccggtcccggcggctcctccttcaacatagtggattctcttcttcttcagacctcccaatggtgcctttatcttaaatggccaaagaaagttgttggcctccttaaaatgaagccccacactcattatctcatggatgacatctttcacacataatactccaaacttgcccaaaacc

SEQ ID NO: 23963 - DNA, 280 bp, Gossypium hirsutum
  Clone ID: LIB3135-028-Q1-K1-F10
cgtccgaccacgcgtccgtttaaaattacatcaattatctaattacgagaatgaactagacattgtatgtattaatttagcggtttgagattttattttatgtgcaaggatccttgatctattttggaggttgagagaagttttcattaaaattatgaaattagcaattatctactatcttattgtattaattaaattcataaattgtatatttaaaatttaattttataaaaatcaaaataaatggtcttcccctctataggatccattcttacattct

SEQ ID NO: 23964 - DNA, 765 bp, Gossypium hirsutum
  Clone ID: GOSHI-09MAY01-C21908_1
tctctctagagaatttacgggagaaaaaaaaaagaaagaaagaaaactcaaccctcccaaaaatggcgttccctcagcagcagtttcaacaacactaccaacctcaacaacaacaacaacagcaatcaaaaagtttcaggaacttgtacgcaatcgacgctcaggtttcgccaccacttgcttattacaatacgcctaatttacaagattcctctcagcatcctccatatatccctccttttcatgttgtggggtttgcaccgggtccggtaccggttacagatgggagtgatggaggagctgagatgcaatggaacaatggggttgagcctaaaaggaagaagttaaaggaacaagattttttggagaacaattcacaaatatcttctgttgacttttttcaagcacagtcagtctcgacagggttaggtttgtcacttgacaataacaataataatcgaatggcttcttcgggtgattcggctttgttgtccctcattggtgatgacataaataatgagttgcaacgacaagatgcagagattgataggttcctcaaagttcagggtgaccgattacaccaatctgtgttggaaaaggttcaggctaacactccaaacaatttcgcttgtggaagaaaaagtttttcagaaacttcgtgaaaaagaagcagaagtggagaatattaacaaaaagaatatggaacttgaagagaagatggagcaactgaccatggaagcaggtgcctggcacacgagccagata

SEQ ID NO: 23965 - DNA, 524 bp, Gossypium hirsutum
  Clone ID: GOSHI-09MAY01-C21818_3
gatgattttttatagtggaagttgagaaaatgggttcaaaagatcatttggatagaatgtttgataggctcggtgaaataaagaaatattgtttataatttaatagttaaaatggaatggaaaaatagaactcaagcgaagaacgattcaatactatatgaagtattgccccgggacttatattgcttaaggtgggtttaatggattgtcgaagatggaccttgacccgttacctatagagaggtaggaaccaaaggtataaaaaggtggatgaacgccacaccaggatggtgataagttcaagaagtcgggttgacgccactagcgagctagataagtcagaacgagactcgtacgaaataggataggaggaaacctcacaatcaagttttcaataatcaaattctgtaaccttttacaataaacaagtaagctatttataagcctaaaatgcctattgatattcggcatctatgttgttcacactaacttaaattctgttcacacaggtatttaacatgttc

SEQ ID NO: 23966 - DNA, 421 bp, Gossypium hirsutum
  unsure (1)..(421): unsure at all n locations
  Clone ID: LIB3083-072-Q1-L1-F2
gtcaccccggttcctatattgttaaggtgaaaaggatgaatagaattgatggtgaacaccacaccaaanatggtgataagttcaaacaaggtcgattgaccccactagcacaaactagataagtctttcgaaacttgtacgagatatgagaggaagcaacctcacaagaacaatgttcattaacaaattgcaaaaagtcctcttacatgaaatgagcaactttataccctaaatcctatgatttggattatatgtacactaactaatttgtaattattaacagcacacaacataattgtatctgaatgctaatgcaaatttgtattatctatttctacaaaagattatatgcgctatctctcttctgcaaagtatgctatctagctttttgtattctaagcctctttctattttcattcta

SEQ ID NO: 23967 - DNA, 375 bp, Gossypium hirsutum
  Clone ID: LIB3196-065-P1-M1-E11
attcaagcctcatttggccaagggagatgtaggagtattaaagggctgcacattcatgaactatggcttttcgtctaggctaagtatgcatgaatgcatcaagtgaagcaacatgatggttcggccaattcatgcaccatcttcaagcatgaaccaaattttaatgattttgtgtgaacatgttaaatataaatgtgaacagaatttaagttagtgtgaacatcatagatgccgaatatcaataggcatcttaggcttataaatagtttgttcatttcatgtaagagggactttttaccaatttgttaatgaacattgttcttgtgaggttgcttcctctcatatctcgtacaagtttcaaaagacttatctagt

SEQ ID NO: 23968 - DNA, 527 bp, Gossypium hirsutum
  Clone ID: GOSHI-09MAY01-C21448_1
tgagcctgaagatttttggtagctgtgcttatttgggtttggtaaattacaaggaatccctaatacgtttggttgttgctggtattacttaattagctatatgctaaaaggctttcttctctccagcacaatatgcttagaattttactgcttggtatggtgtctttttgtttcagcagttgattccatcatactcttatgaaaatcctttgaagatataccgaggcttccagatcttgttggagagattcttggtcagttgctgcataacgccgcataatatcgatagatatgataaaaagcaaaaaggtgaagattgacattattggtcaaggattggaaatctagactcagcatggaagtatgatcatggagccttattcctggcaatacaatgtaagtactctaaacatttacgggcaatgaactgcatggcgttaactatcgactaagtaaatgttattgaaccttgttttgtttactatggaaatgactgtacctcttaatgccatttaagtacatacttg

SEQ ID NO: 23969 - DNA, 1242 bp, Gossypium hirsutum
  Clone ID: GOSHI-09MAY01-C21468_1
ggaacaagcagttcactatatcaagaaaatattgcgttcactctcttgatgatcttaacatacagcgagcttattcacagaggaaaatgatgatgcgattttcacttcaaaaagtgaagaatttaccggctttaaggcctcaggttttggcttctgcgagtcctcgtttctctactgctactgaatcttcttttaatcaccgtaatccttcgagggttcctaatcttataggaggtgcttttgttgattcgaaatcaacatcaaccattgatgttataaaccctgcgacacaagaagttgtttcacaaattcctttaactacaaatgaagagttcaaagctgcagtggctgcagcaaagcaagctttcccgtcatggcgaaataccccaattacaactcgtcagcgtattatgttcaaactccaagagcttattcgtagggatatggataaactggcgaagaatattacaactgaacagggcaagacattgaaggatgctcatggagatgtctttcggggacttgaggtggtggaacatagttgtggaatggcaaccctgcaaatgggagagtatgtccccaatgtagctagtggaatcgatacatatagtgttagagaaccactaggtgtttgtgctgggatttgtcccttcaactttccagcaatgattcccttatggatgttccctgttgcagttacatgtggtaatacttttgttttaaagccatcggaaaaggatcctggggcatccataatgctggctgagttagcaattgaagctggtctgcccccgggtgtcttaaatatagttcatggcaccaatgacattgttaatgctatttgtgatgatgatgatatcagagctatatcatttgttggttctaatactgctggcatgcacatatatggaagagcttctgctaaaggaaaacgtgtgcagtccaatatgggggccaaaaatcatggcattgtcatgcctgatgcaaacaaggatgctacactaaatgctctacttgctgctggttttggtgctgcgggacaaaggtgcatggcacttagcacaatagtctttgttggtgactctgaatcatggttgaatgacctggttgaacgtgccaaaggtcttaaagttaatgctggaattgaacccaatgcagaccttggtccagtgattagcaaacaggctaaagaacgaatatgcaggttagttcaatctggagttgagcgtggtgcaaaactac

SEQ ID NO: 23970 - DNA, 572 bp, Gossypium hirsutum
  unsure (1)..(572): unsure at all n locations
  Clone ID: LIB3584-008-P1-K1-H12
ctgggggggggggggtgggggctgagttagcaattgaagctggtctgcccccgggtgtcttaaatatagttcatggcaccaatgacattgttaatgctatttgtgatgatgatgatatcagagctatatcatttgttggttctaatactgctggcatgggggggggggagttttttcttctaaaggaaaacgtgtgcagtccaatatgggggccaaaaatcatggcattgtcatgcctgatgcaaacaaggatgctacactaaatgctctacttgctgctggttttggggctgcgggacatttgttctttttttttatttttttattttttgtgggggactctgtattatttttttttgttttgggngaacgngccaaaggncnnaaagnnaangcgggagaggaacccaatgcagaccttggtccagtgattagcaaacaggctaaagaacgaatatgcaggttagttcaatctggagttgagcgtggggcaaaactactgcttgatgggagaaatgtcttggttccggggtttgagcaagggaaatttattggtcccgcatttttaactg

SEQ ID NO: 23971 - DNA, 408 bp, Gossypium hirsutum
  Clone ID: LIB3083-065-Q1-L1-B7
gggatttgtcccttcaactttccagcaatgatgcccttatggatgttccctgtcgcagttacatgtggtaatacctttgttttaaagccatcagaaaaggatcctggtgagttcaacataataattgtatgatgtagtatcctggtgagttcacatatatggaggacaaaaggttgctataacttgttttattgtggctggtcgttaaagatcttatttggatgttgatgtgccatacatgggtgggacattataattactattgttactaccttaattttttcagttacataagaaaaagacaacttgggttgtctgtcctttgttcttacatgacttcactttactctccaactcttttcttaaaataccattttgttactttccaggggcatccataatgcttgc

SEQ ID NO: 23972 - DNA, 814 bp, Gossypium hirsutum
  Clone ID: GOSHI-09MAY01-C21798_1
aggtgtccgatacgttggtttagagtgcctagatgtcattagtactcaaactggtcagcccgtacctgctgatggaaaaaccattggagaaatagtgtttcgcggtaacattgtgatgaaaggctacttaaagaacccgaaagcaaatgaggaaacatttgcaaatggctggtttcactccggggatctgggtgtgaaaaatccagatggatacattgaaataaaagataggtcgaaggacataatcatatcgggaggcgaaaacatcagcagcgtggaagtggaaaacaatctctatttgcaccctgcagtaatggaggcatcggtggtggcaagggcggacgagcggtggggagagtcaccttgtgctttcgtgaccttgcagcctggggtgggcaaatccgatgaacagcggttacctgaagacataatgtagttctgcaggtccaagatgcctgcatactgggttccaaaatcagtgatatttggtccactgccaaagacggccacaggtaagattcagaagcatgtgctaagagcgaaggcaaaagagttgggacccgtcaggatgagtaagttataacttggaagttccaaaactaaattatcaggcatctaaatattgctgttattaacattaaaaagaagaaaaaaaatgtaggggattcctactagtagtgttgtattttgtactgtttgtgtaggcttgtagcagtattttatgaataaatatttctggtcaagtaatgtttttgcccaagtgtctgaatgtaataatatatatttgattgaatgtgatagataaagaataatt

SEQ ID NO: 23973 - DNA, 358 bp, Gossypium hirsutum
  Clone ID: LIB3272-057-P1-N1-F5
acttgaccagaaatatttattcataaaataccgctacaagcctacacaaacagtgttcgtagacagtacaaaatacaacagtaattgtaggaatcatcccctaccattttttccttctttttttccttttttttttttttgttaataacagcaatatttagatgcctgataatttagttttggaacttccaagttataacttactcattctgacgggtcccaactcttttgccttcgctcttagcacatgcttctgaatcttacctgtggccgtctttggcagtggaccaaatatcactgattttggaacccagtatgcaggcatcttggacctgcagaacttcattatgtcttcagc

SEQ ID NO: 23974 - DNA, 496 bp, Gossypium hirsutum
  Clone ID: uC-gsflnu33B143g12b1
ttcacgcgtccgaaaaaataaagaaaaaaaaagtgaaatttagctaacaccaaacattacaagttaaagaaaattagtgactaatagattccataatgatggttatagggagtatttgggagtattatccgtagcaacgttcatttagcatgtacgagaatgaaaggccctttttatgtgcctatgttcaagccctttggggtagtctttgcaacagttttcggaacctctttctttacaaacagtcttcattatggaaggtaattaaaatctttctcccttttctcttacctttcaaatctttatatcgttgttgacacaaaaaggttgtacagtgtgataggtacaataatagtaggaacgggatattatgctgtgatgtttggacaaatcagggaagaggaacttcgtaaagagcgtgaagttggaacagtgagtgatatttcagaccttaaggtccctctgttgcaggaaaaccaagatgcccaagtttaga

SEQ ID NO: 23975 - DNA, 384 bp, Gossypium hirsutum
  Clone ID: uC-gsflnu33B009g01b1
tccacgcgtccgatcgttgggttcttgggggtattttgcttgcggctgctaccttgtcgatttcagtatggaatattgttcagatgggaaccgtcaaacaatatccacaagtgatgaaagtggcctcgtcttatagcttagttgggactatccagtgccttgttttttctttgatcatggaaggagatctagatgcatggaaactgaaacgcaagccggatctcctactcattattgtgacaggagtatttgggagtattatccgtagcaacgttcatttagcatgtacgagaatgaaaggccctttttatgtgcctatgttcaagccctttgcggtagtctttgcaacagttttcggaacctctttctttcaaacagtcttat

SEQ ID NO: 23976 - DNA, 944 bp, Gossypium hirsutum
  Clone ID: GOSHI-09MAY01-C21748_1
gagaaatggcggtgatggagagttcgaaaccaacggtggagatcaacggattgagcttcacgtatcctggaatcgacggtcatccaccgccgggatccaagcctcttatcgacggtttctctctcaccctaaacgctggcgatcggtgtctcctcgtcggatccaatggcgccgggaaaacaacgatattgaagattctgggagggaagcatatggtggagccgcacatggttcgagtattgggaagatccgctttccacgacaccgttttggcttcctccggtgatctttgttatcttggaggagagtggagacgtgatgttgcttttgcaggattcgaggttccaattcaaatggacatttcagctgagaaaatgattttcggagttgcaggtattgatcccaaaagaagagatgaactaattaaggtattaaatattgatctttcgtggaggatgcacaaggtatccgatggtcaaaaaaaacgtgtccaaatttgtatgggtctccttaagccattcaaggttcttctacttgatgagataacggtggaccttgatgtgctagcaagagctgaccttctgaatttccttaggaaggaatgcgaagagcgaggtgccacgatcatctacgcaacacatatattcgacggtcttgagaagtggccatcacatattgtttacgttgctcatgggaaattgcaattagcaatgccgatggataaggttaaggagattagcaattcgtcgcttatgagaacagtggagagctggttgaggaaagaacgagacgaagagagaaagaaaagaaaagagcggaaatcacaggggctcccggaattcgaaaaccaaaccgagggaagccgtgtgacaggggatcctgcccgagccgctgttcgttcactaaacaacggttgggctgccgggcggttgaactccacggtc

SEQ ID NO: 23977 - DNA, 1064 bp, Gossypium hirsutum
  Clone ID: GOSHI-09MAY01-C21718_1
cccacgcgtccgcccacgcgtccgcgataccgcgtaaaagactaaaagcaaaagaaaaaactaaaataaaagtcggtattggcttcgaagcagagccataaaatcacctgtattaagcaatctcttccttaaatccaaccattaaaaaccctcgtttcttaaacatcagatcggatccttgaaatctccatcgattcatttttggtacagttttcgtagtatcgatcaaacatgagtttcctctttgggaagagaaaaactcccgcagagcttctgcgggagaataagaggatgctggacaaatctattagagagatagagagggagaggcaaggtcttcagaaccaagagaagaaactgattgcagagataaagaaaactgcaaagcaagggcagatgggagctgtaaaggtgatggcgaaagaccttatccgaactcgacatcaaattgaaaagttctataagctgaaatcacagctccaaggcgtatctcttcgaattcaaacattgaaatcaacacaagcaatgggagaagcaatgaaaggtgtgacaaaggcaatgggccggatgaacaggcagatgaacttgccgtcgttgcagaaaattatgcaagaatttgagatgcagaacgagaagatggagatggttagtgaggtaatgggtgacgctattgatgatgctttggaaggtgatgaagaagaggaagaaacagaagaacttgtgagccaagttcttgatgaaatcggaatcgatatcaatcaagagcttgtcaatgcaccatcagctgctgtttttgcaccagctgcaaagggtaaggttgcgcaggcaaaagcaaccgggaatgacgacggtgggataaatagtgacttacaagcaaggctagacaatttgagaaggatgtagtaagtatgcttaattacacttgtatccaatataaaaattccctccgttgtggaaggcaaaaatacatttggattgtaacatttgggaaaacttgtgccagagtttatcgagtgtcagggtatggaaatacccagtaactataataaatttacatattttgt

SEQ ID NO: 23978 - DNA, 357 bp, Gossypium hirsutum
  unsure (1)..(357): unsure at all n locations
  Clone ID: LIB3147-044-Q1-K1-B11
gttatataatttttgctatggcttggctatctcatgcatgattgggacatttttgctcatgtttttatgagccgagccaagctttcactaatgtctagaaatcgttgcccagaaagttttggactgatactgctactgtattcttgctctggatatatgtatatacatacgtatagatataagcacaatatttgaaacgttactaattcatattagatattctttatgcatatattttcttggccangacaaaagcaatgggccgggtgaacaggcagatgaacttgccgtcgttgcagaaaattatgcaagaattcgagatgcaaaacgagaagatggagatgggtagtgaagtaa

SEQ ID NO: 23979 - DNA, 782 bp, Gossypium hirsutum
  Clone ID: GOSHI-09MAY01-C21678_1
gcaaaaggcaaagagaattggaagaaggaaaagcagggttggggtgggggactagtggcatcaatggcggacacggggagcagatatgggaacaacagcaatcccagatgcagcgcgtaaagaactcgggaatcatccttaccaatgaaactccattgaaagatgacaaggaagaggaaatggccaaatccgcattggctttgtttcgagccaaagaagaagagattgagaggaagaagatggaggtgagagacaaggttcaggcttatatgggacgcgtcgaagaagctactcgccgcttgtctgacattcgagaagagcttgatgccctgatagatccaatgagaaaggacattgcatttctgcgtaagaagatagacaccgttaaccgggagctgaaaccattgggacagagctgccagaagaaggaaagagagttcaaagaagctcttgaagccttcaatgacaagaacaaggagaaaacacatcttgtcagcaaattaatggagctggtgagtcaaagcgagagattaaggatgaagaagctggaggagctgagcaaaagtattgaaacacttagctaaaaatggtgctgactaaaacaacatacatgatgtgctttgcgtgttgtaatttgattgattgtgtcatatattttattgttttactggccatgtttttcagctggtttttcaattaggaaagtagccactgagcaggtgtcaccaaacatgtaacttttatttgctcctcgtgttctatctaactcaccataataattt

SEQ ID NO: 23980 - DNA, 504 bp, Gossypium hirsutum
  Clone ID: uC-gsronu33B169g03b1
accgccgcggcggaatcggggggacccacgcgtccgaggtcattgatttctgcgtaagaagatagacaccgctaaccgggagctgaaaccattgggacagagctgccagaagaaggaaagagagtacaaagaagctcttgaagccttcaatgacaagaacaaggagaaaacacaactagtcagcaaattaatggagctggtgagtgaaagcgagagattgaggaggaagaagctggaggagctgagcaaaagtattgaaacacttagctaaaaatggtgctgctgactaaaacaacatacatgatgtgctttgcgtgttgtaatttgactgattgtttcatatattttattgctttactatccatgtttttcaactggttcttcaattaggaaagtagccactgagcaggtgtcaccaaacatgtcaacttttatttgctcctcgtgtttctatctaactcaaccataataattttgtccaataaaattatatatatatatatt

SEQ ID NO: 23981 - DNA, 852 bp, Gossypium hirsutum
  Clone ID: GOSHI-09MAY01-C21158_1
cggacgcgtggggtgagttaggggtgacaagatggctacaagtgaggcatccgtgactcggataatggtggcggtgaatgagtcaacgatcaaaggttaccctcacgcttctataagtagtaagggagctttcgagtggactcttcagaagatcgttatgtccaacacttctggtttcaagcttctcttcctccatgttcaagttcccgatgaagatggtttcgatgacatggacagcatatatgcctctcctgaagatttcaagagcctgaagagcagggaccgggctagagggcttcatctgcttgaattctttgttacaaggtgccatgaaattggggttgcgtgtgaagcatggatcaagaaaggtgatccaaaggaagttatctgccatgaagtgaggaggatccagccagatcttcttgttcttggtagcagaggacttggtcctttccaacgggtttttgtcggaacggtgagcgagttttgcgtgaagcatgctgagtgccctgtcgtaacaatcaagcgtagatcggatgaaactcctcaagaccccgtcgatgactaaatttgtttcacagaccccttgattcattgctcttggttctgttaatagacttgaaactctacgactttaccaattccatatatcagtggggataagaaatgaattgcttctgttttggtggaaaaaatactctgttgtggattgcgtttgttgtgtgcaaagagaactgctattattagtctggcccgtatataaagttgtatttgctttaattacttccaaaaccctttctcgtgttcttttttttatttactagattttaccaaaaaaaaaaaaaaaaaaat

SEQ ID NO: 23982 - DNA, 359 bp, Gossypium hirsutum
  Clone ID: LIB3083-060-Q1-L1-A7
ggggatcttctggttcttggtagcagaggacttggtcctttccaacgggtttttgtcggaacggtgagcgagttttgcgtgaagcatgctgagtgccctgtcgtaacaatcaagcgtagattggatgaaactcctcaagaccccgttgatgactaaatttgtttcacagaccccttgattcattgctcttggttctgttaatagacttgaaactctacaactataccaattccatatatcagtggggataagaaatgaattgcttcttgtttgggggaaaaaaatactatgtggggattggaattggtggttgcaaaaaaaaactctattaataggccggggttgctttaattacctcc

SEQ ID NO: 23983 - DNA, 634 bp, Gossypium hirsutum
  Clone ID: GOSHI-09MAY01-C121120_1
atttggttggcctccaggaaggccaactgaagacaagcctgggaaagctctgttctttcttttgctctcttacgaagagacagatggaaaacggtctctcattgcaactaaaatattggaaggcacccactatgttctgcacccaaatggttctgcaatgttcatagtgaatattgatgaaccttcacttgacccatttccttgggatagtgatgcagattcgcatcctgtcagtgtgaagcatgctttcatgggagaaggtattgcaaatggatatggttttagatatcctggctcaaagcctggctctctttttgctattcaaaatggcctgcttgccttcatatggaaggaatccagggctgtcttgaccctgcaaagactcaacttgcaagatcttttgaagataggtgaacaggtgcctgctttacctccagttgccaacttttcatatttgaccaaatcctactctaatgtgcttgcggggttctcaaacacctcaacgttttcatcttccttaaggcaaaggcatatctaggtcaccgatgggactagaatagttgccaatactcaactattgttcccatgccaatacgtctgctagccccggggctagtttgctgctacttgtgac

SEQ ID NO: 23984 - DNA, 837 bp, Gossypium hirsutum
  Clone ID: GOSHI-09MAY01-C21048_1
gctatatagcccatggaaattgctatgcttgtgattatgccggaacttatagtgaccagaaatgccgaactaactgcggagagcctgctcaaagatggtaccatgtaccacgttcatggctgaagccaagtggaaactttttggtggcgtatgaagaatggggaggtgatcccaacgctgattgctttggctaaaagaacaacagcaagtgtatgtgctgatatatttgaagggcagccaacaatgaagaaacggggaatgctaatcgcaggaagaatcagtagaccgaaagcccatttgtggtgtcctcctggccagaaaatttctaaaataaactttgctagctatggaatgcctgaggggagttgtggaaacttccgtgaaggaagctgccatgcccacaagtcctatggcgcattccaaaagaattgcatcggaaaacaatcgtgttcggtaaccgtggctcccgaagtattcggaggagatccatgtccaggtagcaggaagaagctatcagttgaagctgcatgcaaatgaagaagtctaaatagagtgatacattaaagaagcctagactcgttcatattcagtacatagatacttccttaccatctctgtgagctttcaaggtatcgctcactgcaaagatgatatgatttatgtgcatagagaaagccattgattgtctgatacagcacagagaaagcatatatgggatcggtttgtaaaagaatctaggattattctagtttcccggaattcagtttatatagcatacatgggattgattctctttgtaaaaataaatggaaaaaagtaaaaatccaagcatttttc

SEQ ID NO: 23985 - DNA, 1128 bp, Gossypium hirsutum
  Clone ID: GOSHI-09MAY01-C21008_1
gcctcctaatataaaaccctaaccgcactctttcaacacccgatcacatactcaacacttcccacgcagctaaactctcctgagtcaaaacatggcaattatctccgagtttcaagaagaagaggccagaccttccgcttcttcatcgccgaaagcggtgccgtttaacgccagcttggatccgtcggaccctgttgggtttctggagaaagttttcgattttctggccaaagaaactgattttcttgagaaagagaacttcgataaggagattgcagtggtcgtgagagttgctaaggagaaacgtaagcagaaggttgaagaggtggctccgaaggtggagataaagaaggaggaagtgaagaaagagaaggagatcaaggaagaagtgaatagggaggcaatggaggtcgataaaaacgaagaccagtctagctctggtttgaaagttccaaacaaaggcaatggacttgatctggataagtactcttggacacagtcccttcaagaggtcactgtcaatgttccagttcccaatggaacaaaatcaaggtttgttgtatgcgagataaagaagaatcatctaaaagttggacttaagggccagcctcctattattgatggggagcttttccaaactgtcaaacctgatgactgttactggagcatagaggatagttgtgcactgtcgatccttttgaccaagcacaaccaaatggagtggtggaaatcattggtgaaaggagatcctgaaattgacactcagaaagtcgaaccagagaacagcaaactatctgacttggatcctgaaacacggcaaactgtagagaagatgatgtttgaccagagacagaaggccatgggccttccaaccagtgatgagcttcagaagcaggaaattctaaagaaattcatgtccgagcaccctgagatggacttttcaagggcaaagctcatgtaaatgtgagtgtaccccagttttagcttttgtcctatgatcccttttgttttgggcagaaaatgaaatgatgaacggtttgaacagtgctgatattggatattatactcttgtagacatcaggtttttgttaagacttgaatttaagagtaaatcaagagttttagttg

SEQ ID NO: 23986 - DNA, 679 bp, Gossypium hirsutum
  Clone ID: GOSHI-09MAY01-C21348_1
gctgcttcacacactttcccaactcccaaacagatctctctctccttattttctcttccttttctctctggaaaatcactgaagaaaaaaacccttggaaccctagaaatagacctatagtgaatgtttagtattaaaattaatcacatttttgtttagtgttttttttagatctcttgataatttgctttctttaggtttcttttttcttttcagtttttggtttcttatctttgaagcttcgtctagccttaattcacatttccacaatgaacgaccttctatcggactcatttgagatccctagaggtcaaggtcaaggatctcatggtggggatatcgaattaggagctcaagcaaatgcagatgaactaggccttcaaaatttctttaaaaaggttcaagagatagataaacaatatgagaagctggacaagctactcaaaaagcttcaggatgcacatgaggaatcaaaagcagtgactaaggctcctgccatgaaatctattaagcagcgaacggaaaaagatgttgatgaagttggaaaaatatctcgttttgtaaaggggaaaattgacgaattggaccgagagaatttagcgaataggcagaagcctggatgcggataaggaacaggtgtagaccggtcaaggacgtcaacaactcttgccgtgaaaaa

SEQ ID NO: 23987 - DNA, 975 bp, Gossypium hirsutum
  Clone ID: GOSHI-09MAY01-C21318_1
tttttcatgggggctgttggattagcaatgtggggtgctgtgtgtggctaaccagaacaggagactgactctgaaatgaggacttcagcaagaggatattccgctgttgctgctgctgaggaactctctgtcatagaaaaggctgctgaccaagaagcactagatgacgatatgcttcttgagaggtcggggggtgtcaaaggccatgtctaagaagtacttaaaggtgtcaatggctgctactgtaaaagaggcaatgaaatgcatgcatgacaaccatcagaaatttgcgcttgtggtcgatgaagataattttctggaggggattatcacacttggtgatattagatggtgtctgtctaagaagcagcctagtgatatctccaagggtgattcaacagctgatgtgaatccatgtcttgtttcgtctgtttgcacgaaaggaataagctaccgtgggcagaagcgcggacttctaacctgctttgctgatactgacttggcaattgctagggagttgatggaggctagtggagtaaaacaattgccagtggtgaatcgtgggggagaaccccacaaaggaaggaaacggagagtcattgctgttcttcattacgaatcaatctggaactgtctcagagaagagataaatcacaggaagtctgtgtatcagcatagccataggaaggataataatgaagaggagactataaattccaatggccattaattagtgcgtctctttctctcacacactctctcggcctgctgcctgcaactacttatatagaattagaacgacttagaagcaaattgtttatgctgtctttagaatcataattagaattgggtctgcaaatctggcactgagtggggatattacagaagcttttgctgtggatcctttgatgtaatttaccgaacaaaaaatatacatacatacatatatatacgtatgtctttgtaattgtactc

SEQ ID NO: 23988 - DNA, 512 bp, Gossypium hirsutum
  Clone ID: GOSHI-09MAY01-C21308_3
cttaagcaaaatacaatactaaattctctcaacctcaaatctcctcgccgtatctttgttctaccgacgccagtgattttccggcttactgctcccttccgaaatgagcctctccttcccctctttcctttgatcagactagatttccaaggaactcccccaaacccattgcatttctaaccagaaagctaggattcaacatcttcttccaccataaggggattgtcaaagaagacacctttccaacaaagtctttgtcaatcgacagtggtatttgggtgaaggtgggtttggtttggtgttggttttgatcgaaaggcgatgaattgaatctctcaagcccacagctgcatactttaaaatgcccgtcgtcagcgagaaattcccgttaggtattggagcatctccttttttatgcacaaggttcatcctccaaacgaaccataatactaagaaaatggattgcatattctcatccatcaccacatatcctttcataactttgagaagga

SEQ ID NO: 23989 - DNA, 796 bp, Gossypium hirsutum
  Clone ID: GOSHI-09MAY01-C21308_1
cttaactttattattaattttaaaaattaaataatcatattttctcttctaaccatatcaattcttaagcaaaatacaatactaaattctctcaacttcaaatctcctagccgattctttgttctacggaggccagtgattctgcggcttactgctcccttccgaaatgatcctctccctcccctcttccctttgatcagacttgatttccaaggaactcctccaaacccattgcatttctaaccagaaagttaggattcaacatcttcttccaccataaggggattatcaaagaagacacctttccaacaaagtcttcgtcaatcgacagtgggatttgggtgaaggtgggtttggtttggtttggtgttggttttgatcaagacgatgaattaaatatagcggtttgaagaaattcccgttaggtattggagcatctccatttttatgcacaaggttcatcctgcaaacacgaacgagggtacgaagaaaatggattgcatattctcatccatcaccacacatcctttcataactttgagaggaaaactaccaccgagcatttgtgttactaacctggcgcatcccaacacaagaatttgctatagcaagcaacccaagaaccgccgttatccgcgtcgcaccaaactccctcctgactttggcgtttacttattcttggagaaacctagaactgaaaccgacatgtccactgacactgaacaaataaagtcaatttacggtcacaatagtgattcaccctgaagaagacgacaaagaagatcatgtgaatctt

SEQ ID NO: 23990 - DNA, 539 bp, Gossypium hirsutum
  Clone ID: LIB3582-014-P1-K1-B5
ggatattcctagaatgtgatatacccaggccgggatataccactatgggttaacgatgaactgagatatccctgggtttagggtttgccttacatagtttccttcatttcagctctcaagcccacagctgcatactttaaaatggctgtcgtcagtgaataacttttgtcgcatataaatggtttgaagaaattcccgttaggtaatggaacatctccttttttatgcacaaggttcatcctacaaacgaacgataatactaagaaaatggattgcatattctcatccatcaccatatatcctttcataacttagagaggaaaactacaacagagcatttgtgttactaacctggcgcatcccaacacaagtattatgtcgtgtttattttagaggatgatactgattttgtttggatttggttctattttttatttcttaaaatttctttattactttaaatataactttcctaataaattagaatattctgatgtcatatttttattttccatattagaataaagaaagtattatgt

SEQ ID NO: 23991 - DNA, 482 bp, Gossypium hirsutum
  unsure (1)..(482): unsure at all n locations
  Clone ID: LIB3583-039-P1-K1-G10
ccggggcgaccgacgcgaccgcccacgcgnccgancgaaccncccaagcccacagcngcatattnnaaaatgcctgncgncagggagaggggcccgttaggtattggagcagctccttttttatgcacaaggttcatcctccaaacgaacgataatactaagaaaatggattgcatattctcatccatcaccacatatcctttcataactttgagaggaaaactacaacagagcatttgtgttactaacctggcgcatcccaacacaggaattgctaaagcaggcaacccaagaaccgccgttatccgcgttgcaccaaactccctcctgactttggcgttaactaattcttggagaaacctagaactgaaaccgacatgttcactgacactgaacaaataaagtcaatttaccggcacaatagtgattcacctgaagaagaaaacgaccaagaagatcatgtgaatattgatcttgcttgg

SEQ ID NO: 23992 - DNA, 410 bp, Gossypium hirsutum
  Clone ID: GOSHI-09MAY01-C21248_1
tttaattgaagagtgaaggcagatggattttagctcattcttgacgtccgtgagggacgcctttcgtaatattcatagtgttgatgctgctctttgcatggctttccacgaggcaagggaacgcggtgctgtattatccgaaccggatcgtcaaaggtatggaaccgtgggaaggcggttcaaggacaccaaaccctttcgcttggataaaggaagccttgtcttccagtgaacacgacgtcatcaacatgtctggcattgacactgccgtctacttcgtcttcctcagcactgtattgggaatcttggttttgtctggcattgtactgcttccagttcttctacccatcgctccaactgatgatggtgtgaagaaaaacgaacatactagtaataatacgagcaatgga

SEQ ID NO: 23993 - DNA, 418 bp, Gossypium hirsutum
  Clone ID: GOSHI-09MAY01-C21268_1
ttttgatctctctgaaaaatttctaaaattttgaagcttcgttgaacgaatggtcgtctttttttttttcccttttcttctttgattctttttttggggttttttgaggtgcaaattgcaaaggcagcaaaattaatggctactgaagaggtcaataagcctccttcacttccttcatacccacagctgattatgaacgccattgaagcattgaacgacaagaatggttctaacaagacatcaatatccaaatacattgaatccaagtatggagatttgcctgctggtcacactactctcctttcacaccaccttaatcgtatgaaacaaacaggggaacttgtcttcttgaaaaacaattacatgaaagctgaccctaatgcaccacctaaacgtggtcgtggtaggccacctaaac

SEQ ID NO: 23994 - DNA, 1187 bp, Gossypium hirsutum
  Clone ID: GOSHI-09MAY01-C22968_1
catatggggaatttcatggctggttctcctttttcagctggtgtaattgcagctgatggtttggcagttcattctcgtagccatggtggaggatttgctgttcagactgagccttgcatgggccgttctgttagcgtacatggatgctctgaggcagcgaatccaccatcgtctcaagatgcagaagaaaaccttgatgtcgtcaaggatgcagccactgatatttctcaaacggtttcaagaagagacatggcgacccaaatgagcccacagagtagcacccactcgtctcccaaaggaaggccttccttctctccctcttccccttcagctctacctatcatggaactgcagagcatccatggctctaaatcagtactgagagatgtgccagtagatgaaagagtgaccctgactaggtggtcgaagaagcatagagctcgaaacactgggaagagctcagaaattgttgatgattggagaaagaaagttgtagatacttgtacatcaacatgggatgttacagagacaggaaagagcatttccaagatgaaaagagaagaagccaaaatcactgcctgggaaaatctgcagaaggctaaagccgaggcagccataaggaaactagagatgaagctggaaaagaagagatcgtcatcaatggataaaataatgaataaactaagatcagctcagaagagagcccaagatatgagaagtttgatgctggccaaccaggcccaccaggttacaaagacctcgcatatggctatatctttcagaagaacccgccagatgagttcattgagtggttgcttcacctgccaagctttctaatgcatttgcttatctatctgttactggttgaatcaggcctgaaatgcaggtttgaagaacagagacctctggagacgatgaatattgcacaggaagcaattgttacgcggacacgaaaatggtgtcgccatagttttgattgaatgaagcactgctacctccataaaaattccctacgagtgcaagaccccagttggcatgtcccgagacttcccacggtttcctgaatgttttgagtaataaaatcctgtatgcatgtatgtatgtaaatcgacctttcaagtttacatattttttctgtgacagcttgccatggaaatggaaatatcattcatatcttttaagttttt

SEQ ID NO: 23995 - DNA, 438 bp, Gossypium hirsutum
  Clone ID: LIB3083-094-Q1-L1-B11
gaattcccgggtcgacccacgcgtccgacggttgcgagaagacgacagaagggcaccctagaatgtcccatttgataaaaatgaaaatggatgcttgtttgataagaaacacattttattccttgatcatcaacatgggatgctacagagacaggaaagagcatttccaagatgaaaagagaagaagccaaaatcactgtctgggaaaatctgcagaatgctaaaggcgatgcagccataacgaaactagagatgaagctggaaaagaagagatcgtcatcaatggataaaataatgaataaactaagatcagctcagaagagagcccacgatatgaaaagtttgatgctggccaaccaggcccaccaggttacaaagacctcgcatatggctatatctttcagacgaacccgccagatgagttcattgagtggttgc

SEQ ID NO: 23996 - DNA, 243 bp, Gossypium hirsutum
  Clone ID: LIB3145-029-Q1-K1-F9
aaagaaagttgtagatacttgtacatcaacatgggatgttacagagacaggaaagagcatttccgagtatgtctacttcactactacattgcctctatttatttttttaaagtacagatcaacaactttgggagtgacaatatgccttaaggactggagtaaacatcctctgggttcatttctataatcaagcactaaaagataccttcagtagcatgctaaaagtttccaatcaaacatttt

SEQ ID NO: 23997 - DNA, 487 bp, Gossypium hirsutum
  Clone ID: GOSHI-09MAY01-C122890_1
attgtgttctcgtgtgttgctctctcctatccacgcctttcatcccactctctcttcctctgttttggtttccgtttctttattttccagtaaacatggagatggtgacgatagcataattatctctagtattagattatcctatcttttttcttaaagatcgaagcaatgagaagtagtagaattcagagctcaacttggtattcagcatcatcttcctccacgtttcctcgtcctccatgtctcacctctacctctcgccattgcaggctgtctatctctcagagggtgtctagaatttctctactttcaagctgttcctccggattgtctaagacacaattgtcagtttctacacaacggaacgaacagaatttgttgtccgtgggcgtcggtgccgatgctttggtgacttcaaacgctccaggtgtctccaatgagcctcttgttgccgaggaaaagattggagtgctgttattgaaccttg

SEQ ID NO: 23998 - DNA, 362 bp, Gossypium hirsutum
  Clone ID: GOSHI-09MAY01-C22578_2
aaaaaattataaaacaccatcctccgacagtcactttacccaaagcaaatgttggtactacagtcaatgaaacagcaaaacacttggaaatagtttaaaaccagaacaagaagaactaccaactctggtttctctaacgattacttttgtcttttttgttgttttctttttttcattttgaatcattttccatactccttttctgctttccaatggcttttcttcttcgggttctctgctaactcccaccatattcgcattcagtggaagatcccaatcttggatttcatcccactattacacagaagattcaataatggatgatcaaggtggtagcaagccgaccgggatccggcagattg

SEQ ID NO: 23999 - DNA, 1008 bp, Gossypium hirsutum
  Clone ID: GOSHI-09MAY01-C22578_1
aagaaccaaaaaaacaaaaaacaccatcctccgacagtcaccttacccaaagcaaatgttgatacgacagtcaatgaaacagcaaaacgcttggaaatagtttaaaaccagaacaagaagaactaccaactctgatttctctaacgattatttttgtcttttttgttgttttctttttctttttttttttttccttttgaatcactttccatactcctttcaaatggcttttcttcttcgggttctctgctaactcccaccatatttgcattcagatcccaatcttggatttcatcgcactactacacagaagattcaatcatggatgatcaaggtggtagcaagtcgaccgggatccggcagattgttagactaaaagaaatccttcagaagtggcaaaccatcacgttatgtacgatgccgagtacggataccccacattcagaagaaaaccatggagttttctgcccaccaatcaaccaaaggctcaaaaacattatgtcttttgattctgacgaggacagttgccacggttccgaaccgccgcccgatgtcccaaagggatatttagcagtttacgtcggaccagagcttcgaaggtttatcatcccgacaagctacctcagccatcctgtcttcactattctgctggagaaggctgaggaggaattcgggtacgatcacaacggtggacttacgctcccttgtgagatcgagaccttcaagtatcttctcaagtgcatagagaaccatccaaacaatcaccctgttggcagctcagtttctgaacagctggagattcattaaatactagtcatggacttttggggttgaagcaatttcactttgtaagcaattttttttttctcttttgttaattgatgaacaatactaaagttttaggaagaaaattgttcaggtgtctaagaggggggaatgtaacctctctgtccgtatcggaatgtgactgttatcttacgtttggtcagtaatgagatacttccgtcg

SEQ ID NO: 24000 - DNA, 1199 bp, Gossypium hirsutum
  Clone ID: GOSHI-09MAY01-C22518_1
aaaagaaatttaaaattaaaagatagaattaaaatccaacagagtatgcatacataaaaagaaatttcaaagagggtgtaaaccaaatataccatttttttttttgctctttacaaatatgccaaatctttctcacaaactagctactacttcacacatcaagaaacaatggtatgctgatatgatttcacaaggtccaatcctccattccatctctctactagtgtattatgttgtaaggacatccggaagctgaatggagtgagctccaattactttaccaccaacatcaggaaaattctcatgttcagggaggcggtttactttcccatccatatctacttgcaaatggatacatcaaaggtaccctgcaatctgaatgctccatcagtgcatttcttccagttctcttcagctcctataaccacttcacgccttccccactttctggctccttgaacaacttatttagctccccaagatgctctgcccataatgacattctatatccgtgtacctgaccacgaggatattttttcttagcccatgtataatgcggttgataggcacccatagctatctctgtgtcttttcgtaccacgccatggatctttgcccacgcttagccgatcccactattacatactcatcatctactatcatcccctttgcatgcacgtaaatcatgaaccgaccaaattttgcggagtcagagaccgaatctttaccactgagcatttcctgagagacctcttcccgcttaccaagacaatagaaattgaggtaatctcgagggtgtgagtccttaatttgcatggacttgagttcttgtgcaacaacatcatacatcatttgcattgtttgactctgccaatacaaaatttcctgtacagtggcagttttgggatcaccctctggccacaaaggaatgatgatatataccgcgaatctctcccctgctctgattttactagcaacctttagtgccagttccatagggatcagattatcagcccctgcatttttatatgatggccatgcatatgaagatccaagaaaatactgattttcaatatatatgtaatgctgggcagatctgatgccctgtatctcggcggcgggaatgcttttatctatcaccagattttttgcacagaaaagattctgattttcagcttttttgatgtattttggaaatc

SEQ ID NO: 24001 - DNA, 821 bp, Gossypium hirsutum
  Clone ID: GOSHI-09MAY01-C22508_1
ttccaagctgctgctgcagctggaggatctgggagttctagtgcatctttcaacaagtctcttaatgcggcaatgattggtgagactctacctcgtggacgaggattcgatgaaagagcagctcgagcggcggcagaagtaaggaagaaggctgctgcaaggggtcttgtgactcgctcacatggaataccagttcaagctgtgcccccattaactcagcttcttaacatgatcaacatgggggcgactccagaggcaggagatggcggagaagcttctggggagaagagggaagaagcaaatgggcatcataatccaaatggagcagttgattccaaaaaagatgagtcaacaacatccaaggaaggagaagcagcacctgttggattaggcaaaggcttggcttcattggatgctaaaaaacagaaaacaaaactcaaagccacatcttgagtggatgtctactatgaaacttgttcaagtttcaggactgcttgttattttttaacaattttcattcatggtaagtgatgaattggtactcaattgcaagtccagggagtagcattgccggcaagaactcaaaattacatataataccttttttgtttttgcttgtccaataatctggcatggcaggctcagcttgttgctaagcgctgggcagcttctgaggggaataggaatttagcattgtcaatgagttgttttccttttgggcgtataattttagaattatgtactgatcttatgttttttaagtgcttggtatttttgggtctcatttgctcatagtagcattttccattgtattttgttct

SEQ ID NO: 24002 - DNA, 824 bp, Gossypium hirsutum
  Clone ID: GOSHI-09MAY01-C22488_1
gagagagagagagagagagagagagagagagagagagagagagagagagagagagagagagaataaaacagagtttagacttaaggaatcagagctcgatccaacctccactcctacctaaatttccgatacagacatcatcatcatcagtagtgcctcagggaggttggttggtggaagaagacatcaatgaatcgcatctaaatgatcgaccatcaggcactacacaagaatctgatgtaataaaatctgataaattgcgaggttatcagaatccgtttcctcatacagcacctggttctgtttccactggtttaccatcgtatgcatcccaagtgaagattgaagaggcacgtactggacttgatacaccgaagcagaatgttctgcctactgctcatttatcagagataggtggaactcagaatcatctgccttctattactagagaattgcagtctgaaggtggaaaaatgaatcttctaccctcccatttgtcgataggtgttctacacgaaattggacgaagatgtggttcaaaggttgagttcaggtctgtggtaagcaccattaaggatttgcagttttctgttgaggttttattcactggggagaaaattggtgttggaatgggcaaaacaaggaaggatgctcagcagcaagctgctgagcttgctcttcataatttagcagaaaaatatgtagcatatatagcgcctcgttcgggagctgtggataaaaatttcaataatctctctcttggaactgaaaatggatttctatgggacgtgaatcctgcatcaaatgaagcaataaaagaaggt

SEQ ID NO: 24003 - DNA, 351 bp, Gossypium hirsutum
  Clone ID: GOSHI-09MAY01-C22468_1
cttacatacatgagggtaaatggcctcctgggtcagttgatattcacatcatcgaaaagagtcttcgaaaggctgtctttgcagctattctccttatacccattgcctgcattttcctatctctcaaggaaatttcagccactcttattttgtggagacttcagctaagtggactccttgtcatattattattggttttttggaaccctgttcacaaagagtctgtcatcataatgccagcctttggagttcagcttgaaacacactatacgagtggaagaatcatccgcagattcattcccgccggtgagattttgaaacctgttttattaaaatgtgttacccccgtaa

SEQ ID NO: 24004 - DNA, 912 bp, Gossypium hirsutum
  Clone ID: GOSHI-09MAY01-C22118_1
tcccacgcttccgcgagggtttcctcaagttcccatctttctttggctttcgcatcagctccatggatcgggcgcagctcctcctcgtaggattacctctcttcctcttcgccactgatctcctcagcctcttcactcctccgcccccaaagccgccgtcccatcaccatcaccatcaccaccatcatccccacctacccaaacctccactcaatcctgaaaccctagatatttctttacagaaacccagcgctagtggaggaatcggctatggcagcacggtgaatatcaatttctgcgcttcatgctcttacaggggaactgctgtgacaatgaagaagatgttagaagcccagtttcctggaattgatgtaatccttgataactatccaccatcattgccgaaacgtttgctttcgaaagtggttccagttttccaatttggagttatagggattatgatggcaggtgaacagatttttcctatgattgggattacgacaccacctccgtggtattattccttgcgtgcaaacaggttcgggtccattgcaactgcttggcttcttgggaatgtaatgcagtcttttctgcaaagctccggtgctttcgaggtttactgcaatgatgaattggttttctctaagcttaaggagggaaggtttcctggagagattgagttgaaagatattatcgccaaaacattggctaattcaagagtgactggcaaccttggagtagtgttgtcttagctctgttggattgaaagcacttgatcataacaggacaaggttcaggtttctctttcgttattacttagatttctgtcgtgaaagcatgtaaaaacacgggttcaggttttacctcgtgtatctgaacttttcgttgcacttatataagccactttattct

SEQ ID NO: 24005 - DNA, 1163 bp, Gossypium hirsutum
  Clone ID: GOSHI-09MAY01-C22098_1
cccaactgttgttcccgacgattccgtgaacccaaggttggctaagatcttggagaaagtagctgttcggaaagagcttatagttgcactcgccaattcgaatgtgaaagagatgttggaggtttggttttctagcatcaagagagtcggtatacctaattacctagttatagctttagatgaccacattgaagagttctgcaaatcgaatgatgtcccggtgtacaagagggatccagattcgggtattgatgccgttgggagatcaggaggcaatcatgctgtctctggattgaagttccggattttaagggagtttttgcaactgggttatagcgtccttctctcggatgttgatataatatacttacaaaacccattcaaccatctttaccgggattctgacgtaaagtccatgactgatggtcacaacaatatgactgcttatggatataacgatgtcttcgatgaacctgcgatgggttgggcacgttatgctcatacaatgagaatatgggtatacaactctggtttcttctttataagacctacaatcccttcaatcgagcttttggaccgtgtagctgatcggctagctaaacaaccaaactcatgggaccaagccgtttttaatgaggaactctttttcccatcacatccgggctacgatggactacacgccgctaagagaaccatggatttctacatgttcatgaacagcaaggtcctatttaaaacagtaaggaaagatgctaaactcaagaagttaaaacccgtaatcgttcacgtaaattaccacccggataagcttcgaagaatgaaagcagtggtagaattcttcgttaacggcaagcaagatgcattggatccatacccagatggctctgagtgagatagcaacaacaccatcaaggatctcatctcgacctacggatgatggatggactctccggttctcgctcgttccaaaagctacatgattatgggtatgtaattctgatattatcttacgagaagagtgtctgaatatatttctttactcactttctttttaacttaaagctttgtattacttgctgtaactttttttgtcaaactttacaagcagtttaattagtacacttgtgctatattatgcaaactaaggttttggttgttaaaaa

SEQ ID NO: 24006 - DNA, 1052 bp, Gossypium hirsutum
  Clone ID: GOSHI-09MAY01-C22378_1
aggcggataaatgggcttgtatagtgtgtgttcaccatgtcaagcagtggttttttttttttttttggttcggctcctttgtactttcagtccaacttttcttttctccataagaagaatcacaataatttttaagagtcttacaggagtgccgaaagaattaacaatgatcttacaagagcaacaactcaccgagaacacgaacaggtttgggcctttttaatggatgacgatgtttggctccatagaaaacaagggtaactatacttaaagactacctataggattaactctggaattcttgtttgaaattcttttacgaggcaatgacagatcatttagacagcttgaatttttaccttacgagtctgtatgagatttggcaaccccttctctccaccctttttgacgagctcgtgtttcccacattgctgtcaatttcttctgagctaccagtgctgcttcggctttctcccttgcttcttcacatgtttccatacctgaattgcacttgtctgcttccttttggtactgtgatgctatcttcttagcctcaagtaatgccatgtcggcccgtcgctgactttccaaagcttcagcttctcttagcttcagttcctccattaaaagttctgcagagttcttctcagtatcctcggtcacttccgggtcatgctttgcgcaatctgcaaaggaagcattgctcagtccttcagggagtgtgagaagtggctgagaagaacaatcacaaagacacggggggcaagtgttggaagtacggctgacggcagccaagccttccatgagatgccagtatagtggtggaccaactatgtagccgaataaacatagacctagtaaacctaaccccaccttcaccgctgccgcatggttcattgccatctcttttctgagaaagggactctggtttttttgggttcagtgcgaaattgaaatggagatagattttggttagttttttttgtatagattcagagatcgatttgaggttaagaaaaaggttatcgaaagttgatttgttttggactttg

SEQ ID NO: 24007 - DNA, 355 bp, Gossypium hirsutum
  Clone ID: LIB3145-015-Q1-K1-H12
ccggccggaatccgggcttttatatggtcagtgaattgaggttgaatttaaatattctacagattgcgcaaagcatgacccggaagtgaccgaggatactgagaagaactctgcagaacttttaatggaggaactgaagctaagagaagctgaagctttggaaagtcagcgacgggccgacatggcattacttgaggctaagaagatagcatcacagtaccaaaaggaagcagacaagtgcaattcaggtatggaaacatgtgaagaagcaagggagaaagccgaagcagcactggtagctcagaagaaattgacagcaatgtgggaaacacgagctcgtaaaaagggtggagag

SEQ ID NO: 24008 - DNA, 1061 bp, Gossypium hirsutum
  Clone ID: GOSHI-09MAY01-C22328_1
cctccttggatatggagggggcaggggaggaaatagttctatctcaaacttagcaggtcgaaatatgtggggaaatggaggtcttaaccatgctactaactcaaactctagtcctattgtgggctctggaagtgggaattcaggtgtgaattcttttggcagcattgcaccactttcggattcctctcctacttcaggtcaaggtggagctgcttttgcttacaacagtggcaatcgtagatatggaagtggtgacattgtggttggatcagaaaggataggctatgatagaaacagtgcggccggtgttgcacatgtatcatcccaaggtgcttcaaatggtggttataatggggcttatgctgatatagatgaaaatgggtcattttatggggaattctacttggctcccttcacccttagacctacagcgatctagttcttttggttttggcccgggaaactcaacttcagatgttaggactaatagctctaactggctacattggtggttatggtgttcccaatatgcagtcagatagaggaattgctgcataggaggaggatgaagctatgatgtcaaattctaggaaatttgtatggtggagctggttaatgactgtgatttctacatttcctttgtgaaaatatttcagttttatatggcaaaaaatatgagtagagctaatttggttcaccttgtttgatgaaaaaacttgatatagagatcagttgcaaaggattcatgtaaggtttgagcttttgagggttcatttttatttttatttttttttctttcaatacaggttttctttactgggattgattaagatgtaaaatcaagattgtgggtatacacagattatgtatcatgcatctcttggtgacattgggattcatattaagagaagcccttttttttttcttccattaattttagagtcgttggatattgtgctgataaaatattatccagtgaagttgctgggttattgtattttgtagattgaaattgtaatgagatatttggtttgattttaatctgcattgtataaaaaaaa

SEQ ID NO: 24009 - DNA, 675 bp, Gossypium hirsutum
  Clone ID: GOSHI-09MAY01-C22298_1
caagagccaaactgagaaaaagattcatccatggagggcatgaatgatgacaatatgcatggcatgatgatgcacaacacatcagatggcggcatgaacatgacgaaccaccataagatgatgatgcatatgaccttcttctggggtagcgatgccgagattctcttctccggttggccaggaaccagaaccggtatgtatgtcttggccctcatagttgtcttccagcttgctttcatggtggaggggatttctcactctcggttcatgaaacccggttccaccaaacacgtgaccgccggtctggttcagactttgttgcatgctctgagggttggacttgcgtatctggtgatgttggctatcatgtctttcaacggtggcgttttcttggccgccgtggctggccattctctggggtttttattatttggcagtcgtgtttttaacaaaccttccgccaccgtccccgccgccaaaacatccgatcttccgcctatgagttgttgaatattagggtttatttctttcgggtttgggtctaaaaggattgatgtttatggttttagatttttgtttttatcttttaatctgtgctttgctctgtatgtgtttttcatttgatacaaaaaaaaaaaaaagattgcttaataaccagtgattgtacattttacc

SEQ ID NO: 24010 - DNA, 384 bp, Gossypium hirsutum
  Clone ID: GOSHI-09MAY01-C22268_1
ggaaaatcctatttaaaaagcaaaaagattatgcttcgactcttgcaaagaacggactaacagggtcagctgcccaattaatcctcatccgtacataccgttactgtataagatagatctcgttgtgaaagatctattactggaaaatttatgagtagagccgaagagtgtgaactgtacaagttaccaattaaatgaaggaatgagctccggtgtatagagaggacctcaccgtttaagaagtaaccatagaaacgatggaacccactatttatttatccatttctatttactcctttattttagttaatatgctttttttgatccctagtatcaatacaatttcttatttcaaggcgaaatgcctataaaaaaagaaaaatc

SEQ ID NO: 24011 - DNA, 745 bp, Gossypium hirsutum
  Clone ID: GOSHI-09MAY01-C23948_1
tatccgttgttatatccttcacggcgttacctcttgtggatcaaaaccttccatctttatcctctcctcctccttccgccatgacaacgcggccaacacctccgcccgtccacatcgacctctggcccatcctttccgaatctaaacgcataatcaacgcccactcccgccacttccttgctctctccgtcctcttcctcctccctctttccttctccttctccgccttccccttcatcaatcaactcttttcccaatcctccacccccaccatcgaaacccacctcagtttcctccacaccccttttcaactgcaaaaacccccaacaattcccatcaattacctgctcttcactctcctttacaccctcttcatcttcatcttctctctcttcgccaccggttccatcacttacagcgttttccacggcttttatggccgacccgtcaagctcctatccgctatcaagtcagctttcacttccttcttccccctcgtctccacttgccttgtaacggagcttatcatttctgggatccttttaattcttgctttgatcttccttggattactccaactaacccaactgttaggcttccatgttgattacacttcgccttatttcatttccctgtgtcttgttttcgtaattactttcttgtttattgtactctatttgcaagttaagtgggtattgcttatgttgttgttgtattgaatcaagctgggggcttgaaacattac

SEQ ID NO: 24012 - DNA, 838 bp, Gossypium hirsutum
  Clone ID: GOSHI-09MAY01-C23978_3
cgacgctcacgtcatttttacaggctggctataagggctgtcttgcacaaattcattctgttgttcgagggaatgggcgagagtagttgagcttttactacagcaaattgatctcaaagacccaaagaaacccatgaaaaagaaaggttctttttgtgaagaatggtgctgttgttgggtttggtcgtatttcaaggtcaacagcctgatttgggcgttgagaaagttctcaagattttccttcaactttgggaggttcacttcttcgcactgaagggaaaaccattgcagtgggaaaaagtcactgatcttccttcacgcagtagtgcttaaaaaattttgttcttagaggtaagcaaattgctgtgtaacttatcctgttgtgttgcagcacggaagagtggagggattgttgctttatctattattgcattacagatgtattgatgtaacaagttgtcaagggaagttgagatggttattgttgctgctctcattgtgattttgatatatggtatgaaccagtacacaccaacccattgttcattaggggttaaaaagaattgcggttaatggtgttcaatcagtttgatcaagctttgtttgttggatgctttttggcaggcaagtctgtttaatgtcgaatttgttgaaaaaaagaagcatatttgtgtttttttaactcgccaaggtgattgaaaaaaaaagaggactggcttcgtttcaatccgagcttgttcctaaataatattgttaggttacattattattataattattgaattacgataagattatgacgcaaattattattaaatctaattctgcccacttttgc

SEQ ID NO: 24013 - DNA, 1074 bp, Gossypium hirsutum
  Clone ID: GOSHI-09MAY01-C23978_2
cccggttcgacccagcttctggtccttgcctatttgaacccttggtgggggtggggggggctcttagagaccccaaggtccatttaggatgcctataattgacaaattcaaagacatgggaactgttgttatgggaaaggtagaatctggcagtgtgtgtgagggtgattccttattagttatgccaaacaaggctcaagtgaaagttgtagctgtatgttgtgatgaaagtaaggtcaggtgtgcaggacctggtgaaaatttacgggttagattatctgggattgaagaagaggacatattgtcgggttttgtcctgtcaagcattgtaaaaccaatacctgctgtcactgaatttacagcccagctgcagattcttgagttgcttgagaatgctatttttacagctggctataaggctgtcttgcatgttcattccgttgttgaggaatgcgagatagttgaactattacagcaaattgatccaaaaacaaggaaacccatgaaaaagaaagttctttttgtgaagaatggtgctgttgttgtatgtcgtgttcaggttaacaactcaatttgtgttgagaagttctcagattttcctcaacttgggaggttcactcttcgtacagaaggaaaaaccattgcagtgggaaaagtcactgatcttcctgttgcttaaaacaattttgttcttagaggcgagaatataaaggtacaaactcgtatacctaatccagtggcagcaggacaccatctccgggaaccatattaatagttgctttagataattgcattacaaatatgctttatgtaatagtatttatgggaagatgagatgattaatgatgctgctctgattgtactttgcgggtatttatacatttcatatgagatgggtgtatagtatagtatagtatagtatagtatagtatagtatagtatagtacagcttagtatagtatggtatatcatagcatagcatataaataaataaatgtagtgtgaacttgattccttgcaaaaaaaaaaaaaaaagggcggccgcccgcgatctagaactagcggacgcgtggg

SEQ ID NO: 24014 - DNA, 702 bp, Gossypium hirsutum
  Clone ID: GOSHI-09MAY01-C23978_1
gcaccaggtcacaagagttatgtcccaaatatgatcagtggggcatctcaagctgatattggtgtgcttgtgatttctgctcgtaaaggggaatttgaaactggatatgagaggggtgggcagacccgtgaacatgtgcagcttgcaaagactttgggtgtgtcaaagctacttgtagtagtcaataagatggatgatcacactgtcaactggtctaaagaaaggtatgatgaaattgaatcaaagatggtaccttttctcaggtcatctggctacaatgtgaagaaagatgtccagttcctaccaatatctggtcttgttggtactaacatgaaaacaagagtagataagaatatatgtccttggtggaatggtccctgcctatttgaggccctcgattctgttgaaattcctgtcagggatccaaaaggtccatataggatgcctgtaattgacaaatttaaagacatgggaactgttgttttgggaaaggtggaatctggaagcctctgtgcgggtgattccttatttgttttgcccaacaaggctccagtgaaagttttagctgtatactgtgatgagataaggtagctgctggacctgtgaaaatctaccggtaggttatctggaatgagaggagacatatcgtcagtttgcttggcagtgtgaaaacgttactgcatactgattacaccaattgga

SEQ ID NO: 24015 - DNA, 475 bp, Gossypium hirsutum
  Clone ID: LIB3493-028-P1-M1-A10
gcctatttgaggccctcgattgtgttcgaattcctgtcagggatccaaaaggtccatataggatgcctgtaattgacaaatttaaagacatgggaactgttgttatgggaaaggtagaatctggaagcatatgtgagggtgattccttattagttatgccaaacaaggctccagtgaaagttttagctgtatactgtgatgaggataaggttaggcgtgctggacctggtgaaaatctacgggttaggttatctgggattgaagaggaggacatatcgtcaggttttgtcttgtcaagtgttgtaaaaccgatacctgcagtcactgaatttacagcccagctgcagatccttgaattacttgagaatgctatttttacagctggctataaggctgtcttgcacattcattctgttgttgaggaatgcgagatagttgagctactacagcaaattgatccaaaaacaaagaaacc

SEQ ID NO: 24016 - DNA, 648 bp, Gossypium hirsutum
  Clone ID: GOSHI-09MAY01-C23968_1
cttcagtttcaatgttcttcgctttgcatttacaaacaagaagatgaacagcaagacaaatggcatggtccacaaacaggcatcccaaagcttgatgccacccgaataaatgaagatgcttcctagtgttctcgcatcaaacaactttctcggctgcttgcttgtgctgctttgcaaagatgccttgagcatactcatagagctccacatcaagcttgttaagtgattgtatccgctggaggaccatttgaggaaccctattacgtgcctccttagtgaagtttgcaggtgagattctcttcaaggaagctatacgtcgacgtgtttgggtctttcgcaagccagaaatgcaaacctcataagtgtccataagtttttccacagtcatattatcttggtttacttcattgtcatctgatgatgtggtttcattccccttttcatctgagttggtattctgtcataacattttaaaaaaaaagaaatggttaagagtcctacattagtaggtatccagatattaagcatttgttagctaaaatgcagcacctgatccagctctgaatctgaaaatgaagtgccctgttctgaattattaacattggcttccttcccaatagcattagagtttaccagctgagaaatcac

SEQ ID NO: 24017 - DNA, 683 bp, Gossypium hirsutum
  Clone ID: GOSHI-09MAY01-C23938_1
cggccgcgtgggcggccgcgtgccggaggaaccgaagcttttcctgatttgggtaaacattgtcaattttcaggttgtcatcaattagattttcttcctttcaaatgccaagcttgtcataaggtgttttgtgtggaacatagatcgtgtaagtctcatgaatgtccggaaccggaacataacagtaggaaggtgattatttgtgaaatctgttctacgtcgatcgaaataacgggcaaagaagatcaagagaagatgatattggagaaacatgagaagtctgggaattgtgatccaaggaagaagaagaaaccaacttgccccgttaaaagatgtaaagaaacgttgacattctctaatagaaccatttgcaagacatgtcgattggaggtttgtttgaaacaccggtttccagctgatcatgcttgcaaacaggcttcttcctccaccactccagcggcagccgctggaggaagctggaacgagaagttcttggtggcttttggtttaaggaatgggaaagattgtggcaagagtgggcgaccttcatcatcgactactccatttttaaaggcctattaggacttttatggtttatgagacactattgtaaatgctaactctttgaatcctctataagaattcaatatttacgtagagttggattatattttatcttctct

SEQ ID NO: 24018 - DNA, 572 bp, Gossypium hirsutum
  Clone ID: LIB3827-002-Q1-N6-D12
cccacaaatcaatttaaattccttaatttacacaattctatagcactgcagtggatccttattccaatttaatcataacattgtatcttagttccatttattatttataaatgaaattaaataagagagattgcgattagcctgcagtattactgctatgttcatcaagccaagaaattatgtcactaaaaactctgttaatcatatcatctggttcaccttcaagaagagaatggccagcatccttgtatataataatgttcttgtctgagctgcttgctttttcatacaatgctttgctcacagctgggtccgtaacgatatcgttctctccatgcaagattaatattggaagcgaaaccttctccaaatgttgttctatttcggctgtcgttctcaacatctccaccgcagtccgtaagcgtggcttgtccttgtaagcaataacattatagggtgtcagttctctctttttaatgtctctaaatgccgcctctgccaaatccttctgtggtactaacttctgttttggaagaatattagctacaccgatcagaatttgcttcagtatc

SEQ ID NO: 24019 - DNA, 361 bp, Gossypium hirsutum
  Clone ID: LIB3083-109-Q1-L1-F2
gtttttgtttacaaggacaagccacgctaacggactgcggtggaaatgttgggaacaactgccgaaatagaacaacatttggagaagttttgatgctgggtccgaatttatgattgcaggtttcgcttccaatattgatcttgcatggagagaacgatatcgttacggacccagctgtgagcatagcattgtatgaaaaagcgcgcagctcagacatgaacattattatatacaaggatgctggccattctcttcttgaaggtgaaccatatgatatgattaacagagcttttagtgacataatttcttggctcgatgaacataactgtaatactgcaggctaatcgcaatctctattatt

SEQ ID NO: 24020 - DNA, 518 bp, Gossypium hirsutum
  unsure (1)..(518): unsure at all n locations
  Clone ID: uC-gsflnu33B082f07b1
tttttatgttgaggccaattatatacttaataccacacacaaatggcatacattttactaactaatgcattacatattataactcaatacgcatccatcatttactccataaccgaacaccatcatatgaaaatatataccttgagatattatatatgtcatgccaatacatcatgtgcaaacatatatatatgtgtgtaagagccgaatcacaaggttgattataaccaaacataaacataaatccaaaacacaaatcttacctaccatgcaataagcataaatcatacttatggatataccatggccgaatacatcacaacaccttaccatttcaattttgatcatggttaaacaaagaacttaatgtctcactcaaaaatgctaaaaagaaaaatccaagagttaatcaatccaccatcacatgtatcattaacaagcttcacatttagcatgcaatgacattaacacanaatccaccttggccgatatcatccccatgacatagcacagatttg

SEQ ID NO: 24021 - DNA, 377 bp, Gossypium hirsutum
  Clone ID: uC-gsflnu33B076f07b1
cgcggcgcggtatttttgggtcgacaccacgcgtgctacgtatgctgaggccaagtagatacttagtggcacatataaatggcatacattttactaactaatgcattacatattataactcaatacgcatccatcatttactccataaccgaacaccatcatatgaaaatatatacctggagatattatatatgtcatgccaatacatcatgcgcaaacatatatatatgtgggtgtgagccacattatatggcggcgtctgaaccaacatattggtgaatttagagggggcgcataagcttctagggctggaaggccatggctactgtagcatgtgtcgtttcgcgttttcatgatcaaagtgttgcttgtgagtt

SEQ ID NO: 24022 - DNA, 697 bp, Gossypium hirsutum
  Clone ID: GOSHI-09MAY01-C23828_1
attttttttttttttttttttagaaaagaagaataaccttcctatattacttgcattgcacgctatcaatttaaagtgtatcatatttgttttcctccaaacacagtatattttaataaagagaataaaaccacaaaccaaatatgtttcaattttcaaaattaaaaaaaatatttatatatatatttaaattttctccttcactgtttgatggttttttattgatgacaaagaatttttttttcaattgtttacactcgagactggctttaaaccaagtttgagagcagcttcccatacaagatcaatcctatccacatcaattgctccaacttcatggtgactccaaccttctagctgatgaactacacctcctgcatggcatgcatgcaccactcctcgctccattgtatactcacaagaaccaaggccttcaacatcaggtggcaacctcatggcagctagatcaccgtaggtgcagtctcttctgataggcaaaatgggcggtacaacaaattgatggaaatgggttcctgatggagcccagctttgctcccatggtgttatccacttccccactatccatgtcttacaattttgagcagcttggtgcttggtcacttgcactaaatagttttggcaatccacgggggcttcctttagtattttttgaaacctttcggtcgatgaagtcaac

SEQ ID NO: 24023 - DNA, 1295 bp, Gossypium hirsutum
  Clone ID: GOSHI-09MAY01-C23568_1
cccttcttcttctttagccctcatcaacaatgtcgccaccgtctcttctcggcccaccggagctccgccaccccactcctccaaagcctgaaaccactgtcgccaccaccaccactaaagttccaagcgatccattcatggatctaatgttggctaatttcaataaagccaaaaacacaccttcgatgggattcaccgaaaataattcagccacttatttagccaccggcaacccttgccttgacttttttttccatgtggtacctaattccccacccgattccattagagaaatgttgggtcgagcttggaattttgatccattgatgactctgaagctaatttgtaacttacgtggtgttcgtggtacagggaaatccgacaaggaagggttttatacggcggcgttttggttacacgatcatcatcctaaaacccttgcttgtaatttggattcctttgttaattttgggtatttcaaggatttacccgaaattctgtatcgtatgcttgaaggatatactgttagacaggttcagaaacatgattggttgatgagaaaacaggggaaatgccgagagggaagccgttgttattcaaagaagcaaaaagtggaaaaatcaaaacccacaggagctaaaaacccgaatttggagaaagcaaaagcaagggatttaagaaaggaaaagaagatttcaatggcgaaaaaggtgatcgagcgatattcaagagacccagatttcaggttcctttttgaatgtgtctctgatctttttgctgcttgtcttaaatcagatatggagtttttgaaatctaatgaaactagaaagattggtcttgctgcaaaatggtgtccttcaattgattcttcatttgataaagcaacattgttatgggaaagcatttccaggaaaatattttctcgagaaaattatcctgaatatgaaggaatcgatgaagaacattatgcttaaccgtgttcgtgatcggcttagaaaagatgtgttagtgccactgcgtaaaattttagaattaccagaagtatacattggtgcaaataaatgggattcaatcccttacaacagagtagcttctatagcaatgaagttttacaaggagaagtttttaaaacacgataaagatcggttttcgaagtatttagaagacgtaaaagccggtaagtcgactatcgcatccggtgcattactcccacacgaaataatcgctgaattaaacaaagccgacgacgaacaagttgagcaagtagcagagcttcaatggcagaggatggtgaa

SEQ ID NO: 24024 - DNA, 648 bp, Gossypium hirsutum
  Clone ID: GOSHI-09MAY01-C123510_1
tattcttcttcatttctctttctatttttctctagttaacatggcagagttagaataccaagctaataccaaaaccaacagcgccactactgcacgtctaaagctcttcggcttcaacgtctcggaagatgatgatgttttggaatccagaaccaccaaagatccatcatcagggtcttcagagccaggtggcttccctgctcctggtgaccgcaaatacgagtgtcagtattgttgccgtgagtttgccaactctcaagctttaggaggtcaccagaacgctcataagaaggaaaggcaacagctcaagcgtgctcaacttcaagccactcgaagcgccgcggtttcgtttgctaggaaccctatcatctctgcttttgctcctccaccgcatctcttagcgtcggctacacccgtcgtggtgccagctgcggcgggaccgtcttgggtttacttgccacgaggagggccacctcctttccacgtctcacatggctgcgtgattccgagcgctggtggtggaggaggcggtgctgagggcacaagtgtaaccaccaagattaggactaagatgaggcccagcatgaaatctgccaccctttctatgccaccttctcccattcttcctacgaagcacaattttttcac

SEQ ID NO: 24025 - DNA, 556 bp, Gossypium hirsutum
  Clone ID: GOSHI-09MAY01-C23488_1
cccacgcgtccgcccacgcgtccgccaactcaaaccgttgagaacaattctgtcagctttccctccaaccatgagctttgcggcatctccttcagccataatgattaaaacttacaaaggaaagctacctctttctgttatcacagttatagtctgcgctttggcattccttgctcttctatatacacaaagcttaacttttctttcttcaaattatattctcaaatccaagtcctgtgctagaagaggtgctgttgtagaagctaatgatcatagaatggcagaggagaacgtagaaatcctcgaaatcgatgacaggttcgagtttgaccctgaagagtgcgatattggtaaaggtaagtgggtgttcaaccgctctatcaagccattgtacacagatacaagttgtccatacctggacaggcaattttcttgcgtcaaaaatggccggcttgattttgactaccatcactgggagtggcagcctgaggactgcaacctgcctagatttcatccagaacttgcacttcaaaagcttcgaggaaagaggctactc

SEQ ID NO: 24026 - DNA, 785 bp, Gossypium hirsutum
  Clone ID: GOSHI-09MAY01-C23408_1
cggtaacagaaagctgaggataaataagaaaatctcgtatctgttgatatggcaaaggcagaaggactcaaatataaaattattttatataacctataaaaggggaactccgattcagccgaagctattctggaatcgacccctttctttaatttagagaagaaagccatgaaactgagactgaaaaatttcgaatcgaaagaaactttaaggatacaacttctatcatcttcttcgattcttcaactccaagaagccgttttcccctgtctcccgctcaatccccttcatgttactccctcttctctccgtttctccctcaacgccaaggacctcctccacgcgccgtctcctctggtttccctcctttccctcggtgttgcttccggtgaccttatctatttttcccttaaccccaacgctttttctccacctcctcaaaccctgtttcaagaaccgatcctaatgccagagtccagcgccaatcgagagaacccagttcgagaacccatgttgatcgagccccaagtttctcaacaagctaataaaggaaggctcttggagcattatttattgaggaagtttttaggggaagaactgggtgatattcgtagcattcacaacctcatggcgatggaaatccacgtgattttattggattcgggtttcgtgttgtttgatacagtttcaggcttgaaaattgatcggtttcgtttgccagatgagtcgtcttcccctgtttcaatttgttattccctgcctcaacttttgattgccaatcatga

SEQ ID NO: 24027 - DNA, 514 bp, Gossypium hirsutum
  Clone ID: GOSHI-09MAY01-C23768_1
tttgggggccccataaaaaaattttttttttccaaacccggggaataaaaattggaccccttaaaagggccccccctttttttttttttttttttttttttgttaacaaaacctttttttgttgtttgaataatgtttttctattatttttattttttttgcatttttttctagttcttgtttatgctttttttttttctttgctcttcttttttttttcagaataaaatatatcccccaaggacatgggaaaattataaggaattcacttcagaaatgacttatttctaaccctacaataatcttcaaagttcatcattcaaataattcaactgctcccataaaatttacaaagacaacaaacaccaccaaccgtatatgcacatctcaggcaagaatcaatcatataaaatcgaaaagcgaaaaacagtcacatccctcaaacaccaacttcccaatactccccactcctgtctctattcaagcataagcagaacaaaccactcacttattt

SEQ ID NO: 24028 - DNA, 645 bp, Gossypium hirsutum
  Clone ID: GOSHI-09MAY01-C23718_1
gaacagtagatgcagaaattacagggagcaaggtcaaatgctgacattggttgagtacatgatgctactttaccgtgctttactgccaactccagtttggtaccgtttcttcttaaacaaagactatggaagcctcttttcatcactaatgacagggttgtacttaaccttcaagctgacatctgttgttgagaaggtgcaatccttctttgctgcattgaaggcattatctcgtaaagaggtacattatggtgcttatgcaacatcggagcaggtgaatgctgctggggacctgtgtgccatctgccaagagaagatgcatgctcctatactactgcgttgtaaacacatcttttgtgaagattgtgtgtctgagtggtttgagagggaaagaacatgtcctttgtgcagggcgttggttaaacctgcagatctgagatcatatggtgatggatctactagtttgttttttcagatattctaatatcattgctaagatacgaccagaatcagaatcagaatcagggaagctttactgcttggatgttcctaaaatgtatccagagcagccctatcctgaacctcatcatcatcatcatcctctagaggggtaaattggattgtttggttttgccatgtcttgtc

SEQ ID NO: 24029 - DNA, 647 bp, Gossypium hirsutum
  Clone ID: GOSHI-09MAY01-C23618_1
gtttaagttacacatctctcaaacattccttgtacttaaaccaaaaaaataaaataaaattatagcacgaagaagaagacgaaacccaacttccctggaaatcattatcgttcttcagtcaaacaccacgctattgcttttgtttgcatacacaatcaggaaagggtatggcagccgaggacaatttggacttgtcaactctgcaatctcagcttagtgaaactcatgaactgtggaagcaggagattgaaaatcgtcgaggccaagtagacgtgttacaagccaaaattatggaggtaaaggcttctatacaagggtcggaagaggagtcgaagaaggagttagatgttctttggcgaagggtagaaactaccgcgaccttattgacttacttgaaatcaaaagcaagagtaatggctgttcccgatttagctcatatatcgtgtggcatcaaattattagacggggtagggcttgtagataaagaaggtacaccactatctagctggtcaaggagtgttgatctctcttcattcgattgtttggatgatgaaacgtggatcggaattagtagacaacaaggttctttggatgaaaaagatggagcttatatcggtgaattaattaaagtcgtgcaaatggtcacg

SEQ ID NO: 24030 - DNA, 431 bp, Gossypium hirsutum
  unsure (1)..(431): unsure at all n locations
  Clone ID: LIB3146-047-Q1-K1-H6
ccggaccggaagggccggcgtcagagcgtacgcgatacagaacacagacgtaagtctataggcacgaataagacgtacgaaacccaancttccctagaaatcgattatncgttcttcagtcaaacaccacgctattgcttttgtttgcatacacaatcaggaaagggtatggcagccgaggacaatttggacttgtcaactctgcaatctcagcttagtgaaactcatgaactgtggaagcaggagattgaaaatcgtcgaggccaagtagacgtgttacaagccaaaattatggaggtaaaggcttctatacaagggtcggaagaggagtcgaagaaggagttagatgttctttggcgaagggtagaaactaccgcgaccttattgacttacttgaaatcaaaagcaagagtaatggctgntcccgattt

SEQ ID NO: 24031 - DNA, 577 bp, Gossypium hirsutum
  Clone ID: GOSHI-09MAY01-C23148_1
ttgagtacgagaaaacacccatctttaccgtgaagtagttcagaagatcgacggtcgattgggtcctaattatgcgatggatgctgcatggtgctctacgattgagcggaaagctgagcagaggaaagaaaagctcgaaagtgaactcaatgcttataggacgaatttaattaaagaaagtataagaatgggatacaatgattttggtgatttttactatgctcatggtgcattgggggatgcttttaaaagctatgttcgaactcgcgattattgtactacgtcgaagcatattattcagatgtgtttgaatgcaattcttgtgagcattgaaatggttcaatttagtaatgtgactagctacgttagtaaagctgagcaaacacctgaagcacttgatcccccacctgttgctaagctatgttgtgctgccgggttggctcatttggaggctaagaagtacaagcttgcagctcgtaagtttttggaagttggtccataattggtgaattcatacagcgaagttatcgctcctcaagatgttgctacctatggcgggctatgagcactgcaagct

SEQ ID NO: 24032 - DNA, 408 bp, Gossypium hirsutum
  Clone ID: GOSHI-09MAY01-C23398_2
atgggtccagccatattttaccacgttccaactgaaagagggttaattaatagtggcgagatcacaaatgcgagatgcaagtgggaaccggtggtggagatgctgctgagcacttaaacgaaaaatgtgctgaaagccactaacatcgggaaaacgaaagcttctaaacaaattctctgccatcgcaaccaaatgaaaatgcaatggccaatacaatctgatctcctagggattatccaagtgatccaagaaactgaccgcaagtgcaaggatgctgtattagcagaagccaaagcgaagtggcggctgcttctattaggagagacgattgaataacttgatccacaacgatcaaaggacttgaaagaaaaagcaaggcaacttattatacaaaggtaaaagttactg

SEQ ID NO: 24033 - DNA, 1570 bp, Gossypium hirsutum
  Clone ID: GOSHI-09MAY01-C23398_1
gtttcatctccttcgattcactatttcactttcttcctcttcccattttcccgcaatttttgccttgatttcagttggagccatctatggaggaagacgcgatcaatttcatcataggcagaatgatctccgatattcgccttgaaattgaacctgttggtgaatattaaaaagtgacctcgaccacctcagaaacacaatgtctgcaatggaagctgtgcttcgaggcgccggagagcgatctgcgaccagcaatttcacagttcggcttacaaatccggaggatgaagagcaacccgtgaccgactattctttccaacgatggcttaaagtgaaaaaaaatttagaaatcatgcccattgattcggcaagaacagcttttccagaagttcgtcggagtaggatgaagatgatggaaaagatgggttatggcatggcaaaaccggagcatcagtctatgtcgaatggaagcaagaaaagatttatgaattttgtttacgatgacttcttgagactagaagcagaacgaaaaaagaaacagaaggatatccggaactggagacaaaaaagagcgaaattttacgatgatccaactgaaagagggataaataacaatggtaagataacaaattggagatgcaagtggcaacgcgtggtggtgatgctgctgagcgtgccgaaagccactaacgtcgggaaaacgaaagcttctcaacaagttctctgccatcgcaaccaaatgaaaatgcaatggccaatacaatctgatcccctagtgattatccattgtgatccaagaaactgacctcaactgcaacgatgctgtattagcagaagctaaggcggagcggcgacttgatcgacaacgatcagaggactttaaagaaaaagcaaggcaacttagttatccaaagatttttttcccacctccatgcaaggtaaaagttactgcaactgatgataaaactcgtgaaggagtacaatctaaattctgtgatttggagaaccaaatttatgacaaaggcgactacagagtgggatgcaaagattttccaggcttggaacaggaattaaagaaaacgagttgggggaaaattccagactacctcgaatctattgcaatccaaatcgaaaaagatcgtggaaaaactactgatatttttcatatccccactcaagttctgctctgcgctgctatcagagagatgaaagatttttcggttggggatttggatttgggtaccttgaaaaagtggagcgcgacacttaattacgctaagaaatatggttttcaagtgggatttgctgataatctgttgaagaagaatttgcttgcctattttgcaattcaatgtctgcccaaatcgataaaaatatagcttcccaagagcaaatggttgttttgttgttgctggcttgctgcagtctacaaaaatattggctttaacgatatctacatttacttttctgtatgtgtgaagtttatcttatttgagattaactgctttgtaaactgagaaattatgtatcaaaaaaattaagagttgaatttaagtcttaaattttattt

SEQ ID NO: 24034 - DNA, 893 bp, Gossypium hirsutum
  Clone ID: GOSHI-09MAY01-C23348_1
aagttctgttgatctccttcaaggtggaaaagcttgtgataactgccattccgaatgttgtggaaacatggaccaagggtttcggtttcaagctggtggaggaagaggaaagaaaagcacttaataagatcaacttgatggtgtttccaggaacagtattgctgtcgaagtccttgtatcaatcccaaaaaacaggtggacaatcagaaaccggcaatacatcatgtttgcaacaagataactcaattgaacatttgagacgcgaagaattaaccaacataggcattcaagctgtaggagatcagggagccaattcattacagcacaccatttatgcaaaagaaacttgtgcaaaaatagtaaccgagtttgttggagacaagactctgcaagattcggaaatcaatggtacaaaggaaatagccaatgccagtggagaggagctgtgtgataacttggccttacgagttatagaagaaactactagactagttatctgtacgaagggaaagccggcggacgaatctgtacaatgtgctgattgtaattttttgtctgaagaagttaggatcaagctgggggagcggcctaaggtcaggagttgtcaagaatctcctgctggagaaaccagctccgggtcccaaactgatggttgctgtggagacaatgaagctgacactgtaatgaaagtggagtctgtgcagcagtccgatcctgtttgtgtcgataaccatagcgctaaaatcgatgaatgggtacttgtgacgccagaacagcttttggaggtgtcctgtgaagaacaagaaatggcattagcttcttctagtgttaaagaatcatgtatttgtaatggaacacacgtgtctgtacgggaaacaactgctgaaagactg

SEQ ID NO: 24035 - DNA, 963 bp, Gossypium hirsutum
  Clone ID: GOSHI-09MAY01-C23298_1
gatcataaaacccaccatgttcatcatatgtaatgatcaacaaagtttggttccactgcgggctagctctcaatgtctcgtacacctccttcacaaacatctgcccttgatacacatcgtgcgacggatggtcatcgttggcgggctccagcttagtgtccatgtaccgctgctccaccacaacgtagcccggcagcttcccttcttgcgcatgttttttgaatgtcacaccgtacggacggaatctaaataagtatttgagtttcctgaggtttttgtagaacaatgtagctgggatgttctggtagtatattccccaggatattccggcgtcgtccaggttctcgaagatcgtcctttggggataaccctttaccaggagtgccggaatgttgctcgtcgcccccgccgacgtcgccgagtggacgtacagacgattcggttgtgtggatgacggtacggaggcgaaccaccgatcaaagacagcaaattctgagacaagagacttgtaaacggcgaccatttcagggtcaaatccattcatgacgttctgagacatagtggtagatgggtccatggagtaagcttgttgggcgaagccattcatgggaggaggattggtggaggtgtcattagagccgaaaatctgctcccttatggcttggaaagagtgaccaggatctggatccacgaactgagcttggttctggaagaacaactttttggagttaggatcagtggtagacaaagggttccattcagttccatcaacaccgttgatttcagggttgattttcttcatccatcctagcatgtgatcgaacgagcgattctccatcactaggaccacaatagttttgattggaccgccatggcagctgaagaagaagaagaagatggcggtgcttgcaggtttgaacattagtatttctcttttgctgggaaggaaggacggacgcgggg

SEQ ID NO: 24036 - DNA, 377 bp, Gossypium hirsutum
  unsure (1)..(377): unsure at all n locations
  Clone ID: LIB3083-100-Q1-L1-D4
cgaagattgtcctttggggataaccctttaccaggagtgccggaatgttgctcgtcgcccccgccgacgtcgccgagtggacgtacagacgattcggttgtgtggatgacggtacggaggcgaaccacctagtgaatagaaccaagttcaattccatgttttgaaacctgaactcatttcaaaatacaaaaagcaaaacggaagaggaattaccgatcaaagacagcaaattctgagacaagagacttgtaaacggcaaccatttcagggtcaaatccattcatgacattctgagacatagtggtagataggtccatggagtaagcttgttgggcgaagccattcatggggggagggatggcggangtgtcattaga

SEQ ID NO: 24037 - DNA, 338 bp, Gossypium hirsutum
  Clone ID: GOSHI-09MAY01-C23278_1
aaacgtgaagcttcaatcaagttatatatacttctggatttgagcccaaggcaaagcaaaatacatggaatttattcttgttcctctcttacgtcggggggcttcatcagctatcgtgcatacaatttctctgtttttaacaaataccgcacactgtaaaccaaaactataatctaaaagagggaaagaactttactttacaggggaagaattgaagaattcatgcttcggtaacgtttggatgaagagaaaaaccttccaccacatgagaacgatcttttcattgtaactgggcttaaatgaagatgctgagatatggatgaattccccattaccct

SEQ ID NO: 24038 - DNA, 446 bp, Gossypium hirsutum
  Clone ID: GOSHI-09MAY01-C23228_1
gtttgagaagatattggaactgagttatgccatggcggaggaggggttttggaccgagcaggatctcaagtttactgctgcttggcttcaagacttggttgccgtaggttatcagcagccaaggttgatgacattggaactggacaggccaagggcaaatatcggtcacggggatcgaaaagaatttatccctcagaaattgccatctgttcatttagcagtggaggaaacaggggtggttagctctgagattgggaatttgatacgatggaggaagaattttggaaatatcgtgctaatcatgttctgcaatggtcctgtggaacgtactgccctggagtggagactgctttacgggcggatatttaaaactgtggttatcttttctgcgcagaagaattcggatcttgccattgaagaaggtcaattagatcaaatttacaagc

SEQ ID NO: 24039 - DNA, 593 bp, Gossypium hirsutum
  Clone ID: GOSHI-09MAY01-C98528_1
ccatatgttttaacgagcttggtaacccagatgccatttcaaaggttcaaggcagagaggagattaactacttagacggtttggtcaatcaagaaaatctgcagcttctgaatttaatctatgatgcaacaccttcagattatgtctccatgataatcacagattatggcatgattccacccacaagtgtgcctgtcattgtgagagagtatagaagagatcacctgtggtcgtagttcaagacggctcgtaaatgtattccagaggattttccacaattttgctcatgttgtcgaccatcattctggtcaatcgcaacggaacaataaggatagtatttttttttatcacatgttctttcctctgttctttcttcatggaataaggctataggctgacatggtttcctgtgttattttttttctccttttttcctcttaaactgactcagtgaagagtgcaatccgttcgcctctccgggcagaattgatcctatctcatatatattgtagacaagccatggtttgttctttttcctcccttgaggtatcaaaggggtgattttgttgcaaatttgacttttttttccacga

SEQ ID NO: 24040 - DNA, 624 bp, Gossypium hirsutum
  Clone ID: GOSHI-09MAY01-C98728_1
ccccgcgtccgatttcccctctctctctctctctctctctctctctctctctctctctctctctctctctctctctctctcaaaccacaaagaagaaagaaagaggacgcaaggcagaagaaatggaacagaacgtacctgtcatgaccaaaagatatggagcattggaaaagcagttctcttcatgatgaggaaaggtcttttatctaagaggaagctcatggttgatcttaacgtgatgctcaaacgcggcaaaatcgccggtgccaaagccattggcaacctcatgttccaccaccacagcaaccgccaggtgtcatcatcctccacggcggaggcgactgcaacggcagtccaggagtacgagttcagctgcagcaacacccccaactacatcttccctttcaacctcgccgccaagaagaaaaacagctaccaccaccatttcttcgcctgcacccacgcgcctcctactctcgacgacgacaacgtggccaccatgaacgcccttaaggctgccttggagatgatcaacaagaacgacggcaacaacagcgtgggggctgctccccccatgttaccagggttcggacaaaccccattggcgaggcaactcaggataac

SEQ ID NO: 24041 - DNA, 104 bp, Gossypium hirsutum
  Clone ID: GOSHI-09MAY01-C98038_1
cttattcatatatctcgtatatatacagatatataaactatcttacttttgttatgatacttctagtatactttctatttagaaatgaaaattgtttcccttct

SEQ ID NO: 24042 - DNA, 883 bp, Gossypium hirsutum
  Clone ID: GOSHI-09MAY01-C99528_1
gggcggacgcgtgggaaaaaattagaaggtgtgggaggcgttgcttggaccgaagaagaagatcagttgctcaagaaatgtatagagcgttatggagaagggaagtggcatcgggtacctcttttggctggtctaaacaggtgtcgtaaaagctgtagactgagatggctaaactacctacgcccaaacatcaaaagaggaacctttgcagaagatgaagttcagctcatcattaagcttcacaagctcctcggaaacaaatggtcattgatagctgggagactcccaggaagaacagcaaatgatgtaaagaatttttggaactgccacctgagtaaaaagctcaacaatgctcaagaaaccgaagaggaatatcaaaatggcatgaaaatggaaaccctaaaaccccagccacgatgcattgcagtgacgggctcaattaaaccaagaacccaagatcattttgctcctaagaaccagccaccaatacaagaaagccccatgcccccccctttcaactttgttgaagttgataaacaacaaggccaggagcttgtgaaagaagaagaagccctcagagaggaggctgcaggtggtgtgttttttggtgatttggcaacggaagatcatcagtttgggcagcttgatgaagttaatgtattgagtagtactgaaggatgcagcaaatgggattgggatgatttgatgttagacatggatttatgggctgattcattgtgaaatgtgattttccttaagtgggaacaatcagaatatttcaaccccaaatatgaatgcattgttatgttatttgggtttgaaggacttagctgcatgaccattaggaaaatataaataaaatccgaatgccgtctttccaatt

SEQ ID NO: 24043 - DNA, 581 bp, Gossypium hirsutum
  Clone ID: GOSHI-09MAY01-C99728_1
cggccgcgtgggcggcgcgtgggtttcattagcagcacttcacattttctccctcaaaaaacaccagcccactgcaatgtacggtgaccggtgctccaggcttcgaagtatggcctattttagccatagatttccctcttaactccgatttcgacgaagctaaagggagccgacggcctagtagcggggtacgggtgcatggcgcgtgtacgaggctgtactggcgtatggaggcgtgggcgtggcgttgctgaggcgtacggaggcagctggcagttgtacgacgcgagggctggggcttggctgcctggttgcaacgcaaaagtggggaagaaaccctagggtttctgttctcaaaacaatgggcctatcgggcttgtaatttgggtctaggtttagttattgggtttaggtttgaatttgggtctaggtttagttattgggtctaggtttagttattgggcttgtttgggtcttgagttatgtagttgggtttggggtttaatttttgtttattctgtattttggtgggcccgggcaaattggcccgtttacaataataataagtaaaaggtggatgt

SEQ ID NO: 24044 - DNA, 770 bp, Gossypium hirsutum
  Clone ID: GOSHI-09MAY01-C99088_1
cgacatctaaaaaaatactattgaagaattagtaatgcttcaaaggctgtgaagtaaggaccatcagctggaaaagcagccatcgggggtccatttagtcttgtaaatcatgacggtaaacgtgttactgagaaagactttaaggggaagtggactttggtttattttggcttcactcactgtccagatatctgcccagatgagctgctaaagctagctgctgctattgacaaaataaaggaaaaggctggaatagacattgtgcccgtatttatctctgttgatcctgaaagagatactgttgagcaagtacgtgaatatgtgaaagagtttcatccaaaattagtaggtttaactggtacaccggacgagataaagaaagttgctcgtgcatatcgagtttattatatgaagccggcagaggaagattcagattaccttgttgatcattccatagtcatgtacttgatggatccaaaaatggaatttgtgaagtttttcgggaagaataatgatgtcaattcactaaccgccggtgtaatcaaagagataagtccacaaaaaaaatagagatggttcttttttgagctataaggttctggtttgtttgatttggattatccattcctcggcacggagactaacatttttctctagttttcccctgaaaagaatacatgatttatatttatgtttaaagaattttatgctggaaagcttgagctcaatagattgcaattgtacttgaaaataaatgcttatttgcatgt

SEQ ID NO: 24045 - DNA, 591 bp, Gossypium hirsutum
  Clone ID: GOSHI-09MAY01-C94108_1
gagcaaacgaaacggagaagaaacaggggagaaagaaagaaagaaaaagaaaaagaaaaaggaaaatttgagtttcaaggctcaaagtttaatttgaaatctcggctaagaaaggacaagacaaagtccgcgggggttggctcgaaaattccggtttagtaaagatagaacgttgaatcagcatcccagttcgttcccgaattctttaaggtaaagtgtgttaatttttggtaatggcatgtccctaggatgttttttgagagtcttttaggttgtagatgtcctcatgaaatgagtaaattttggttggccccggtatgtagtatgaattttgaaatttactaaaaattcgtggtaattttaaattagtcccgaattgaattttctgttcatattggcccgcgagggccccttaaaggggcgccttctttaaactaggatgtgtgtaaatattttttttaattaatgcccgaaattgggctgtactgcctggtaatgtctcgtaaccctgttccgatgccggtatagggttagggggcgttccaaacccagggaaaagagccaatgcctatggaactagttttggattaa

SEQ ID NO: 24046 - DNA, 770 bp, Gossypium hirsutum
  Clone ID: GOSHI-09MAY01-C95448_1
catttttcaaacaaactcaaaaacattaaattcaaagttcacaagccatgacaatgatggtggagatgcatctttgcctgactcagctatgttgttggctaaatatcctgctgcatttgttaattatcctgcatccttatctcaagttcaccctcaagcactgcagactcttgtccagagcactgaacgaaacttcaatggtgttccagtttattcccttaaggaaataagcagcactggggtggattatctcgtgtacgggggccatcattgcatgaaggttgcacaatttactatcgatatgaagcagcaacatgaaatgttcccccagatgtgaaggcgtaactgattctatgcaatcccgaaattacagcagcggggaagggggatggttggaactattgttgtaggtagggtaggacttctttctgattcggtagcagtacttagaatgcagtactcgaaaactaagaagccaaatgacgggcagaatgagagcatcatcagggaagaagattcatggaataggtaagggggacataggtagatagtagaaaccaaatctttctttgctgcacgcaatacaatagattttggtactgtatgcgttttaacgacacttgatgactgcgcagtgtacagttattaagtccagtcttttggtagtgtatgtgtgcgttttaggtcatttgtaatgttccagcatccttgtataagttgtatttgatggaaaatacacacaaaataataataataataataataataat

SEQ ID NO: 24047 - DNA, 694 bp, Gossypium hirsutum
  Clone ID: GOSHI-09MAY01-C95418_1
ggaaacgggcacaataattatgttattactaagagactaggatcaagccctcaaaatatttatgtcaatgaagatatatatatatactcagatatattacgtaatttttaacagtaaataaaaagtgatctacaaggttagacaattattagagcatccaagttcatagggctgcctttccacacaaatttaacacatccctgaatccctactgatgaagtaagaaattagccacaatcaagggctttactcctctccacttttctgactgtaattacaggacctagaaagtagaaatgcaaatgaactctatgagtcatcaaatggtggtcgagggaactcatgaaacccaccaaaattacatgtatcaaagctcaacggtgagaagtaaccaacagcatcatcaatcccccctttaatgtccatactactactttgaacctcactttcactagaaacataagaggaaaggttgaaattcacgcttccaaccttattagtggctccatcagatgttccggcgggtgctactttaatttcatctgaaggaatggctggagtgtgaccttggaaaagagtgatatgcccaaacagcttatctttccttgaaaacgtggtgccgcaagaacaaagccacttatccttaccacaatgcttctcatgagttttcagatcagcaatcactaagaatgtc

SEQ ID NO: 24048 - DNA, 544 bp, Gossypium hirsutum
  Clone ID: LIB3829-011-Q6-N6-H2
aataacacaggtgaaaaaaatattaaaaacaaacaattgtcaagattacgactttaacaagaaaaaaaaaagaactgctgttctaacaaggttagagcatttctttaagcaaccaagtacagagggctgccttaccacacaaatttaacacatccctgaatccctactgatgaaggaagaaattagccacaatcaagggctttactcctctccacttttctgactgtaattacaggacctagaaagtagaaatgcaaatgaactctctgagtcatcaaatggtggtcgagggaactcatgaaacccaccaaaattacatgtatcgaagctcaacggtgagaagtaaccaacagcatcatcaatcccccctttaatgtccatactactactttgaacctcactttcactagaaacataagagaggttgaaattcacacttccaaccttattagtggctccatcagatgttccggcgggtgctgctttaatttcatcagaaggaatggctggagtgtgaccttggaaaagatgatatgcccaaaca

SEQ ID NO: 24049 - DNA, 606 bp, Gossypium hirsutum
  Clone ID: GOSHI-09MAY01-C95738_1
gtaaatgctggctcaacctttcacatttaataatttatgatgtacagattccgcatatcaaatggttgcgcaaggagaaagtttttgttctctcaagaaacaaaaattgttaagcaagaaagacttgcccaaatttagtagattataaaacttctctaacctccttaattaactttatgtctcaggagtctttctctttttgtcagatgctgaagccgcctcagattgagcttgaccaaatacagacccgcaggtggaacatttcttgtgatgcttgcagaaaattgacaaacatacagaacatatgtagcccatgtcaatagtgtttttatggcaaaaacatgaggcgcgaaaatcaacaccaacaggctttggaagatgtatgaaactgcgagaatgcaagtcagtagcaaaaatagtcatgagatactgaaacagcccatccaaattttgcggtttatgatgtacaccaccagttatgtaagaagcctgctgcaggaaggctgaattttgagaacctaggtaacaagaatctataggaaccgaagagcgttgggcagagaatatcgcgtccccgcccgccccccttgttcaggtccttggtgt

SEQ ID NO: 24050 - DNA, 489 bp, Gossypium hirsutum
  Clone ID: LIB3829-016-Q1-N6-G7
gtaaatgctggctcaacctttcacatttaataatttatgatgtacagattccgcatatcaaatggttgcgcaaggagaaagtttttgttctctcaagaaacaaaaattgttaagcaagaaagacttgcccaaatttagtagattataaaacttctctaacctccttaattaactttatgtctcaggagtctttctctttttgtcagatgctgaagccgcctcagattgagcttgaccaaatacagacctgcacttgcaagtaaaaaatcaactttacatacaaggattagaggatggttaaaagaatcccaaaacactaaaaggatgtttagggtttcacaggaggagaaattgatgaagctgattccagacaaccagcacttctgtcggagaaaagttcgagaagtcacagaattttttgttattttgagaaccaactgaacttttaattgtttgatagataagacttttgcatacatgaggagacga

SEQ ID NO: 24051 - DNA, 606 bp, Gossypium hirsutum
  Clone ID: GOSHI-09MAY01-C95618_2
gttgtggtatggctgttggttctggagatacaaagtcaaacaagctccaatttttgggaagacgcagcttacctgacgagaaactccctcagagtgcctcttgatgcgtggctaaacattgatgaatcaacaaaggaggaccttctccagagacggttatggataaagtccaacttagatagctacttatcagaaatgcggaaagagcataaacgcagaagataggaaagctctatcacattgcttgctcgagattgttcacggaaacttctacattcaaggaaaaaaaaacccctttttactcataaggtgattttgattttatttatactagaaagaagagaagacagttattgctgatcaccaaattttgatgaggaaagcatccgaatctaattcttctagcaagggtactctagcataatcttttatatttctaaatacgaagttatagttttagatagctgtgttgatgctctagtaattgctgatcagctatattcatatatgaaatcatgctaactcgtatcactgatgataaattgtttgagttactcgtttgtgatactgatttctttttctagagatgaaaatcgatgagtttag

SEQ ID NO: 24052 - DNA, 688 bp, Gossypium hirsutum
  unsure (1)..(688): unsure at all n locations
  Clone ID: AI055028.1
ggagctgaaaagccatccatctgggaattagttggtgtccgtttcattctcctcccttacactattggcaagctattgttgtggtatggctgttggttctggagatacaaagtcaaacaagctccatattcttgggaagacgcagcttacctgacgagaaactccctcagagtgcctcttgatgcgtggctaaacattgatgaatcaacaaaggaggaccttctccaagacggttatggataaagtccaacttagatagctacttatcagaaatgcggaaagagcataaacgcagaagataggaaagctctatcacattgcttgctcgagaattgttcacggaaacttctacattcaaggaaaaaaaaaaaccctttttactcataagtgattttgattttatttatactagaaagaagagaggacaggtttggctgatcaccaaattntgatgaagaaagcattcgatcttttcttctacgcaggtactctaacatatctttattattctaaatcaaagtatagtttagatactgggtgatgtctagtaatgcgatcacttatcatattgaatctgctactcgatactgtgataaaaaaaactactnnaaaaattaaanaanataaataattaaaatattaattataattaattagggatccggctttattattaagaaattcttgg

SEQ ID NO: 24053 - DNA, 1215 bp, Gossypium hirsutum
  Clone ID: GOSHI-09MAY01-C95608_1
gacttccagtttttgtagggcttgaggaaagccgatgatcatctgctctacgacttcttcatcgcccaagcttcggccatgcgacgagcatctgctctcatcctcaacacgttcgaacaacttgaaacaccctttatatctaagctcgcttctattttctccaaaatttacactatcggaccattgcattgtctctccaatgtggacgacccaacagctttagcttcgacaaaagtattttttggcaagaagaaaaggttgcctcacttggcttgattctcacccatcaaaatcagttgttttcgttagctttgggagtgtagtgaccttcacccttgaccaaatgcttgaattttggcatggcttggttaacagtgggaaaccatttctatgggtcatacggtccaacgccattattggagaggatgatccaaggaaaatattggaggacctgaaagacaatacaaaagggaagggatcgatagtgagctgggcacctcaagaagaggtcttagcccaccctgctgtgggtgcattcttgactcatagcggttggaactccaccttggagagtatatacgcaggggttcccatgatttgctggcctctatttgtggatcaatatgtcaacagcagatgcgtgagtcatgtgtggagagtgggatttgatatgaaagatagttgtcatagatccattgttgaaaaaatggttagggacgtgattgaaatgaagaatgaagaaataatgaagtcaatggaagagatttcaaagcaagctcaagagagtgtcaaggaaagtgggccttcttactgcaacttggacaaaatgattcaagacataatgtcagtcaatctggaaaacattaatagaagagattgagttcaaccatgtgctgcctagtttcctatcctgtattattgcccaccaagcacgcatattgaagccaaatacacccaacggtgctgcatatatggtatagaagaaaattcagttccctaaaccgtggttcatttcttaaaaataaagtgtggttgaaccaatttgtgagtgaacccaactgctattttgaccaatggacacccaatggtttcatttggtcaaagactaccaaactgcttaaggtaaagatcatggatgggtgatatcatccaacttgggctcatatattttttaggagtacctacccggtcctttttctcttttatctgaaaaag

SEQ ID NO: 24054 - DNA, 528 bp, Gossypium hirsutum
  Clone ID: LIB3829-014-Q6-N6-D3
gaaaaaaagagatggtgaagtgacttacttgaagaaaattatgaagcacaaggtgtggatgatatcaaacaatacattgatactttaaacctaaagcagtttgtttgctcttttgaccaaatgaaaccaatttgtgttcaacaaattggttcaacacaactttattttaagaaatgaacacaacgttttaggaactgagattttcttctatacctcaatctcttctattaatattttccagattgactgacattatgtcttgaatcattttgtccaagttgcagtaagaaggcccactttccttaacactctcttgagcttgctttgaaatctcttccattgacttcattatttcttcattcttcatttcaatcacgtccctaaccattttttcaataatggatctatgacaactatctttcatatcaaaacccactctccacacataactcacgcatctgctgttgacatattgatccacaaatagaggccagcaaatcatgggaacccctgcgtatatactctcca

SEQ ID NO: 24055 - DNA, 595 bp, Gossypium hirsutum
  unsure (1)..(595): unsure at all n locations
  Clone ID: LIB3829-019-Q6-K6-A7
tttctgtttaaatccaaaatgtattctctttagtttacctatgaaatgttgttcgatgatatggcttttgcagattgggccctcctttcctgggcaccaacctgttatattcaacccacaagtggcaccaatacaatcaccgcaagcatattttcatccaaatggacctcagtatgggcagcagatggtacttgggcaacggcaagtggtgtattgccaacctgaaatgcaatacaaaggacgggattattaactaataagtgtgtcgacatccttctccgaagcttgcttgctattctcgcaaagagtaaaaactttttgggaggcttcttggatcaattttttctttcacaaaacaaagcctagtcctaccggtccaagaaagaacctatatatatataggggatggggatgatgtttactggttttgtgggggataattttataaaccctcatgactctttggactttctagcttttgttaactaacctccacctttgtctgattggatagttntttaatctttgatagtactggaattgtatcaattttgtggtgcaaagatagtgttgcgttctactcctatgtaccttt

SEQ ID NO: 24056 - DNA, 574 bp, Gossypium hirsutum
  Clone ID: LIB3825-015-Q1-N6-C8
agaacgcaacactatctttgcaccacaaaattgatacaattccagtactatcaaagattaaaaaactatccaatcagacaaaggtggaggttagttaacaaaagctagaaagtccaaagagtcatgagggtttataaaattatcccccacaaaaccagtaaacatcatccccatcccctatatatatataggttctttcttggaccggtaggactaggctttgttttgtgaaagaaaaaattgatccaagaagcctcccaaaaagtttttactctttgcgagaatagcaagcaagcttcggagaaggatgtcgacacacttattagttaataatcccgtcctttgtattgcatttcaggttggcaatacaccacttgccgttgcccaagtaccatctgctgcccatactgaggtccatttggatgaaaatatgcttgcggtgattgtattggtgccacttgtgggttgaatataacaggttggtgcccaggaaaggagggcccaatcccaaaactaacaggcatgtgcatatgtggtaaaggagacatctgtgtctgatagtagaaagaaccat

SEQ ID NO: 24057 - DNA, 366 bp, Gossypium hirsutum
  Clone ID: GOSHI-09MAY01-C96058_1
ggtccatgtaacttaaaagcctatagagtcatggttttcaactgattttccaagatgaagaaatggactcttcggctttaaacatttggatagtgctcttctgttcctcatctcctatctgcagatcacgagatgattcttgtattgtatttgtatccagtgacaatcttttgtgcagcaatgggttcatgccagatcaacaattccctattcgccttcgtccataatcagatgcttggtctgctcacctgtagttcctgccggtttgtctatgggtgtgattgatatttagtcctagtcctagttctgtacatagacggatatttttggtagtattatgttagagactgccacaagttttagcac

SEQ ID NO: 24058 - DNA, 584 bp, Gossypium hirsutum
  Clone ID: GOSHI-09MAY01-C96388_1
ggggacatgtttaatcaaattatatatttgctttaaatttattaaaattacaaaaatatcttacataattgatgaaataacacctcataataacaaagaaccacaaatgaaggatcattgtaataaaattccaagccaaactcttttcagttaacacccttattcctggatcagttgtgtaaaataagaaaatacagtaaacatggaaaaagattacatttttacacaacatgcatgaaacataattgaagtggtattggtaaagccaaggatgagttgccggtctccgccgccccttctcacgggacaaccgaagcaccgtgccgcattccatcgcctgtactgcctgcacgagatatatcggcgaatccatgttccagccgctggaaattgccgtcattgtcggaaacgctcgagatgttcatgcagcttgtattcggaccgtcatatccggccatgcgagaataatgactctctagttctgatatactattcgtttgattattgcagataacattgggctgctggagtgtctttttgctaagaaaacgtcctcctgatcccctaaccctattcagtgcatg

SEQ ID NO: 24059 - DNA, 625 bp, Gossypium hirsutum
  unsure (1)..(625): unsure at all n locations
  Clone ID: AI729190.1
tttttgttagcatttatgattgaatctattttcagaatcgagaccaacgaatgttttaatactgtggaaggaattcttattttttcacccaagataaccccctttcatggcaaaaagcaaatcaagcccatccatctaatgaatatacatttgcacttaagtgcaaatgattctcaaacaaaaacctttgaaagcaaaactttatatatgcatctcatctgatcttgtaaaagtaccgattgaaatagtaaccgattacctccctaaattctcagctccgatcctaattggaacctttgtctttgctgtctttgtcgtcttggttatctttggtttcattagcaacagcatcagtgaccaaagccattggccttcgatcaataacttcatcaattaacccaaactctttagcttcttcgggggtcatgaaataatccctatccatgttcttctgaatcacatcgactgattgccccgtgtgcttggaatacaaancgttcaatgcatcccaaacacgaacgatctgcttagtgtgaatggttaagtctttagcctgcccactgtatccaccagaaggctgatgaatcatgatggtggcatgggggaggcaccgcctttcacccta

SEQ ID NO: 24060 - DNA, 566 bp, Gossypium hirsutum
  Clone ID: LIB3825-008-Q1-N6-A2
aagaagagccttttgaaattcaatgaatgtcccaaaattagcagataatggtttaaaacttgggtctgaagaatttccaagccaaaggtccagatagaaatagacagcacaagaacagacatttaagctttagctataaaactatatgaaacctgaggaaaaagaatcatcatgaagcttcatatttcttttgtatagagcctaaaaaggaacaaagaaaatcaaaacaacaatacaacaacgagaatcttgttagcatttatgattgaatctattttcagaatcgagaccaacgaatgttttaatactgtggaaggaattcttattttttcacccaagataaccccctttcatggcaaaaagcaaatcaagcccatccatctaatgaatatacatttgcacttaagtgcaaatgattctcaaacaaaaacctttgaaagcaaaactttatatatgcatctcatctgatcttgtaaaagtaccgattgaaatagtaaccgattacctccctaaattctctgaaaccaattccagaagcataacatcaatcaacagccgaaaaactg

SEQ ID NO: 24061 - DNA, 368 bp, Gossypium hirsutum
  Clone ID: GOSHI-09MAY01-C97398_1
aaagacccttatggttcaagcctatcaactgttcgacaaaaggcttatgtggaggctttgaggcttgataccatgtttacacctcaggttgtggttcaaggcagggctcagtgtgtgggtaatgatgaagatactttgttatccatcattgccggtgctcccaggttccctgctccaacattccagggaaccatggatcaataatggaatacatatttagtgaatcaagatcaagcctagaccacctcaactatcaaatatatatatttgttagtttattatattttcttcccataggtagtaaaagtattatagagaccttgtattcggagtaagatataaagattaatttactcatatcttagaag

SEQ ID NO: 24062 - DNA, 948 bp, Gossypium hirsutum
  Clone ID: GOSHI-09MAY01-C90878_1
aaattttgaaacgcatcgccacacattacccgctcgacccgccgttccataaaatttctgtgattttgggccacgatgataaagtccatcctcttacgtacctattctgctcctatccttgtggaggttaaggatatccgccgttcgggattatcaccgttgtcgaaaacgagatttgcttccacgattcgctgttcttcgagcaacgacgcctacataccgaagcttgagccttttagtagaacaaaattcgagcgtgctgttaaagaccctcccttgattgagaaatctgagaacgatctcgctgattactgttcgacacttgaaggagacgaatcttatagttgctggagagcttatttcgaactcaaagatcttgagaaagaggtagcgaaagaagaggtagagcagttgattatacaagcagggggagttaagtcactgattggtttcttacatggaatcgcatccatccacaacaatggaaacaacaaaggaatttcaagtaaggcaaagccattgcagactgaacatgaaggtaaaagattcagtcatatcccagatgggttgccaaaatctgcagaagaaatagaggaagaagagagagcaagaatgctggattccccatttaccagaatgcttagaaccaaaggcacacttcctgcctggtactctcctgcacctgaccacgagaccaattgatataaatgttattatcatacatacactaccctccccttgtacataaaatcttttgggagtttgtagaaatgggttttcaagtgggattgctgtggagaaactgttgttgaatgtggggtttacctgattccatttttgaaaatgacggtgttgcaagtttgtgttttgaatctctgtaattccattacctattaatcactgtttttgtttcaaagttttacttgtactaccaccatgattttgttt

SEQ ID NO: 24063 - DNA, 579 bp, Gossypium hirsutum
  Clone ID: GOSHI-09MAY01-C90638_1
tgagatgatgatgaggtgcttcttgagatcggccctagaccaaacacattttagttatttccgagtgtaaaagctgccaccgtagtactttatatcctttcaaacaagttagtgagaaggggggtttcggtacctgtgtacaagggtacactgtccagatggtgaaagttgtagctgctaaaacaactttcagtggcatcaaaccagggggaaagatcagtttgttactgagatagctgccatatcagcagtgctacatcccaatcttgtcaaactatacgggtgctgcatcggaggaaataggcgcctccttgtttacgagtatcttgtgaacaaaagccttgatcatgcactttggggacaaaaggacttgcgtcttgattggccaactcgcttcattattggccttttaactgcccaagggctagcctttcttcacgaggagtctaggccaaagattgttcatagggatgtcaaggcaagcaatatttttgcttgatgcagagctgcgccccaaaatatctgattttggattggcaaagctttatgatgacaagaaaacacatatcaccagtcgcg

SEQ ID NO: 24064 - DNA, 648 bp, Gossypium hirsutum
  Clone ID: LIB3543-063-Q6-K6-E11
accggagtgagcaaaggcttggtggggctttagctgtcgagctttccaagagaggccacaccgtaatcggttgttcccgcgcccaagaaaaactcaattccctccaatcggagctctcgtcgcctgaccgtcacctcctcctcaatgtcgatgtgaggtcagataacagcgttaaggagctggctcgagtgatgatggaaaagaagtttgtacctgacataatcgtaaacaatgcaggtacaatcaataaaaacaatagaatttgggaggttcctgttgaagagttcgatactgtgattgatactaatgtaaaagggattgcaaatgtgttacgccattttatcccgttgatgcttccaaaaagtcgagggattattgttaatatgtcttctggatggggacgatctggtgctgctttggttgcaccatactgtgcatcaaaatgggctgttgaaggtttaagcagagcagtagcaaaggagatgcctgatggatttgctgttgtagcacttagtcctggtgtgataaataccgagatgcttcaatcttgcttcggaaattcagcctcaggatatcagacacctgatacatggtctttgaaggcagctacaatgatactcaatcttactgcagcagacaatggggcgt

SEQ ID NO: 24065 - DNA, 577 bp, Gossypium hirsutum
  Clone ID: LIB3543-034-Q1-K1-C5
ccccgcgtccgcccttccccttccccttcctcttcctcttcctcttccccttcccccatccttgatcggttgttccaagagaggctacaccgtaatcgattgttcccgctcccaagaaaaactcaattccctccaatcggagctcccgtcgcctgagcgtcacctcctcctcaatgtcgatgcgaggtcagataacagcgttaaggagctggctcgagtgatgatggaaaagaagtttgtacctgacataatcgctgaagatgcatatgtttttctggttaactggtttgaaaggtttccacaatacaagcatagagatttctacattgctggtgaaagttatgcaggttggaaatgctgtaacggatgactatcatgatttcattggcacatttgaatactggtggactcagggtttgatttctaattcatcttatcgaagtttacgagttgcatgtgacttggaatcctctacacatccatctctgcaatgcatgaatgctcttcgagctgctcaaattgagcaagggaacatcgatccatatagcatctttcactcaaccttgcaaagataatt

SEQ ID NO: 24066 - DNA, 638 bp, Gossypium hirsutum
  Clone ID: GOSHI-09MAY01-C90118_1
tattttcttaaacttacgctgtggttgatggggttctctgaaaaagaagcctctgaagaagaacaaaacaaaaaacttcaaatgttctttctgtataatcaaagagaaccggacgcgtgtgtttagttcagtctgggggttgggtgtttgagaaaaatccgggaggagtggggggggcgggtctctcttctgcaattgggagctcttcgttgcgaatttgatggatgccaataactggaggtctactcctcccagtggagagcccaccatggacacaggcgattggagaacccagttgctgccagtttcacgacagagaatcgtcaataaggtaatggatacactgaagaggcaccttccattttctggtcaagacggtttaaatgaactcaggaaaatagctgtaaggtttgaggaaaagatttttactgcagcaaccagccagtctgactacctaaagagaatatctttgaagatgcttacaatggagaacaggtctcagagtactgtacccaacacaggggataacagcataccgcctgatccaggttctcagggcatgcagaaccaagttcacagtcaagggcaaccaattcctatctctttacaaagtaatcaatctcaagcacaactgttac

SEQ ID NO: 24067 - DNA, 618 bp, Gossypium hirsutum
  Clone ID: GOSHI-09MAY01-C90078_1
tacttgcttttttttgggtaaattgtattgtgaagtcaagggtgttctttttccattttaatcttaaattgagtgttaccgagtgatagaaaaaacggagactaggtttttccttctaatttggttgttggttaaattcggctgcaatggagccgcgagttgggaacaagtataagctcggtcgaaagatcggcagcggatcgtttggagagatctatcttggtaccaatattcaaacgaatgaggaagttgcaattaagcttgaaaatgtgaagaccaagcatccgcagtttgatgtatgaatcgaaggtggttaaaatactttcagggaggaacctgggaattccaaacgtgagatggtttggcgttgaaggtgactataatgtccttgtgatggatttacttggacctagtcttgaagatttattcaacttctgcagtagaaaattgtcactcaaaactgttctcatgcttgcagatcagatgatcaatcgagttgaatttgctcattcaaaatcatttctgcatcgagatatcaagccagacaatttcctcatgggtctaggaggcgtgcaaaccaggtctacatcattgattttggtctggctaagaagtaca

SEQ ID NO: 24068 - DNA, 920 bp, Gossypium hirsutum
  Clone ID: GOSHI-09MAY01-C90068_1
catgaatggattgacctcatattcgggtataagcagcgaggcaaggaagctatatcggctaataacatgttcttttacattacatatgaagggacagttgatattgataagatctatgatccagtacaacagcgtgctacacaagaccagattgcttattttggacaaactccatcccaacttcttactgtccctcacatgaagaaaatacctctttcagaggttcttcatttgcagacaatcttccggaatccgagagaagtaaaatcgtatgcagtcccaaaccctgatcgctgcaatttgcctgcagctgctattcatgcgtcttcagattccgtcataatcgttgacacagatgcgccagcagctcatattgcacagcataaatggcaacctaacactcccgatggtcagggagcaccatttctgtttcaacatggaaaggcaacaacaagctctgctggtggagcacttagaagaatgttcagagggccagcagctgcaggctctggttctgatgataggcactttccccaggcactagcattcgcttcttctgggatcagaaactcatctattgtttccatcacatgtgataaagaaattatcactggtggacatgctgataatagtatcaagcttttgtcatctgatggagcaaaaacaatagaaatggcttttggacactctgctcccgtgacttgtcttgctctatcaccagatagcaattatctcgtgacaggatcccgggacagtactgtaatactttggaggatacatagggcatttacctcttgcccaagcagcacatcggaaccaactgctggcactggtacaccaacttcaactagtggtggtacttagctaattccttggcagacaaaagcagaaagcatcggatagaaggtcccatatatgta

SEQ ID NO: 24069 - DNA, 650 bp, Gossypium hirsutum
  Clone ID: GOSHI-09MAY01-C90298_1
cccagcgtccgatcgggataaggcctcgtggtgctccttctggtgcaaattccggtgttggattctcgattccagttgacacagttagtggcatcgttgatcagttggtgaagttcgggaaggtgacaagaccaattttagggattaaatttgcacccgaccaatctgtggagcgggggggagtaagtggtgtgcttgtcttagatgctcctgcgaatggtccagccggcaaggcgggtctgcgaccaacaaagcgtgatgcttatggtagactcgtattgggtgatataataacttctgttaacggaaagaaggtcaccaatggcagcgacttgtacagaattcttgatcaatgtaaagttggtgataaggttaccgtcgaggtgttgcgcggtgatcataaggagaagatcccggtaattctcgagccaacgccagacgagacatgaaatgtctttttgctgtggtgtgtaacattaggtacgtgtatatacaatgaaatgccattatttattatgaccattccactggaaatggtcctgttgtacaatgtacatatgccatcagcgggtaaattataaaaatagtcacccaactattaatgtgttcctgttttggtaactcaagtttaaaactttctattttaaaac

SEQ ID NO: 24070 - DNA, 191 bp, Gossypium hirsutum
  Clone ID: GOSHI-09MAY01-C91928_1
caaaattcaaatagataaagatggcaatttataaagcagaaagaaacaacaattcgtccatgacatatcatggggttatccagctcatcaaagccaatattatggtcttcgatcacaattccatgaagtctaaattcaaatgaatccaggaaatataaataaataaaataaaataaaatcggacgcggggg

SEQ ID NO: 24071 - DNA, 894 bp, Gossypium hirsutum
  Clone ID: GOSHI-09MAY01-C91608_1
gcgttcgcggccgcgtgggttcggaacaaaattcaatgaccgtattcactttggagaattatcatgtcgaaacttataacaacatttcaaactggcatgtaccaattttggctatgacggcagatgttatccaggccacacatgaggagtgcctacggcgtggaatggatggatatgtatctaaaccatttgaagccgagcaattataccgggaagtttcacgatttttccattaggcatcagatcagaatcggttggaaggacttctgtgcatgacttgctgatggcatcagtacaaccgccccttctatggcatgctttgagataccttaataagtcgcaattcttcccaagagaaaaaacgtgtttttgtagcagggtgtatataaaatcatgcttgggtatgggattttcttgtattctacaaagcagttgacaaaggttgtagatcctttttcatttttgcctgtaaagttggtcacgatcacaagccttccagcagggttggtgaattcagatttctgtgcagtaaaaagaaaaacactgattttaacttagggtaaaaacaaaattaccatattgaaatgaatggaagaaaatcatattcctttgagtgtatcagtatctcagcatccccgggggggggggtggggggaggattgagtcttatacattaattaatgctccaataaaatgattggtcagtaccttattcagatttaacaaattgtatcatgttcatctatgttatcttatcataattggtgttaaatgtttatttggagcaatggtggttatttatatagtgttggtcgctgtttcattttggtgttgtatttgtatggtgctattacgttatgtttaatatggttgggtctaatgttattatttttc

SEQ ID NO: 24072 - DNA, 609 bp, Gossypium hirsutum
  Clone ID: GOSHI-09MAY01-C91388_1
gactccaaatagaatgtctcaattagtaacaaaataacttgatctttgcaagctaagaagaagccactcctgaatatctaaattgaaaaaaccatcaatcttttcttgtttaataagctttaacctgatagaggtggacataaaacattatttaaggttatggttaatatcttctactaaatttttgcacaatgtacaacttgcaccgatactgaaatatctcctaactcattcttgcatcattatgaaccaaccaaagaaaactttaatcatttgcaaccaacaagagcaccaaatatgtttccattatgagtcactcctaaaggagtttgaatccaattcaccataagctgattttatcaagaaatgtcttcttttatcccatttccacttaggcatatcatcaatgtccttcatgcaaaaaaggattgtggctacaatttttgccaaacaagataaaggaagtaacttatctagttagctccaatctcattatttttaaggggagaccatatcacgaactggtagacatgatggtgcaactttccattgagaaaagaaccaaaaattggattgcaatctatcaaccaccatctttccggacgcgtg

SEQ ID NO: 24073 - DNA, 768 bp, Gossypium hirsutum
  Clone ID: GOSHI-09MAY01-C92918_1
ggtaagttataatgctatgtataaatgttttatttaaacaatatctagccataaccattttggcaccaaatgtaatagtcttataccgggtttgtatgattagatcaggtatagggttgttacagcattaggctttgtcgtctgaaaaactcacgatacaatatagccagaactgcggaaccctaactatacgagcgaacattctgcaaatcagctaataggggtaaatacatcaaatgaaccttattgttcccatccggcatcagtacaccccttataatatgcataatgtacgctccagctgtgcacatcacctcatgctcagtgacattaattgataaatgttcaaaatttattttcagccatgaaaatttcaaactcgtaaaattggactcggcattgttaggcgagacttctagtaggccataacaaagggtagtcagctcagctatcgtacttacgccctttacggcactcccgtcgattgggagcccaagttgcaatgcaacatcctccaaagtgacattgcacttcccacacggtaaatgaaaagtgtaggtctttgggtgccaacgctcgaccaatgcagatattgaatcgtactgcaaatcaaacgtctggatcaatactgctgacccgaacccagctaaatccaagtatggcatcagtcattcatccagagaatatcctataccattcacccgaccccttaatgcgcggtacgggcccatattattaactgtgtttgatatgtgatcggacgcgggg

SEQ ID NO: 24074 - DNA, 405 bp, Gossypium hirsutum
  Clone ID: GOSHI-09MAY01-C92668_1
aaaattttgattcaatctattaaaaattataaaaatataaactattaagatggtctgattccgaccatgctaggtaactgcacaattcacactttacaagagattccaaacagtaaatcagaaatacaaagaaaaagttcaggtcaaagtaacatataccatctgaattacacttcaaatgattgttttcacgcgattggtaattctcctccacctgacacgaatagcaaagccaccgacgcatcctcgttcttttcttcaaaaacagaccgtcgagattttctagttgcacaaagtagccagggggaggaggtatatgtgcctgcataattccacaccacttttattcttaaacacactgtacacataagtacaaccatcattatgaaaacaaatccctatgct

SEQ ID NO: 24075 - DNA, 402 bp, Gossypium hirsutum
  Clone ID: GOSHI-09MAY01-C92068_1
gagaggaagaaaagaacaccttttttatgactaatataactaaggggaacaaaatttgaagatggggggaaaatgatgtaaagatattatgcagatttaaggcctatgtaagcagcacataaagccaacacagaggaaacagcttatgccccagcaacaatcattggctcttggagtccacatagttctagatgatgatgcaaaggggcccttaaacaaccgactcccgcttccatgatactgtttagttgctttaaagtataccacctgcataacaactgatgatgcttccaaaacaaacaaaccagatgcaatgaataagggaaagaacattccagtacaagcggccattgcagctaatgccccaccgagggccgatgatccagtatcacccataattac

SEQ ID NO: 24076 - DNA, 887 bp, Gossypium hirsutum
  Clone ID: GOSHI-09MAY01-C92298_1
ataaaattaaacatcatatattaataatttatattttcaaagccataaaggcagaaattaaaaggtgattgaccaggcaaacatttcttaccatataatttattttttattatatataaagtatggaaaattggtcatgcacccaattgtcccaccaatcgccttcggatctcaggtaatttctgcttgaaagcaacttctaggcgtgcatctaaagtattttccaaaacaatcttcccgtcttccgaagccaacacaactccgcccgagcagtaaggttgatgggcaaactcatctccgttagcgggcggtggtggtgggagataaacactgtcgataacaatcttaggtggaggtacattgaatttctctgcgtactctcgtttagcttcatcgataatagtttccaccagcttacgatccacctctcggcacctcaacaacaccgacggttccctcagccgaaccagactctgcaccaccaatgccttcaccaggtttttatacccccttttgtcagtgcccaaacgctgcagctctttcctcgcgctttcttttatggagttcaccaactcttcctgcccttgcagcacttttatcctcgacgcgttcagctgcattgagtactcaattttcttgcgtatttccacctgctttgccttgcgctcgtactcttgtttaatctttctcctttcagcttctacgatttgcagcttttcaatgttgaattcttcttcagcagatactgaaatctcattggctttctcctcagcttcttggcggatgaatctcaccatctgctggatttgcttcgatacatccccgtcgttcatttttcttctcttttcttagcaaacgaacaaattgattaaattgccaaggttttt

SEQ ID NO: 24077 - DNA, 507 bp, Gossypium hirsutum
  Clone ID: GOSHI-09MAY01-C92248_1
atcaaaatgggcaaagttctatttattcatcgaaggaactagtttacaagacaatccatgatttttacatatataaaaactcgtagaaaaatataatatatacacctattgttatccatgtattatatatagaggagattcatttacttcaaggaaagcatacgatgaaatgagattttttattattatccataatatatatatatatatatgagaggctacggatgaccattcattcaccttggctggtatccataacaacaataggttttgattttcaagaagcaactgatctgccttgtttgactcagtaaagtgtatatatcttccaatccattgtaagatgatgatcatctcacaaatcaaaggaaacagctttgaattggatcattttgctgcgcaacttagcaggcaagatatcaatcccttcgactctgctttaggctgagagtcgtcccgttcacgtctctgggctactttcacaaactcatctgagcttaaactccc

SEQ ID NO: 24078 - DNA, 534 bp, Gossypium hirsutum
  Clone ID: GOSHI-09MAY01-C93988_1
ccgtccggccgaaccatcaggaaactcagtctctgcaatcaatcttgtgagattggcctccatggtttctggcagtaaatccgaccattacaggcagaacggagagcatcttcttgctgttttcgagtcgagattaaaggaaatggcaatggcagtgccacttatgtgttgtgcagccgatatgctgtcgattccttccaggaagcaagttgtgctggttggccataagccttcagaagagttcgaaaacatgcttgcggctgctcatgcctcatatgatccgaacaaaacagtaattcatatagatccaacaaacacagcagagatggaattttgggaaacgaataatgacaaagtggctctcatggcaagaaacaattttgcagctgacaaagtggttgctcttgtatgccaaaatttcagttgcaggcctccagtaagtagccctaaatctctacaacatatgctctcaaacaagtctgcctcgtcctctgttgtatgaatctgtcattgctttacttggtagtgtatgat

SEQ ID NO: 24079 - DNA, 197 bp, Gossypium hirsutum
  Clone ID: GOSHI-09MAY01-C93908_1
tggaacatggaggatgatgaggaaagctacttgtagtttaagggaagttgataattatacccttaagaagggcctcattattgaaggaatcgatattcggcctaaagatagcagatagaaaagaattacatactatgtatgataaacattattgcttgtgacattatacaacatatttagtgggaatatttgctagc

SEQ ID NO: 24080 - DNA, 301 bp, Gossypium hirsutum
  Clone ID: GOSHI-09MAY01-C93928_1
gatacaccaccaaaggggagcaaggtttcaaccttgaaataaccatggatgcaaagtctgcagcaaaaaatgaggttttggatgaatggactctctccaacaactcaaacgattgaaaatttgtatcaatggttttgctatctgtgattgtagcaagtaattttccaagatatatagtttggaaataaaacaggttgtttttcacctgaatactgctgtttcagctacttactgcagtattattgtagcaggttgctacacctgtttgtcttggagaaataaaaatcataattttttccag

SEQ ID NO: 24081 - DNA, 660 bp, Gossypium hirsutum
  Clone ID: LIB3825-011-Q1-N6-E2
acgccgttacgttaaagctatgggaatcttctaagagtccggcccgccccttttccccctttttttttttttttttggtcttcaatttctagtaattaataaggtccttttttacatgaaaattaatgatccgaaactttgttaaaggcaaaaaagaaaagagaacaacaatagaaaaaatactctgaattgagtggctattctcccacgtaataactacacagcaagatgggaagtattaaccgattcaaaactaactctaaacactcttttcatacactaacactgtattcgttaatagttattacctataggaggaaataaaactatggagctagataagaggggggggggacacatgtttatcatacacgtccaaaatacaatcaaatctcaccaggacaaacatgatcgcagcagaacgggaccaactgaggaactaagcatatcactgagagctacctggacctcagttgaaccatgctcagtacttaccaagttcgaaataagagggaagaactgaggtaagttcttctcaaacaaggtttctcccaaacaacaaatggcctggagagtcgccacaacgagaggtgcacgggcagccaattctcttcgtttcccagaaccaagaggaatcagccattgagtttgtccattggc

SEQ ID NO: 24082 - DNA, 430 bp, Gossypium hirsutum
  Clone ID: LIB3825-031-Q6-K6-G9
ttagttttgaaacggttaatacttcccatcttgctgtgtagttattacgtgggagaatagccactctattcagattatatagatatgatatttttttttcaaaaaaaaaaattaataataaaaaaaaaaaaaaaaaaaacaaaaaaaaaaaaaaaaaaaaaaaaaaaaaaaaaaaaaaaaaaggggaaaaaaaaaaaaaaaaaaaaaaaaaaggaaaaaaaaaaaagaaaaaaaaaaaaaaaaaaaaaagggacacaaaaaaaaaaataaaatgaaaagaaaaaaaaaaacaaaaaaaaataggaaaaacttttaaaaaaaccaaaattggtaaaacttggggggtttccccaatttaatccggttggcttaataggccaaaattcccaacggggggcccttccaaaaagtcccccattttgaatggcca

SEQ ID NO: 24083 - DNA, 836 bp, Gossypium hirsutum
  Clone ID: GOSHI-09MAY01-C93528_1
gttctagatcgcgagcgccgccctttttttttttttttgctacaacatggtaaacaggaaataaatatagatataacatttatacaagaatccattactatatttacatttatatgtacagttacatcaaagagatggaatctcagagtttgagacagacgactccccaccaccatgacgaacatcgcctctgcaaagtgggcacactccgtgtatctctttgagccatttatccacacaagacatgtgaaactcatgctggcaaggcagaattcttatttggtccccttcctcatattcacccaaacatatatgacactgttcaacagcatccccgtcctcagctacatttgcttttctgttgtgacttctgagggggaaagaatcaactacagattcgggagccggcggtgataccatggatagggaaagtgaaacaggttgacgatgcaaaacctcaaatagagcctcagcaagcataactattcgagatatgcttacacgagcactaggctcatcagtcatcagggaagaatcacatgagcaagtgccatcagggtggattccagatggacaaaatgtagttcgccgatgattttcatcatgtccaccatgcagccttaaccaattctctagtcttgagtgtcgtcttcgttcatttaatctatgaattctactgctgaggtaaccagaatcacctgcagccccgtcataaaagaaatcaccatcgaaatcaaggagccatctgttatcaaatcctggatcattattatcatctgttgaaagaaaaatggactcggaattattaactcttctggaactgcgtctcgaaaaag

SEQ ID NO: 24084 - DNA, 663 bp, Gossypium hirsutum
  Clone ID: GOSHI-09MAY01-C93748_1
gagagcttaacagtttaactttcttcagtcaacgtcagcagtttaaaccaagaaaaagaagaagaaaccatggctttcccaacaggaaagagatgagcttgatcgtagggcaagggaaggaaagaccgtcgtccctggtggaaccggtggcaaaagcgttgaagctcaagaaaaccttgctggagggaggagccggggagggcaggcgaggagggaccagataggaagggaagggtatcaagaaatgggtcgtaaaggtgggttgagcaccgtcgagaagtcgggcggagaacgtgcggcagaagaggggattccaatcaatgaggacaagttcgcgacgaagcagaggggctaaataagtaaaaaagaaggaagaaataaaaatccaacgttgtgggaggaaagcagcggatgtttatgggtagctaaaactaaattttaaggaggtattcgagtcatgtcacgtgtgtcatcagtcatgtagtcgttagtagtaagtagcatgtaaaatggaagtgtttcagtgtttttctttaaaatagctaggtggaaaatggagatgtttgatgtcagtttatgcttctctgcagttaaaagctaacaatggagatgtttgatataagtaattatgacttccataattcatttatgttgttttaacgt

SEQ ID NO: 24085 - DNA, 665 bp, Gossypium hirsutum
  Clone ID: GOSHI-09MAY01-C93198_1
agactgctgtgcagtgaaatgttgcttctgctcttcatgataactgcagagctgttcttgttggggagaggactttcggcaagggtctgattcaatctgtctttgaacttcgagatggatctggggtagttgtcactgtaggacagtatgtaacaccaaatcatttggacatcaatggcaatggaatagaacctgactttagaaacttccctggttggagcgatgtttcacagcatctgttgaagtgcaatttgcatcaacaaggctagaaacagttcatatcctcaaaaatgttgctgctaaatggcggcatgatttggatttgccttcccagtagctgcactcgagggatttgagatgaaaatgaagacttgagagctgattggcttccactcagggctttggcttatatcctgcatggcaaagtgggattattgtataggtttgctggattctgagttcagtctacaagaacaccagcagaagtaaaacggtctgccaagacggattaaccatgaggcaacggaggcaattgccccagctgaaaaatcctaaaatatattacttcgtaattaccattatcaattcttatcaaaaaacaaattttactgtaccaatgaaagaaaatatttatatgtccaattatcaataaaaaagatttattt

SEQ ID NO: 24086 - DNA, 773 bp, Gossypium hirsutum
  Clone ID: GOSHI-09MAY01-C93048_1
agcaatcaataataatgaaggaaccattagaggcttttaaaatgagaggatataaatacataatatcctctactaagggctacaaatcaactaataacttcaaggcttaatctcctttctttactctaaaagtggaccttatcgacaccaatggctaaagtattgctaatcatctttcgtatcgctgaatccatttgtatattcggcgatttgatgttggcttctagaaatgcatcctcacaagtttgtacattctcgatattggagcttaattccatgcttacttggtaaacgtcatgcaaagagagagcatcaaggactctcttatcgctatcgaggatggatttgtagctatccaagcatgtttcaaggcaagaagcagtcattttttgggtcgagtgatcttgcataagtttcgtagccttgtctatggcttccttaaccttgttatccattgcttgaatctcaagtttgaggacagatacgggttctgcaacaaatttactatgacctaggaatggaacaatatttgatatacactcttcaggatggtcagtgtctttactgatttgctgaagcccagggtcaacgttattggtaggtaatgtaggtaatttattaaatgtttggtccattcgagttcctgaagatttggaaaaatgaacattaaatgctgcagatggagctgaagatgatgagtgagaaaaagagtaatgataggaataagatggaggggtagaggtagaagtagagaaggagaacccacgcggccg

SEQ ID NO: 24087 - DNA, 793 bp, Gossypium hirsutum
  Clone ID: GOSHI-09MAY01-C93028_1
agatcaaaatctgctggttatatacacagttaaaacaatgacgatgataatgctaactgcactttttgagtaaattattattttgtatctctattctagcaaaacttgaaatctgaaaatacaattttttatcctattgaagcactctatttagatttatttgggaaggaacaaataaccgaaggtgcatgcactcttttaaagggccattctaaccagaaaacctacaaaggctttctccttcaagatataataagaatatcggtttctcaccttaaataaatgctgagtagagctcgaaatgaatgtcttcatgggacctagtgatctggtgttagcacagagacaaaatttcgattttcacactgcaccaatttaagcatctctccaaagctcatcgcctcatcaattcctggaattgcattcgccaagtctgaaaataaactatccattccttccgtcccgaattcatcattatccacgctaggatctacctccatggcatataaattcttgaagccatagaccaaagtgggagtcttagtgaatctctgttgaaaagcatcgctgagattatgagcagggtcggtggaaataatcaggacagagggtcgcacccgagccaagagcatcgaaataatcgagctacaagtggtcttacccacacctcctttgccaccaacgaaaacccacttcagggtatcttgctccaatatgttatgaacggttgactctggtatatcctcactgtctgccatgtttgtttaacgaagctttatttatttttattttt

SEQ ID NO: 24088 - DNA, 628 bp, Gossypium hirsutum
  Clone ID: GOSHI-09MAY01-C93298_1
ggctgatcggaaaaggttgagttggttcgtacggcgaggcggataaggaatgaggagctggtggtggtggttgggaatcatcaggtggagggtttagttgaagtggcgctgaagggtgtacttgcagggctagaaagggtgatgaaagcggccgattgtgtgagactcaaggccttgaaaggtgttttggatgttttgaatccatcacagtcactgggtttcctggctgggatctgcatgcttcagattcagatcaggaagtggggcccaaacagggataacccaaagggttcgaatccgttaatattaggggaactcccccccaatgtccttttttaaggctccaacatcgagcatggccggcggcagccaaagtaggcagagctaaatgcatgccccatactaccagtgttaatataggttcccatgtaacccgatgtaggtgattttccccgttacatcgaggttgaaatgttggtttttttttctttagagtctgtctggtttgccagtctcccacctttaaattttgccccttctttttcgcatttttccatttgcataaaacttgaccccccaatatacatatatatatatgtatgtgtgggatctattgacccgttgttag

SEQ ID NO: 24089 - DNA, 782 bp, Gossypium hirsutum
  Clone ID: GOSHI-09MAY01-C88528_1
gaaatgaagtcaaggttcaacaagaggatggtgctaaaagcttgaaaatggcggtggctctagcaagaatggtgagggttgtagtaacgttagcaaagtcaatgatcaaggtggcggtggtgcagcttgtaaaaacggtgtacaagttaaggagccgaagcctgaggtgaagcaaaatgtgatctcggtagccggtaatcagtcatcggtggctgagaagaaaggtggtggtggtggtgccggcggtaatactgagggtaacgttaatggtaatgctggtgagaaaagtggcaatggcagtgggagtaaaaagaataaaaagaaggggcaaaaagctaatgctgaatgagggtggtgagcagcatcctggtgatccagtccctgcatccattggatcacattttaaagtgcagggaccccatggttcagttcccatgccatccccagccaatcatagcccaccgcgtcagcacccaatgtacgagtaccccacgtattaccatgcccccccggtgtacctccctagctacaacatggcgtatccaaccagtagctatactgcatcctattacccctccccccccccgtattcgtatgcatacatgcacccgggtcacacaaccgaacgtcaaaggtgggatatggacatgtactcgtcctatccatggtattcatcacaaaaaaaaaaaacctttgaaatgttcagcgaggaaaacccgaaggcatgttcaatcatgtgatgtattcttccgcattataaacgaaaaaaccaagcttatact

SEQ ID NO: 24090 - DNA, 598 bp, Gossypium hirsutum
  unsure (1)..(598): unsure at all n locations
  Clone ID: LIB3825-002-Q1-N6-E8
aaataattacgacatcgttataatgaattttctttttgtgaattacaaatagtgactagcgtaactcgaatccaggtcacacctagagcgatgaacactcttgatcgaccaattttagcccgggcctagcactaaaagtaaacagtttaaaaacacaaaaaaaatgagaaaagtaaaccaaaaggatgtccacagtccaagtccctagtacaaaacaacccaaatacactatacaagcccaacattcaagaccctaaaaccaaattaacaaatccttaacccaaaatacgggcccaaacggcccaaaagactaaaccaaattttagcaaaccctagccctagcagccgagcccctccagcgcctccgtacgctccagtgtttcagcagccacgcgcgcctccgtacgccagctcctgtacccgagcaccagcacaccccgtacctgggaaatacgccgtaaacctccttctgctttgttgaagtcaaagctaggaggagatcttgaggctgaaaaatcatcttctgggcctaaggggncaggttgttgcctgggggatgggaatcggggctttggttgttgatcttagggttcgtctg

SEQ ID NO: 24091 - DNA, 337 bp, Gossypium hirsutum
  unsure (1)..(337): unsure at all n locations
  Clone ID: LIB3825-002-Q1-K6-E8
tttttaaaccaatcagacacctaaccccgcggcggtgggcgaaatcaaagtaaaaaaagaactaaagtctctcagacgaaccctagatcaacacccaagccaccgattcccatcccccaggcaacaacctgcccctttaggcccagaagatgatttttcagcctcaagatctcctcctagggggggcggcaacattttttttttgggggacggcgnannncccaggnacggggggggcgggngcncgcgnacggcaccggcgnacggaggcgcgcgnggcngcngaaacacnggagcgnacggaggcaacaaaaggagcacggcngcnagggcnagg

SEQ ID NO: 24092 - DNA, 505 bp, Gossypium hirsutum
  Clone ID: GOSHI-09MAY01-C88788_1
cccacgctttcgcccacgcgtccgcccacgcgtccggaccaaccatctcaaagtgttgaagaaataatgcgtatcatacaagaggctaagacgacaacagccgaaggagccaaagttggtgagcaagctgctgccggttcatccgatcctgatgatgtggaggcagatttagaatctgaaatcgatgtcagtggtgactttgaagctcctatgtgagaacccgatgttaactgcttcaacaggatttgtgcatcgaggtttggagtgttatttggattacagtttatatatatggtttttatcgtactgggaaaatgttgtacagcagacattaacactggatcggtgttgccttgctttgtattaccttggtttagtgtctcatgttgtacatttcatactttgtgaagcatctttcagaaatgatttcaaagcttgtatgtattgttttgcactacttcggactgtaacaatgttatgattgtattttataattaatccacct

SEQ ID NO: 24093 - DNA, 519 bp, Gossypium hirsutum
  Clone ID: GOSHI-09MAY01-C88748_1
tagtccaagtcgaagtcgaacccctattcgcagccgttgtgcagttgattctccaagggttggaaggcgaagttttccttctctgagcaggagcagatcagaatcaaggtcgttgttgaactcccagtctccaaagcaggtgagcaaagtgaagtcaaggtcatcatcaggaagcccagatggtagaaggggactggtctcttatgatgatgggtctcctgagtcgggtgggtgatttggagtgagagggggggggagatttttgtttagtgtttgataagccccatcttctgttggtgcactgaacttgactggactgtgcagttttaccaacttgtctctactttctgttatggtattttaggaattttcgttccggtggttgttgttggcctggcatgcttatttagggtaattttattttgttataaataaaaataatgaatagtatgcgacctgtgtaactattacgggttaggaagaaattcggtactttgtttgtgcagtagtatcataccc

SEQ ID NO: 24094 - DNA, 933 bp, Gossypium hirsutum
  Clone ID: GOSHI-09MAY01-C88618_1
ggggaccaggaaagatccgaaattattgatgctgatgatgatcctacagcatcagaatccctcgtggatgggcaaattggaatgacttcttccttaaccatgcatgtgaaacctggtaaccgacttcccttgccggatgatccaagaacagcttctggtgtgaaaaagattctaaattcacatgacctgtatgcatcaaaggactctccaattagaacagtttccagaagtgaaacccttaacgttaactgtaaactgacgtcagatccgcctgcccctcttagtaccaaaatgtattactctcaaagaaatagtcgtcttcgcttagcgcttagtcatcagtacttcattacttcaaccaaagaactttgcagtgaaatggctaatcgacaagtgtcaaagcagagcacgatgatgttacgggattcttctcagggggtctgtcctcttgaacaggcagataatctgcttaccaagaagcaagagtcttctctgcagaaacccgatcaagttcttgctcaaatttcagaattatgctcgagtaaatctgaggggtgcctgccatccaatgacttctcaaatccgcatcctgttgatattattccaaggcctcaggctgattctgttggattgacccgaagcaaatatgttcctgagcaccatgcttttgctggaaactcagtttgattttctgcagacaaactgctggggcctttgcagcctcctagtggaagtgttcctgttgtatagacagtcccaggatcaattttttgcttggcgaaggtgtatttagccatacatgagatttaggatccattttttaaaacctaggaaagcatatctcttcaattgttcattctagtcttctgaattacacttttgacaactagcttctatttatatttcatggaaatgaagtaaattctttcaatt

SEQ ID NO: 24095 - DNA, 788 bp, Gossypium hirsutum
  Clone ID: GOSHI-09MAY01-C88278_1
accggtccgaacccccggtcgcccaccgtcgggcgcgtgggctcagtcttcagtcaaaacagaaaacctccacaaaaacctgtcgttccctcctatggcggcccaacccagacgaggcggaatttccctacccgagagatcatccgcccccaaaccccattccaacattctcgccaggatcacttcttcccccattgtttcccgtgggaagcaagcggcctctgatgctgctttcgtctccaagaaactcctccgtagcaccggcaaagccgcttggatcgccggaactaccttcttgatcttatttgtccctttgatcattgagatggaccgcgagcagcagttcaatgaactcgagctccagcaagcgagtctcctcggtgccccacccactgcacctgcacgctcttgagtaaccgagtcagtgtcatatcaggtcagaggagcttgttgtttatcaaattttatggctgtcctggtttagtgaaacttctagattcagtcttacgatttttttccttttaatttgagtttaagttttttatttgtcggaatgttgttactggactttgttttatcgatagagtttattcgtatgaatttttaagtgaaactgaacattgttgtgataaagtaaaattgggtgaccctccaatggtcgtggaatgatttttattttattttatgtttcattgcaaataatggtctcgggattcattgggatacctttgatgaagtgttctagtttgtattttttttgtaaatgaaatttcattgttctaaggagt

SEQ ID NO: 24096 - DNA, 419 bp, Gossypium hirsutum
  Clone ID: uC-gsflnu33B075c06b1
tgtactacggtacagcggacaacatgccgacggaagaaactatgggccctccattggggggccaacccagacgaggcggaatttccctacccgagagatcatccgcccccaaaccccattccaacattctcgccaggatcactccttaccccattgttacccgtggtaagcaagcggtctctgatgctgctttcgtctccaagaaactcctccgaagcaccggcaaagtcgcttggatcgccggaactaccttcttgatcttatttgtccctttgatcattgagatggaccgcgagcagcatttcaatgaactcgagctccagcaagcgagtttcctcggtgccccacccactgcacctgcacgctcttgagtaaccgagtcagtgtcatatcaggtcagaggagcttgttgattatca

SEQ ID NO: 24097 - DNA, 999 bp, Gossypium hirsutum
  Clone ID: GOSHI-09MAY01-C89908_1
cccagcgtccgccccgcgtccggccacgcgtccgcccacgcgtccgggagaccataaaaccgcaaccgatacacatgccttcctcctcaagtggtttggtctctatccggagtttgttagcaatccgttctatattgccggagagtcttatgccggaatctatgtgcccactctttcttccgaagtggtgaaagggatcaaagttggtgcaaagcccacaataaatttcaagggttacatggtgggaaatggagtgtgtgaccctgtttttgatggcaatgctctagtcccctttacacatgggatggcccttatttcagatgatatttttcagggagttgaatctagttgtgggaaaaattattcaaacccttctaagatttgtgacgaaaatatagaaaaagtttacaaggcaattcccgtccgtcccatttatgacatccttgaaccgggctaccatgatcctacttcacaactaagctcaaaaggaaacaaaagcttgccagttagcttccaacaattaggggctacatcgaagcctcttccggtgaggactcggattttcggtcgtgcttggccgtttcgagcaccggttaaggatggtatcgtccctttatggcctgaactagcgcaaacgaacagccgcgatgtcccctgtttcaatgatgaagttgcgacgctatggttgaatgatgcaaaagttaggcaagctattcatgcccaaccggaaaatgtatccgggacttgggagttatgtaccgatagaataagctattaccatgatgctggagtatgattctgtaccataaaccctaacactccaaggttatcgagcacttatttacagtggagaccatgatatgtgtgtgccatacactggaacccaagcctggaccaggtcactcggatataagactattattccatggagatcatggatgtctaatggccaagtttctgggtacttgcaggatatgaccatgacattacctttctaac

SEQ ID NO: 24098 - DNA, 641 bp, Gossypium hirsutum
  Clone ID: LIB3543-051-Q6-K6-D8
ccccgcgtccgccccgcgtccgcccacgcgtccgcccacgcgtccgcggacgcgtgggcgagaacggtctcgtcaaatgttatctcacggtatctctgatattccagtggaagcaactttcaccaacattgagcagttcctggagccgctcgaactgtgttatagatctctgtgcgggggtggtgaccaaccgattgctgatggaagccttctcgatttcttgaggcaagtttcgactttcgggctctcacttgttagacttgacattaggcaagagtctgatcgccacaccgatgtcatagatgccattaccaagtacttggaaataggttcctatcgagaatggtctgaagaacaaaagcaggaatggttgttatctgaactaagtggcaagcgcccgttgtttggtctcgatcttcctaaaaccgaagaaattgctgatgttttggacacattccatgtcatagcggaactcccggcagacagcttcggagcatacatcatttcaatggcgactacaccttcggatgttcttgctgttgagctcctacagcgtgaatgccacgtgaagcaaccgttaagagttgtcccacttttcgagaagcttgcggacttagaagctgcacccgctgcattggctc

SEQ ID NO: 24099 - DNA, 562 bp, Gossypium hirsutum
  Clone ID: AI725492.1
gctttgaagaatatcgggattaatgaacgtgttccttataatgctccgcttattcaattttcttcatggatgggcggtgatcgtgatggtaatccgagggtaacgcccgaggtcacaagggatgtttgcttgttggctaaattgatggctgctaatttatactactcccaaatcgaggacctgatgttcgagttgtcgatgtggcgttgcagcgatgagcttcgtgttcgtgctgaaggacttcataaatcatcaaggagagatgctaaacattacatagagttctggaaacaagttcctccgaatgaaccgtaccgtgttattctcggtgatgttagggacaagctgtatcagacacgagaacggtctcgtcaaatgttatctcacggtatctccgatattccagtggaagcaactttcaccaacattgagcagttcctggagccgctcgaactgtgttatagatctctttgctcgtgtggtgaccaaccgattgctgatggaagccttctcgatttcttgaggcaagtttcgactttcgggctctcacttgttagacttt

SEQ ID NO: 24100 - DNA, 676 bp, Gossypium hirsutum
  Clone ID: GOSHI-09MAY01-C89598_1
ccccgcgtccgccccgcgtccgcttcggactcatcgcccctttatttctctaagatcgttcttaagtgaggagagctcacctcctttcgaacccaaccccactcatctcctttctccctcccaaattcacattgttaaagtttagggttcaatcaactactcatctgactgacattcttgttgttagatttccagatggcttcatcggtgttctctttagcttctgcaactccctctgcttcactctcttctcatgatattgaaaagggaaaactgaatcttagaaataccagcttgtgcttcaaaaaagagaaaaacaatcccttcatgaaaacaaagtcttttggtcgaatatcaatggttgtcgcttccaatgtgtctcgttttgaaggtataacaatggctccccctgatccaattcttggggtttctgaagctttcaaagcagacaaccatgagttgaagctcaaccttggagttggggcctatcgaactgaagagctacagccctatgtccttgatgtggttaaaaaggcagataaacttctactggagaagggggaaaaccgggagtatctcccgattgaaggtttggctgctttcaataaggtgacagcagatttgttatttggagcagacaacccagttataaagcaacaaagggttgcaacagttc

SEQ ID NO: 24101 - DNA, 628 bp, Gossypium hirsutum
  Clone ID: GOSHI-09MAY01-C89438_1
acaaatgaagcagcagaggaactactgcatgctgatagaaaagaatacatgctgagattgaagagctaaaaatgttgggggacttgaaagctgctgtggataatatgatggttgctcaaatgcaatgctctattgtagagcttagccggcagaaagcatatgaaagaaagactctgaaagagcaaactgttatgcaaaattctggatcttgttcagttaaaaatagggtcgttgctgacaatggcaatggattcaactcgccaatgtcaaaaccagatagtgcttctcctagctctgcccgtttctcatggattaagcgctgcagagaattgatattcaaaaatgcctctgacatggcccaaatgaagccagaagaaagatctttgatctctgaccgtgaagacgtgtgtttgacgtcagctggaaagttggttttaagccatgagtgtgatgggcaaaaatacaagcagtatggaagaaagcccttgggatttgatggggaaccaaaagtgacagtggaagtgccctcagaagatgaggtgatcaaaggaattcatcatttggaatctggattggaaaaaaagcaatgcggaaaagtctttagtatctgaagaaaggattcaagctg

SEQ ID NO: 24102 - DNA, 1002 bp, Gossypium hirsutum
  Clone ID: GOSHI-09MAY01-C89708_1
ggcacaaggaaatctgggtaattcacctgtatatggagatatggatcctcaaagattttctggattatcaagaggcaccttaaatacgaaagagggccaccaacagtgaatgatggatatattgggtctcccatgcaatcgacctcatcaaaacagatgagcatgccaccaataagacaatcttcttctcaacaagatccattgcagtcacctcaagtgcaacaaaataaccgtaaaagaaaaggaccatcttctggacctgctaatacactggcactggaaacacagtgggtccttccccaaactctcagccatcaaccccatcaactcatacagccggtggcggtgcagctctggttggcaatatgcagcacggcagtagcatggccaaaaatttgatgatgtatggatctgatggaacgggtggtattgcatcatcaaccaaccagctggatgacatggaacattttggagatgttggctccttggacgacaatgtggagtcttttctctcacatgatgagggagatggggggaatttgtttggcaccctaaaacgaaatccttctgaacatgctactgagacttcaaagggttttggcttcaatgaagttggttcaatacgtaaaagcaatggcaaagtcacctgttgtcatttctcttctgatggaaagctattggccagtgctgggcatgacaagaagtaggctgttctttggaacatggaaactctggaaactgaatgcacacctgaggaacacactcatattataactgatattcgcttcagaccaaattccactcagctggcaacatcttcttttgatacaacagtgcgagtttgggatgctgcacaaccaagttattgcatgtggaaatatacagggcatacggcacaagttatgtcccttgatttcaccctaagaagaatgatcttttctgctcttgtgatggtaacagtgagattcgcttttggaacatcaatcagtattcttgcactcg

SEQ ID NO: 24103 - DNA, 433 bp, Gossypium hirsutum
  Clone ID: LIB3825-021-Q1-N6-B8
tcgcgatctagaaaccggacgcgtgggttttgatacaactgtccgcatttgggatgctgcacaagtataacttcttgctctttccttttttttatttgtgtaattctctcttattggcccagtttgcatgtttctattttatcggtcttcaggtttttacatagactgacactttgccatcgttgtctatgctgaattaatgctcacaccattaaacgtgacactatttccagaaagacaataagcaaacttcttatcattataaaaaagatttaggattctactttgttgaaactttgatgaatacggttcacattccatgtacttatattaattgtttgcagccaagttattccatctggaaatataccgggcatacggcacaagttatgtcccttgatttccaccctaagaagaatgaacttttctgctc

SEQ ID NO: 24104 - DNA, 984 bp, Gossypium hirsutum
  Clone ID: GOSHI-09MAY01-C89658_1
gaacgattaaccaccgaaaggcacggatggtggccaagggttgttcataggtacctggctgtgattttaaagagatgttcagtccggtagtcaaacctcctactattcgtgtcatcctatctgttgctgtgaccaagggttggcccctccggcaagttgacgtcaataatgcctttttaaatggcgatctgactgatgacgtgtttatacagcaacctcctggctttgagcaacatggttcaaatggtgaaaagctagtatgtcatctgactaaagctttatatggcttacggcaagctcctcgtgcctggtttgacaaattaaaacagtttcttgtttctactggttttaggttgtcgaaatcagccgcttcattgtttgttcaatcttcgtctcactacactctgtacgttcttgtatatgtggatgatattgtgattactggcagttcgtctgatgaaatagattattttgttcagcagctacacaacaaatttgctctaaaagatatgggtgatcttcattattttttgggaattgaagtcagttgatcttcctccggcggtcttcatttatgtcagcgtaaatacattcgggagctccttgaacggagttctctctctaatgccaaaagtgttcatacaccgatggtaagctcttccttgttgtccaaggatgagggtgaatatcttgctgatccaactgaatatcgtagtattgtcggtgctcttcagtatattattttaactcggcctgatattgcttatgttgttaatcgggtatgtcaatttatgcatgctcccactaatctacatatggtagcgttgaaacgtattcttcggtatttacgtggtcctctttctcatggtttgttctttcaactctctgagtggctgtctttggttggttatgccgatgcaaattagggacttgattttgatgaccgtcggtctactacaggatattgtgtgtactttggtcaca

SEQ ID NO: 24105 - DNA, 776 bp, Gossypium hirsutum
  Clone ID: GOSHI-09MAY01-C84718_1
cctttttcttctcttccctttgctctcccgcaggggggagggaatatcttattttggggttcttggctctctatattcccaaatcttaatttttatttttcgatctctttatattcagattcagtgttttacacatcgcttctgtttctgatccgacgacggagattgagtttcttgtcaaaaagaccgaggtatgcagcagggtgatcagatggtgttaagcttaagtccgcccgcgcgtccggggagcagactctttggtgctccctcgtcttcatcctcctcctcttcgttagcctttggttccctttcttctgatcttcccgtctttcgtccccatgctggtgctcctcccgccttttctgtcaaggctggagactcacgatttgagggcccggaacgtgtgcagtacactagggaccagcttctaaagcttagggaggctgtagaagtttccgacgagattcttaaaatcgaacgagaaattgaagtggaactctttggtgaagatcagaaccggactcgtggagaaagtaacccaccaaatcaaagtcacaaccgttactctgagcctgacaatcgtgattggcgtaaccgttcagcacagttttcatctgatggagaggagaggtcctgggaatcacttcatgatagagaattggggaaccattatgactccaagcaaccagaagctagtcaattcaatcgtcaagcacaaatctcctctaaccaactgggggacaaactccagctttggtgaaggctgaggtgccatg

SEQ ID NO: 24106 - DNA, 1000 bp, Gossypium hirsutum
  Clone ID: GOSHI-09MAY01-C84038_1
tttattttttaatttacattatttttagattactggcgtttcttttccctatttattcagctatttttaggtcgttattatacgaggcttgtgggcggatagtgaacccgatatacggttctgtcggcttattatggtccggaagctggcagctttgtcaagccgccggccgcgcgggccgccgcggggctccgatcacgccgattgcgtcggaagccgctgcgaatggtcaagggccgcctctaaaagcttacgacattcgtcatgtttccaaagatgaaaactctgcagcctctaacgatgtccaacgagttaagacccggtgccgagttaaaagaactttgaagccgaaggtgaataacccggtcttagaggaggagaaccgcagctcggaaccacccgaaccgcggtgttacgcggatgaagggttcgagggaaaccggtcgacgagtcacgagtcctcgctgagtcaccaatctgagttggctgttatggatggggaaagtaaagaaacctcgagtatgatctcagaggaaacagtggcggcttcgcggctgtttccggcggggccggagctcggaggtaaggtgtcggaagaaagggcggtggagggaagcagcgaggttgggctggagttgacgctggggtttaaaccggtggtgtcacgtgcttgtcaggtggtggtgcccgtaaagaaaaggagagtggaggcatacggcacgttcgaggatggtcaaacgtgtaaggttgagctgggtcttgactatccggcggcttaaatggcttttataaaaggaaaaagaaaaggatagtttgttcccagttttggcggctcgtttccggcttttggttattttacatagaaaagttgtgggtcgttttttttctttttggtaattttcctttttttctcattttggaaaacaatttgattttgcttttcttgttgttaaaatggttaaatttcttttgggggatgctctatgcttttttttctttt

SEQ ID NO: 24107 - DNA, 588 bp, Gossypium hirsutum
  unsure (1)..(588): unsure at all n locations
  Clone ID: LIB3543-038-Q1-K1-H2
cgtccgcggnacgcgtggggctctcgttcgttgctccaactttctcaaaatgcgcatggagttgtaatggggatgccggnattcttcgcaagggggctgcagtgaaaattgtagcantcaggccctgtttacaatnggatcaagagccctngaatcccaagcaaacgccaccgtctttctagccaaggtctatggccgtgctggccttatgaacctcatcaacgccggccccgaacacctccgccctgctatttttaggtcgttattatacgaggcttgtgggcggatagtgaacccgatatacggttctgtcggcttattatggtccggaagctggcagctttgtcaagccgccgtagaagctgtgctaaaaggtgctccgatcacgccgattgcgtcagaagccgctgcgaatggtcaagggccgcctctaaaagcttacgacattcgtcatgtttccaaagatgaaaactctgcagcctctaacgatgtccaacgagttaagacccggtgccgagttaaaagaactttgaagccgaaggtgaataacccggtcttagaggaggagaaccgcagctcggaaccacc

SEQ ID NO: 24108 - DNA, 563 bp, Gossypium hirsutum
  Clone ID: GOSHI-09MAY01-C84248_3
gtttatgataaaataaacaaaatatctctctttcttttcccgcgcgcccgcgcggccatcgaatctcgaaaaccccatctgagatagaacaaaagagaaggaaaaaagaaatgtcgccgccagcagcagcagcggtagcggcagcggcagcgggcggaggaggaggacagcctcagcggcagcagcaacaaggtggatttggacagagcataaccggaatcataaggatcgccgtcttctggtacttcgcttccaaattcttctctcccaaaaagcccgtcgatccttctaacctcatctccaatctcttccagaagggcgaaccactggatatgtggttgtatctttctgagcaccaaaggttcaatgactttgggaacgaagcttctcttgtttggcatgaaactaatattccttatgccacttggggtcctgaaagcactcgtactctttctttagactaccatccttccgataccttgaaaaacaatggcagtctttatgctcatgttttctttgcacgctcgggttaccctccagatccaaatgatcctgaataccag

SEQ ID NO: 24109 - DNA, 779 bp, Gossypium hirsutum
  Clone ID: GOSHI-09MAY01-C84248_1
ttttatctcgaccccgaaccccctctgagagaacaaagaaaggaaaaagaatgtcgccgccagcagcagcagcgggcggaggaggaggacagcctcagcggcagcagcaacaaggtggattcggacagagcataaccggaatcataaggatcgccgtcttctggtacttcgcttccaaattcttctctcccaaaaagcccgtcgatccttctaacctcatctccaatctcttccagaagggcgaacccctggatatgtggttgtatctttctgagcaccaaaggttcaatgactttgggaacgaagcttctcttgtttggcatgaaactaatataccttatgccacttggggtcctgaaagcactcgtactctttctttagactaccatccttccgataccttgaaaaacaatggcagtctttatgctcatgttttctttgctcgctcgggttaccctccagatccaaatgaccctgaataccagcctcaagctgcctttgggaggactcaccctgtggtgaaatatttgcccaagtcaagatcagataagaggaaaagtcttcttgggaactccaaggacggtgaagtgtttgaacctgagccacaggtggctgatgatgctgaagctgactctaaagatgatggccctgacgagtggattgcttattggaaaccaaatatcaccattaacttggttgaagatttcacacgatatgggcacaatgctgtaccaccaaatattgctccttacttaaatattgagcctattacaggaaat

SEQ ID NO: 24110 - DNA, 569 bp, Gossypium hirsutum
  Clone ID: LIB3543-039-Q1-K1-D1
cccggtcgacccagcgttcggcaaaattagttaaaagatccaggacaggactacgctggtaccgaacttctgctttgataaaataagcgagtgtctctctggtatttgtatgtttgttttgatttgaacaactcagaaaaaaaaagtcttctttttcttttgttttcgatcttggagctcccataaaccctaacccgagagacagagaaaggaaaactatggcgccgccagcagcagcgggcggaggaggaggaggaggaggaggagaagaaggacagcagccgcgacagcagcaacaacaaaatggatttggacagaccataactggaattattaggatcgccgtgttttggtactttgcttctaaattcttttctccaaaaaagccaaccgatccctctaacctcatctccaatctcttccagaagggcgaacccctggatatgtggctttatctttctgagcatgaaaagttcaatgattttggaaacgaagcttctcttgtatggcatgagactaacattccttatgtcacttggggtcctgaaagtacccgtactctttctttg

SEQ ID NO: 24111 - DNA, 404 bp, Gossypium hirsutum
  Clone ID: uC-gsflnu33B037h08b1
gacctttcttcgggcaaaaagcgaccgacaacgcgggcggatctaagaaaaaaaacccgccaattccccctttggttttcgatctgggagctcccataaaccctaacccgagagacagagaaaaggaaaactatggcgccgccagcagcagcgggcggaggaggaggaggaggaggaggagaagaaggacagcagccgcgacagcagcaacaacaaaatggatttggacagaccataactggaattattaggatcgccgagttttggcactttgcttataaattcttttctccaaaaaagccaaccgatccctctaacctgaaatccaatctcttccagaagggcgaacccccggaaatgtggctttaactttctgagcatgaaaagttcaaagattctggaaa

SEQ ID NO: 24112 - DNA, 686 bp, Gossypium hirsutum
  Clone ID: LIB3583-034-P1-K1-D8
gctttatcagaccagttgtcacccaagagaaaggtgttttctaggcttggtcgggggttggcagcgtgtcttattgctatcacaggtcttatgcttaacagctcctttaacggccctgttgtgggatctttgttccaagggtattatggtgttagcgacgccacgatttcacttcatttttcttctttttcttccgttagtaaagctactgtggatactcaaaatacgttagaagttgacaatggttcttcagtgattgctaaaaagcaagaattttgggaggaaagtgagagtggtcaggtggatttgaaggatgaggttgacattgatagagagggaacccagttggagaattcttatgaggggtctaaaactagaaactttgatgttgtggaaggaaggattcaacagattgcccaagatgcaaatggttcagttgtttccaaaaatggtgatgaagtgattttggaagagacctggtttagggaattcttccaatatattaaataatgctactttagctgaaaagaaggttgtggaattgaataaaaccacgaactctcctggtggtgatgatcatttctttttaggaatgtgatctctttgatgcacaatggaaggcctgataaaggctacattaaatggaaatggcagcccaatggatgcaacttaccaaggcttaatgc

SEQ ID NO: 24113 - DNA, 472 bp, Gossypium hirsutum
  unsure (1)..(472): unsure at all n locations
  Clone ID: LIB3583-035-P1-K1-C6
cccacgcgtccgcccacgcgtccgcgacgccacgatttcacttcatttttcttctttttcttccgttagtaaagctactgtggatactcaaaatacgttagaagttgacaatggttcttcagtgattgctaaaaagcaagaattttgggaggaaagtgagagtggtcaggtggatttgaaggatgaggttgacattgatagagagggaacccagttggagaattcttatgaggggtctaaaactagaaactntgatgttgtggaaggaaggattcaacagattgcccaagatgcanatggttcagttgtttccaaaaatggtgatgaagtgattttggagaagacctgaaaagaaggttgtggaattgaataaaaccacgaactctcctggtggtgatgatcatttctttttaggaatgtgatctctntgatggtaggtgggtgaaggatgatcattcaaagctgtattatc

SEQ ID NO: 24114 - DNA, 1023 bp, Gossypium hirsutum
  Clone ID: GOSHI-09MAY01-C85668_1
cccagccgtccgaggctgatggtcacgactgcttttcttgtgatgtagtttttaagggtggtgattttgtaagaagagatggaactagtggggaaagcattatatgatggaaagtttccaggtaagtgatctcttcccatccttccaaggttacagtgatagacatagtttgggttgtcataaattaatgaagaatagatgcaagattctcctttcttttaatattttaaaattcaatcattttgtggaaatgatttaaacattgtactatttatgctattgttgtttgtaattactatttgttcacccacgcgcccgcccacgcgtccgatatcaataatcgtgtacatgatggaagtggtcatgtgtgctaataacatacatagtatcgtactctccgtaagtgaccaaagtctctaattttgttaccgagttgtgtttctaatggtcaaaatgtcaaatctttattttcaatttttaatttgttgctatataatatggaattgatcaatttttttggacttaatttcaggcttggtattagggctatttataccaagataacaccgtattaagctttttccttgaatctagatttgggtgtctttgcaattgaaatgtttctgagtgagcaataggtgttcccaggatttttgcaaaagctttcttttgtgttaatatcgtatatagtaggtgcttcccatggctcttaatctaagcctatcttcacctaaaaggcctttttgatggagcaatatgcattcttcaaatcacttcacaagttttattttgcatcatcaatgcctaggtaatagcatttttccttaataatctagatgtctttgagaattggttggtgctaacataatgaattgatggctaaattattaaggactattaaatgctaaattcatgatctccacaactatcaagagacataattcaaagaaagtatgcttactgtttgaagtctaatgatttcttaattccaagcctgtgattattcttttagaatttgatagt

SEQ ID NO: 24115 - DNA, 716 bp, Gossypium hirsutum
  Clone ID: GOSHI-09MAY01-C85148_1
tcggcgggcgaggtactctatgatacaaatggctttttggataagaaccgtgatccactgagctctgaggtagtccaacttctatcatcctgtgacagtcagttgccacaattgtttgtcaaaaaaatgtttaatcaacctctgcaatcagtaacttcattggacacaccaatgcaaagtgttgctttgcaattcaagggccagctcttcaaattaatgcaccagttggagagtacaagatctcattttatttgctgcataaaaccaaactccaagcaactccctggtacatatgaagaagatcttgtcttgcagcagcttagatgttatggaatttttgaggttattagaatctcgaggtctggatatcctactagaatgacacatcatgcatttacagaaaggtacggattcctactgtcggagcccattgtatctcaggattcattgagtatttcagttgcacttctaaaacaatttaatgtccttcctcaaatgtatcaaattggctataccaaactgtttcttcgaactggacagattagtgcattggaggataggagaaaacaggtgttgcgaggagtaattgaggttcagaaatacttccgtggtcaccgagctcgtcgtcttttccatgagcacaacaaaagagcgaaaagtattcaatcatttgtctgtggtgaaaatataccaaggaagtatgcttcttagtcaaa

SEQ ID NO: 24116 - DNA, 465 bp, Gossypium hirsutum
  Clone ID: GOSHI-09MAY01-C85178_1
caatttcttaaacaatagctttcgcagccttgtcctttgtccttcttcttcttctgcttctttgtcctttgtaacttctgcgggtgttgaagaagaaagctttcagctgtaggtgcctggtgattgttacaactctgttgtagtcaggtgttttactgggtatgtgtctttttcctgttccaacacttgtatgaatcgcttgcttgtttggaatttgtatcttgtgtttctttctataactcaggaaagtaaagttgttgtggccaatgacaattaccctccacaggggtgtttgagatatccaataattgctgtacaagcttttaaatttgccattctgaatggatactactggtgtgagcggtggggtgtgttctgggattgggtcaggtgtgctaggtctcgtagtgctcattacacccccaacatcatcaacaccaacaaccccctagaaacccccaaact

SEQ ID NO: 24117 - DNA, 720 bp, Gossypium hirsutum
  Clone ID: GOSHI-09MAY01-C86898_1
ttcttctcttcgagacaagctcaccggaaagaccaacaaatcgccgacttgtgtgcccagatcgatgctctcgagacttctttgtctgaaacctcgaataagctcgttatggccgaccaagaaaaggagagcttgttgaaagataatgcttcgctttctaatactgtaaggaagcttcagagagatgtttccaagttggaggtctttagaagggagcttatgcagtcacttcaagaggacgatgaaagttctgccacagggggtcctccaatcattgcgaagccaacactgtcagaagatgattctgccttgatttcaagaactgcttcaatgcgcagccagtactctgattcgggtgcagaggatcgtgactcagatgtgtcagcctcaagacctggcttacctcatggcctcctgctagcatcacaaacaagcacaccgcggctaactcctccgggttctccaccaagtgtgtcagcttctgtatcccccacaaggacatctaagccagtgtctcctaagagacatgcagtttcgttttctacctcaagaggcatgtttgatgataggtcatcaatatcaagctccgattctggatcacaggctggtcgcactcgggttgatgggaaagaatctttcgtcaagtcaggagcccgttgtcgaatgagcaagttggtgcattccttgcaaatgttaaggaactaaactcccacaaacaaa

SEQ ID NO: 24118 - DNA, 598 bp, Gossypium hirsutum
  Clone ID: GOSHI-09MAY01-C86888_1
ccgggtcgacccacgccgtccggcaccttcattaaaaagctggtgccgtcaaggaccagtttccaaatggggtcgtgggttgcacgcgtgacgtcaacgtgatctccggtttaccggcagccacaagcaccgaacgtctcgatatcttaaacgataatgaaaaggtaaccgggtttagcatcattggcggtgaacataggttgacgaattaccggtcggtgacgactgtacatgggtttgaacgtgatgggaagatctggactgttgttctggaatcatatgtggttgatgtacctgaagggaatacggaagaagatacacggttgtttgctgatacggttgtgagacttaatttgcagaaattggctaccgtcgctgaagggttggcgcgtgatggcgattgtaataaatcacaggtgatgtgaaaataaattatatatatatgtgggtaagaaataaatattggctctttttcttctctctctctctttttttttttaactttgatcttaatttgtttttgtgaattagggtttaattatgcttcagtccctgtacttttcagacgtttgggattaagtgcttcttcttttctttt

SEQ ID NO: 24119 - DNA, 1034 bp, Gossypium hirsutum
  Clone ID: GOSHI-09MAY01-C86778_1
cctttccactcttctaaattagaaattagctagaattctcggccttttctcatctccgccgccgctgctataggggaaaatgcaacaagctccatttgcattgggtgaatgacaaagataattgtgggatatgggaggctgctgctgttcttccaggaaacctcttctgcatgggacacctgtgtattactattgtccaccagctttggaagagaatgagtctgtaacacctcatgatggatcagcctctgcaatggctgcaagattcctggttaatttggatttagaagtacctgacacctttagaccacctcctgcaccattgccatatgatgtggtcttgggatgtccacaatcaaccaattcggagtccttcagagaaactcttagtagaggtagtttcgagactctgccaacatgtgaagatcttgaggaatcagactgtaaaacacagtctggtttgcttctttcgccaaggaaatcagaagtctcaaaattaaccgagtctaaggaatcaatggcagaagaagaggatgcttgtcctatttgtcttgaagagtatggcacagagattccaaaacttatcactaaatgtgaacaccattttcatctctcatgcattttggagtggatggaaagaagtgactcctgccctatctgcgatcaggaaatgatattaaaccagacttttgatcaatgacgcttggtatgctgcagatacatatttgtttttggttctgcagcaggtctgatggtgtgcccccaagattgaattttatcagatatctagttatataaaaagattattggggaggatggcgtaaactacaaggtcaatggagggatcaggttcagatcgaaatgagctttattttgtggaagggaatgagagtcgtcagcctgccttgcttcaagtaatgataatcagagttttacttgtacaggtttccttaacatttaccttttgtttatttcttaccatgtcatatggtatgaattttagatcaatctaattgtctatagtcgtctgcttt

SEQ ID NO: 24120 - DNA, 812 bp, Gossypium hirsutum
  Clone ID: GOSHI-09MAY01-C86768_1
cttgcagtggctcctaggagtgagccagaccacaccgtagcacccggcggaaaatctgaacaccaacatattcgctaccaggagcaacaaccagtggtgggcggtgtaatgggatcattgcgtctcatcgaactccaactagtagctttcattatggttttctctatcagtggtctagtgccacttctggatttagtcttcccggctttcacctccgcttacctcatcgccctttcacgcttcgccttcccgtcccgtggcagtcgagtatcctccggtggctcggaagagattttccgaggcagcagactgtttaatctatactaacggagaatgtaataagtgggctgtcattgttttcgccgccggtgagagcattggtgccattgctatatacagttaggagggtgttcgttatacttgattgggtgcatgatacttgggtgaacaaaactctgccttataatgcaccatcgaaggacatagcatgggattggttcgggaaggggctgtcagctgcaaatctaatgtatttcgcaatcaacctgttatgctttttgatcccgcggttcctccctcgagcatttgagaggtattttagggaaaactgaggagtttcatcaaaagatgtcggaggataagcgtggtaaatctaatacaccaccaaataagtctcgacccacagataggaaaatggattgaattgaactctcttcaccctctcctgtgttgagtggttcctatgtgttgagtggttcctatgtgtcattaaacagtacagttggtaatgaaaactgttggtgctgtaactg

SEQ ID NO: 24121 - DNA, 798 bp, Gossypium hirsutum
  Clone ID: GOSHI-09MAY01-C86618_1
aagaagaaaaaaaaaccaccctaaaccaagcagcaaagcaaaaccaactaaacatcagccaagtagtttgtttatcctttgaagagacgatcaaaactatgaaccagaggaaacccaaaactttgagaccagccatggagattcaaagaaccttctccatattcaaagcgttttatagcaaactttgttgtctctgtacccaacctctccgatcctcctccatcagccgctggacagaaactggaatctcatccacccaagaaccagaacgattgcttctccttccttccatcgctagaatcacctgccgccacctgttttcggaagcccttatcaatggcgcccttgcttcagccacgaacgcatcaaccacatcattgaaaagataagttgctgctcctatatagtctcctttgtgatctttggcaataatcgcagatgtagaagtcctagtatcactctgaaaagtagcatcaaaatttatttttaataataacacccaaatctggaggactctatagtataaccgataacgatctgtagacaactcccatctttttcttgatactgatttaattccttaatatatccacgggaaaaacctaaaagatcctatagagaaaacttcagaccctcattaatcaatttatttcttctgttccacaaagcttatatagaaatagcaattaaatgtttgctttgggcatctactgcacaaaaagtattaacgaaaaaggacttgtaattcataatactatcaagtgaaacagaccggatttgaagagacgcccaaatatt

SEQ ID NO: 24122 - DNA, 821 bp, Gossypium hirsutum
  Clone ID: GOSHI-09MAY01-C86178_1
tgaggttttgtcttgaagaaaaggaaagggaagctgggctgaagttgcaaaaagctcaggagcttggaaaagcagaactagctgcagcgattgcaaacgagaaagcagcacagattgaaaaattggcagaagcaaatcttaatataaatgccttatgtatggcattttatgcacgatctgaagaggcgcacaaaagtcattctgttcacaagctagctctgggagcacttgctctagaggatgcgctttctaagggattaccaatccaaaaagaaatagatgctctgcgcacctaccttgaaggtcttgaaaaggattcagtgttggatttggtgctttcgtctcttccagaagaaacacggtaccatggtacccacactgtactacagttgaatcaaaagttcaatgcattgaaggggaccctaaggcacttcagcctaattccaccaggtggtggtggcatcttgacacattgtttagcacatattgcatcctggttaaaggtgaaggaagtcgaccaatctggtgaagggattgagtctttaatcggtagagttgacaaatacttggctgaaggaaagctcgctgaagcggcaaccgtccttgagcaaggtgtcaaaggtagccaagcagaggagattgtcaatgattgggtgaagcaagcgaggaatagagccatcactgagcaagctttaactgcactccaatcatatgctacttgcattagtcttacctaatctccagtcctcaacacatggctcaaacaatatcttgggtttgggaatttacaaatctcacaatgcatattatttttttttaaa

SEQ ID NO: 24123 - DNA, 293 bp, Gossypium hirsutum
  Clone ID: GOSHI-09MAY01-C86078_1
atagcttaggtagataggctcgtggttcggtgcagataggataagccttttatggttcccgtgttattctctctagaggggcataggcatgtcatctaaagggaaaaaaaatgtacctcttaatcctcttagtttctttcgacctttaagaaattaatacctgtagatggtgggagatttggtgctatattatattgtactcttgattttaacgttgaagaatggcttgtaaaaatatcctttttagatgatgatgttgatgcgttcatatattttatgttttgtgattacgt

SEQ ID NO: 24124 - DNA, 620 bp, Gossypium hirsutum
  Clone ID: GOSHI-09MAY01-C86018_1
taaaaataaggcgtaaggggaagctaaaacgcgaaagtcgtctgtatctattcgattttctttgtcctgaaggcgatatcctcagaaaacaacacgtgtcctcaaatgcattgtatcgtgaccatagaagctatggaattctaattcccaacaaccagctactggtgtctctccacctaaaccatgggagcaagcagggggactcaacgggtgctggaccctttaagccgccatcacctggcagcacaagtgatgttgttgaggcatccgtgaacagcaaggccaggtgaacttgtttctactgctgataggactgcagctgtgaatagaaatgctgttggtaggcctttacctagcaggccttgggagcaacagaactatggaagcacttacggaggttatggttctggtttaaactacaactcagcatatggttctggaatgtatggttcgtcatcatatggtggaatgggttcttatggtggtggattgtatggaaacagcatgtatagaggaggttatggtggtctatatgggaactctggaatgtatggtggtggaatgtacggcggaggccttggtggtggctttgggggtcctatgggtggttatggaatggg

SEQ ID NO: 24125 - DNA, 595 bp, Gossypium hirsutum
  Clone ID: GOSHI-09MAY01-C87978_1
tgggtgtggcggaggttgcggaagctggtgaatagcagtggctgtggctctggctgtggtgggtgcggcggaggttgtggaagcatggtgaatagcagtggttgtggactcaaggaggagagcggtggctgtggtggttgcggtggttgtggcggtgggtgtggcacccttataaatacctgtgtcggaaccggaggtgtggtaaaaagtaatgggtgtgaaaatcccacatacatggaggcggctataaaagcttgatggtccatggggagtttccccattattcataatgatggtccagtaaatcattgcatttattgctgcttatttccatttcctcctggtgaataagtccagctattattatatgaagtttgtatatttcgcttgtgtttctttcagattctggctttgcatatctattttccttcccccccaacctttcctggaaaaaaagtaatccaatactctgtaatccacctatctaaaagttcttgttaatgtcgaatttcagtgaattatccccaaaaaaaaaaaaaaaaaaaaaaaaaaaacccccaaaaaaaaaaaaaaaaaaaaaaaaaaaaaagggcgg

SEQ ID NO: 24126 - DNA, 652 bp, Gossypium hirsutum
  unsure (1)..(652): unsure at all n locations
  Clone ID: LIB3543-001-Q1-K1-G5
tatttattgcaaataccccatacattctttcccttggatattcatattataactgatgttatggtaggttacaccttttgcggactgcttgttaatatccattttacacttacagtacctcagactgtctatgtaatggaatggttcttaaagtaggttttctactcttgggttgcatattagttgggaatataatgccatttgttctactatgagcaccttgttaatgttttcagctgcttttattgttgtccatattatgatgatttatttgtcttctgttatctgatagcattgaatgatgcactgaaagaagaaatccagcatctgaaggtgctgactgcccaacctatgccaaatggtggaccaatgatgaactttgcatcttttggagctagtcagcaatacatcccaaataatcatgctatgcaggctcttctaacggcccagcagttccagcaactacagattcagttgcaaaagcatcagcatcagttcccaccgcatcaactgcatcaacttcagcagcaacttcagctgcaacaagagcaccaacagcaatcagggngagatgagagttaagaggatccatgcctttncccaaccgaagagaggtccatcttcatcagatgtcagctcaacgcatcaaatg

SEQ ID NO: 24127 - DNA, 645 bp, Gossypium hirsutum
  unsure (1)..(645): unsure at all n locations
  Clone ID: LIB3543-014-Q1-K6-E3
cccacgccgtccgcccaccgcgtccgcccacgccgtccgcccacgccgtccggttnttaacttggaaaccgctttcgataaagatgtgggtggcgagagatcactattgagactatgttnttaacttcgagatcgttntctatataanatgtatctgtggcgaatagngcagtctgcttgcgaggtcaaagggaaagaaagatgcggtatatagcttgagcttgaacggaaaatacagacattgcaaacagaagcaacgtcgctcgctgctcagctgactctactacagaaagactccactggtatgagtgctgaaaatagtgagttgaaactgcggttacaaacaatggagcaacaggtttacttgcaagattcattgaatgatgcactgaaagaagaaatccagcatctgaaggtgctgactgcccaacctatgccaaatggtggaccaatgatgaactttgcatcttttggagctagtcagcaatacatcccaaataatcatgctatgcaggctcttctaacggcccagcagttccagcaactacagattcagttgcaaaagcatcagcatcagtttccaccgcatcaactgcatcaacttcagcagcaacttcagctgctccaggagcaccaacagcaatc

SEQ ID NO: 24128 - DNA, 1031 bp, Gossypium hirsutum
  Clone ID: GOSHI-09MAY01-C87578_1
ctttgtctgagttttatgagttgatcagtttcataattttgtatggttattgttggatgttgttttaggtttttattcataacatgaagcttaaaagtggatagagatcgaggatctgcataaacctatatatctggttacttatatatagagagagagttataaatacttacagcactgcttattctatttgtttcttttgagagaatttcttgaaaaaaaaaattgtctcttgggttgaatccaatatgatgatgattattttatatattcacccatgtatattaagcctagctaatcaagtatcaatttctttctcttttatgacttagttggtttttttttttttggttttttgtctttggattttttttcttttttggtttgtaaaaaaccaagatccatggccccccggtggcgacccccgcccgtccgcaagttcattgggtttatgtaagagaaagaatgatgaaaagctttatgttccaccaacagcaacagcaacagcaacagcaacagcaacaacaacaagttttggaagagaatatgtctaatttgacttcagcttctgcatctggtgaagccagtgtttcatctgggaatagaactgaagctggttctaattatcctcaacagtacttcaccactagtcaacaacctcaaactcagccagttaagagaaagagaaacctaccaggcaacccagacccagatgcagaagtgatcgctttgtcgccaaagacactcatggcgacaaatagattcgtgtgtgagatctgcaacaaagggttccaaagagaccagaaccttcagcttcatagaagagggcataatttgccatggaagttaaagcaaagaacaaacaaagaggtgaggaagaaggtgtatgtatgtccagaaacaaactgtgtgcaccatgatccgtcgagggcgctgggggacttgactggaatcaagaagcacttctcgaggaaacatggcgagaagaagtggaaatgtgaaaagtgttcgaagaagtatgcggttcaatc

SEQ ID NO: 24129 - DNA, 287 bp, Gossypium hirsutum
  Clone ID: GOSHI-09MAY01-C87718_1
ggcttgcgcgtaagttgccgcatgacaagagcgtgtacttgaagcctggtgaaagggtattgaattggacagctggcccttttggtgatctgaaaccttggtagctgttgtaacatcaaattcctaaaaccttccagcactctgctgatttgacctacctctgaacgttatcggggtttatccgtataagtgatccagagatacaaaaaatgtagaacataattcttccaaaatggtctttgttttgcagctttagcaatgcgattgttccttgtatgttatctcag

SEQ ID NO: 24130 - DNA, 334 bp, Gossypium hirsutum
  Clone ID: GOSHI-09MAY01-C87728_1
cgggtcgaccctgcgtccgcggacgcgtgggctggcaacctcgaacaagcggattttgcagggttttggggttccttttctttctttatattaaatgtttgtagttttatatcatctttgacgctcagttccctcgagttcgagagacaaagctagtaggcaattaagcttttaatactttttttcttttccaaaaatctaatgtttcatcattgtaatttacacatttctaggagacgtgaccatgcatttaggatttgaaattttgtagaatggagtagttaacaatgctgaacctttaattaattaatgaattcttatagtttatttggat

SEQ ID NO: 24131 - DNA, 827 bp, Gossypium hirsutum
  Clone ID: GOSHI-09MAY01-C87028_1
cggacgcgtggggaaaaggcaggtttttgctgctccgccagaagaaagggtctttcttcctcttccattaccaaggatcctcctgctactccttcctggttcactcccgagaggttattgattctattttgtgtaattaacatgataaattatgttgatcaaggagtaatagcgagtaatggtgtgaatgggagtattaggacttgtgatgacaagggaatttgcacatctggtagtggaattcagggggagtttgacttgactaactttcaagatggtctcttatcatctgcattcatggtcggacttcttgtggcgtccccaatatttgcctctttaacaaagagccaccatccttttaggcttattggagttggattatctgtttggaccttagctgcagctggatgtggtagtgcattttccttttggtttattgcaatatgccgcatgttggttggtgttggggaagcttccttcataagtcttgcagctccatttattgacgacagtgctcccgtttctcagaaaacagcctggcttgcgatgttttatatctgcatacctacaggaattgctgttggatatgtttatggtggatttgttgggagccagtttaactggcgctatgctttctggggagaggcattattaatgcttccattcgcggtttttggctttgcgtttgaaccattacagttgaaaggtatttgtttatatgcgtcgtctgcattccagagttttatgtcttattatctcacaacaatttaagtgttgaacatttgcattactgaactttaaataataagtttctgtcctgttggatc

SEQ ID NO: 24132 - DNA, 540 bp, Gossypium hirsutum
  Clone ID: GOSHI-09MAY01-C87348_1
ctttaaagccattcgcagacatttgaacaggcaaacaaaccctaagatttgctcccattcagccgacgctttcaacatcacaattgatggatggcaccgttagattcccccttcctaatcacctattcatcttcaccggatggtgctcgtcgagcccggagaaatctcagcccgaaatccctcctcaacttcgatttcagagaagaaaggagaagaaatccatggcctgctcgcactgaacagccgtacggaggagtgaggaaaggtgtgcgtgaaagaggccgtgcggggaaatcgttcatgggagccggaccccttggtactattctggcacgttccagaagcttctagtgctctcggctgttgagattccccttttgggttctgtatttgggctaggtttaggatatgggtttatgactttgggttagaattgtatttggctagtataggttctttatttgagcctgaaattttgtaaaaggacattgatgatggacttttattggtttttatcttaatttatttttgtttttgttt

SEQ ID NO: 24133 - DNA, 731 bp, Gossypium hirsutum
  Clone ID: GOSHI-09MAY01-C80548_1
aatattttgtaattggtggtgccacagccagcatggttggtatactgggagtattattcgaaagggcaactttgtaatttgaaagcaaaaggaaggctgttactataagccacagcagggttgatggttcttttctcatcccttttttcaatcgctccaagaaagagaaatttcttgaaagaaatcgaaagagaaatattctctgaggaagcgaaagaagaagaaagagcggaagcatctctctctgttttcgtagatcaaatgaagagctgtgagctctgtgatttggcggcaaggacgtattgtgaatcggaccaagcaagtttgtgctgggactgcgatgctaaagtgcacggagccaacttcctggtagcgagacacgtcaggtgtcttctctgtcacgcgtgccagtctctcactccgtggagagccgctggttcaaagcttggtcacacggtctccgtctgcgagagctgcgtcgacggcggcgatcgagaagacaccgaagcagaaaacgatgatgaggacggggaaggcaacgatggaggagctgtttccgatgatgatgtgcaggaggatgaagataatcaggtcgtgccgtggtctgcagttgcaaatacacctccgccggcttcaagttcatccagtagcgaaggaatccttttattgccgaaagaagagatctataaatcgacaaatttgtttccgttgaaaaggttgagagaaaatgg

SEQ ID NO: 24134 - DNA, 523 bp, Gossypium hirsutum
  Clone ID: GOSHI-09MAY01-C80538_1
gaggaaatgaggcctacaatgggcatggtagtaaagatgttagaaggagtggtggaagtgaccatccctccaccaccaaatctaatacaagcaatagttgcaggcgaatcggatcacggaattggaacaaattccggcatgtcaaaagtcgatggatgctccgactacaacgttgggttttcaagtgctggttcacgatcatctcttagtaacctctcttccccgttggaaccaaaattcggtgaagtctaatcgaatgataaatgtagttccatactagtaactcatgtatgggcttcaacaacattaaaattcccaaatttttgttcagtgaatcactaatttcaactttggggacattggcatatgattacaactttgacatcaaaataatgtgcaaatgacaccaccatcatcattgccaacacttgcattgcatcaccccccaccttttgcttttgctttacaaatgtagtgtaatgtcattggattctaaaagagtcattatctccttttttttgac

SEQ ID NO: 24135 - DNA, 661 bp, Gossypium hirsutum
  Clone ID: GOSHI-09MAY01-C80768_1
ccttatgcgacggcggttaacagttatggtacggaatcggtaatctcgttgcctgatcgggtatcgaatccggaatggacccggtttaaatattcgagctccagatatgcggttcgggacgcccgaatcattttggatagttataatttgaagttgcccaatgtgagatggtctgtgttgggtgacgacgatacagtgtttttcactcataacttagtttccggcttagcgaggtatgatcatcgtgaaatgtggtatattggcggaatatcagagagcgtagaacaaaacggaatgcatgcatacgacatggcgtttggcggtggcggtatagcggtgagttacccattggcggagaaattagtcaaagcattggacggttgtttgagcaggtacttttatttctacggttctgatcaacggatttgggcttgtatctacgagatcggggtcccactcactaaagaaccaggctttcatcagtttgatattagaggggatccgtatggactacttgcagcacatcccatggcaccattgctctcattccaccacgttgaagccttaacacccatgttccctaacaagacccggactgactcgttgaaagcccttatcgaaccgtaccggcttgacccgagccggatccttcagcaatata

SEQ ID NO: 24136 - DNA, 622 bp, Gossypium hirsutum
  Clone ID: GOSHI-09MAY01-C80108_1
gagctgatattgttggttaggtgagtagggtcgggcgtctcaggaccaagctaataattggccataatagtagctttactttattaaaataatttctttacaccaaattaatggtattaattttaatattctcaagtcatacctgatctgaatttgattatttgttttggataatggaagcgtttgcaattctgcatgcaaataatttttatattgtattattatcattgattttatagatttagaaatatatataatataatttcttatttcttaattcatcaattttttttattttaatttctcaaacagatataagtcataatcgttgtcaagtcaagatttatattgaatcaaactaatttaattagatacaattaatttatgaaaatttaatatttaatttaaatctaaaaaataaaataagaaacaatcaaaccaactggtttaacctgtggtccagtttctttaacattggcatttatgtcctttaatgtcgaacttctacatttatgtctttcattttgaatttttagatgatagtagtgtcaatcaattctttgtcccttgttatgctattagttcctttgttttgctttttctttctttctttttttgccaa

SEQ ID NO: 24137 - DNA, 492 bp, Gossypium hirsutum
  Clone ID: uC-gsflnu33B146f03b1
catgttcattatttattgaacaggtaaaaaaccaattattttttttccctttttcttaaattaaagaccatgccattaaggtaaatgcatattattgttaactattaattatattaactatttattttacattaaattaatgtttaaacataaaaaataaaataagaaacaatcaaaccaactggtttaacctgtggtccagtttctttaacattggtatttatgtcctttaatgtcgaatttctacatttatgtctttcattttgaatttttagatgatagtagtgtcaatgaattctttgtcccttgttatgctattagttcctttggttttcattttctttttttctttttttcccaaagccacttgtcccagttgtcatgtttttttatgcatttccttggctatggggttttgcttggtagttatgcagctttttattggaagctgaaactcatgcctgttttatgaatgcttacatgcatggcaag

SEQ ID NO: 24138 - DNA, 497 bp, Gossypium hirsutum
  Clone ID: LIB3585-049-P1-K1-H11
taagttccggctccacccacgcgtccgcaattatttttttcccctttttcttaaattaaagaccatgccattaatgtaaatgcttattattgttaactatgaagggtattaactatttattttacattaaattaatgtttaaatataaaaaataaaataagaaacaatcaaaccaactggtttaacctgtggtccagtttctttaacattggcatttatgtcctttaatgtctaacttatacatttatgtctttcattttgaatttttagatgatagtagtgtcaatcaattctttgtcccttgttatgctattagttcctttgttttgcattatctttttttctttttttgccaaacccacttgttcgaggtgtcatgtttttttatgcaactttaaatttaaagttgaactcatggaagaaattaagataaaaaacaactaacatatttgatcaggaaaattctttgccatgatctgatttattgtttacttgtt

SEQ ID NO: 24139 - DNA, 644 bp, Gossypium hirsutum
  Clone ID: GOSHI-09MAY01-C80098_1
cctacgcgtccggtgggtgattccaattttagagaaacttgacaaacttgatgtcaggaaattaagtggtggtggattgggtcatgtagaagagataactgagggaaacacgccagacttgctgaagaaggaagctgtcatcgttacagctccagaagagcaggaaagtaaaattcaggcagcaagggaacgttttcttgctcgcaagggaaagaaatgaggtcgggtattatgggttgacagatcagtgcagtgagagctgcttgattactcagtggacattccaattttcaaaattgttggtgggactgagaatcatgtgcgttttgattttccagttcccactatctattctatagcactttgctgatggcatgtgagctttatacattccttgatgcttatagaggaccttgttaaatgaggagtgtggccacgatatgcgttggtgcgaggcaagattacgctctttgttccttcagacaaatcaacaagagtttggatgtgaggcttgattaatctatataaccttataattcgaatatatcacttgcctccacagatgaaacttaatgagggataaaggctagcattgccctgaacttgtacccaaaggtcaaatttaccgttcttcctatatatag

SEQ ID NO: 24140 - DNA, 775 bp, Gossypium hirsutum
  Clone ID: GOSHI-09MAY01-C80328_1
gaaaatgaagagttatcagtctattcttattttgctgctgatgatattgccgcttcttttatccccaaatgcagtggagggaggcaagcgaaagattcacattaccgacgatctggacgacgtcgttgacgatgaagaagacgaagcctggaaagaatggggtaagaagaaaacttctcaagaattcgatccccccccttccgatttcgataagatggagctttcccagattcaggaggaaatcatgaagcgccataccggccctgcttttggcttcgttaagctccgcttggggattccccgggataagaacatggtagctgaaattgctctgaaatggacccaacttttgagaacgggagcgcttggggtgaaattcatgggcattgatttaggcacaatcatgttcaacgtggaagatgggcacaaagtattagagttgaaggagttcatactgagccaggaccaggcctacgaaatcaagattggggataaagtttatagaagagcaggagatccgccgatagaagtggtcgctgagaaacttcgccaatccaagaaaaacgaagagcatgtgaaagaagaactgtaattggctggaaattctattctaatcacttttttgtcacgttacttaaaagattaatttaattgcattgcattgcacgaccagcgagcatctgatgcattgactctgtaaagttaaagcctgcttgactcaattcataaacctctgcttgttatctggattattgataaaaaaaaaaaaaaaacc

SEQ ID NO: 24141 - DNA, 637 bp, Gossypium hirsutum
  Clone ID: AI055512.1
tgtctctgcttatgaatatatcttcatctgggatgaagacctgggagtggaacacttcaatgctgagagatacatagaacttgtcaagaagcatggtctggagatctcacaaccaggtttggagcccaataatggattgacatggcagatgacaaagaggagaggtgacagagaagttcacaagtaggctctgtctctctctctcaaccatatgaaacactgcaattgcttagcgattataagaaggaaccttttttttttttttgtcatctgaaattctctgcatttgaacttggttcacaggtttactgaagagaaaccaggctggtgtagtgatccgcatttgccaccatgtgctgcgtatgctttctgtctctttatctctcatattcacacatgtgtctttcaatgaaacactccaatgcacttcacttgtgagtttccttcaatcagatatcctccttttatcttggtgcatttaacattggttgctttgtttcagctttgtggaaattattgcgcccgtattttctcgggaagctggagatgtgtatgggatatgattcacgtaagtgcgggtaagaattctctgactttaccagattgtacatgcatggattgctgccttatggtgcca

SEQ ID NO: 24142 - DNA, 533 bp, Gossypium hirsutum
  Clone ID: LIB3585-053-P1-K1-D9
atttacagttggctttgatcagaggagtaatatagataaatgtgttaaaaagttttctgaggatttccaaattgttggtttttcattatgatggccggacaactgagtgggaccaatttgagtggtcaaagaatgcaatccatgttagtgtaaagaagcagacaaaatggtaagctttatagcgatcagaatggttaaagatctatgtatgtctggatccttctaattagagggaatttttaagaaagaataagcctttccctgttccttgcttccttgaattccagacgctgcctggttaggtggatgatagtttgctgctaatatatgtgtgtgtgtatattattaggtggtatgcgaaaaggtttttgcatccagatgttgtctctgcttatgaatatatcttcatctgggatgaagacctgggagtggaacacttcaatgctgagaggtttgtcctataaagcagcgacattattcacttgattacttaatttcaccatgtatatttttctttcttatcttctctgcaa

SEQ ID NO: 24143 - DNA, 643 bp, Gossypium hirsutum
  Clone ID: GOSHI-09MAY01-C81978_1
tctacgcgtccgtaaaaacaaaggtatatgcagatcaaaattcagagtaaaagatcgacgatgagcggcttttgctcggcgatggcaatgacggtgacggtcgtcttcttcttcttcttgttccttcagcaaactccattaatggcggtggcggcgaaactcgaagaagatcatttcatcattaagaataagccaacgctgtacgacttttcaagcagagatgagatggtgcatttggccggatacggcgaagagaagctctcgacagttctcgtcaccggaactgttctttgtgaagcttgccaccgccgccgccgccgccgcgatccacaacctcaacttcgttcatggcctatatcaggggctttggtgtctgttaaatgtgaaactccttgtaagaccaaatcaggtacaacaccagctacaaccgatgaatacggagatttcatgatcgatcttccgtcccacctccacggagttgccgatttgcaaaagatatgccccgttaaagtcatgggaattcccgaagagtcgatgtgccgacccgcgttcgtgaagaaacacgagcacctgaaaactttaatcggtcaggaccggaattcgtacctacacggccggaagggatcggttccaagacatcatg

SEQ ID NO: 24144 - DNA, 567 bp, Gossypium hirsutum
  Clone ID: GOSHI-09MAY01-C81498_1
ttgaaggctttgcagctcatttacagtagcaaacaaagcaaaaccaaagggggtttgattgccggaacggcgactaccaatgtctttcgcaattcacagttcaagaacacaatgaaagcaatgcagtcacagtgttgcagccctgatgaagtgatatttggtcctgatttccaccaatccttgtactgccatctcttgtgtgggctgattttccgcaaagaaattcagttcatttcatccaccttttcccatagcattgttcatgcttttcgaaccttcgagcaagtttgggaagagctttgtgctgacataagggaaggggtattgacaagccggatcaacgttcccttcggtccgatcagcgatggccaaattgctgaagccaaatcccgaactagctgatttgattcacaagaaatgcttgggactgaataactggtacggactgataccggagcttttccctaatgtgaaatacatctatgggatcatgactggttccatggagccttatctgaaaaagctgaggcattatgcaagggattgcctcttataagtgctgattat

SEQ ID NO: 24145 - DNA, 526 bp, Gossypium hirsutum
  Clone ID: GOSHI-09MAY01-C81738_2
gtgaagcagtggaatcagctcaacgttgtagtagacatctaatggaattatcatcattcctgttaggataatggtccgtattaagtcatctaagatctttcgagaggagttgagaaattgaaactgtttattcctattttattgttatgtgctgcatatcaatgaatcctctgtacttctcggctcattggcagtgcatcatgaagttcttggatctcaatttctcatcttatataggaatctctctgatgtattatgggaagcagtatctaccggccaagttctttccttataccagggcctaggcacaaaaaacctgcagtcattcattgcacaatttgtctacttctatggatatagctacttcaaaagactgtacctagaaaacagtggttccaagtctattggaacgaaagtaaacttgattcttgctgctggagcaggggcttgcactgctattgtcactcagcccctggatacagcctcctcaaggatgcagacaagtgcctttggaaaatcgaaagga

SEQ ID NO: 24146 - DNA, 581 bp, Gossypium hirsutum
  Clone ID: GOSHI-09MAY01-C81738_1
aaaaaagagaacagagataaagaatatttttaatatgggtgttgatttagagtcgatatcggaggcaacttcaggtgccataggatcactattaagcacaacgattttgtaccctcttgatacctgcaaaaccaagtatcaagccgaggttcaagcccatggtcaacgaaaatacaggaatctctctgatgtattatgggaagcggtatctaccggccaagttctttccttataccagggcctaggcacaaaaaacctgcagtcattcattgcacaatttgtctacttctatggatatagctacttcaaaagactgtacctagaaaacagtggttccaagtctattggaacgaaagtaaacttgattcttgccgctggagcaggggcctgcactgctattgtcactcagcccctggatacagcctcctcaaggatgcagacaagtgcctttggaagatacgaaaggactctggaaaaccctcaccgaaggcactttgagtgatgcatttgatggccttggcatctcgcttttgctgacctccaaccctgcaattcagtatacagtttttgatcaccggaca

SEQ ID NO: 24147 - DNA, 510 bp, Gossypium hirsutum
  Clone ID: GOSHI-09MAY01-C81648_1
atcggaattgattcatttaaaagcctcgtttaaagtttaagacaagcttttgctttattctctttgattcgaggaagtaagtcatggcgagtcgagtgaagcaagacgagagaaatgaacggataattcgaggtcttctaaaacaaccggagaatcgaagatgtattaactgcaatagtttgggacctcaatatgtttgcacaaacttctggacatttgtttgcaccacctgtggtggaatacaccgggaattcacacacagagttaaatcagtatcgatggctaaatttacttctcaagaagttactgctcttcaagaaggtggaaatcagcgcgcaagagaaatctatatgaaagaatgggatcctcagcgtaattctggtcctgacagcagtaatgttgagaggctccgggacttcattaagcatgtctacgaggatagaagatacactggagagagaaactatgacaagcctccacgaggaaagatgggtgataaggaagatgttt

SEQ ID NO: 24148 - DNA, 671 bp, Gossypium hirsutum
  Clone ID: GOSHI-09MAY01-C81188_1
cccacgcgtgcgcatggctctaacaatctctcctttttctatgccggatattcacaaaaacccgtcaaattttcaccacaaattgaagaacccttgtttatcttctattaaaacccaccaaatacaatccaaatcaggtctatttccaattttctgcacatcgaaacccagcaccaagaacctgaaaacatgcaagaattgcaaaacccaattcgacccattgctcaatcaccctcgagcatgccattttcacactgcccatttcggaggggaaacaaagaggaaatttgagagtgtatatgcagggggcaccatggatacacctgaatctggtaaagtatttcaatactggcattgttgtggctctgaagatccatttgatcctggatgtactgctgctcctcatgcttcttacgacgactaatgccggttcgccgctgtcttcaaagactgatgccgggtcggtttctttataaacatttaactttgtatgtatttattattggaagtacatttcattcacattttgtaggaaaaaaaaaccatgtgataatgcatctgtttattgtaggttcaagatgaactatgtgagatgttgagactctgttagtgtagttgttttttcagttttttatggttcattgaacagttgaaccaatgatttctttccg

SEQ ID NO: 24149 - DNA, 191 bp, Gossypium hirsutum
  Clone ID: GOSHI-09MAY01-C81098_1
gaaaagaacaagtaataccatttaacatgaaaacggaaacattgatgatcaaacaccgtttttgagatgaacaacaacgttttcatcaccataacctctttcttacatctgctcttcagtaatctaaagtcacaatgcagcatagagacagatgatgctcaattcatggattgttcgttgtattctgtctt

SEQ ID NO: 24150 - DNA, 696 bp, Gossypium hirsutum
  Clone ID: GOSHI-09MAY01-C81348_1
ggaccgagtccatgcctgccacacttaaagactcagcttcctcaacgtggctttccattgctgctaatactagaacggttttcatgatggagcaggcatccggagtcacccacagttttaatcccgattcgaagacctggtacggacccttcgatctccgtccggatcggagcatttacttttcggtgataacttgtgtccgggacaacttgattatgctgggtctgcttggagatgccgaggatgtaaactatgtaaaattgtgggagctaaacggggagtcgttagagtttggaaaagaaatcggggtgatgccgacggagttggtggagaagctgaaaggagagggaacaagcttgaattcaataagagtaagttgtatgggtggttttttctatatatataatcctggggagcctggggaattggtagcgttggaagttggggaagaagggtggtgtcggtggggaagtttgaagaatgcggcggtgagtgatcggagcagagtggcagaaagggtggtgcttacgtgctcagacgtggggttgggtgaaatagctaaattggtggggtcgggtaatggaatattcaccctccttaaacgttaattagtgggatttacttaatattttatctttgttcaccggggttttttatgcgtttcttgagtgtgcttaatttgatgtgatatttttt

SEQ ID NO: 24151 - DNA, 598 bp, Gossypium hirsutum
  Clone ID: GOSHI-09MAY01-C81318_1
gcgagtaagagaagacagtgaccctcaccgctcactctcttaggtctcggctcctcctcttcacgcaactctacctaccattcccatggcaaccaccgccgataaacccctcgctaccgcaaggaactccgcggctccatcctccgtcgccaattcatccgcagaaccgatctctaagaagaccgccgagcccgctctgccttccaccgataagttagatcctcctagctctgatacttctgcttctgaagtacctcttaaggagagcgagggttcgaagactggccggactgctgggggctccgcctctgggggtggcagcgctcccgttagcgacatccagaagaagattcgccgagctgagcggttcggcgtaccggtccagttgtctgagcaagagaagcgtaattctagggctgagaggttcggcactgggcccagcacgaatggatcagaagcatctaagcaatcggaggacttgaagaggaaagccagagcagagaggtttgggctttctgtacccactacggctgctgatgaggaggccaaaaagaaagcacgtcttgccagatttgcacaagattccaaacctgatacg

SEQ ID NO: 24152 - DNA, 715 bp, Gossypium hirsutum
  Clone ID: GOSHI-09MAY01-C82538_1
cttatggtttaagtgatcttatgaaccaagaaaagcttttggcttatttatccgagtgcagtagatcctcaacaatttctcttgctgacttcaaaataaatgaggcattgctgacagtagaaagtgatgccccaattcctctctgttctaaggttgatagtcctgtcagcatgcccttctggaaagatagtggggggacctctgattatcatcatcaggaatttttgagtttaggaaagtcagctgctcacgcacaatatgagttgggggagcattctgaattaagaaagtatgtgaaccttatctttaaaaaggtcgaggacttttggtcattggtcgagttaggctgcactactgaagcattcaagggtataagggcctgtaaggaagaagtggcatcatttaccgcagattccccaggatcttccggtgctgtagcatttactctgcagtatctccaagttataggaatgcttgctaaagtttggggacaccttaggccaacaaaaatgcttaatccttatggagtgggagaattagagcttctatttgcaaaattggacacgaggctcacggaaatcagtaataggtgcattggtttgtccccaggagaagagttgcaaatattggacctggtacttgtggcttgtcttttgagattgtccaaaatggagatttgctgttgcaatgcggcaatgaattattgttgtctaca

SEQ ID NO: 24153 - DNA, 752 bp, Gossypium hirsutum
  Clone ID: GOSHI-09MAY01-C83858_1
aatttgggcaactttgttgaaagcgatcatgagtctgcggcctcgcctacagacatgtcacttgacaaaagcacaacggattctaaagccctggtagctgtaccagcgatgagtgtggaggcgctagctgcggttcccgctcataggaaatccaagcgatctgaagttgcgcagcgaagaattcgtcgacctttctctatttctgaagttgaagccttggttcaggccgttgagaaacttggaactggaaggtggcgtgatgttaaactaagagcttttgataatgcgaagcatcgcacttatgttgatttgaaggataagtggaaaacactactgcacacggcaagaatatccccgcagcaaaggcggggagagccggtaccccaagaactcttggacagggttctaaacgcccacacctactggtctcagcagcaagccaagcagcagcagcagcagctgccagagagctgccttccccattataactctacaatgataggtagtggccgatgtgatgatgacgaaaatatcttaggttgattatgggtttaggttttttttttttaaatttcctgtatgtttattatgattatgtaaaaaataataggtatgacaaggatgaaatagaagtaccaagaaatctatgtaatattttatggtctgctctgagcttatgattattctcttgcaacaaagatatttggcccttctgtgaatggttgattaaataaaggcttgctgactgtatt

SEQ ID NO: 24154 - DNA, 532 bp, Gossypium hirsutum
  Clone ID: GOSHI-09MAY01-C83868_2
gtgcatggaagctttgtcaaagcatgcaaatataaaagcagtgattacttcaacaggtaggtattcttccgacactttcctctttcttgatcaatcaagcagcatatacatcgtacatgatgaacttgaccgtaagggtcttattaagtagttttgttgttagtaatataattaataggatgcgtatatgtattggttaaagtttggattgagttggagaaagagaacaaggagttctttgaggcatacacaaggggaagccatgagagagccactgaaatagagaaaagacaaaggattcagaggagtctccatgcttacataagggacaacaatggcaacgatcaactccactactaaatatcatcatattgttccaaactatttgggcttcctttttggtggtgaaagggtattggaaaagtaggcatgaaagttgaggcaatatcccttgcatgataccatggttgagtgtaaggttaccttgctatattcctaagcaataaactcactaaacaattttaattgcttc

SEQ ID NO: 24155 - DNA, 494 bp, Gossypium hirsutum
  Clone ID: uC-gsflnu33B026g12b1
ttttaaccctaagtacagttgagttgaaaagcttctctcttttaatactaattttagtttttgtttttatttatggctgactcatcatcatcatcttcttcttcttcttcatatattcacatggtgcaccgtcttatagaagagtgtttggtatttaagatgagcaaagaagagtgcatggaagctttgtcaaagcatgcaaatataaaaccagttattacttcaacagtaatataattaataggatgcgtatatgtattggttaaagtttggaatgagttggagaaagagaacaaggagttctttgaggcatacacaaggggaagccatgagagagccactgaaatagagaaaagacaaaggattcagaggagtctccatgcttacataagggacaacaatggcaacgatcaactccaccactaaatatcatcatattgttccaaactatttgtttttccttgcacatagttacaattattctggaataaacc

SEQ ID NO: 24156 - DNA, 614 bp, Gossypium hirsutum
  Clone ID: LIB3829-002-Q1-K6-D6
tgctcatttatcagtggttttctgtttatgagtccaacagtttatggtgctgatgttttcctttgtgagccttttgatggtgcatttgcttggaagggttttcttttcttatcaagttgtttagtgcacgagaagagattaattagttttatgttatgatgatcaaacaaatatttaataggctcccgcggaaacaatctaagtcaagtgacaatcgtgagggaggtggaacctctgcctcttcttcaaatgcttataccagttctagaaataatgcaaattctggtggtccagcctcttctggtgttagttctacaccaaatttagggctgaatcaagggaataaggtttctcaagtggtgaatacaaagctgaatggagatgtatttgcctcttcatttgtgacattgcctagttttaaagatattccgaattccgagaagcagaacttgtttatccgaaagctgaacctgtgtcgtgtcgtgtttgacttcagtgacccaacaaaaaacctcaaagaaaaggatatcaagcgacaaactttgctagagcttgtagattatgtttcatctgctaatgggaaattctcagagattgttatgcaggaattcgta

SEQ ID NO: 24157 - DNA, 511 bp, Gossypium hirsutum
  Clone ID: LIB3585-040-P1-K1-C10
accaaacatacgaccacgcgttctcccacgcttaccaacacactttctaacacgcttccggccattcgttctatttaaaaagagcagtcaacacgaacataaaaacctttgcctcttcttcaaatgcttataccagttcaagaaataatgcaaattctggcggtccatcctcttctggtgttagttctacgccaaatttacgtctaaatcaatggaataaggtttctcaagtaatcaatacaaagctgaatgcagatgtattgacctcttcatttgagacattgtctaaatataaagatattcctaattccgagaagcagaacttgtttatccagaacctgaacctgtgtcgtgtcttgtttgacttcagtgacccaacaaaaaacctcaaacaaaaggatatcaagcgacaaactttgctacagcttgtagattatgtttcatctgataatgcgaaattcccagaaattgttatgcaggaattcattaagacggtgtctcttaatttttt

SEQ ID NO: 24158 - DNA, 640 bp, Gossypium hirsutum
  Clone ID: LIB3543-047-Q6-K6-H3
cccagcgtccgctaagtgtttgagtggatatcgcgatatgggtagtggatacacctgattttagctattcctaattgtacagatacgttgataacttcaaaaggaaatttgctgagcaggagttcaatgccataaaaaggcgatacagtgggcaacatgggcagacatatacatgtgttgtcacggtcaggaaggaggagagaaatgtcaagcgcacggtgctgaaaagtgtggtcggaacccttgatttcagcattcggcatttgttgcatggagagtcttttcccggggaacgtgaaaagcatctgttctgcagcatcagcagaactaacctgaatagatatatttatgtttccaacctatgtgtagcaaaatcagcccgtcgacaaagcattgctagcaatatgttgtattttgttattgaatcagcgagatcagaaggtgtggaactggtttatgtgcatgttcatagaaacaatgaacctgctcttgaactgtaccaaaagattggttttgagatggttgaaatggcaagctctcagttgttaaaacagcagatgtacttgctttgttataagacataaaattcctgttgaaacacaaaccccagggttccttctttttctttttttgaatgaaa

SEQ ID NO: 24159 - DNA, 314 bp, Gossypium hirsutum
  Clone ID: LIB3584-043-P1-K1-E7
gcgcttgcaggaacgtgaaaagcatctgttctgcaccatcaacagaactaacctgaatagatatatttatgtttcgggcgtatgtgtaacaaagtcaggccgtcgacaaatcattgctagcaatatggtggattttgttattgaatcagcgagatcagaaggtaaaatcacaaacttgtcctttagaatcacataatctgatccaaatcactgggaaaactccccttctaagttggtcatttgattgcaggtgtggaactggttcatgtgcatgttcatagaaccaatgaacctgctcttgaactgtaccaaaa

SEQ ID NO: 24160 - DNA, 587 bp, Gossypium hirsutum
  unsure (1)..(587): unsure at all n locations
  Clone ID: AW186684.1
aatttttttttttgaataatcaggaaaaacccaaggagtagaaaatggagaatgtggaggaatcgacgaatgaaatggaagaagaagtagggaaggtgatggagcaagccagagagttgcaagaagcaggcgcgggcctcatatccatgatatccaacgacgagcaatctcttcgcctaaaggcgaattctctcgattcctctattcgccacctccgttcctccattactaccgttctctctcagaagcttttggatcccaaacttgcagacaagctggaagaggatttacagacagcgatatgtattataaccgatggagacgctgctggttttcttcctgccaatgctcagggttggtatctaaggatgtttctgggaccaatcagtgttcgtgcatctcgcaaagagatccagttgaaagctagcgaagaattatatacctacagagataggactgcccttatgtttattctttttccattaattttgcttatnttacgatcgtggatatggggaagatgcttgcctgcatttccatttcanttgtaccaggcatggttgttgttccttaacactggtttggct

SEQ ID NO: 24161 - DNA, 482 bp, Gossypium hirsutum
  Clone ID: LIB3584-044-P1-K1-H10
cccacgcgtccgcccacgcgtccgcccacgcgtccgcggacgcgtgggcgacgagcaatctcttcgcctaaaggcgaattctctcgattcctctattcgccacctccgttcctccattactaccgttctctctcagaagcttttggatcccaaacttgcagacaagctggaagaggatttacagacagcgatatgtattataaccgatggagacgctgctggttttcttcctgccaatgctcagggttggtatctaaggatgtttctgggaccaatcagtgttcgtgcatctcgcaaagagatccagttgaaagctaaggaggaatataatagctacagagataggactgccttaatgtttattctttttccattaattttgcttattttacgatcgtggatatggggaggatgcttgcctgcatttccagttcagttgtacgaggcatggttgttgttccttaacactggtttggctttgc

SEQ ID NO: 24162 - DNA, 420 bp, Gossypium hirsutum
  Clone ID: GOSHI-09MAY01-C119447_1
ttggtttgacgcttgcagattcgattcttgcgggctgttttttaataaaaccaaagaagcatcaaatgtcaccaatgtaaagagccaaccagaagtatgatctgatcagcggtgtatgatgtagcagctgcgtatgcaccatccgcccaccctatgttattcggattaggatgtaagtttcaaatataaatgttcgaagttatttcatgtatctggaagtttttaccttggtattcatatcaatatttgtggtgtgtaagaccaatcaagctctattttcttttgttttgctcttgcaagttgtaatcaacttaagtgcttatgatgatgcatagcttccgtatgaaataattgtgtatatagctcttaataggcttttcccccgcctcatgagagtgattattaaggggcttttattta

SEQ ID NO: 24163 - DNA, 226 bp, Gossypium hirsutum
  Clone ID: GOSHI-09MAY01-C119747_1
ggtatctcaaaataacagcaaatgtgacttgtaggctgtaccagctttatggatagctgattagcagcaatagcagatattttcatttatctgtgttcaattaaaggagttccataaaggctggaacgattgtttgaagcattagcagattttaactccttggatgcatgttcatcctgtaattttaacagatagctgattacgagcaagtaccagattttttttc

SEQ ID NO: 24164 - DNA, 480 bp, Gossypium hirsutum
  Clone ID: GOSHI-09MAY01-C119267_1
tcgtttagatcgcaaatcggctcgcctttctgtttaaatgcttacccttttctagcctacatgtctaataaagaccaaattgatattaattatgctctcttcctaccaacgaaaggagcagatgatccaaaaactaagttgcattatgataacttgcttgatgctcagattgatgcagcctatgctgcattagaagatgccggatatggaaagatggaagtcattgtcacagagaccgggtgggcttcacatggtgatgagaatgaagctgcggcaaccgcaaacaatgcaaggacttataattacaatttgcggaaaaggcttgcaaagatgaaaggaactccactcaggccaaaaagtgtgcttaaggtttatgtttttgcaatctttaatgaaaatttgaagcctgggccaacgtctgagaggaattttggattggttaaacctgatggaagcatctcatatgacatcgggtttcac

SEQ ID NO: 24165 - DNA, 414 bp, Gossypium hirsutum
  Clone ID: GOSHI-09MAY01-C115857_1
tccccgcgtccgcccacgcgtccgcccacgcgtccggaatttctaatccttatctgctaatggcttcttcacatcatttctgatttcttcttgcttgcttctttccttttagtattttctttcttgcctctttttttactctctctgacagtcatctgtatccccaaagcaaaaaaataaaataaaaatggaagcaattggtactggtgctgctgccaatgtctcttccgaggctgccaaaggtattttccaccaagttaaacgtcatattagatatgtagtcttctaccagaaaattgttgacaagttcgagcagaaacacgggacgttgattgcaaaaagaacaaagtgtgcaacaagatgttgatgttgcagaaaggaacggggagaagattaaagccgatgtcctggatt

SEQ ID NO: 24166 - DNA, 481 bp, Gossypium hirsutum
  Clone ID: GOSHI-09MAY01-C115727_1
gttccctatcgagccagcaccatggagatatgcaaatggaagtcgaggtactcagaaacaacctcttaaacatgtaaaggttccacccaagcctccgaattgttccccttcggtttatagtgagatcgagaaaagattgaaagatctcgaatttagacactcgggaaaggatctcagagctcttaaacagatacttgaagcaatgcaagcaaagggactacttgagactgggaaagaagaacaagctgcgaacttggtgtctcaaagagactatgaaccgaaatgcacgagccccggtcagcatctgagaggtcagcgaagccaacggggttcggattctattggaacatatgaatcacctattgtgatcatgaaaccagcaaaacttgttgagcaagttagtatgcatgcttcaactgtagttcccatagttgacatctcaagtcttccgaagattcagaatggggcatctgtagataat

SEQ ID NO: 24167 - DNA, 700 bp, Gossypium hirsutum
  Clone ID: GOSHI-09MAY01-C115367_1
cttgtttctatctgtatataaccaagggaattagacacccgttcagttgaaagagttcagctgaacaccccaaagatggccaaccacaccgttacctttctccctaaactatccattgaagctattcagacagtgactccgatgaggataactgaaccacgacagacacgacaagtattggcaggggagcttgtaggacctgggattttccaaaggtgtttgaacgtggtccagtattacatgaaggagaaagaagaagactctggttggttattggctgggtggatcaaggaaacacttgggagagctttacatgagcaaccaatgatttctggtcgtcttcggaaaggggaacgaaacgatggagaattggagattgtttccaatgattgcggcattagactcattgaggcaaggattcagatgaatttgtcggattttcttgatttgaaacaaagggaagatgctgaagctcagcttgttttctggaaagatattgatgagcaaaacccacagttctcccccctcttttatgttcaggttactaatttccagtgtggtggatattcaattgggattagctgcagtattcttctggcagatcttttgttaatgaaagagttccttaagacatgggcagatattcacaacaaggttattatcaacaaaaacgatgaacaaaagcttcctttattctacg

SEQ ID NO: 24168 - DNA, 477 bp, Gossypium hirsutum
  Clone ID: GOSHI-09MAY01-C116727_1
tcttcttcttcttcttcttccagtgctcgtcaacaatggctatctctttgctttccaagttctccactcaaaccctactcattgcgtccattttcgtagtttcagctctgggtcacgatttctccatcgtgggctattcgccggaagatttgggttctgccgataaactcatcgagctcttcgagtcatggatatcgaagcacggaaaaatctacgagtccatcgaggagaagctaatgaggttcgaggtttttaaggataatcttaaacacatcgataagaggaacaaggcaatcagtagctactggctggggttgaatgagttcgctgatttgagtcatgacgagttcaagaaaatgtatttgggactcagaccagatgttagacgaagatcccagtcgactaaagactttagttatggcgatgtggctgagctgcccaaatcccgtgattggcgaaagaaaggagctgtcactc

SEQ ID NO: 24169 - DNA, 726 bp, Gossypium hirsutum
  Clone ID: GOSHI-09MAY01-C116247_1
tgtttattttgtgaaagctgagaaatagggggggaaagatggtgaagctgactacgattgcccgtgttactgatggtcttcctctggcggagggactagatgatggtcgtgatctggtagatgctgaaatgtacaaacagcaagttaaggctttatttaagaatctctccaaaggccataatgaggcttcaaggatgtctattgaaaccggcccatatgtattccactatatcattgaaggacgtgtttgttacttgacaatgtgcgaccgatcttatcctaagaaacttgcctttcaatatctggaagacctcaagaatgaatttgagcgtgttaatggagctcaaattgaaacggctgccaggccttacgcctttataaaatttgacacattcatacagaagacaaaaaagttgtaccaggacacccgtactcaacggaatattgcaaagttgaatgacgaactctatgaagttcaccaaataatgactcgcaatgtacaagaagttctcggtgttggtgaaaagttggaccaggtcagccaaatgtccagtcgtttgacatcagaatctcgcatatatgctgacaaggcaagagatttaaatagacaggctttgattcgaaagtgggctcctggcgccattgtgttggcagttgtgttcctcctcttctgggtgaaagcagcgttatggcgattcaactgtgatccatagtgataagaactca

SEQ ID NO: 24170 - DNA, 630 bp, Gossypium hirsutum
  Clone ID: AI055627.1
ataatgaagcttcaaggatgtctgtcgagactggtccttatgtattccagtatccttgtcctggtgtctattttttggatgccatattttttgaattatgaaataggtttatactttatggtctattgagggaaagaaataagttctgttgtatgtttttctcagtacgatttgcaggtgcatctgaattataccattatggtgttaccttgacctaagttcatagctatatcattgaaggtcgtgtttgttacttgacaatgtgcgaccgttcttattctaagaaacttgcttttcaatatctggaagacctcaagaatgaatttgaacgtgttaatggagcttaaattggaacttgattcctagccttatggcattatttaattttgttcctttttttccgtaattcattaaaatttttctcagtaaccccgtccttaatcgaatttttctaaatttgtacgatgaactttacgaagattcacctataatgacctccattgtgctataagttctaggtgtttctgaaaaatttatccgttataaatacctttactttatgaatacttatggcttttatacgattagtttagtatttcttggacttacttgattatgtctctgtgaacg

SEQ ID NO: 24171 - DNA, 686 bp, Gossypium hirsutum
  Clone ID: GOSHI-09MAY01-C110967_1
gcgccgccggcgattggtggctccgcgtcggcgtcgactattaagcaagtgaagttagagagagaaagcgagctgagaatcgaggtgtgtaatgaaacgccgcttaaacttcgattacttaacggctcagccgagattttcgggtccgaattggcccctgagatgtggcttactttcccccctcgcctcaaattcgctgttttcacttggtatggtgctacaattgagatggatggtgctactgaaactgattatacggcagatgagacacctatggtcagttacgtgaatgtacatgctgtactcgaaggacgaagaaaccgtgctaaagctttgtcaccaaatgactctgaggcatcccagggacccagagtgattgttgtggggcctactgattctgggaagagcaccttatcaaggatgcttcttagttgggcagctaaacaaggttggaaacctacctttgtggatttagatataggccaagggtctataacagttcctggatgtatcgctgctacacctattgaactgcccattgatcctgtggaaggaattcctcttgagatgcctcttgtttatttttacggccctacaactccttgcaataatgtctatttatataagacactcgtgaatgagctggcttaaatgctggagactctatttgcttgtaatgctgagtc

SEQ ID NO: 24172 - DNA, 475 bp, Gossypium hirsutum
  Clone ID: GOSHI-09MAY01-C110867_1
cataggaggtgctcttaggaatgttcctattggaggtggatgtaggaaaaacaagaactctactactactactactactgctgcttctgtttcaacatctatgggaaaatcaagtgctgctaagatgaaaactgctagtgtctgatattggaagaactggtcttggaaatgggtcccatcatgaccttcaatctagtccaatcctttgggcttcacctcagagttctcatcttctagccttattgagaactaccccaacccctaacgctaacactttgtccactaataatcctgttagtattaaggaagaggtgagcttgcttggatcgcatgcaatgaacgagccagctgttgcaaatgctgcgttaaatgctcgaaccctaggtttggatccccttagccaggtcccttctctaggactttgcagccctttttggaaaaacaatcaacaccaagctcaacagcaacatcagag

SEQ ID NO: 24173 - DNA, 546 bp, Gossypium hirsutum
  Clone ID: GOSHI-09MAY01-C110527_1
tgttgtgttgactaatactagtgtttccggtacggggtatattgacggtcattttgctgtttatcaaatagatagagttcttcagcctttacagatattcgatcctagacctccggcaccagcgcctgctccggcgaaatcgaagaagaagaaagatgatgatgtggctgatagtcctgctgatgattctactgataattctaaagctgtgaggttcactatgggaaacaatgttggtttatttggggttactgccatagtacttattgcattaatttctttgtgattatagtaaaataaaaattttaaatatgggattttgaggggaaaaatatggtgagattgagtgcatgtttttttgtttttgtttttttttatattttgcgtttttaaaaaaaatattattatcctttaaatttcctgctttttaccatatttttatcatataaatagtactgtcacaagagctaattgttaactaagtgatcactgacgatgagatcacggctcaaattaaattttgaggttgttgagtggtatgatgtt

SEQ ID NO: 24174 - DNA, 624 bp, Gossypium hirsutum
  Clone ID: GOSHI-09MAY01-C110177_1
gaaaattttttcattgctaatgataccatgaattccctgtacaactgatgttttcactgatttattactataaatcatgatccattgctcttcattttcccctcttttctctgtttttcagtgatgatttcttggatcattttccttcaaaacctgggtttgatttgattgatcaagttcttcaacaaaaacccatcaacgaattcctttcgcttccttgtttatttttgagttttcgtcgagtcttggagcatgggaaaaagcaatagtagcagagattggactcagatctatgccatttacggcatggatcagtggcaaacactgcttttccttttgtgtcacgctgttttcttctcattactgtctattatcttccttttctacttcggttccatcttccacttcttccaaactttatttcccagccccagcaccgctcgtttcgcgcccgggttcagcggcgccgtcacctcgattcttctgttgcttgttcttcgctgcgccaactttgtactccgctgcccgttgcatacgaaatgcgcagcgatggtggggtcgttatgatggtcgtcgtgaagctgcgctgacattgatgcgcagaggattctctcactcgtggca

SEQ ID NO: 24175 - DNA, 305 bp, Gossypium hirsutum
  unsure (1)..(305): unsure at all n locations
  Clone ID: uC-gsronu33B007b03b1
cccacgcgtccggagatattgattcatggatcctatttcagagatgggaaaaaatgtgctcgtgaggatttctttttcatgttctgggagaatataccgtaccatctcatgagctcatgacattccattgcaattaaagtgtttcctcatagcattaggtctagaattctgtttcaatgtaaattacttggagaagggatccaatgttcttaaaggctatgttttatctttgttatatacccagataatatcaatgttattattttgttatgcatctgctattgctgagcagcattagctgatng

SEQ ID NO: 24176 - DNA, 296 bp, Gossypium hirsutum
  Clone ID: uC-gsronu33B007b08b1
tgctgccgctcgcgatggatttcttatgcagaagggactcgattaacttgatggagctgtgagagatccctataaatcgtctggtagaatataccgtaccatcttatgagctcatgacattccattgcaattaaagtgtttcctcatagcattaggtctagaattctgttttaaagtaaattacttggagaagggatccaatgttctttaaggctatgtattatctttgttatatacccagataatatcaatgttatttattttggtatgcatctgctattgctgagcagcattag

SEQ ID NO: 24177 - DNA, 726 bp, Gossypium hirsutum
  Clone ID: GOSHI-09MAY01-C110067_1
ccttcgcgtccgcccacgcgtccgcggtgcccgaaataacttttcggcacttaacggaaaatgacgaatttgttgtcttggctacagatgggatatgggatgtcctttcaaatgaagaagcagtagagattatagcatctgccccagctcgttcctctgcggctcgagcattagttgaggtagcaatccgagcttggagatataaatacccaacttcaaaagtcgatgattgtgctgttgtttgcctcttcctcgattctaattcgaaccatttgtcgaccgcttctaacggcaataccgaagtgcagccaacttcgaaggaccaactcgacaatgacatcgaggaaaacaataatctcgatgtattgacccctctcaaccagtgccgggatcaccagaacagaagaagaaacatccctagaagggaacgaagatccctcgatgctggagaatatgaattcggacatgggaatatattggtctgccctcgaaggggtgtctcgtgtcaatacgctcgttaatctcccgaggtttattccggaaaaggaggagaaggctgggaagtaagaaggtaccttgcttttcccttggattaaaatttttgtaactctttttttccatgcattttagtgcgggtagaattggaaattcctgtttatcccgctctatattatattttatctctttctcttaactctttatcatcttcaccaccacatggcttat

SEQ ID NO: 24178 - DNA, 423 bp, Gossypium hirsutum
  Clone ID: GOSHI-09MAY01-C111957_1
tcgttcacgcgtccgtatcaccccaccaacgaatccataacgaaaagaaaaaccacagaagttgaatggcttgtattgcggtcggtgacacgattcccgatggtactctctcatatgctgatgaggcccatcagattctaaacgtgtccgtacactcccttgctgccgctaaacaggtcattctctgtggagttcccggtgcttttacccccacatgcatgcttgaaacatgtgccaggtttcattgacaaggcagaggagctcaagtcaaaaggcattagtgagattatcgccatcagtgttaatgacccatatgtgatgagggtctgtgggcagtcattttccgaaaacaagtacgtaaagttattttccttattactcatagtgccttcctttaaaacccttatgttttttaactttatt

SEQ ID NO: 24179 - DNA, 454 bp, Gossypium hirsutum
  Clone ID: GOSHI-09MAY01-C111587_1
taatgcttttaaggtcacctacataaatccaagtaaacctcaccaaaatgcaaattcctgccaagtttgatttagaccttgtcttctttcactcttttttttttcccaattttcattcaattatcttggtttgtttcctttaaagtcattcctcattaaagtagagtctttgatcattattactaagtaattgcgtcatagatttttttttcttacgaccttaatttccaggacggttttattattttgaaggagatgaacccatcaaacgcactacctcagacatcacctccatcagatgcggtggacacgtcacccctcctgacccattccatatccgaccaccttctccgcagccgccgcatcctccgtcgtcgacctccacctttgcctggcacagccgctaggctcctccgacgcgtcagcagatcgtcgtttgatgcttcgtgagcca

SEQ ID NO: 24180 - DNA, 525 bp, Gossypium hirsutum
  Clone ID: GOSHI-09MAY01-C111547_1
tcctctcgtccgcccacgcgtccggaaaatatgggcaaaaagtggtcaaagggaacccatatccaaggagctactacaagtgtacacatccgggatgtccggtgagaaagcacgtcgaaagagcatcccacgatcttaaggcggtgatcacaacctacgaagggaagcacaaccatgacgtcccagcagctcgtggcagtggcagccattccgtcaacagacctctactcgacaacaacaataacattggggcaatgacacttaggccatctccacttaacaatcccatgagcaacaaccaagctcttcggggtttgaggcaatcgacaaccgaaggtgaatcccctttcatgctagaaatgtttcaaggcaacggaaacttgggattctcgggtttcgggaactcgggagggtcaattatgaatcaacatgatgtaaacaacatgttttcaagaaccaaggaagaaccaagagatgaagccttcattgagtccttgctatattgaaattaaaatctacaaaagg

SEQ ID NO: 24181 - DNA, 531 bp, Gossypium hirsutum
  Clone ID: GOSHI-09MAY01-C111447_1
ccctcgcgtccgcccacgcgtccgcgatcctcccttaggttcaggtgatggaggttctgaacagaaaactgagaggcctttagaggaggaacctatgcttgcagctagaatcaccattgaagacggtctgtctcttcttcttgatgtagatgatattgaccggctcatacaatttagtcaaccccaggatggtgggatccagctcagacggaggcggcagatcctgcttgaaggtatggcagcatcactgcagcttgttgatccacttagcaaaggtgcgcatgcagttaaatgtgttgccaaagacgacattgtgttcctaagattagtctctcttgcaaagggccgtaagctggtcaccaggttccttcagcttcttatccctggaagtgagcttgttcgagtagtgtgcatggcaattttccgtcacttgagactcttgttgggggggctttcttctgaactggaagcagctgagacaactactaaatttgcaaagactgtttctacatgtgttaatgggatggatct

SEQ ID NO: 24182 - DNA, 542 bp, Gossypium hirsutum
  Clone ID: GOSHI-09MAY01-C111727_1
tccacgcgtccgcccacgcgtccgcccacgcgtccgcccacgcgcccgctccatttctgtctcaacggcgctcgtcttcctcgtccgctcagatcaagcctcgtcaactcgtactctaacttttcagcggtccggtcaagcgccgactcggccatggcagcactcaactcagtccgagtagccgcggttcagatgacctccgtcaacgatctcgcctccaatttctccacttgttctcgcctcgtcaaagaagcagcttcagctggggcaaaaatgatttgtttccctgaaaggtttctcctttctgggtcccaagtctgaggatagtcttttggttgcggaaggctttagatggaccaattatgcacaaattctgctctttagcaagagaatatagcatttggttgtcccttggagggttccaagagaaaggacatgatgcacacttgcgaaacacgcatgttatagttgatgatgctggcaacattagaagcacttaccgtaagatacactttgttgatgtggatgttcctgtaggatca

SEQ ID NO: 24183 - DNA, 434 bp, Gossypium hirsutum
  Clone ID: uC-gsronu33B078h12b1
tcgttttctaaaaaaaaaaaaaaaatctatgttaaatggctgtctccatttctgtctcatcggcgctcgtcttcctcgtccgctcagatcaagcctcgtcaactcgtactctaacttttcagcggtccggtcaagcgccgactcagccatggcagcactcaactcagtccgagtagccgcggttcagatgacctccgtcaacgatctcgcctccaatttctccacttgttctcgcctcgtcaaagaagcagcttcagctggggcaaaaatgatttgtttccctgaaagtttctcctttctgggtcccaagtctgaggatagtcttttggttgcagaagctttagatggaccaattatgcaaaaatattgctctttagcaagagaatatagcatttggttgtcccttggaggtttccaagagaaaggacatgatg

SEQ ID NO: 24184 - DNA, 550 bp, Gossypium hirsutum
  Clone ID: GOSHI-09MAY01-C112547_1
ccctcgcgtccgttagcttctggtttcttcttctcaaactcttttcttggggggtgggtttaattattaactcaaaggaggaggagagacgatgagaatggaatcactcggaaaatcatttgaaggccaagttttgaagaaagattttaaatttacattcgagtcatggcctatataaaaaatttgcagcaaattaagaagaaggtgatgatgctgatgacgacttcgaggaattattaacctcctaggcaagtctaatgcttggctttttatcctccttttttttattttctttttcttttttggggtttttatcatgtttggttgctgagaaaatggaggaggatagatactatatgaataagatttcaaggctatgtatgtctttcagtaaccaaacagctcttcttctttttcttgatttggagttcttggatgctccgacactgtaagagaaagctttgtgaattgtgaagacattaaattacttttaactcaaataaacccttcttttataatataactaattattttacttatctcataattg

SEQ ID NO: 24185 - DNA, 529 bp, Gossypium hirsutum
  Clone ID: GOSHI-09MAY01-C112687_2
tgcatgttcgagtgcgtcccaaaggctgacgctgctgtctttatgtgggtgttgcatgactggggtgatgaggaatgcatacaaatcctaaagaaatgtagagaagccatcccacaagacaaagggaaggtcataattgttgaatctgtgcttgaagaagatgaaaatgacaagctagaatttgtggggttgatgttggacatggtgatgatgacacatacgaacaaaggcaaagaaaggaccttaaaggaatggacgtatgttcttggacaggctggattcaccagaatcgatgtaaaacccattcatgctgttcaatctgtcattgaagcttatatttagaaattccaccttgcctgctttctttcaactttgtgttaataaatggcttcttttactattaaaccttaaatcctgtcgggtcttttattggccaaaccatatgagatctgttgtgggaaagatgtaattttctttttccatctgtttattattagtttggcttgcaaaaaaaaaaaaaaaaaataat

SEQ ID NO: 24186 - DNA, 692 bp, Gossypium hirsutum
  Clone ID: GOSHI-09MAY01-C112687_1
tggtgctatgcagaggagaaccctggacatagcagactctatagacgaagcaatggcttgcgatgctagagtggcggtgcgtgccttaatcgaaggatgtcctcgagtgtttgatggcattaaaagtttggttgatgttggtggaggcaatgggactgctttatctatgatggtaaaggcattcccttggatgcatggcatcaacttcgatcttccccatgttgttgccggtgccccgaaagtcgatggcattgaatacgtaggaggagacatgttcgagtgtgtcccaaaggcagacgctgctttctttttgtgggtgttgcatgactgggatgatgaggaatgcatacaaatcctaaagaaatgtagagaagccatcccacaagacaaagggaaggtcataatcggtgaagctgtgcttgaagaagatgaaaatgacaagctagaatttgtggggttgatgttagacatggtgatgatggcacattactaacaaaggcaatgtaaggatcctttaaggaatggaagtatgttcttggagaggctggattcaccagaatcaatgtaaaacccattcatgctgttcaatttatcattgaagcttatatttagaaattccaccttgcctgctttctttaaaaaaaaaaaaaaaaaaaaaaaaaaaaaaaaaaaaaaaaaaaaaaaaaaaaaca

SEQ ID NO: 24187 - DNA, 568 bp, Gossypium hirsutum
  Clone ID: GOSHI-09MAY01-C112657_1
tattatgaattttaaattgtttccgaacctctcaatgtcattccatagttccatcaatcggactacggctccgattcggtcatatctcttctctttgaagcggcgaaagccgcttagcttgtttgaaaacgaagcataaacgtttgttcgtaacactaatacggaaaatatacatcgaattacttacgatggaagctgatcctggtcttataatgggtcactataaccgaatgagcttcctagattcagattcgaagcttgatgaagcgagattttgatggtgtgagtttgagatgatttgtatatatcgatacactcctccccgtcggcatcgcacgtcaaccccccccattcgttgtcgtcgtccaaggccttgagatggtttctgtcgacatcttcaatattgaaatgcttcgcgatctctcgttgcaagtctataaagccccaattcggttgcaaaccgaacagtaacttgacttgtccgaacatagcttttactctcaagtcacccctggtttgattgtgaagtagcttcatctcgtggtgatttgaggcgtgcaatttggca

SEQ ID NO: 24188 - DNA, 600 bp, Gossypium hirsutum
  Clone ID: GOSHI-09MAY01-C113067_1
ttcacgcgtccgggtttttgagagctgaggaaacatgggaggttgcgctaccaaacctaaggttttaaagggtgatgagatgccttctccggttgcaccatctcctgagccggcgaaacaacatgttcaggtcgctgatgatgagggaaagaaggtggaagctgagattgttaaggccaaggatgttgacgagacaaaggaggttgttattgttaatgatgcgaagcttgatgatcaagccaacgatcctcaatctggtagtaacttattgaatgagaatgaaaagaagggggtagctgagactgagagtgatagcaacacaccatcagagccaacgaaaaccgaatcagtagaggcagtgaaacaagaatcaatggagaccgagcctccgtctattggaggcaaagcagcaacagtggctgtcggtgagacacaaaatagggaaacagcagcagcagctgaaggttgaggaaaggaagactgaagtaacaaagtgaagttatgggaacaattatgttcgaagaaaagaaaaaaacagatttgatgtttttctcctacgatgtgagattaaatactgtggtggagagaatgttgtagaac

SEQ ID NO: 24189 - DNA, 538 bp, Gossypium hirsutum
  Clone ID: GOSHI-09MAY01-C113227_1
cgtactcgtgggggcaactccggtgaaagtgcatggccccccattgtctactgctgtgtctagggtcttagcttgtctcattgagaaagatgttcaattccagcttattcccgttaacatgtccaagggcgagcacaaaagtcctgatttcctcaagatccagccctttggtcaagtaccggcatttcaagacgaaagcacctccctgtttgagtcacgggcgatttgtaggtatgtatgtgaaaagtatgcagagaaggggaacaagggattgtatgggagcaacccgttggcgaaagcttcaatagatcaatggttggaggcagaagggcagagctttaaccccccaagctcagttctggtattccaacttgcatttgcaccccgaatgaagattaagcaagaccaatccttgatcaaccaaaaccacgataagctggctaaagcgctggaggtgtacgagaaaaggctaggagaaagtcgtcttggcccgggatgagttttcattggcagatctttcccacttgcctaacacaca

SEQ ID NO: 24190 - DNA, 664 bp, Gossypium hirsutum
  Clone ID: GOSHI-09MAY01-C108527_1
aaagcaaaagcaaaagtaaaagcaaaagcaatcatctgtggatgctgccgcactcgaacatgccacgggaagacaaccaggttccattactatccgaccaggatgttgcgtacgagtccggcgaaaaagttcacatcctcggaatcaatgaaccggacgaggaagggtcatcggttgtcccacctttttcctggaaaaagctatggcttttcactggacctggttttttaatgtcaatcgcgtttctggatcctgggattttagaaggggaccttcaagccggagcaatagccggttactccttgctgtggctgttgatgtgggctacggctatggggttgctggttcaacttttgtcggctcggcttggtgtggcgacgggaagacacttggctgagctgtgtaaagaagagtatccgacttgggttagcatggttctgtgggtaatggcagagctggctctgattggagccgatatacaagaagttattggcagtgccattgctattaagattttgagtaacggtattttgcctttgtgggctggcgttgttgttacacttctgattgttttatcttgttgtttcttgaaaattatggggttaggaagctggaagcattttttgcagtccttattgcaactatggcagtctcatttgcttgc

SEQ ID NO: 24191 - DNA, 423 bp, Gossypium hirsutum
  Clone ID: GOSHI-09MAY01-C108537_1
aaattgctgaaacagtagtggaagtaaacctttgcatagctctctctgggtagtaattcatgaatccaatctcaacattcctaaacccttgtaaataattagaattcacacacaaatttaaggtctacaaaaatacagatttttgggtttaattttaaagaaacaacgatatgaaaccaccattgtcgtcttcttcctctgctgttcttagaaaagctcgactctctccctacctctttacgttgttagctctcattgctttccgttctattctttatggagaagatttcatgtgcattcttggacaacttgaaccaattccaggcccagccatgtctaaacctctgaaaagatcagggaagttggcattcgctatatggaagggcgaagaaggatgtgatatattcaatgggaggtgggtga

SEQ ID NO: 24192 - DNA, 604 bp, Gossypium hirsutum
  Clone ID: GOSHI-09MAY01-C109917_1
ctagtaccaccaccataagttacatgccaatcggaggaaactcgacagctggggtatcaggttttgcaggagattggtctcggccgaggaccgggcatggatttgaagatttctttgctgaggaaatccgacttaggagttcagaaatgttagagaccgatgacatgcaaagactgctgaaaacattcggtgtaggtgttggtatgggagctggttttggtcatccagatgaatcttcttatgcatacaccatcccatatgatcatcaaagggaccacccttatccttatgcgccagaacgtggcaaaggatcggggaaagcggttgtggggtggcttaagttaaaagctgctttaaggtggggaatatttataagaaagaaagctgctgaaagaagagctcagcttgttgagcttgattaactgttctgatgcttaaaaaaacgtattttaacatcattatctattagctggttgacaaaggattggtgcctcagcaatcattaaccttcatttggcaacattgttgaaaaattccaagttctgttatctttgcccatatttggataaggcataattcatcagaagaatgcttgttatataac

SEQ ID NO: 24193 - DNA, 1070 bp, Gossypium hirsutum
  Clone ID: GOSHI-09MAY01-C109517_1
cgctatgttattctctactgcctccctgtgtttgttcttcaacttattcttattttgattgcaccaaagttacacaaggataggagagatttaccgtcgtatttcacaagatcagctgctccagtgaggcagaattctgatgacattgctctttgcacttaccctttactgaatactattcttctagggctttttgccaccatcttgactgcctacttgttttggcttggaaggcagattttggaattggttatcaataagggtttgctgaagagagtttacacattaattttctcggttttgagtttacttcaaataagggttgctttacttggtttatctgttttatctaaaccggaagaatttctgtttgaagctcttgccttctctgcttttattgttcaactatgttgtgctggggtctgcatttacatacttgcatattacccggttaaggattgtcttgccctggggaatcttcacgacttggaggctactaggagaaagggttttcttgatggtcaaaatgatacggtttctcttattgctgatccgagccgtcttgaaggaagtgccgatgcgtcctctgtgcgtggatcattttcttttcggatgtatgaaaatgatggaacctcggcactgacattcgtggagctgagctgcttctctagctgagaatgtaaccccacctcggactaatgggagcaaccttcaacacatgctcgtggacgacaaaaaagtaagcaaagaagaaactgaggaggtgtgatgaatatcaattttgtggttaagaaatctgattgtaaagggtttagcttcaataaggattcttaattcttggtttgtttttctaattttagatatgatggtttttgctcgatgcaatctataatccgattccccttttttgtaacgttacttatagccatttttttaaaaaaagtctgcatccatagtgtttaaatttaaaaaaaaataagcaaaatggggaaagcgaaccattgggtggagttcccattccgatcggtggcagatatggggatcgggcaatactttgtttcctggggggg

SEQ ID NO: 24194 - DNA, 882 bp, Gossypium hirsutum
  Clone ID: GOSHI-09MAY01-C104507_1
gttcttcaccgttttcggaacagggggggtgtggggtgggttagtttcttcgtcttttcttcatgtacgatttggaaggatgaagcgaataagagatgatatatattctggttctcaatttaaacgtccatttgcttcttcaaaggctgaatcctacgcgcaaaaccaaatgcctggggggggtggcggtacaggtggaggggaaggggaagggggagggggaagtatgtcgcagacactggctatgaacgaggccttaacatatttaatggaagtcaaggagatctttcaggatcaaaaagggaagtacgacatgttccttgaagtcatgaaggatttcgtggctcgaaggactgacactgctggtgtcattgcccgagtgaaagagttattcaaagggcataacaacttgatttatggatttaatacctttttgccaaagggatatggaattacccttgacgaggatgaggctcctccaaaaaagactgttgaatttgatgaagcaatcagttttgtaaacaaaataaagaaacgtttccaaaatgatgagcatgtttataaatcatttctggatattttgaatatgtaccggaaggagcacaaggacataaatgaggtctatactgagcttgcttctctttttgaggaccatccagatcttctttatgacttccatattggtttttaccgaagggcgtggacgagtacaaggcttctccggaagaaaagatttctgaatttgacaaagcattcgaatttagaacgctaataaaagtgaaatactgaaaccattgtcccctaatattcggatagcaattgctgtctctaatttatgcaatcttaccatgcaggaacatgtttatacatcattccttgatc

SEQ ID NO: 24195 - DNA, 562 bp, Gossypium hirsutum
  Clone ID: GOSHI-09MAY01-C104677_1
gttaaagctatttcaacagatttaagcttttccatcttcaatgcctcaaagaggtgcaatgcaaaattatacataaaatgatggaaatgaatctacaatgaagaattcaaccaaataccaaagccgccaagccgccaagccaccacttgccgccacaaacactaacactctgtttggtaagaaggaaagtaaaggaaaattgaaaggaacacgtctaatctaatgactcgaccaagaacatatagcatacatcgatatgatcgtatgcatgaatttcaaccattagattactactcttttactttctttcctatcaaatggggtaccttaacgataatgaaatctaccacacacgtgcagcattatgcattttcaatgagattgctagttggtgtttacccttttgaatcgtatctcattcaatcgaggaactgttcttccattgcatttttggttttgcaattaacccttgaaacgaactacaatacaggagatatcatccttactgtctcggttcagtgactcggttattagccttttagctgctcgaagcgggtccttg

SEQ ID NO: 24196 - DNA, 551 bp, Gossypium hirsutum
  unsure (1)..(551): unsure at all n locations
  Clone ID: LIB3828-029-Q6-N6-A11
tcgcgatggcaaatccatgnatcctaccaggaccatattcatttttctttctcttcttttatatggttctactaccggtttcagtcgcgttttctcttcagaagttgtcgttttccggcaatttttaattttggtgcctctaattctgataccggtggcttcgctgccgccttctttcaacctaagccaccttatggagacaccttttttggaatgccgtccggaagagcatgtgatggacgactcattgttgatttcactgttgagaatttggatttgccattcctaagctcttacctaaattcactggcaatcaatttctcacatggcgcgaatttcgcgacggtgtcttccaccataagattaccgacggctgatgttatcccccaaggccaagccagtccattctacctatctttacaatgttcacaatttgctcagttcaaaaatagatcccaaattattagaagacaaggaggaatatatgcaagtctaatgccaagggagggaaacttttgccaaggcattatacactttcgacatcggccaaa

SEQ ID NO: 24197 - DNA, 485 bp, Gossypium hirsutum
  Clone ID: uC-gsflnu33B005g10b1
tcctttctgttcttttatatggttctactactggtttctgtcgcgttttctcttcggaaagctgtcgttttccggcgatttttaattttggtgcctctaattccgatactggtggcttcgctgccgccttcattcaacctaagcctcctaatggagacaccttttttggaatgccgtctggaagagtatgtgatggacgactcatcgttgatttcaccgctgagagtttgggtttgcccttcttaagctcttacttgaattcactggcaaccaatttctcacatggtgcgaattttgcaacggtgtcttccaccataagattaccaacggctgatgttatcccccaaggccaggagaaatatatgcaagtctaatgccaagggaggaaacttttgccaaggcattatacactttcgaccatcggccaaaatgatctcacgcatagtctctttcttaacatgagcatagtgcaagttatcgctgcc

SEQ ID NO: 24198 - DNA, 657 bp, Gossypium hirsutum
  Clone ID: GOSHI-09MAY01-C104207_1
gaattcagatgatatttttttttcaaaaaaacgcagttgtttgtgggaggggggggggtggagcttcaaagtacatgtccctatcaaaggaaactaacgatttagcaaaagattagagaccagttgtgcacaattgaagtgaaggtgcatggtgttggaaacattgtttctaagaaagaaaatgattacgagaatcaaaagaaatcaatctctaaataattaccagaaggcttcacatctaaacccggaaccttgtcattggttggtggtacctttgccgagtttgttccagcagaacagtccatcacaacttgcttcggcacatcgggtggatttgcacaacgaatgagagcccaattcacactttgaaagaatggatgctgtttaatttcagttgcgccacgcctataggcaagccgatgctgcggttcctttacgagtaaacctctgatcaagtccttagcagcaaagctcacactaggatactcaggaaatcttaatggctggccaacgacattaaatagagttgcacggttcccggcccccttgaatggggttttaccaaacaaaagttcgtacaaaaagatcccaaatgtccaccaatctacggcacttccgtggccttcacctttaatgatttcgggtgccaagaatcga

SEQ ID NO: 24199 - DNA, 827 bp, Gossypium hirsutum
  Clone ID: GOSHI-09MAY01-C105597_1
ccttattttaatttttgtgccccaaaaaaaaaaaaaatactttccatgcacagcgccgtaaaatttgttcttttaaaaagggcgccccccattaagttttttattttttaatttttttctgttttttttttttatttattttttttttttttttttttttttttttttttttttttttttttttttttatttttgttttttttttttaaaaaaagaatcaactgtaagaattggcaagtaattaaaaaataactacaatcacacaagccataaaataattgatgacaagctatgtatatataataagaacactatggcagacatatactcgagttcctgggaacatgcacatagagaaaatctcatactaacagtcacatcctagtaaatcaacccaccctaaaacaaggggaaagaagggttctccaaaccaatcatatttcatggttttaacatgtataaataaccaccaaacctgcaatcaaccttaccccttttcttccatgaaacatatcatatatagaccatgcaagctttaacattgccatgcatcttgcaaagcagcaattagagccccctattgctgcttgcaatctggcggcctcacaccttgctgcccatccccttgtgctcttccactcttctttcgtgcaaatgaggactttttggtcttacttccttcatcatcctcatcatcgtcatcgtcatctccatcttcatcttcatcctcatcatcctcgtcctcatcctcgtccacatcatcatcatcatctcctatctctaactcatctccttgaatagcttctcctgtaaaccatgacactgca

SEQ ID NO: 24200 - DNA, 514 bp, Gossypium hirsutum
  Clone ID: LIB3829-017-Q6-N6-E1
ggagggtgaaataattcattatgctaaattaaatttattttaaatgttttggtatgaattttaagttcagttgcgtgtaaacataaaaagcaatcccttatatagatatgttaagcataaattaaattatctacaatcaacatcgaaccagaaatagagacaagttcgagcataaatgacacgaacttgctgtagtgctagatctccactcgtcaaaacagcctttgcacctccttcaatccgagtgtgcgatacagaaatgctatcaccatcactcttcaggttggagggaaacaccccacttccggccgtactcacgatcgggcatgacagatagtccaacgggtttgattcacactgaagtatgcattcatctataattagccttccactcctatgaagcaagcagcaacctagctccgccttcaccgttaagtttgtcagcttgcaggttgatagaaactccaatgcactgctccaccaaaatgaacagcacaaacgtgccaggtgtttc

SEQ ID NO: 24201 - DNA, 488 bp, Gossypium hirsutum
  Clone ID: uC-gsronu33B016b09b1
gtgcattggagtttctatcaacctgcaagctgacaaacttaacggtgaaggcggagctaggttgctgcttgcttcataggagtggaaggctaattatagatgaatgcatacttcagtgtgaatcaaacccgttggactatctgtcatgcccgatcatgagtacagccggaagtggggtgtttccctccaacctgaagagtgatggtgatagcatttctgtatcgcacactcggattgaaggaggtgcaaaggcttttttgacgagtggagatctagcactacagcaagttcgagtcatttatgctcgaacttgtctctatttctggttcgacgttggttgtagataattggattagggaattcaatttaattcctgaatgttgttttgttttctgtaggaacaatatctaatgtagccatagccatagccatagccaaaggcattgtatgttatcagaccatttgcaacaaacgttccttttctattt

SEQ ID NO: 24202 - DNA, 667 bp, Gossypium hirsutum
  Clone ID: GOSHI-09MAY01-C106557_1
ttaaactggtgtggagcctttagcattgatgtcacaacttgctacagtgatgaccgatgttcttgctggcagttatgatttctcccaagaaaggcgcagaaggaagttctttcgacggcagccattgtccaaagaagatatggagaaactacgacaagcattgtaaaaccttatctgaggctgaaaaacatctgacgatgtcaaatgacaaattaacatggttaacggcagctttgcttcaccttgctcctgatcagcagtatatattgcctatttcttcttctggtactagctctcgtcatagtccattgcctctaaatgacttgggtggaagagaaattgtccataaaggtggtgagcttgtcgagctgcctaataacaacactagagtgttgtcaacgaatgctaggcctgaaaatctctatgccggaagttcaggggattttgaaaccagcatcatgaaggggaagagacatgctttagctgggatggctcctcaaagtgttgcagaaaatcgcaacagaaccgtaagaatttggttggaagtgctccaaaagattcaagatgatagtctgaaagagtttctatatcgacaatgaaagttgatctctgtcaatctggggtgcagctacaactgtccggttgacgttcagttcacaggtgacta

SEQ ID NO: 24203 - DNA, 912 bp, Gossypium hirsutum
  Clone ID: GOSHI-09MAY01-C106427_1
ctgaccttcctcttttcttgacctccaattgagttaggttgttgaatatagttattttgtcctctcttttatatatctgttttgccctaggttttattgcatagataagcttcttcgtcttaacaaaaatgttcactctccttttcttacagcttgagaaacttgtctctaaagatgctttgcactatgatacgatttgctttcattattacaaccagttccacttacatttgcagttatcagaagctgcagaatatgcaagagctaaaggggtggttttgaaaggagacctacctattggcgttgacaggaacagcgttgatacttgggtctatccaactttgttccgcatgaacacctctactggagcacctccagattattttgctaaaaatggccagaattggggatttcctacttataattgggaggaaatgtctaaagataactcgggctcgcggccggctcgcctaacacagatggggaagcactttacggctcatagaatagaccatatattaggcttctgtagaatttgggaactaccagaccatgctatgacgggtctgattggaaaattccgaccctctatccctctaagccaggaagaacttgaaagagagggtatttgggactttgaccgcttgactcgcccatatgttcgaaaggagttttacaggaaaattttggagattcttggattttgattgcggcaaatttttttaaggaatatctagaccgttatgagttcaaggaggagtgcaacacggagaaaaaaattgctgccaaggcgcactcatgtgcgtagaagtccttgctaccagagagcgaagacaagatacgttgagatctatttgatcttctaaagaacatagttcttatcagagatctagaacatgacaaagtttctat

SEQ ID NO: 24204 - DNA, 553 bp, Gossypium hirsutum
  Clone ID: GOSHI-09MAY01-C106667_2
ggccctatcacaccaacagttttggctccgcccacgcggccgtatactatcccataccatgagatagattggaatcgagcacggaatgcatgtgcaaaggaagatttgtactaccctcacccattggtgcaggatattctttgggcatcccttcacaagattgttgaacctattctgatgtgttggcccggaaagaagttgagagaaaaggctctccaaactgcaatagagcacatacactatgaagacgaaaatactcgttatatctgcattgggcctgtaaacaaggtgttaaacatgctttgctgttgggtggaagacccaaattcagaggcgttcaagttgcatcttccaagactttatgattacctatgggttgctgaagatggcatgaaaatgcagggttacaatggaagtcaactatgggacactcgcctttgcagttcatgcaattctttcaaccaaccttactgaagagtacagctcaaccttgaggaaagcaaacatgtacttacggaacacacaggttctaaaaattgccctggggatcttt

SEQ ID NO: 24205 - DNA, 653 bp, Gossypium hirsutum
  unsure (1)..(653): unsure at all n locations
  Clone ID: LIB3543-056-Q1-K6-G3
ccggaaccgcattccctgtcgacccagcgtccggcaacattgtactacacctcacccattggtgcacgatattctttgggcatcccttcacaagattgttgaacctattctgatgtgttggcccggaagaattgaagaaaggctctcaaacgnatagaccatacactatgaataaaaaaactcgttatatctgcattgggcctgtaaacaaggtgttaaacatgctttgctgttgcgtggaagacccaaattcataggcgttcaagttgcatcttccaacactttatgattacctatgggttgctgaaaatagcatgaaaaatgcagggttacaaatgaaagtcaactatgggacactgcctttgcagttcaagcatttctttcaaccaaccttactgaagagtacagctcaactttgaggaaagcaaacatgtacttacggaacacacaggttctagaaaattgccctgcggatcttaactttaggtaccgtcacatttccaaatgtgcttggcctttttcaactgcaaatcatggcatggcccatttcatattgtacagctgaaggattaaaagctgttcttttattatcaaaaatacccccagatatcgtctngagaaccgttaggaagcaaaacgattatatgatgctg

SEQ ID NO: 24206 - DNA, 507 bp, Gossypium hirsutum
  unsure (1)..(507): unsure at all n locations
  Clone ID: LIB3543-041-Q1-K6-H11
cgtccgtttttttcggcaagaaggggggaaaacaaaatacaaatagttcaagaaatatgtacacgaagtagcggatgataaataaaaacacaaactggaaccctaatttttttatgtgaatacgttgatacaaatattctcttgaagatgtacaggagatcattggggaagaggggggtttttttaccctgcaaatagcatgaaagcaccattatgtcactgcaaataggttttgataatttgaagcacacagtagctgttcatcgctcctcggttttcaaggaagtccagcccctttctgttgcaatttgtctcctatcatgtgaaacgaaacccagaacatagccaacaaaaccaccaagactggcaaccaacatgggaacctcgaccagaccatccacacgatcccgtctaccctcatcccaagaggtctttgtcccgcacaggcgagtttgggtacactggattaattgctgccnncgagacacttactctttcgttcgttgg

SEQ ID NO: 24207 - DNA, 476 bp, Gossypium hirsutum
  unsure (1)..(476): unsure at all n locations
  Clone ID: uC-gsflnu33B100d09b1
tttgtgtcggttgatcggatgaagaccccttttgttgtagttcaagggcatagacctatgtacactacaagtttcgaaagtagggacgccgcattgagagagaaaatgcttgagcatttggaacctttatttgtgaataacaatgtgaaccttgcattatggggccatgttcatcggtacgagaggttttgatcattgaagaatttcacatgtggaagcatggggcagaaggggaaggattgggaggcattaccagttcatgttgtgattgggatggcaggacaagactggcaaccaacatgggaacctcgaccagaccatccacacgatcccgtctacccacaacccaagaggtctttgtaccgcacaggcgagtttgggtacactagattaattgctacaaaagagaaacttacactatcggtcgtaggaaaccatgacggngaggtgcatgacatggntgagattttggcatc

SEQ ID NO: 24208 - DNA, 610 bp, Gossypium hirsutum
  Clone ID: GOSHI-09MAY01-C100827_1
aacaaaagcaaacctcaattggccgctctgttgctgtctctttccttcttccataaaaacacgcctttcttttcctttctttttgcaccactgttttcttttcaagggaagtgataaaagaagatggagaatgaaggaacggcgattgatctcagagggaccccaacctacgatggcagatatgtacgttacaacatcttaggtaacatcttcgaagtctcttccaagtatgttcctcctattcagcctgttggtcgtggcgcttacggcatcgtctgctgtgccacaaattccgagacaaaggaagaggttgcaataaaaaagattgcgaatgcattcgacaacaggattgatgctaaaagaacactccgtgagatcaagctcctctgtcacatggatcatgataatattatcaaaatcaaggacataataatcccgccagagaaggataagttcaatgatgtttacattgcatatgagctaatggacactgatctgcatcagataatacggtctagccaggctctcaccgatgatcactgtcagtatttcttatatcaactgttgcggggtcttaagtacacacactcggcaaatgttctgcatcgcg

SEQ ID NO: 24209 - DNA, 945 bp, Gossypium hirsutum
  Clone ID: GOSHI-09MAY01-C100837_1
ctgaaagcgaactgaacgagaaagcgtaggagcaacctttcagtgaaagaggaggcgattctgccccattcttccgaacaaagtgaaccacttccagctgcggctttgaccacttcatccgagccagtagaactgaactacgagtgcttcaacagcagcaacaatagagtggctgacgccatccttttcccagaactgaaagatgggtcatcagatagtgactcaagtgctatcttgaatgaagacgaccacaccaacaccaacaatggtgttgtttcgtcatctggggtcctacaaagccaacatcttttgatgtcaccaacgacaacctcttcattcaatttcgactcatcttcttcgtcttcaccatcctccatgaattgtttccagttctcaaaaacaacctatcttgtgaagatggaagagcacaatttctttactgcagatgaagcttgcaatttcttctctgatgagcaagctccaagtcttcaatggtgttacccggagcaatggaactaaaagcagaagccaaaatgaacatgtatgtaacaaaatgctaagaaataagccaaaaaagcaaagttgggtatctaaaatgaagctccaagagtgttgtaaaatgcgaattacgtaacaagttaaactactaataccgtgaaagaaagagaaaaatggggatttggagctgaagaagaggcacagagatgggttgatatggccgccgaaagagggcttaaagcatatggcgacaccaggccaggcgtgcgggaatgattaggtcgtaattgataggacttatcttttttcgctcttctgcggtaaatggaaaaaatctcccccccccccttgggggaaaagtaaacaaaatcccccatcctctttttcttttatcttttctttatgcaatatagtaacaaatgatgaaagaattttagtttttcctaa

SEQ ID NO: 24210 - DNA, 988 bp, Gossypium hirsutum
  Clone ID: GOSHI-09MAY01-C100817_1
cggcgcgtgggcgccaggaatgcacttgctgttctgaaggagaaagaaacagctgaagctaaggagaactgtgaggggagaatgggaaaaagaagaagaatggcaaccagacatttaccaggcaaacattgaatgatatctgcctgcgtcgaaactggcctatgcccttctatcggtgtgtgaatgaagggggccctgcccatgcaaagagatttacttttgctgtcaaggttaacaccactgacagggggtggaccgatgaatgcataggtgagccaatgcctagtgttaagaaggccaaggactcggccgctgtgcttctcttggaacttttaaacaaatggtattcatgatagacaatattgaggacaatgattattttggtacttagtttcccaatactattttttcaatagcccccttattggtcgtggggtgcatcacaattcttatatttttttgtcattaattaaggcttagccgatcttattactatagaatcagcttgaacaataaaaacttgacccgattttaggcgtggtccgcttttggctatacatacattttcacaaataaactgcctaaagagaaagatatcaaatatctggagtttctttttgtatattatatggatgattcgatccgcaaggaccatgattgggaattgtttgatcgtctttctccgagtaagaggcgaaacataatcaacttgaactcgggacagctatttgaaatcaattggattctagaattattcctcaaaggatagacaagagctgtcttatagccattagattccatatacctaattttaccccccccccttttttcctaatcattttttttatcgttttttatgcttttggccaaaggaaaatattataagtaaatggatttataattttgcatgaattgttgattttaaatgtaatgggggaacaggaccagaacatacgcagttgaataagataaagagacatttgtcttc

SEQ ID NO: 24211 - DNA, 731 bp, Gossypium hirsutum
  Clone ID: GOSHI-09MAY01-C100757_1
cagtctggaaaaccacctagtgtttctagtagaactattcctcagaaggacagcttatcaagcattgtgggttctcaacctgatgatgctctgactgcagatgtatcaaaattcaaggattctgctagcggtgctgagaatatatcaggagagcataacttggagttgagatcttcaagttctgatggagctgcagagggccaggttttattttcttgtgctgctctctcatcagatgcaccccctgagaaagcttccacatcaaatgctaaatccgaatctatcagtaaagggaaacttgctccagtttctgggaagttggctaaagttgaggaggaaatgaaaattgtatctgaagttgttgaacctcgtagatctaatcggaagattcagccaacatctagactcttggaaggtatacaaagctcattgatcatctcaaaagttccagtttcacatgacaaaggtcagaaaggtcaaagcaggagtactagaggaagtaaccaaggttgagaagcgaaaaaggagctgttttagaacctgggaacccagtcctttgagaaattcaagatttattggatgaacaacaggcaacattcaacggtgtagcttgtgtaaattatgacattgacagatagagctaggaaccaaattttttctttggcttttgagatgtagcagtagatatatataaaattatttattttgaaatgaattttagttttgtttac

SEQ ID NO: 24212 - DNA, 951 bp, Gossypium hirsutum
  Clone ID: GOSHI-09MAY01-C100177_1
caccttccacaaatggacagaaggtttatgtccgagaacaagcagcactatttgtttcaatggcagaaatgatgaaaaaagttccaatcaagtaccagagatttgtcacgtccgcacagttcatcaaatatgccagtgctcagattgacaaggcctaaagaacccgaattcgaaacagcacagagaatgcgtccggttgcggtgaagagcacagcagagcttgaggaagaaatgatggctaaaattccgaagttcaaagcaagaccattgaacaaaaagatttttgaaccttcaacactcactcttcattaccaagaaagtactccgcaagacacaagagtttcaggaaatttcactttgagcacaatggctacagcaagtaagaatgcagagacatcttcagtagcttcaacagaagtgtctcgccagaatactcaatggtaaacctcatctcacagaacctaaaaccccagtgcttcaaacatctctaagggcaagacctataacggtcaaaagttctattgaacttgagcaggaggaacgtgaaaaagctcctaaatttaaggcaaggccattgaataaaaagtatatttgagagcaaaggagaattgggaatcttctgtaacacaaagaaacaggtgactatacctcaagaattccattttgcaacacatgagagaattccaccaccaccagcagtttttgatttatttgataagctgtctctgaaatcagaatctacccatgatccaattccaagaaacaccattcccaatccattccatctccaaacagaggaaagaggtgctaaaaaaagaaaagaagttcgtgatggaaattatagagaagcagcttgaagaataaagagccagggttcccaatgctaatccatatccatacaccactgactaccctgtgttaccttcaaaacccgaaccaaaacaatgtaca

SEQ ID NO: 24213 - DNA, 461 bp, Gossypium hirsutum
  Clone ID: GOSHI-09MAY01-C100257_1
agaaaaccccggaaggttcctctttctacacttggaaatcttcatgctctgcttctgctaaggggatctgtaagatcttcctggcaatttccgtaggaaagtaatcattccaaatagagatctcagagcctctgcctactctccaaccaagcccgtcttgaaggagaccccttgctgcccagatgctcttccaagtaaaagaaggggcagatcttaatcaaacaaaggggccgactcacaagaaaacaaaaccaacaagaaacacaaagcaaaacaaacacaaaatggcggaaaccctaacctcttgctagagatggcagacaatatcttgctaggatagcagacctaattccatttcgcttttgctaactataaatttatttatttattcttaatttatatgtcaaaactcaaaagaaaataaatatattttacaattatatcaaatattaattactccc

SEQ ID NO: 24214 - DNA, 174 bp, Gossypium hirsutum
  Clone ID: GOSHI-09MAY01-C101967_1
cggaaaactctactggaaattttaggttttgggcctagttcattttgagccgttgaattgggtcaaaggtgtaatgggcatgcttatggggtatttgggttaccagtctgctaggtctaggctaaatgggctgtaaaaggactgtttaataaataaacatttatttttttttcc

SEQ ID NO: 24215 - DNA, 636 bp, Gossypium hirsutum
  Clone ID: GOSHI-09MAY01-C101917_1
gctggcttagggcggcagaactaacttgtgatcgtgcagcccttcttgttgcacaagatcccaagttgccatctctgttttgatgaaattaactggtggctgcccatcaatggctgatcagctaaatgttgatgcatttttggagcaagctcactcttatgaaaaggcttcttcaagcccaatcgggtggtatataagaaatgcccaaacacggcaactttcacatccactgcctgttctacgagctcgtgagattgatgagtggtcaagaagtcgtgaatacagaagtcttcttgaacgtgcaacacagatgagcatgtagaagaggtttagcactgctctgaacctggagaaagtcatagtttaaacagctttaatagatatcggctttgccttacgatatattgctaggcagtggagagcacagaaatggaggcaacatttgtaaaaagcatctatagctaacatttgtccataaagatgatagtttaaattgtgggacgaacatatttggattttctgaaaccacgatagagaaaattctgggaagttacagaaacataggtttgatactcataggaacagaacactgtatcctgctgttcaacacgataaaatcggatatagcaatctctt

SEQ ID NO: 24216 - DNA, 574 bp, Gossypium hirsutum
  Clone ID: GOSHI-09MAY01-C101897_1
gttaaggtcgcaggaaacgcttgcttttggaacttcggcttatgttactcaagatgatgctctagtgacaacgcttacagtaagggaagctgttttctactcagcacagcttcagctgcctgactccatgtcaatatctgaaaagaaagaaagagctgcgatgacaatcagagaaatggggttgcaagattccatggacaccagaatcggagggtggagcaccaaaggacttagtggtggacaaaagcggagagtcagcatttgtattgagctcttaacatggcccgagcttctcttccttgaccagcccactagtggactagacagtgcagcatcctaccatgttatgaatcggattgtgaagctagctcacctacatggaaggactgtattcgcatccattcatcaacctagtagtgaagtttttgagctgttccataatctctgccttctctcctctggcaaaacagtctattttggtcctatttcaatggctgagatgctttttgctataaatggattcccttgtccacctttaaagaacccatcagatcattatcttaaaaccatcaac

SEQ ID NO: 24217 - DNA, 836 bp, Gossypium hirsutum
  Clone ID: GOSHI-09MAY01-C101867_1
cgggtagcttccatttttcggtcacttactattatgtcgcgcctacgctgcagtaaggaaatttaaaattttctaaagaagagtatgagaggtgcttggagcttaagacagattttctagttggttggctatgtcctaaaactgtatggaatctcagttgaagagcaacctgtttcaaatgtttttgagttagccttcaaggaaggctcagaagggaggaataattcatggaatatgtggatggctgtttataggttagtgatgggcctgatatgtttatggaatcgggactttctttcagcagacgaatttctggaacaaccttgttcggtgaccagtgctgagagctgcattttcctttggcatggtctcacttctatggagattgcaaggaggtttcatgatccgcaatttttatccagtgccataaggagcctcagtaaagctcatataacttcttcggtcccaatacccattgtctcagcattgttagcccagccagaagggaagccttggttctaggaacaagtgggagagagatcttcgcctcgtatggggttcttggccaccacaaattgacaccagaaacctggttttcaaaagcatttgcttcaagacagattgattcgagttgacattcatccgtgtggaggctgccaaagtccctgcattggttcttgaaccttcacacaaccctttgacttggatatggaaagtctgcaagctttgtacagagagactcattcgacatgacaataccacactttaagatccacttgtatcagtttgaagaatccagactactgtcttatgacaatggtttgaatgactggttt

SEQ ID NO: 24218 - DNA, 542 bp, Gossypium hirsutum
  Clone ID: LIB3828-029-Q6-N6-B6
gacaaaattggaggttaattaattgcattcaagaaaaccaggtcaatctacaaaacccgattgtacgatgaggaacaagtagtcctagggattcattctataatctgtataaacaaagtaggatcttgaaaagttgtgtgctattgttcaatgtgcggaattgagtctctcttgttacaaaagctttggcagaactttccaatatctcaagtcagaagggtttgtgtgaatggctcgaagaacccattgcaggggactttggcagccctccaccctggatgaactgtcagactcggatgcaatctgtcttgcaagcaaatgcatttgaaaaaacagctctgctggtctcatttctggtggccaagaaaaccattcaaggcgaagatttctctcccactttttcctagaaccaatgcttccttctgcttgggctaacaatgctgagacaatgggtattgggaccgaagaagttatatgagctttactgagactccttatggcactggataaaaattgcgaatcatgatacctccttgcaatct

SEQ ID NO: 24219 - DNA, 594 bp, Gossypium hirsutum
  Clone ID: GOSHI-09MAY01-C101837_1
ttcccggtcgacccagcgttcgccagaatccagcctgggagccttgcgagcctcggcgtcggtcgttggtcgccggtgacggcttccattgtccacggtggctgacaaaaaaaagggcctttttgatcgttttactatcctctaccccaatctaatgccaaaatgcccgaagagcccaccaaaattcaaaacaaatcaaaggaacccttcgattctgtctttttctgtcgcgaccatttggcaaaccttgaggatccattagtctttccaaacggagggagaagactgcgatgagggcactggcgcgtggtcaacgaagaggagagaagggctgcctttgccattttggtgcaatggcggcaagtgcgcgttaggcctcgggacgaggtgggctgacgtggcacgagcggagggagggggtgcggcgcgcatagaacattagagttctgagaatgagtttaagttgtgggccaacgggctgtttaaggctttttttcattttgggccatttgggcctattctataaatggatttctttttttgtttttgggcttgtatcatttggactattaatttattaaatttcttggttta

SEQ ID NO: 24220 - DNA, 754 bp, Gossypium hirsutum
  Clone ID: GOSHI-09MAY01-C101597_1
cccacttcttccgcaaatgagagattaccagacaagaaaggaagtgtttggtctaacatcatgtggtggaacgcatgtgcttgcagcagaatctgctgagaaaggatggtttttgaataattcccattggtggtttcatgttcataacgagttaaatgaaaatgacattgcatttggttttaaaggaaatcgaaaggtgattgtttttcgaggaagaaaactaggatttgagattaatgatggcaagaagctgaaaaatgaagagcatttcatgaccgctgttgaattctccatggaatatccttatggaaaagctatagctttgttcaaccttaaatctgctattatagagatcagtgaagaagaaccgcttgtagtccctatgattatattggcttttctagtttctgaaagttcaagcacctgtgagaaaagctgcaataatgaagggaagggtggtggtgaagccattactaatggaatcaaatactcacctcctgccggtgaagatgaggttaagagtagcaattgcgccgggtgtggtggtggctgcggcattagttgtggaggaagctgcggagggccctgttcgggtggtgatgcctaccggaattgattacctctcgaaatacacaaatatgactaaaacattaatgattagttttcactataatccataaatagttggattaaatactcttctaaattaagtccttatgaataaatgcatggcatgctattgcaatgtttccac

SEQ ID NO: 24221 - DNA, 519 bp, Gossypium hirsutum
  unsure (1)..(519): unsure at all n locations
  Clone ID: LIB3828-024-Q6-K6-A12
tctgtaaaatgnaanagcatttcatgnacggtctgttgggggggtggctggnaatatnnccttatggaaaagctatagctttgnttcaacccttaaatctgctattattagagatcagtngaaaaagaaccgcttgtagtccctatgattatattggcttttctagtttctgaaagttcaagcaactgtgagaaaagctgcaataatgaagggaagggtggtggtgaagccattactaatggaatcaaatactcacctcctgacggtgaanatgaggttaagagtatcaattgcggcggttgtggtggtggctgctgcattanttgtggaggaagcttctgagggcactgttcgtttggtgatgcctaccggaattgattacatctcttaaatacacaaatatgactaaaacattaatgattatttttcactataatccataaatagttggattaaatactcttctaaattaatttcttatnaataaatgcatggcatgctatttcaatgtttccacat

SEQ ID NO: 24222 - DNA, 721 bp, Gossypium hirsutum
  Clone ID: GOSHI-09MAY01-C101577_1
gtcgacccagcgttcgttcggttcgagctccctctctaggttgctgtgggcatggtggagaagtataatttcaacaactcattaaggtgtggaggaaagatacagtgaaaggcaaggagattttgattgcaaaatcgtgtggaaatccttcggttcgggttaactgggatggcattcatttcacagaagcggctagcaggtggatatttcaacaaatcgccagtggctccttttctgacccaccacttccattgaaaatggcttgtcatttgtcaaaggatggagcaatgaataaattcaggtgaaggaaatcaatgtttagaatgcagagcgacattgcaaatacctgaaaatccaaattatggtgggagttcgtataataatcctactctcggttctcatctacaaatacatccggaggtgataataagtacagaggcatatgttagagaaatgaccaataatggtgaagattctaatcagaacgttgaagattttagtgacctcgatgttgatgagctttcggacaatatcgatgatgaaggcccgaaggaggttgaagatgttcacggctcttcattcagtaacccgaatatttatacaaaaagattgctgatgtggcatgttgatagcgtcaaacactttggcttcaccaacttttactgtaaatttaagttattttcatattttatcaaaaaataaattatttaaataattaatt

SEQ ID NO: 24223 - DNA, 976 bp, Gossypium hirsutum
  Clone ID: GOSHI-09MAY01-C101777_1
catgaaatccttttctcaagttccgacaacgcaagcggcactcttcatacttcttctcatactcgaacttgtaatagcagtaggaacatgcagtccaaaatgagccctttacatttcccgtctctccaggacctttcttccgctcatttttcccatttttccctcgcttctctcccctcttttgatcgaaacccatgtttaaagaatgggtttcccgtctttggtcttctgcagacttattgtggatggtttgaccattgttttgagatgagttagcaactttttgacaaaaagtgaatttatcagtcattggggtttaagtcttttaagagaatggaagattggggttgggattaagggtcggttttggcgacagaacgtcgccgctaagtagaaatggtcggacgacgggccaaatattgggtaaacccaaatgattcggatcggattcttaggaggcggcaagagagaacagactcggaacagggaagaaccgaaaaactaaagaaatattttgtgcggttaaatataagggtttatgtttttatggattgtgttgccccttgccagttatagaatctatacgctataattcatttaattctttgaaatattaaataaataaatttccgtaaaatttgaaataccacttttggacatgcatggtgaactaggatatgagggtgtttttgtcatttcatggttagagctttcttacatcaggatcacgttttctcctagctggcatgcaggacaggtgttgtcgtcattcatgatctaaaacattagagaatttagaaagggataaatatgtaagtttaaacgtgaattattttaatttaatgtgtaattttatttggtgtaattaaatatgtaaatttgaattatggtttatatgtattcataaaatttttattttgattcaattgtacatatttaaataaataaatacatatatttattttcatatcgaatc

SEQ ID NO: 24224 - DNA, 222 bp, Gossypium hirsutum
  Clone ID: GOSHI-09MAY01-C101677_1
gtttacgttggctgttttcccacccaaactccggccgaagattttatgctatctgatagataatcgtgtgagtttccattgtctgtttttcccgcccacccccggaaaaaaagaagctatgtgatagatatttgtgataagttttgattgctaccagcatgaatgttgtaagtaaaagtgaaagattgaccagtgtaatatatataccaattctattttccc

SEQ ID NO: 24225 - DNA, 572 bp, Gossypium hirsutum
  Clone ID: GOSHI-09MAY01-C101657_1
gaaagtatgcttatgctgtgggatctgctttgcatggcgtgcaacatatacttcgggaggacttcatgctgcagccaccgtgggattttgaaatcggaaaaaagtttataattcattacacctatggatgtgactacaacatgaagggcgagttaatgtatggtgaaattggtgaatggcgatttgacaagagatcatttctacgtggacctccaccacgaaatctctcattgcctcctccaggggtcccagaaagtgtggtgacccttgtgaaaatggtgaatgaagcacctgcaaacattcccaactgggaggcttaataaacgccagatgtgacaaaggaggggaaaaatacatagcatttatggaaatctttctttgtggtggtaaaaaggaatttttgtttatttatttagtaaactctttgaaaattctcatgtataaatacctcatcagcttaattaaaaattcaagctatagatttaagttagataatcccaaaatataattaatataaacaaatgaaaataatgtactcaatatgcttaaaattctaaaatattttttttatt

SEQ ID NO: 24226 - DNA, 1068 bp, Gossypium hirsutum
  Clone ID: GOSHI-09MAY01-C101337_1
gtttaaagctttctcggtttttacttattttgatttggaattactcatgggttcaaaaaccctttcgtatgaatataaaagagggtttttttagttggattagtagctataagtcatttattgtttcagtcctttttgcttccatatggtaatgctcttagatctttattattgcctggtattgatgattcaattgagggtaattatggaaatgttgtttctccggttcgatcgggttcaaaatcggttgtggttcgtaatactcttactataaatggttctgattttagtactagggatgttattttgtttaatgatggtaatggtggtggaggtgttggaatcagtggtcgaaaaatcggggattgggtggaaaagggtgtgagtaacgtcattttcgatggaaatgttgacgatgattatgcgttcgagaatggtgaggatttaaacgagaatgccatgttggaagaggtcattcgagatcaagataattatgtaaatgctacgtcgcgtatagagcaggtcgcgaaacacggccgggaagtgtcgaccggtgaacttcgggatgtaaatactacttctcagtatccagcattgtcttcgatggcaaacccgaccccgaatgctggctcttctttccgttccacgtccctgcaaagtgatcatacagtatctaagagtaattctttgatggttgctaaacaggggaagaaaaagatgagatgtgaaatgccaccaaaaacagtaactacgatagatgagatgaaccgtatattactacggcatcgtaggtcgtcacgtgcaatgagaccacgtcattcttctatacgtgaccaagaaatctttgccgcaaaatctcggattgagaatggtcctgtcataacaaacgatcaagatctttatgctcccgtttttaggaatgtttcattgtttaaaaggagctacgaacttatggaacgaatactcaaagtttacgtctataaagatgggaaaaaacccatttttcatttaccaatacttaagggattatatgcgtcggagggatggtttatgaaattgatgcaaggg

SEQ ID NO: 24227 - DNA, 1050 bp, Gossypium hirsutum
  Clone ID: GOSHI-09MAY01-C101247_1
ataattttagcaaaaaccatcatcagcttagtgcttttacggtgttgagtaagggggttgcaagtagggctctttgttttggggttgatgaatgtgtagagtagtgacttcagtctgatatgaatttattatgaactttatgctaagaagaacattgtggggttacatacagtgatgatagatgtttgccatgcctgtatgatttttcactttgcttttgttcatgctagtatgtgtgcttgcttacctgttgtcagtggaagtgttcaaactgacgcaactatgttatgtttaaagcattgcaatttgttttatcatgatatgagaacctagagcttaataaggttatgattgccacaaattgaaatatgagcttgggattgtttgtttttcttatatgtattttttcttgcagtatacaggaaacctgaagatatgaattaccactcagtttgcctgcatgttcttgcagattccgttcgcagtgcaggtttgatattggcatcctggtttctctctcttggcgttaataatgctgaagttctgtgcttgggactagtttcggtggcagtctttatgcttgtcatgcctctatttaaagctagtggcggtgtcttgcttcagatggcaccacccaatatttcatcttcagccttggccaaatgctggtggcagattaagtctcatgaagatgttatagaagtttctcaagctcggttttgggaactagtgcctggtcatgttgttggatccctttcacttcaggtgaagaaagagatggatgatcggcggatactagagtatgtgcataatttgtaccatgaattgggaatacatgatttgacagtgcaaactgattatgcatgaacttcatccccctttacgctcgttttttcattgtatttatgagattggtgatgggaaaagaaccttgtattgtagtcattttgtcatcccaaatggatagattatgactagggggggggatctttttgggtcaaattgaccgttcaaaaagtaatatttcatattaatttatattatttctct

SEQ ID NO: 24228 - DNA, 435 bp, Gossypium hirsutum
  Clone ID: GOSHI-09MAY01-C102917_1
gcgttcggccctttaataacggtacaccccacttatcatctaatgatgctgagacgggtaactacttccaccagcagagggatatggtgcaagggaatggggcacaacatgggtccccttcaattaaatgagattccttcttgaggcagcgctggaggtatttgtcccttagatgttgggtggcggaatccttcccagagtggcgtctctcaggcaaatcattcttggctttggtttggttaaggggttatcatatggggaagtatgtggtctttggttttatccacacactgctgttcctcctattgatccctttgtagaaagataatgtgtggtatcgtgctacctacaaaagtgtataatttgaaacaacttatattagaacttgtgaactgaagcagaacttacgtatgactaaagagttttagcatttaa

SEQ ID NO: 24229 - DNA, 528 bp, Gossypium hirsutum
  Clone ID: GOSHI-09MAY01-C102587_1
gcgtttcgggagtgttgaagagatgtcttttcatatacgtaccctaggcttgatatggaggtgtcgaagcacatgaaccatttactgaaggcacctttctgtgtacatccaaaaacaggtcgtgtttgtgttccaattgacccaaacaattgtgatgagtttgatccaaccacagtgccgaccctatcccagcttctggaagaactgaacaggggaggaccaagacaagatgctgagaatgaatgggatagaacctctcttggagagtcggtcacgtttttcagaacatcatttttacagcctctgctaaaatcttgcaaggaggagatagaaaattcttacaatgcaaagctgcagcagtccaagaatgccctcagttggtaatgttttctaaccagtatcatctaagaatccggtcatcttttgatgtataattatatgaatttgtattatgttcccatgtatgcttttatgctattcaaaacatgatacgataatatatttaattaatgccaggagtcatgtttc

SEQ ID NO: 24230 - DNA, 762 bp, Gossypium hirsutum
  Clone ID: GOSHI-09MAY01-C102567_1
tccgttgtcagatgaaatgtagtagcaagagaagtaacctagtagtctaattttttgtgcttgacccaactcatttggtatctgatgaagaaagaagaaaaagggaaccacacttggaaaaagcttggcacttgaaagttgaatctctggggtttataatattaaaagaccaatgctcctttcatcagatatggttgtcccagcatggaggaactgcagagctatagtcaagaatataagaaaagattagatgaagctggacaacgaagagaaataccagatgatttggctcttcaggtatcatctcctggtgcagagagaatactaaaagtaccagatgatttagatcggttcaaagacatggctatgagagtttgttatattgaagacgctgggtctaattatactgaaaagagtggagtcttcttactagatttggtcgaggaagagaactgtgtatggaagttggcagaggtgaaggagaacagggaccccaacagcaagggtagaccatttagtcgtaaacaaaaggattggagattaaaactgccttttgacaagcataagatgataatgctgtacctcgaatactaaacaaacaacagatgacaactttgaaggtatgaagacttccttggcagtcttcttagtaaggtttctatatgtaaaacaacagttttggtaatttcggtatcttccacatagaacctttgcaagcttatattgtatcttaacggtaactatcagcaattacattggatc

SEQ ID NO: 24231 - DNA, 507 bp, Gossypium hirsutum
  Clone ID: GOSHI-09MAY01-C102287_1
tatcgaatagaatgagtgtggagaagataagggagttcattggatgtgattcactggcatttctgccattcgaaagcttgaagaagatgttgggcagtgagtctccaaatttctgttatgcttgcttctcaggaaaatacccagtgatgccaagggaggttaaagtgaaacgggttggggatttcttggatgatgggctgaatggacctatggattccattgatggagggtggattcaaggcccacgagatttgaacgttgagaaagaaattgatcccctgtatcaaaagagcaacatttagctgtttcaagcaatgactttagaggggagaaagatctatctttgggtggatctcaatacacgctttttgctttcatctaaattctaaagcttatacaattttgacccactattttggctctacaaactaatctctaatagacgctgggttgatgtgtttgctttgtttatgcattttatgaagtcgagtttcctactttcattct

SEQ ID NO: 24232 - DNA, 552 bp, Gossypium hirsutum
  Clone ID: GOSHI-09MAY01-C103547_1
gtataaaaaatctaaaaatttagaaaatggaatttaattagatacaaggtattttaagagccgacttaagcagaaaataataatacaaatcaaagtagttttgacttttttttaggaaaaaaaaaagagccagtctaggttggcttcaaaaccaatatgcggccaatgtctgtacccaacaaatttaaagttgcaatcacgggtccacagaatcgcacaccgggtgccacaggcagaagagaagtgcatagaggcccccggtcatacaatagctatcctacacaggcactctgccagacctcacagctgccttctccagatgaaataccaagctagtaacgagactccgttttgacacctgcttttgccttacgctggcctgccctgcccttcttccttaatctctacattcaggccatctcacagtgaatgccattagtcgattttctgaatctcgtcgttcaaccttttggggttgattgattacttttgcccactgggtattttgttttgtgaaggttgttcatagttgcataggtggctttaccccgt

SEQ ID NO: 24233 - DNA, 729 bp, Gossypium hirsutum
  Clone ID: GOSHI-09MAY01-C134407_1
atttttccccctcaaaaggagagttaaccatagatagattcaaatgtgaaacagcaagatctttgaacaggaaaagaagtttcattcattagttcctacattttgattttttttttttaaaaaaatttctctctatcgtccttctgtcgtagcggagacacgatgaatcttctgtgtctattatttcccatgtgggcatgttccttctctttgttttcactcttaattcatgcccgaccacagtcaactgttcccttcacatccgcttctgttcttccttctgaacaagaacccatttctcagttttcttcacagatggaagctgtttctccaggggtggctgttgttcgagtatgcaccaccaggatctaaacaagagaattcttatagctctaattgttgcctccactctccttgctggaatattgctctttttgttatgtttctggatatgtaaacagaaaatcttgaacaactccaatgggaaaagcaaacaaaaaaacctagaacctacaaaagcactttcattgagtccaattgtggatcgttttaattccttatggatggctgggaaaaaggggtcagtactgtcatcgagtatcggttattggaagctgcaacaaactgtttcggggaaagtaatgttttgggtgaggcggtctggacttgtctataaagctcgcttcgatgaacaatttcttgctgctgttgaaaaattagataatggat

SEQ ID NO: 24234 - DNA, 756 bp, Gossypium hirsutum
  Clone ID: GOSHI-09MAY01-C130647_1
gtaaaacagaatttgcttcctctggtggtgcccttgaactacgagacattgaagctattgaaagatgaggagaggaaaattgtcctgacaatcttaaatgatgagaatgaagaccaatcacaggacttgatcaagttattaaaggctgctgcatctgctaatcctgatttggtatttagttatgttggggttgagcaatgggaagactttgctgataaatttgaggccaaccataagacaaagttgccaaaaatgattgtttggaacggaaatgaggagtactttttggttattggtgttgaaagccttgatgctgaagatcaggggacccaaatctcacgattcctagaaggatataaagaaggaagaataaaaggaaaacagttaaagggccatcatttatggacttcatccattcattagttggcatcagaactgtgtacatactcgtctttattgttgcaatgatgatgcttatacaaagcattgggaaagaagacgatatgcccagggttggcagccagatgcagttgatcatgctgggagctctgaggctgaaagcagtcggtacggacttgaaaaaaaagaagattaaggcgaggtatcttcctggttgagatacagcaacgaaaacacagcgagttacagaataaaggtgcaagggtgaatgaatctaattaacaattctgtgttggagctgatgttcccagctttcttgacgtgttatcttttttatatgctcaatgatggcagtct

SEQ ID NO: 24235 - DNA, 810 bp, Gossypium hirsutum
  Clone ID: GOSHI-09MAY01-C130137_1
tttaaaagtagccactatggctaaaaaaatttaattaattcttcaatcaaaattacacaccacaacatctttcacttccaaagaaaccataatgtgaccaaaaaaaagaaaaatacaaaacagtaggaggtgggggagggatacaattcaaactcagatgttgattgtggcttcccaaagccgaaaaactccattgcgacccccaccgcatatccttttcctttccaggtccgacaccacacatcgtaccacagcattggtcttttgtggggtccgataaagttgccacccaaacattttggatcctgtgttagggacaccaagcctctcttgaggccgttggaagagagacattgaattgtcagctgctccaactcctaaccactgctccccggcatttatagataagatacgagcagtatgaattgttacattcttcacccattttataccctcctcatcattttcccaaaatcggagcaccccatccgttgaaccagttattattccctcgtctgatgctgcatactcaacacaaagcagtgggccagcatgacaagcaagaacagcatcacatgttccccgggaaacagtccaaactttagcagtccaatcgtcactacccgtaatcagagtgtctccaaccattttaatagaccgtatccattttgtatgccctagaagcttgtgcatctgcctgccagcacgaatgtcccagatatttgcaaccgcgtttttgccagcagcagccaagatcccagtggtatcatcatactccatgcataaaactgcaatagaacagcgaccaac

SEQ ID NO: 24236 - DNA, 1069 bp, Gossypium hirsutum
  Clone ID: GOSHI-09MAY01-C132857_1
caatatgccaccgtattacagttcagctgtggcatcaggccatgctcctcccccctatatgtggggtccaacacagcctatgatgccatcctatggagcaccttatgcagcaatctactctcatgggggagtttatgcacatcccgcagttcctctggcatcacacagtcttggtgttccatcatcaccggcagctgcaggtcctgtggagacacctacgaagtcccctggaaatactgaacaaggtttaatgaaaaagctgaaaggatttgatggtcttgcaatatcaataggcaatggtactgctgagaatgctgaaggaagagctaaacctagaccatcccacagtgtggagactgcaggttcagctgatggtagtgatggaaatacaactgggacggatctaagtatacggaaaagaaacagggaggggacaccaactattggcgaagatgagaaaattgaggcgaagtcttaccaagtcgctgcgggggaggtgactgcaaccatttctcctaaaccaattggaactgtagtttctcctggcatgaccacaggaacaatattggagcttaggaacacccccaccatgaatgctatgtccagtgctatgggtgtacattgtggagtaatgcccactgaagtctggttgcagaatgagcgggagctgaaacgggagaggcgaaaacaatctaatagagaatccgctaaaaggtcaaggctgaggaacaggctgagactgaaaagcttgcccgtaaagttgaatccttaacttcagagaatgcagcactcagatctgaaataaaccaattaactgaaatgtcttaaaaagtaaggctcgaaaatgcgatattattggaggaactgaaaaacgctcaactcggacacggacaggagaatgttttgaacaaaggaagacaaggaggatgaaatgtgtgataaaaagtcagactccggtgccaagctgcatcaactcttggatccgagtcctagaaacaatgtatggctgctggctgaatgaagagaaaattgtggcctactgattttggtattaaattggaggaaatcg

SEQ ID NO: 24237 - DNA, 623 bp, Gossypium hirsutum
  Clone ID: GOSHI-09MAY01-C132297_1
gcattagagcacaggtatttttcatctgcacctccacctacagatccagctaagctccctaggcccgctcctaaaacgcaagcatcagattttaatccccaggaaggtcccactgtcctttctcccccatggaagtcaaggagagtaatgcctgatcctgagaggtttgaaggtaattccaaccaaaaggagaagatcgatgagcgtgttggtgaagttcgacaggcagttggtgaaattgcaggaaaggttgaacagtgctgatagatctcatctgaagaggaaacttgatcttgatttccagcacaatgaataagaaaaataaaagtctacaaaattgtatctttgccggtatcgtgtttatgcagcgtggatatttatgaactatatggtggctccttggagttttttgttaaccaaccaagaggatttttcttcactctgaaggaagaagcgacagggtatgagagtcatcactcatcagtcaatgctttagttttaagttgtgttccgtcgttcctgcatgttttcgactttttgcaagtggttagagctttccctttggcctctagatgatacaggttcaaaccgcgtcatcttttttccgtcttaatattcgggac

SEQ ID NO: 24238 - DNA, 818 bp, Gossypium hirsutum
  Clone ID: GOSHI-09MAY01-C133147_1
gcctagattacatgataatctcgactgggaaatggtttctcaaggctgcaatctaccatgagaatgacaccgaagttggctgccatatatgtccaggaaagaacctgaccgaattaggatttgtttatgcttacaacaaaaccctccattatgtcatggacttcattgcaaactcaaagcataaggggttgatctttttcaggacatccacgccggatcattttgagaacggggaatggcataacggagggagttgtccgaagacaaccccggctaaagaaggagaagttgaaataaaggacttgagccgaattctgcgtaacgttgaattagaagagtttgagaaggcagctgcaaaagccgctgacaatggggtgaatcttaagcttcttgacttcacaaacctcttattaatgagaccagacgggcatccgggtccataccggcagtttcagccgtttgcagagaaccaaacagccgtggttcaaaacgactgtctacattggtgtttacctggaccaatggacttttggaatgatgtgattatggagatggtggtcaggggttaaattattaaaaagggagtaagttctgagcaatttttggaggttggtttttctcggaaattttgacaatggcaagcctgaagctatttcatcagattgaaaagtagataaactatacttgtctgtaattcatttcttggattggcaattgtaacttgattctaaaactctatgattggagatttgctattagtgtatagataaataatctgcaaacttgtacctatatgcaatttattgcattttccatac

SEQ ID NO: 24239 - DNA, 623 bp, Gossypium hirsutum
  unsure (1)..(623): unsure at all n locations
  Clone ID: AI055471.1
cccctatagtacatcaatctactacaggtcagatgcacagctgatgtttgcactgtgcaaanctcatacagttgagtgagatcttgtctcttgtaacgtgttcagagaagtcctcatgattcctgtaaacactggagaatgcatatgctcccttttccgctctatcatgttgcttaactnttcttgtgaaatcaaaacaggtaccacctgaaagatgcagtcctagaaggggggagtcaatttaacaaggcacatggagtagaggttagtgagtatatgagcaaagatgcgaggtttggagacatcttcaagacctctatggttgattacaacaagttgttcgtggaagagatgttgaaaagctacaatggttttgatggcttgaattcattggtagacgtaggtggcggcaacggttttattctccacagtattgtttccaaataccctaccatcaaggtgttgttccaatagggtcggaagcgtgtaaattattgtactaaaaaatcacacaaagttcaattcccagggaagagaggtggatcacatcgatctcttaaataccaagtctttccttaaacagaatatcccttctatagtaatttaatagcacaattaaatac

SEQ ID NO: 24240 - DNA, 551 bp, Gossypium hirsutum
  Clone ID: uC-gsronu33B019d09b1
tttacgcgtccggttgccaaatacttcattacaagcccaagtggaggatccttgtcgcctatgttagacttgtatcaggacaaagtcactatggattcctggtaccacctgaaagatgcagtcttagaaggggggagtccatttaacaaggcacatggagtaaagaccagtgagtatatgaaaaaagatccaaggtttggaagcatcttcaaggccgctatgatggattacaacaagcttttcgtggaagagatgttgaaaagttaccgaggttttgatggcttgaattcattggttgatgtaggtggcggcaatggttttattctccacagtattgtttccaagtaccctaccattaagggtattaactttcgatctgccacatgttattgacaagtcaccctcctatcctggaattgagaatgtggctggagatgttttcaagagtgtaccaaaaggagacgccattttcaccagttgggtactccatcattttgaggacaagcaatgcgtggaggtacttaggaactgctacgaagcattaccggcga

SEQ ID NO: 24241 - DNA, 879 bp, Gossypium hirsutum
  Clone ID: GOSHI-09MAY01-C129537_1
agtgccttgtctttctttatattttttcttctttttgttgattcagaaattctctatttgtttgtttcgcattatcttctctcaagaaatcgtttgtcttttccgtgtttggagcatttttttttctcgggacagaaaagatgaagggaagtgcggaaaaccctcttcatctcaaatctttgaaccatatatctcttgtttgtagatcagttgaggaatccattaatttttatcaaaagactcttgggtttgttccaataaggaggcctggatcatttgatttcaatggggcatggttgcttggatatggatttgggattcatcttttgcaatcagaagatccggataacttgccaaagaaatggaaaatcaatcccaaagataaccacatttctttccagtgcgagaacatggggtgtgtggagaataagctgaaggaaatggaaatggattatgagcgagcaatactggaagaaagtggaatatgcgttgaacaactgttcttccacgacccaaatggattcatgattgagatatgccactgtgataacttaccagtggtcccgctggctggtgagatggcgcgatcatgctctcgggtcgatatgcaactgttgcagcatcagattcaacaagtgattcagcagtgaagaaacactttgcggcatcttggactggaccaatgatttcattcatttgattttaagtgcatgttaatatgagaaaataaatttagaattaaaaatttaattgcaccatctgcctcgtttgttcttgtgatcttgtatgagaaatataatcctatgtccaacccggggttggtatgtgtgttcctcaaatatggtgcatgttcttcagaagttcaagccgatgtgattc

SEQ ID NO: 24242 - DNA, 642 bp, Gossypium hirsutum
  Clone ID: GOSHI-09MAY01-C129757_1
attttgtttttgttttcctttgcaaagcaaagtgaaagaatgcttccaaatgacaagactcttttactcattttatttcctttctttgactatcttcagcttgtttttactcttgtcctttcaccctatctctctctctgacatgtaacgaatgttgttcttcaaagtccatatatatgaacatctataaccagttcactttacttgctttaatttggttattaatctatagtttttagggtttttcttttcttggttcatatatctcatatctacttttagtaaagatcaatcaagtcacactcacaaagtacttcagcagagacatggctcatcaggaagaaggttggcccctgggattgcagcccctgaatgtgagagttgggttgcctggaaaaaaccatgattactcaggatcaatatcattcaacactatactcactggttccccaacttcctccacagattcctcttcagatttagacacagagtcaactggttcctttttccatgataagagcattacgcttgggagcctaatcggggtttctacatctgggaactctcgaaagatccataaaacgaaggatagctgtagcaacagagaaaaacgaaacaacagatcaaaagtttggctgtttt

SEQ ID NO: 24243 - DNA, 556 bp, Gossypium hirsutum
  Clone ID: GOSHI-09MAY01-C125767_1
ggatggttcttgctgccaccctttgtcttagacgtgccccacgtgctagaccgcaaatgggcgttgttgtgaagctcctacaaggtgatgctgatgtgaccaagtgggcaagattgcaagtgaatgcatccgaaggatccgatacattggatgatgaagcttgtcctggtcggtccaaccttcaatcccatcttagtctcgcattgcttgatgtggaggaagactcggtctccatgagcagcatcgagcaacctgtgtcgttagaggactacctcaagggtcgatggagccgttcatcaagctttgactaacttcattaccgccagagataagctgcaaaataagcattcttccatttatggatcttttcacccatccttgtatattctttcggttccttgtttgacttttcaatggcattgctcattgcttacggtaggtgttggatgagaggttgtttgcatggtgtgccctcctccttccctttcgattttcttttatgttggtctgacacttgatattttttggtatccgatacttgtgccaactgtcaatc

SEQ ID NO: 24244 - DNA, 484 bp, Gossypium hirsutum
  Clone ID: GOSHI-09MAY01-C120357_1
gtttcctaactttacggcaagcaagggcttcagcagcctaggttgagggcactcgttgatgaatctccaagcatgataggaggaccagccctgcactgcctcatacagcaactccagatgctgactgttgattcctctcatccgaggctccatcgaaattaatttttactgtgtgaacaggtgggcgtttccattttatttcctccggtcaacctttgaacggtctttgtccggcgccatttaactctggtatataggctgtggacaaactgatgctatctcctgaccagattgatttgtctttttaggactgcgagcattcttgtcccccagatggcccatagcgcacagcaatatgttctgcagggactgcaaggctgctgagcgaataccctggacattcgcggcggaggactaataggtgatccattggttctactccttcaccacaacggggacaagcggaactgttttttagtcttct

SEQ ID NO: 24245 - DNA, 509 bp, Gossypium hirsutum
  Clone ID: uC-gsflnu33B138a12b1
tgtgtcaggtgcactgatagcaacaaccacattgcaagcgattctgagcccgccaggagggctgggtcagggtgaggacaatgaagggaaggtggtgatgaaagcttgggtatacatgatattcataatcttgaatggtacttcgttttgtgtgacagtcataaccatatttcttcttctcccacacggcttctttggttggctattgacggtatccttaggtctgctgtctgctggttacctgttcagctcaatggtcatatcgccaaacctggaatgtgctttgtttaatttgggtttattcattctgtttgtagtgttactagttgtgggtattctggttttatcaaagcgtcaacggttcatctccatcaaaaaactctgcaaatgcagcaagtatgacctttcattcgtggacggatctttgagtccaattatttgggtacataaaagatatctcctcactctgtgtgaagtgcattttctttgcaattaaactttttctttta

SEQ ID NO: 24246 - DNA, 211 bp, Gossypium hirsutum
  Clone ID: uC-gsflnu33B138a06b1
ccctctcttccgcggacgcgtgggttttgcttttaaaaaggttcgctaaacccgggggagggctgggtcagggtgaggacaatgaagggaaggtggtgatgaaagcttgtctatacatgatattcataattattgaatggtactttgttttgtgtgataagtcttaaccatatttattattttctgacacgatttttttggttggattttt

SEQ ID NO: 24247 - DNA, 563 bp, Gossypium hirsutum
  Clone ID: GOSHI-09MAY01-C121067_1
tcacgcgtccgcccacgcgtccgcccacgcggacttccacgcgtacgaccactccctcgcttttcccctttcttaccgaaccctaaatccctctgtcaagcatcaatccaccattaagaatggcgccttatgctttgggcctcgattcatcactctttggcctcaagaaccctcccttcaacttcgatttcgacgaagcaagaggggatcaacggcagatacgcgaggtacgggcgatgtgctggcgtatggaggcgcaggcgtacgggggctgctgacgtggaggcatgagcggcgttggggctgtacggtggctgaaggctaccgcgcatctgctgctagggctagggtttggcaaaaatttgcttagcatttgggtcgcttgggcccatttcgagtgctgtgtcagtctttgggccatggggttctagtcattgcgtctaggtattgggctgtcaaaggatattaattactggactgtcttatttatttctttgacttttgcttcataatttgcatttattttgagtttaaaaaaaaaaaaaaaaaaggcggccgtttaa

SEQ ID NO: 24248 - DNA, 409 bp, Gossypium hirsutum
  Clone ID: GOSHI-09MAY01-C121347_1
ttcgtttacgcgtccggccacgcgtccggattacagaaactggtacctaattcaagcaagacagacaaagcttcaatgttagatgaagtgattgaatacttaaaacaattacgagcacaagtccaaatgatgagtaggatgaacattaccatcgatgatgttgcaacaccaacttcaaatgtcgatgatggcaccgatgggaatggggatgagtgttatggacatgaatttcatgggccggccaaacatcattgggatctcacctgttctgtctaggccttttatgacaatgaatacaccttgggatggttctaacaacaatgatcggttacaacaaggtgcttcaatgacagaccctagatctacattgcttgttagtaaatcacaaccgatgactatggatgcttat

SEQ ID NO: 24249 - DNA, 866 bp, Gossypium hirsutum
  Clone ID: GOSHI-09MAY01-C122117_1
tccacgcgtccgcaactggctaagccattcaggcctcatgatacgatcacaccccaaacctgcattaaagacaaaagatcaggtgaaagacaaatattccaaagttacacccaagcctgcagccaaggaaaatactaagcctcaagagttcaagcttcacactggacaaagagccgttaagcgtgctatgttcaattactcagtggcgaccaagttttatctcttggaaatacagaagaaacaagttgagaaagtgcaaaagatgattgaagatgaagagatacgttgtttaagaaaggagatggttccaaaagctcaactcatgcctttcttcgacagaccctttttccctcaaagatcgaaccggcctttaacgatcccgagagaaccgagtttccgcgcagtgaattctaaatgttggagttgcatatcggagaatgagctctattattttcaccatgctcatgcttggaaccccatcaaatgaacacacagttaataaaggttgcacacagtactcaaattagtgtgattgatggactacgtgcgtgcgtgcgtgcatgcatgatccatgtacaatatatcaacatatgtagttgtaggatgttccattctatctcatctcatctcttttgtcatcgccttttgtgttttgtcggcttagacagtgtgagtaaggtagatatataacccctttccactagtcttttagtttcaaaataaagacgtgattggatgtatctttttaatttttttggcataaaaaaactcataattttccctttaaaaaaaaaaaaaaaaaaaaaaaaaaaatttataaaaaaaccaacattaaaaaactaacccttaaaaaaaccacaaaaaga

SEQ ID NO: 24250 - DNA, 414 bp, Gossypium hirsutum
  unsure (1)..(414): unsure at all n locations
  Clone ID: uC-gsflnu33B062a06b1
ccggaattacccacgcgttcttctcgttttgaaaaagttgcaggttacggagggttgattacctgcaccctggtctcaaaacgggaaagatgactccccatgaacagcgcctcgtccttgaacttactgccaagcggggacacacgtactactgaattgctctttcatggcggacagcaactgacaacgagattaagaactattggagaacccatatgagatatacggctcctgaagagagacaggccatccccatctgaccatcttgatgatctagccattgtcattcatcatcatcaactgttactgcagtcgattccttgccctcctctggtactggaaatattgtaagctntttatgacactggnggccttgacatggcaggaaagaaaaacagtccatagtttgaaaat
